(19) United States
(12) Patent Application Publication
(10) Pub. No.: US 2025/0314672 A1
(43) Pub. Date: Oct. 9, 2025

(54) SYSTEMS, DEVICES, AND METHODS FOR RUMINANT ACIDOSIS DETECTION

(71) Applicant: Native Microbials, Inc., San Diego, CA (US)

(72) Inventor: Mallory EMBREE, San Diego, CA (US)

(21) Appl. No.: 18/864,244

(22) PCT Filed: May 10, 2023
(86) PCT No.: PCT/US2023/066851

§ 371 Date: Nov. 8, 2024

Related U.S. Application Data
(60) Provisional application No. 63/340,146, filed on May 10, 2022.

(51) Int. Cl. G01N 33/98; A01K 29/00; A23K 10/18; A23K 50/10; A61D 99/00; C12Q 1/04; G01N 33/84

(52) U.S. Cl. CPC G01N 33/98; A01K 29/005; A23K 10/18; A23K 50/10; A61D 99/00; C12Q 1/04; G01N 33/84

(57) ABSTRACT

Embodiments include example systems, devices, and methods for solvent analysis and biological sample analysis, and for analyzing biological samples for solvents associated with health status related to ruminant acidosis, and for on-farm identification of acidosis in ruminants. In certain aspects, acidosis is detected via measurement of solvents and other volatile chemicals present in the ruminants. Embodiments include methods and systems of diagnosing a state of health of an animal by receiving a sample of a bodily fluid or gas from an oral or nasal cavity of the animal, measuring a quantity of at least one of an identified solvent or an identified gas in the sample, and determining a state of health associated with the animal based on the quantity of the identified solvent.

### CROSS-REFERENCE

[0001] The present application claims the benefit of U.S. Provisional Application No. 63/340,146, filed May 10, 2022, which application is incorporated herein by reference in its entirety.

### STATEMENT REGARDING SEQUENCE LISTING

[0002] The sequence listing associated with this application is provided in text format in lieu of a paper copy, and is hereby incorporated by reference into the specification. The name of the text file containing the sequence listing is ASBI_027_01WO_SeqList_ST26.xml. The text file is approximately 17,722,115 bytes, was created on May 10, 2023, and is being submitted electronically.

### TECHNICAL FIELD

[0003] The present disclosure relates generally to systems, devices, and methods for solvent analysis and biological sample analysis, and specifically relates to analyzing biological samples for solvents associated with health status related to ruminant acidosis. The present disclosure is directed to on-farm identification of acidosis in ruminants. In certain aspects, acidosis is detected via measurement of solvents and other volatile chemicals present in the ruminants.

### BACKGROUND

[0004] Livestock animals in modern farms frequently develop acidosis, a metabolic status that is believed to arise due to overproduction of lactate in the rumen. Traditionally, it is believed that acidosis occurs when ruminants consume excessive amounts of rapidly fermentable carbohydrates and/or low amounts of fiber. The microorganisms residing in the rumen ferment the carbohydrates into lactate and other volatile fatty acids, which in turns lowers the pH of the rumen causing a wide range of pathophysiological consequences in the animal.

[0005] The main signs attributed to ruminal acidosis are decreased feed intakes, decreased milk production, poor body condition, diarrhea, and generally lowered animal performance. More serious symptoms include rumenitis, rumen ulcers, and inflammation of the epithelium which can lead to liver abscesses and other serious diseases. Herds with high prevalence of acidosis often experience higher culling rates, increased death, and decreased milk production.

[0006] Today, the most common diagnosis of acidosis involves measuring the pH of the rumen. This process typically includes: (1) tubing an animal to extract rumen content or (2) ruminocentisis, both of which are highly invasive and difficult to perform routinely. Subacute acidosis is defined as a ruminal pH between 5.2 and 5.6, while acute acidosis is defined as ruminal pH less than 5.5. To elaborate further, the current industry practice involves (1) putting tubing down a cow's throat, which can accidently kill the cow if the tube gets into the lungs, and then utilization of a motor to suck up rumen content. The industry standard cannot be used frequently to the same cow without severe damage to the animal's throat. If not using the aforementioned methodology of placing tubing down the cow's throat, then the industry resorts to (2) ruminocentisis—i.e. use of a syringe and a long needle to stab into the rumen from the cow's side behind the ribs. One can only do this a few times to the same cow—it is highly invasive and animal welfare becomes an issue. In some implementations, the animal swallows a device that can provide real time pH information. Such devices, however, are not a long term solution, as they are damaged easily and provide inaccurate measurements (e.g., with a drift in the baseline readings). Such methods of using a swallowed device can also only be used in one animal at a time, and performing at scale is generally financially infeasible.

[0007] There is currently no reliable, on-farm method to diagnose acidosis in ruminants. Even when pH is measured (i.e., using tubing or ruminocentisis, both of which are very labor intensive), it is often unreliable as acidotic animals will sometime have rumen p>6 depending on the time of day, feeding pattern, etc. Additionally, acidosis can be present even when pH readings are not indicative. That is, animals can suffer from or show symptoms of acidosis without having a suppressed pH (suggesting that pH may not be an effective indicator of an animal having an acidosis). Subacute ruminal acidosis is a major concern in the dairy and beef industries. Losses from production alone were estimated to be $1.12/day/cow in a herd diagnosed with subacute ruminal acidosis.

[0008] Thus, there is a need in the art for alternative methods of detecting acidosis in ruminants, and/or ameliorating or treating acidosis, which does not involve the invasive and harmful procedures currently practiced by the industry.

### SUMMARY OF DISCLOSURE

[0009] Systems, devices, and methods described herein relate to analysis of biological fluids from oral cavity or nasal cavity of an animal. In some embodiments, systems, devices, and methods described herein relate to detection of one or more solvents in a sample of biological fluids obtained from oral cavity or nasal cavity of an animal.

[0010] Embodiments disclosed include a method of diagnosing a state of health of an animal, The method comprises receiving a sample of a bodily fluid or gas from an oral or nasal cavity of the animal. The method further comprises measuring a quantity of at least one of an identified solvent or an identified gas in the sample. The method further comprises determining a state of health associated with the animal based on the quantity of the identified solvent.

[0011] The present disclosure relates to methods of detecting acidosis in ruminants. The present methods are non-invasive. Further, the presently taught methods and kits are fast, reliable, and are sensitive to the animal's welfare. The present disclosure includes methods of treating or ameliorating a state of acidosis in a ruminant using additives, including one or more synthetic microbial ensembles, adsorptive ingredients, microbial growth inhibitors, carriers, and/or the like. In some implementations. the one or more additives can be directed to increase or improve a yield or property of a bio product (e.g., milk) from the animal.

[0012] The present disclosure provides an orally deliverable composition for increasing milk production or improving milk compositional characteristics in a ruminant, comprising: (a) one or more bacteria comprising a 16S nucleic acid sequence with at least about 97% sequence identity to any one of SEQ ID NOs: 2125-4945; and (b) a carrier suitable for ruminant administration. In some embodiments, the one or more bacteria comprises a 16S nucleic acid sequence selected from the group consisting of SEQ ID NOs: 2125-4945.

[0013] In some embodiments, the composition comprises: (a) one or more bacteria comprising a 16S nucleic acid sequence with at least about 97% sequence identity to any one of SEQ ID NOs: 1-30, 2045-2103, 2108, 4104, 4116, 4364, 4620, 4814, 4828, 4921, 4943, 4944, and 4945; and/or (b) one or more fungi comprising an ITS nucleic acid sequence with at least about 97% sequence identity to any one of SEQ ID NOs: 31-60 and 2104-2107.

[0014] In some embodiments, the composition comprises: (a) one or more bacteria comprising a 16S nucleic acid sequence selected from the group consisting of SEQ ID NOs: 1-30, 2045-2103, 2108, 4104, 4116, 4364, 4620, 4814, 4828, 4921, 4943, 4944, and 4945; and/or (b) one or more fungi comprising an ITS nucleic acid sequence selected from the group consisting of SEQ ID NOs: 31-60 and 2104-2107.

[0015] In some embodiments, the ruminant is a cow. In some embodiments, the ruminant is a calf.

[0016] In some embodiments, the ruminant administered the composition exhibits an increase in milk production that leads to an increase in milk yield or an increase in energy-corrected milk.

[0017] In some embodiments, the ruminant administered the composition exhibits an improved milk compositional characteristic selected from the group consisting of: an increase in milk fat(s), an increase in milk protein(s), an increase of carbohydrates in milk, an increase of vitamins in milk, an increase of minerals in milk, or combinations thereof.

[0018] In some embodiments, the ruminant administered the composition exhibits at least one improved phenotypic trait, selected from the group consisting of: an improved efficiency in feed utilization, improved digestibility, an increase in polysaccharide and lignin degradation, an increase in fatty acid concentration in the rumen, pH balance in the rumen, a reduction in methane emissions, a reduction in manure production, improved dry matter intake, an improved efficiency of nitrogen utilization, or combinations thereof.

[0019] In some embodiments, the composition is formulated to protect the one or more bacteria from external stressors prior to entering the gastrointestinal tract of the ruminant. In some embodiments, the composition is formulated to protect the one or more bacteria from oxidative stress. In some embodiments, the composition is formulated to protect the one or more bacteria from moisture.

[0020] In some embodiments, the composition is dry. In some embodiments, the composition is combined with food. In some embodiments, the composition is combined with cereal, starch, oilseed cake, or vegetable waste. In some embodiments, the composition is combined with hay, haylage, silage, livestock feed, forage, fodder, beans, grains, micro-ingredients, fermentation compositions, mixed ration, total mixed ration, or a mixture thereof. In some embodiments, the composition is formulated as a solid, liquid, or mixture thereof. In some embodiments, the composition is formulated as a pellet, capsule, granulate, or powder. In some embodiments, the composition is combined with water, medicine, vaccine, vitamin, mineral, amino acid, enzyme, or a mixture thereof.

[0021] In some embodiments, the composition is encapsulated. In some embodiments, the composition is encapsulated in a polymer or carbohydrate.

[0022] In some embodiments, the one or more bacteria are present in the composition in an amount of at least 102 cells.

[0023] In some embodiments, the present disclosure provides a method for increasing milk production or improving milk compositional characteristics in a ruminant, the method comprising orally administering to a ruminant an effective amount of any one of the compositions described herein.

[0024] In some embodiments, the ruminant administered the effective amount of the composition exhibits an increase in milk production that leads to a measured increase in milk yield.

[0025] In some embodiments, the ruminant administered the effective amount of the composition exhibits an increase in milk production and improved milk compositional characteristics that leads to a measured increase in energy-corrected milk.

[0026] In some embodiments, the ruminant administered the effective amount of the composition exhibits an improved milk compositional characteristic selected from the group consisting of: an increase in milk fat(s), an increase in milk protein(s), an increase of carbohydrates in milk, an increase of vitamins in milk, an increase of minerals in milk, or combinations thereof.

[0027] In some embodiments, the ruminant administered the effective amount of the composition exhibits at least a 1% increase in the average production of: milk fat(s), milk protein(s), energy-corrected milk, or combinations thereof.

[0028] In some embodiments, the ruminant administered the effective amount of the composition exhibits at least a 10% increase in the average production of: milk fat(s), milk protein(s), energy-corrected milk, or combinations thereof.

[0029] In some embodiments, the ruminant administered the effective amount of the composition exhibits at least a 20% increase in the average production of: milk fat(s), milk protein(s), energy-corrected milk, or combinations thereof.

[0030] In some embodiments, the ruminant administered the effective amount of the composition, further exhibits at least one improved phenotypic trait, selected from the group consisting of: an improved efficiency in feed utilization, improved digestibility, an increase in polysaccharide and lignin degradation, an increase in fatty acid concentration in the rumen, pH balance in the rumen, a reduction in methane emissions, a reduction in manure production, improved dry matter intake, an improved efficiency of nitrogen utilization, or combinations thereof.

[0031] In some embodiments, the ruminant administered the effective amount of the composition, further exhibits a shift in the microbiome of the rumen.

[0032] In some embodiments, the ruminant administered the effective amount of the composition, further exhibits a shift in the microbiome of the rumen, wherein a population of microbes present in the rumen before administration of the composition increase in abundance after administration of the composition.

[0033] In some embodiments, the ruminant administered the effective amount of the composition, further exhibits: a shift in the microbiome of the rumen, wherein a population of microbes present in the rumen before administration of the composition decrease in abundance after administration of the composition.

[0034] In some embodiments, the ruminant administered the effective amount of the composition, further exhibits: a shift in the microbiome of the rumen, wherein a first population of microbes present in the rumen before administration of the composition increase in abundance after administration of the composition, and wherein a second population of microbes present in the rumen before administration of the composition decrease in abundance after administration of the composition.

[0035] In some embodiments, the present disclosure provides a composition that performs the same or better than recombinant bovine growth hormone for increasing milk production or improving milk compositional characteristics in a ruminant, wherein the composition comprises: (a) one or more bacteria comprising a 16S nucleic acid sequence with at least about 97% sequence identity to any one of SEQ ID NOs: 2125-4945; and (b) a carrier suitable for ruminant administration.

[0036] In some embodiments, the one or more bacteria comprises a 16S nucleic acid sequence selected from the group consisting of SEQ ID NOs: 2125-4945.

[0037] In some embodiments, the composition comprises: (a) one or more bacteria comprising a 16S nucleic acid sequence with at least about 97% sequence identity to any one of SEQ ID NOs: 1-30, 2045-2103, 2108, 4104, 4116, 4364, 4620, 4814, 4828, 4921, 4943, 4944, and 4945; and/or (b) one or more fungi comprising an ITS nucleic acid sequence with at least about 97% sequence identity to any one of SEQ ID NOs: 31-60 and 2104-2107.

[0038] In some embodiments, the composition comprises: (a) one or more bacteria comprising a 16S nucleic acid sequence selected from the group consisting of SEQ ID NOs: 1-30, 2045-2103, 2108, 4104, 4116, 4364, 4620, 4814, 4828, 4921, 4943, 4944, and 4945; and/or (b) one or more fungi comprising an ITS nucleic acid sequence selected from the group consisting of SEQ ID NOs: 31-60 and 2104-2107.

[0039] Rapid detection of this disease state will enable dairy owners and nutritionists to take the appropriate steps to resolve and quickly enact operational changes to improve the health and productivity of their herd (i.e. through diet changes).

[0040] Furthermore, recent analyses suggest that acidosis arises due to an increase in the microbial biomass (cells/mL) of gastrointestinal content. An increased number of cells leads to increased concentrations of not only acids, but carbon dioxide, hydrogen, solvents, and other microbial by products. Accumulation of carbon dioxide, in particular, can reduce the buffering ability of bicarbonate in the rumen allowing pH to decline more rapidly and severely. Described herein is a new underlying causal mechanism associated with acidosis that is unexpected and counter to current understanding in industry and academia. Based on the new causal mechanism, embodiments described herein include devices, systems, and methods to detect and/or measure a state of acidosis in ruminants using non-invasive sampling. Also described herein are system and methods to treat, and utilize the information gained from understanding this process.

### BRIEF DESCRIPTION OF THE DRAWINGS

[0041] FIG. 1 is a schematic representing changes associated with a progression of acidosis in the rumen of an animal.

[0042] FIG. 2 is a schematic illustrating an acidosis detection system (ADS), according to some embodiments.

[0043] FIG. 3 is a schematic illustrating a sample examining device included in an ADS, according to some embodiments.

[0044] FIG. 4 is a schematic illustrating a compute device included in an ADS, according to some embodiments.

[0045] FIG. 5 is a schematic illustrating a progression of acidosis in ruminants.

[0046] FIG. 6 is a flow diagram illustrating an example method of acidosis detection using an ADS, according to some embodiments.

[0047] FIG. 7 is a flow diagram illustrating an example method of acidosis detection using an ADS, according to some embodiments.

[0048] FIG. 8 is an illustration of an example timeline to study effects associated with acidosis and diet in animals using an ADS, according to some embodiments.

[0049] FIGS. 9A and 9B show plots of dissolved CO2 as a function of rumen pH measured in the rumen and dissolved carbon dioxide associated with a state and progression of acidosis in an animal.

[0050] FIG. 10 is a schematic illustration of progression of acidosis in rumen of ruminants.

[0051] FIG. 11A shows a table indicating constitutes in a diet of cow used in Experiment I. FIG. 11B. is a plot of baseline measurements of concentration of ethanol in saliva of healthy cows under feed associated with diet shown in FIG. 11A.

[0052] FIGS. 12A is a schematic representation of an example schedule according to an example protocol to study effects of acidosis induction and recovery in an example cohort of animals, using an ADS, according to some embodiments.

[0053] FIG. 12B a representation of an example composition of a feed provided to study acidosis induction and recovery in an example cohort of animals, using an ADS, according to some embodiments.

[0054] FIGS. 13A, 13B, and 13C are plots of changes in pH in a cohort of animals that were subjected to acidosis challenge, measured using an ADS, according to some embodiments.

[0055] FIGS. 14A, 14B, and 14C are plots of changes in rumen biomass in a cohort of animals that were subjected to acidosis challenge, measured using an ADS, according to some embodiments.

[0056] FIGS. 15A, 15B, and 15C are plots of intake and concentration of ethanol in a cohort of animals that were subjected to acidosis challenge, measured using an ADS, according to some embodiments.

[0057] FIGS. 16A, 16B, and 16C are plots of concentration of ethanol in a cohort of animals that were subjected to acidosis challenge, measured using an ADS, according to some embodiments.

[0058] FIGS. 17A, 17B, and 17C are plots of milk yield, fat content, and protein content in milk, respectively, measured in a cohort of animals that were subjected to acidosis challenge, using an ADS, according to some embodiments.

[0059] FIG. 18 is a plot of rumen pH as a function of concentration of solvent measured in an experimental cohort of dairy cows, using an ADS, according to an embodiment.

[0060] FIG. 19A and 19B are plots of traces indicating a concentration for ethanol obtained from a generated control sample and a sample containing a carrier configured to absorb ethanol, respectively.

[0061] FIG. 20 is a plot showing the relative absorption of various carriers tested to identify suitable carriers that can be added as feed supplement for recovery from acidosis, recommended using an ADS, according to an embodiment.

### DETAILED DESCRIPTION

[0062] While the following terms are believed to be well understood by one of ordinary skill in the art, the following definitions are set forth to facilitate explanation of the presently disclosed subject matter.

[0063] The term “a” or “an” may refer to one or more of that entity, i.e. can refer to plural referents. As such, the terms “a” or “an”, “one or more” and “at least one” are used interchangeably herein. In addition, reference to “an element” by the indefinite article “a” or “an” does not exclude the possibility that more than one of the elements is present, unless the context clearly requires that there is one and only one of the elements.

[0064] Reference throughout this specification to “one embodiment”, “an embodiment”, “one aspect”, or “an aspect” means that a particular feature, structure or characteristic described in connection with the embodiment is included in at least one embodiment of the present disclosure. Thus, the appearances of the phrases “in one embodiment” or “in an embodiment” in various places throughout this specification are not necessarily all referring to the same embodiment. Furthermore, the particular features, structures, or characteristics can be combined in any suitable manner in one or more embodiments.

[0065] As used herein the terms “microorganism” or “microbe” should be taken broadly. These terms are used interchangeably and include, but are not limited to, the two prokaryotic domains, Bacteria and Archaea, eukaryotic fungi and protists, as well as viruses. As used herein the terms “microorganism” or “microbe” should be taken broadly. These terms are used interchangeably and include, but are not limited to, the two prokaryotic domains, Bacteria and Archaea, eukaryotic fungi and protists, as well as viruses. In some embodiments, the disclosure refers to the “microbes” of Tables 1, 2, 3, 4, 5, and/or 6, or the “microbes” incorporated by reference. This characterization can refer to not only the predicted taxonomic microbial identifiers of the table, but also the identified strains of the microbes listed in the table.

[0066] As used herein, “microbial composition” refers to a composition comprising one or more microbes of the present disclosure, wherein a microbial composition, in some embodiments, is administered to animals of the present disclosure.

[0067] As used herein, “carrier”, “acceptable carrier”, or “pharmaceutical carrier” refers to a diluent, adjuvant, excipient, or vehicle with which the compound is administered. Such carriers can be sterile liquids, such as water and oils, including those of petroleum, animal, vegetable, or synthetic origin; such as peanut oil, soybean oil, mineral oil, sesame oil, and the like. Water or aqueous solution saline solutions and aqueous dextrose and glycerol solutions are preferably employed as carriers, in some embodiments as injectable solutions. Alternatively, the carrier can be a solid dosage form carrier, including but not limited to one or more of a binder (for compressed pills), a glidant, an encapsulating agent, a flavorant, and a colorant. The choice of carrier can be selected with regard to the intended route of administration and standard pharmaceutical practice. See Hardee and Baggo (1998. Development and Formulation of Veterinary Dosage Forms. 2nd Ed. CRC Press. 504 pg.); E. W. Martin (1970. Remington's Pharmaceutical Sciences. 17th Ed. Mack Pub. Co.); and Blaser et al. (US Publication US20110280840A1).

[0068] In certain aspects of the disclosure, the isolated microbes exist as isolated and biologically pure cultures. It will be appreciated by one of skill in the art, that an isolated and biologically pure culture of a particular microbe, denotes that said culture is substantially free (within scientific reason) of other living organisms and contains only the individual microbe in question. The culture can contain varying concentrations of said microbe. The present disclosure notes that isolated and biologically pure microbes often “necessarily differ from less pure or impure materials.” See, e.g. In re Bergstrom, 427 F.2d 1394, (CCPA 1970)(discussing purified prostaglandins), see also, In re Bergy, 596 F.2d 952 (CCPA 1979) (discussing purified microbes), see also, Parke-Davis & Co. v. H.K. Mulford & Co., 189 F. 95 (S.D.N.Y. 1911) (Learned Hand discussing purified adrenaline), aff'd in part, rev'd in part, 196 F. 496 (2d Cir. 1912), each of which are incorporated herein by reference. Furthermore, in some aspects, the disclosure provides for certain quantitative measures of the concentration, or purity limitations, that must be found within an isolated and biologically pure microbial culture. The presence of these purity values, in certain embodiments, is a further attribute that distinguishes the presently disclosed microbes from those microbes existing in a natural state. See, e.g., Merck & Co. v. Olin Mathieson Chemical Corp., 253 F.2d 156 (4th Cir. 1958) (discussing purity limitations for vitamin B12 produced by microbes), incorporated herein by reference.

[0069] As used herein, “individual isolates” should be taken to mean a composition, or culture, comprising a predominance of a single genera, species, or strain, of microorganism, following separation from one or more other microorganisms. The phrase should not be taken to indicate the extent to which the microorganism has been isolated or purified. However, “individual isolates” can comprise substantially only one genus, species, or strain, of microorganism.

[0070] As used herein, “microbiome” refers to the collection of microorganisms that inhabit the digestive tract or gastrointestinal tract of an animal (including the rumen if said animal is a ruminant) and the microorgansims' physical environment (i.e. the microbiome has a biotic and physical component). The microbiome is fluid and may be modulated by numerous naturally occurring and artificial conditions (e.g., change in diet, disease, antimicrobial agents, influx of additional microorganisms, etc.). The modulation of the microbiome of a rumen that can be achieved via administration of the compositions of the disclosure, can take the form of: (a) increasing or decreasing a particular Family, Genus, Species, or functional grouping of microbe (i.e. alteration of the biotic component of the rumen microbiome) and/or (b) increasing or decreasing volatile fatty acids in the rumen, increasing or decreasing rumen pH, increasing or decreasing any other physical parameter important for rumen health (i.e. alteration of the abiotic component of the rumen mircrobiome).

[0071] As used herein, “probiotic” refers to a substantially pure microbe (i.e., a single isolate) or a mixture of desired microbes, and may also include any additional components that can be administered to a mammal for restoring microbiota. Probiotics or microbial inoculant compositions of the invention may be administered with an agent to allow the microbes to survive the environment of the gastrointestinal tract, i.e., to resist low pH and to grow in the gastrointestinal environment. In some embodiments, the present compositions (e.g., microbial compositions) are probiotics in some aspects.

[0072] As used herein, “prebiotic” refers to an agent that increases the number and/or activity of one or more desired microbes. Non-limiting examples of prebiotics that may be useful in the methods of the present disclosure include fructooligosaccharides (e.g., oligofructose, inulin, inulin-type fructans), galactooligosaccharides, amino acids, alcohols, and mixtures thereof. See Ramirez-Farias et al. (2008. Br. J. Nutr. 4:1-10) and Pool-Zobel and Sauer (2007. J. Nutr. 137:2580-2584 and supplemental).

[0073] As used herein, “improved” should be taken broadly to encompass improvement of a characteristic of interest, as compared to a control group, or as compared to a known average quantity associated with the characteristic in question. For example, “improved” milk production associated with application of a beneficial microbe, or consortia, of the disclosure can be demonstrated by comparing the milk produced by an ungulate treated by the microbes taught herein to the milk of an ungulate not treated. In the present disclosure, “improved” does not necessarily demand that the data be statistically significant (i.e. p<0.05); rather, any quantifiable difference demonstrating that one value (e.g. the average treatment value) is different from another (e.g. the average control value) can rise to the level of “improved.”

[0074] As used herein, “inhibiting and suppressing” and like terms should not be construed to require complete inhibition or suppression, although this may be desired in some embodiments.

### 1. System and Devices

[0075] Systems, devices, and methods described herein relate to processing of samples of biological bodily fluids or gases from an oral or nasal cavity of an animal to determine a state of health associated with the animal. Embodiments disclosed relate to methods of detecting acidosis in ruminants by measuring solvents (or gas) associated with acidosis in the saliva or secretions in nasal/oral cavity of rumen. The present methods are non-invasive. Further, the presently taught methods and kits are fast, reliable, and are sensitive to the animal's welfare.

[0076] While certain examples presented herein may generally relate to processing the sample of bodily fluid or gas to measure a quantity of an identified solvent, ethanol associated with acidosis, it can be appreciated by one of ordinary skill in the art that such systems, devices, and methods can be used to process samples of bodily fluid or gas for any suitable component that is associate with any suitable pathological state, including, for example, components that are by products of processing food in the rumen of ruminants and/or associated with pathologies like laminitis, ketosis, ruminitis, etc.

[0077] FIG. 1 shows an illustration of a theory of progression of rumen acidosis in a ruminant. The theory of acidosis, as represented in FIG. 1 (adapted from Nocek J. E. 1997) shows how farming practices can be linked to rumen acidosis in animals. High levels of fermentable carbohydrates used in intensive farming practices can challenge rumen stability and increase the risk of ruminants developing metabolic disorders like sub-acute acidosis. Conventional wisdom has attributed lactate accumulation to rumen acidosis. It is considered to progress as shown in FIG. 1, where each successive stage or state of acidosis is associated with ac increased degree of acidosis. Each state of acidosis progresses to the next when the fermentation profile of the rumen is unbalanced by high levels of lactic acid or butyric acid.

[0078] The industry and academic field of study associated with rumen health understands that rapid fermentation and acid production leads to decrease in rumen pH and microbiome dysbiosis. As shown in FIG. 1, consumption of rapidly fermentable carbohydrates leads to increased volatile fatty acids (VFAs) and increased bacterial growth rates in the rumen leading to decrease in rumen pH. Many lactic acid producing bacteria are more acid tolerant than other rumen bacteria (Russell, 1992). Therefore, lactic acid producers continue to grow at a low pH resulting in increased lactate production. When a state of subacute ruminal acidosis sets in (when pH decreases below 5.8) bacterial growth rates were thought to drop and enzymatic activities of fibrolytic microbes were thought to decrease whereas lactate production continues to increase further resulting in a state of acute ruminal acidosis which can lead to fatal consequences if left unchecked.

[0079] This theory presents gaps that remain for a better understanding of the mechanism underlying ruminal acidosis. For example, the state of ruminal acidosis is not particularly related to pH changes from acid accumulation alone since studies show that acidosis cannot be induced through acid infusion into the rumen (i.e. drive pH decline). Neither can acidosis be induced through lactate infusion into the rumen (i.e. increase lactate concentration). Studies indicate that acidosis can only be reliably induced through diet, via an increase in concentrate and a decrease in fiber, and/or increase in polyunsaturated fatty acids (PUFAs). This leads to the modified understanding that consumption of the increased concentrate/decreased fiber leads to increased biomass and release of carbon dioxide in a first state of acidosis, which then leads to the second state of acidosis. This second state of acidosis is first marked by increased production of fermentation acids and a decline in pH, which is followed by a shift in microbial metabolism towards fermentation solvents produced by the increased biomass. The second state then leads to pathophysiologies likes rumen epithelium damage and ruminitis, metabolic acidosis, respiratory acidosis, liver abscesses, ketosis, laminitis, increased bloat, and abomasal dysplasia among others. The embodiments disclosed include systems, devices, and methods to focus enquiry on the microbial biomass increase and increase in carbon dioxide at the first state of acidosis, and on the increased fermentation solvents on the second state of acidosis.

[0080] FIG. 2 is a high-level block diagram that illustrates an acidosis detection system (also referred to herein as ADS or “the system”) 100 for processing samples of bodily fluid or gas from an oral or nasal cavity of a ruminant, according to some embodiments. The system can be configured to receive the sample, process the sample for the presence of one or more identified solvents or components, and to provide an output indicating the presence and/or a measured amount of the identified solvent or component. The system 100 can include a compute device 110, a sample examining device 120, and optionally a data source 160. In some embodiments, the compute device 110 can communicate with the sampling device 120 and optionally with the data source 160, to perform sample processing and sample analysis, acidosis detection, and optionally any suitable health prediction or feed planning to provide computer generated guidance to an animal health specialist or livestock manager during maintenance and treatment of livestock like ruminants (e.g., dairy cows for yielding milk).

[0081] In some embodiments, the sample examining device 120 (“SED” or “SE device”) may be configured to receive and/or extract a sample of bodily fluid or gas from an animal, process the sample and perform acidosis detection. The device can be configured to indicate a presence of an identified solvent. In some embodiments, the device can be configured to measure a quantity of the identified solvent present in the sample. The SE device 120 can be configured indicate the presence and/or the measured quantity of the identified solvent or component. In some embodiments, the SE device 120 can be configured to transmit an output, for example, to a compute device 110.

[0082] In some embodiments, the compute device 110 may be configured to perform acidosis detection to detect and identify one or more solvents or components in a bodily fluid from an animal. The compute device 110 can be configured to process the solvent to identify characteristics associated with the solvent indicating a state of acidosis. For example, the compute device 110 can identify a concentration of the identified solvent in the sample analyzed, a type of solvent detected in the sample analyzed, and/or the like. In some embodiments, the compute device 110 can be configured to perform a health prediction based on the detection of solvent and/or a state of acidosis. For example, the compute device 110 can be configured to generate output indicating an expected progression of the state of acidosis if left unchecked, a prediction of interventions, medical and/or feed supplements, and/or treatments that can be used to ameliorate or treat the animal to a state of recovery from the state of acidosis, and/or the like. In some embodiments, the compute device 110 can be configured to generate a feed plan or a feed management plan to help set the animal on a path to recovery from the state of acidosis.

[0083] The compute device 110 may be implemented as a single compute device, or be implemented across multiple compute devices that are connected to each other and/or the network 150. For example, the compute device 110 may include one or more compute devices such as mobile phones, servers, desktop computers, laptop computers, portable devices, databases, etc. Different compute device may include component(s) that are remotely situated from other compute devices, located on premises near other compute devices, and/or integrated together with other compute devices.

[0084] In some embodiments, the compute device 110 can be located on a server that is remotely situated from one or more imaging device(s) 160 and/or image data storage 180. In some embodiments, the compute device 110 can be integrated into one or both of the sample examining device 120 and/or the data source 160. In some embodiments, the compute device 110 can be integrated into a sample examining device 120 (for example, a sample examining device that is configured to be a solvent analyzer integrated with the compute device 110). In some embodiments, system 100 includes a single device that includes the functionality of the compute device 110, the sample examining device 120, and the data source 160, as further described herein.

[0085] In some embodiments, the compute device 110 can be located within an animal health facility, a farm or other livestock management facility, or an animal husbandry facility. The compute device 110 can be operatively coupled to one or more data sources 160 associated with the animal health facility, e.g., a veterinary hospital database or a livestock management database for storing animal health information, animal feed information, etc. In some embodiments, the compute device 110 can be available to farmers, farm hands (e.g., feeding personnel, animal health monitoring personnel), veterinary physicians, and livestock management personnel for performing evaluation of animals and/or for monitoring animals for a health status (for example, pathophysiologies like acidosis, ruminitis, etc. as described herein), visualization of animal health data, diagnoses, and/or planning of livestock management, yield expectation, and/or the like. In some embodiments, the compute device 110 can be operatively coupled to one or more other compute devices within a hospital (e.g., a veterinarian workstation), and can send outputs and/or other data to such compute devices (e.g., via network 150) for visualization of animal health data, diagnoses, performing evaluation of animal health over time, recommend feed supplements and/or medical supplements, and/or planning of yield harvesting and ongoing livestock maintenance.

[0086] Network 150 may be any type of network (e.g., a local area network (LAN), a wide area network (WAN), a virtual network, a telecommunications network) implemented as a wired network and/or wireless network and used to operatively couple compute devices, including system 100. As shown in FIG. 1, a connection may be defined between compute device 110, the sample examining device 120, optional data source 160, and/or other compute devices (e.g., databases, servers, etc. that are shown in FIG. 1). In some embodiments, the compute device 110 may communicate with SE device 120 and/or data source 160 (e.g., send data to and/or receive data from such devices) and with the network 150 via intermediate networks and/or alternate networks (not shown in FIG. 1). Such intermediate networks and/or alternate networks may be of a same type and/or a different type of network as network 150. Each of the compute device 110, SE device 120, and data source 160 may be any type of device configured to send data over the network 150 to send and/or receive data from one or more of the other devices.

[0087] In some embodiments, a data source 160 may refer to any device configured to obtain and/or store data associated with an identified animal including for example animal health (e.g., a history of health status in an animal in a managed cohort, a history of intake, biomass extracted from the animal, results from any medical, physical, and/or other examinations of the animal), a history of feed supplements, medical supplements, and/or medical interventions provided to an identified animal in a cohort), a data associated with a yield or production of a bioproduct (e.g., milk, meat, etc.) associated with an identified animal, properties of a bioproduct obtained from an identified animal (e.g., a fat content associated with milk obtained from an animal, a protein content associated with milk obtained from an animal, amount of milk fat content in the milk, amount of milk protein content in the milk, microbial abundance in an animal sample, etc.). A data source 160 be configured to obtain and/or store data associated with examination of a sample from an identified animal including for example animal health status of that animal at various points of examination, properties of solvents or components associated with the animal health status, data associated with synthetic microbial ensembles including one or more identified microorganism strains that may be used to address diagnoses in an animal, one or more identified carriers that can be configured to absorb one or more solvents associated with a health status of an animal, one or more microbial growth inhibitors configured to inhibit grown of identified microbes and/or inhibit solventogenesis in an animal, and/or the like.

[0088] In some embodiments, the data source 160 may associated with a laboratory or analysis provider that is used to perform biochemical analysis, imaging analysis, surgical analysis, tubing studies, and/or the like of samples from identified animals.

[0089] FIG. 3 schematically illustrates an SE device 320 that can be a part off an acidosis detection system like the system 100 shown in FIG. 2. The SE device 320 can be substantially similar in structure and/or function to the SE device 120 described with reference to the system 100 in FIG. 2. The SE device 320 includes a sampling structure 330, a sample processor 340, optionally a memory 352 and optionally an input/output interface 362. The sample examining device 320 is configured to obtain a sample of a bodily fluid from a nasal cavity or an oral cavity of an animal and process the sample. In some embodiments, the SE device 320 can be configured to capture a bodily sample are to extract a bodily sample from an animal from its oral or nasal cavity. In some embodiments, the SE device 320 can be configured to process the sample and to indicate a result associated with the sample. For example, the SE device 320 can be configured to process the obtained sample of bodily fluid to detect a presence of a solvent associated with a pathophysiology for example, acidosis. In some embodiments the SE device 320 can be configured to indicate the presence or absence off an identified solvent, for example ethanol, or an identified gas, for example carbon dioxide, in the obtained sample via an indicator area. In some embodiments, the SE device 320 can be configured to process the sample to measure a property associated with an identified solvent, for example, an amount, a quantity, a concentration, and/or the like.

[0090] In some embodiments the SE device 320 can be an apparatus like a test strip configured to capture a sample in a sampling structure and process the sample in a sample processing are through a sample testing process to provide an indication off a presence/absence and/or a property associated with an identified solvent. The apparatus or test strip can be configured to test for a target analyte which can be an identified solvent associated with a pathophysiology like acidosis.

[0091] The sampling structure 330 can be any suitable structure configured to receive a sample of bodily fluid or gas to be analyzed for the presence of, absence of, and/or one or more properties associated with an identified solvent (e.g., ethanol). The bodily fluid can be any suitable fluid obtained from a nasal cavity or an oral cavity of a ruminant. For example, the bodily fluid can be saliva, nasal secretions, buccal or oral secretions, and/or the like. The gas can be exhaled air from a respiratory system of an animal obtained from a nasal cavity of the animal.

[0092] The sampling structure 330 can be configured to receive any suitable amount of bodily fluid or gas. (e.g., 1 μl, 2 μl, 5 μl, 10 μl, 15 μl, 20 μl, 25 μl, 50 μl, 100 μl, 250 μl, 500 μl, 1 ml, 5 ml, 10 ml, 25 ml, 50 ml, 100 ml, 500 ml, and/or any intermediate amount therein). In some embodiments, the sampling structure 330 can be specially adapted to capture the sample (e.g., a bodily air) without allowing it to dissipate. In some embodiments, the sampling structure 330 can be a structure, material, chamber, cavity, receptacle, or any other suitable component adapted to receive a bodily sample of a defined volume or quantity. The sampling structure 330 can be configured to convey the sample or a portion of the sample to the sample processor 340. For example, the sampling structure can include a region or material or structure adapted to receive a sample of bodily fluid and to convey the sample or a portion of the sample to a sample processing area in a sample processor 340.

[0093] The sample processor 340 includes a sample processing area 342 configured to process the sample or portion of sample conveyed from the sampling structure via any suitable sample testing process to detect the presences of an identified solvent and/or to measure a property associated with the identified solvent. In some embodiments, the sample processing area 342 can include one or more adaptations (e.g., materials, structures, etc.) configured to conduct a sample testing process to probe the sample or portion of sample conveyed from the sampling structure for the presence, absence, and/or one or more properties of an identified solvent.

[0094] The identified solvent can be any suitable solvent associated with a state of acidosis in a ruminant. For example, the solvent can include an alcohol including ethanol, propanol, isopropanol, butanol, acetone, acetaldehyde, succinate, and/or the like. While the present disclosure describes solvents associated with acidosis, it can be appreciated that the disclosed systems, devices, and methods can be used to detect and/or measure properties associated with any suitable solvent associated with any suitable pathophysiology associated with a rumen of a ruminant, including pathophysiology likes rumen epithelium damage and ruminitis, metabolic acidosis, respiratory acidosis, liver abscesses, ketosis, laminitis, increased bloat, and abomasal dysplasia among others. In some embodiments, the sample processing area 342 can be adapted to conduct a suitable sample testing process to detect a presence of an identified solvent and/or to determine a property associated with an identified solvent (e.g., a quantity, a volume, a concentration, and/or the like).

[0095] The sample testing process can be any suitable testing process including an enzymatic assay, a chromatographic test, an immunoassay, a colorimetric assay, and/or the like. The sample processing area 342 can be specially adapted to conduct the sample testing process. For example, the sample processing are 342 can includes one or more test reagents used for conducting the sample testing process. The test reagent can be localized in the sample processing are 342 such that when the sample or portion of sample to be tested is conveyed to the sample processing area the test reagent reacts with the portion of the sample. The test reagent can be configured to undergo a change or a transformation if it comes in contact with the identified solvent for a predetermined period of reaction time, such that the change or transformation from a first state to a second state can be detected to infer a presence. In some embodiments, the test reagent can be configured to undergo one or more transformations the resulting state indicating not only a presence of a solvent but also a property associated with the solvent (e.g., a concentration).

[0096] In some embodiments, optionally the sample processor 340 can be configured to define an indicator area 346 designated to provide a region where the change or transformation of the reagent(s) can be easily represented for a user to read a result of processing the sample. The change or transformation can be exhibited or can be represented in any suitable form. For example, the change or transformation can be represented in a change in color that is visibly detectable, or detectable under light of a suitable wavelength, etc. In some embodiments, the sample processing area 342 and the indicator are 346 can be configured to conduct a testing process and to provide results from the testing in the indicator area 346 for easy access to the results of sample processing.

[0097] In some embodiments, the sample processing area 342 and the indicator area 346 can be configured to include a reagent that is configured to undergo a first change when a certain first threshold criterion is met and a certain second change when a certain second threshold criterion is met. For example, the reagent can undergo a first change or transformation (e.g., emitting or causing an emission of a first color) when a first criterion of a mere presence of a solvent is met. The reagent can undergo a second change or transformation (e.g., emitting or causing an emission of a second color different than the first color) when a second criterion of a presence of a first threshold concentration of the solvent is met. The reagent can undergo a third change or transformation (e.g., emitting or causing an emission of a third color different than the first and second colors) when a third criterion of a presence of a second threshold concentration of the solvent is met, and so on.

[0098] In some embodiments, the sample processing area and the indicator are 346 can be configured to include multiple reagents each reagent configured to undergo a change when a certain threshold criterion is met, for example, a first reagent having a first criterion of a mere presence of a solvent, a second reagent having a second criterion of a presence of a first threshold concentration of the solvent, a third reagent having a third criterion of a presence of a second threshold concentration of the solvent that is greater than the first threshold concentration, and so on.

[0099] The testing process can be suitably selected and the sample processing area 342 and the indicator area 346 of the sample processor 340 can be suitably configured such that a wide range of properties of solvents can be detected and/or indicated. For example, in some embodiments, the sample processor 340 can be configured to detect any concentration between 0 and 50 mM of an identified solvent, for example ethanol. In some embodiments, the sample processor 340 can be configured to measure and indicate a presence of a concentration of the solvent within a predetermined window e.g., between 0 and 1 mM, between 1 mM and 5 mM (e.g., daily average measurements can range between 1 mM and 5 mM), 1 mM-10 mM, 10-20mM, 20-30 mM, 30-40 mM, 40-50 mM, and so on. In some instances, a concentration beyond 10 mM can be indicative of a symptom or an extreme symptom associated with a health status of the animal. In some embodiments, the sample processor 340 can be configured to indicate a lower threshold of concentration of solvent detected and measure. For example, indicate if the concentration of solvent detected is greater than 1 mM, 5 mM, 10 mM, 25 mM, 35 mM, 50 mM, and so on (including all intermediary values in between the example illustrated here). While described herein as adapting a testing process to detect presence or a concentration of an identified solvent (e.g., ethanol), it can be appreciated that embodiments of the sample examining device 320 can include a sample processor 340 suitably adapted (e.g., a sample processing area and/or an indicator area suitably adapted) to detect and/or indicate a presence of an identified solvent and measure the presence using any suitable property like quantity, mass, volume, pH associated with the solvent.

[0100] In some embodiments, as it may be appreciated, the sample processing area 342 can have any suitable adaptation to test the portion of sample for any property including biochemical, electrochemical, metabolic, electrolytic, conductive, thermal, enzymatic, an/or immunological property that may be used to detect a presence of an identified solvent or gas and/or measure a property associated with the identified solvent or gas.

[0101] In some embodiments, the sample processes or 340 in a sample examining device 320 can include one or more processors (not shown in FIG. 3) configured to coordinate a sampling function of the sampling structure 330, and/or a sample processing function, a conducting the testing process function, and/or result indicating function of the sample processor 340. For example, a processor can be configured to aid, initiate, or cause a sample or a portion of sample to be conveyed from the sampling structure 330 to the sample processor, cause the testing process and the indication of result by the sample processor. The processor may be any suitable processing device configured to run and/or execute any of the functions described herein. In some embodiments, the processor may be a general purpose processor, a Field Programmable Gate Array (FPGA), an Application Specific Integrated Circuit (ASIC), a Digital Signal Processor (DSP), a Dedicated Graphics Processing Unit (GPU), and/or the like. In some embodiments, the processor can be configured to implement one or more of the functions described herein as one or more programs and/or applications that are tied to hardware components (e.g., processor, memory 352, input/output interface(s) 362). In some embodiments, a system bus (not shown) may be configured to enable the sampling structure 330, sample processor 340, memory 352, input/output interface(s) 362, and/or other components of the SE device 320 to communicate with each other.

[0102] In some embodiments, the sample examining device 320 optionally includes an input/output interface 362, configured to receive transmit an output associated with the sample testing process described herein. For example, in some embodiments, the sample examining device 320 can be configured such that a result associated with the sample testing process conducted in the sample processor 340 can be electronically transmitted to an external device such as a compute device (e.g., the compute device 110 of system 100) or a data source (e.g., data source 160 of system 100).

[0103] The input/output interface(s) 362 may include one or more components that are configured to receive inputs and send outputs to other devices (e.g., compute device 110, data source 160 of system 100, etc.). In some embodiments, the input/output interface(s) 362 can include a user interface, which can include one or more components that are configured to receive input and/or present output to a user. For example, input/output interface 362 may include a display device (e.g., a display, a touch screen, etc.), an audio device (e.g., a microphone, a speaker), a keypad, and/or other interfaces for receiving information from and/or presenting information to users. In some embodiments, the input/output interface 362 can include a communications interface for communicating with other devices, and can include conventional electronics for data communication using a standard communication protocol, e.g., Wi-Fi, Bluetooth®, etc.

[0104] In some embodiments, the SE device 320 optionally includes a memory 352 operatively coupled to the sampling structure 330, the sample processor 340, and the optional input/output interface 3662. In some embodiments, the memory 352 can be configured to store data and/or instructions used to conduct the sample acquisition by the sampling structure 330, the sample testing and result indication by the sample processor 340, and/or the input acquisition and/or output transmission by the input/output interface 362. The memory 352 can be, for example, a random access memory (RAM), a memory buffer, a hard drive, a database, an erasable programmable read-only memory (EPROM), an electrically erasable read-only memory (EEPROM), a read-only memory (ROM), and/or so forth. In some embodiments, memory 352 stores instructions that causes a processor associated with the SE device 320 to execute modules, processes, and/or functions associated with sample acquisition, sample processing, result indication and/or the like. Memory 352 can store sample data 354 which can include details or information associated with a sample tested (e.g., a source bodily fluid from which the sample was obtained, identity of an animal from which the sample was obtained, data associated with the source (e.g., a health status of the animal at the time of testing, a diet associated with the animal at time of testing, a phase of livestock management that the animal was part of at time of testing such as transition phase of dairy cows, calving phase of dairy cows, a post-calving, negative energy balance phase for dairy cows, post-calving acclimatization phase with an identified milk yield, etc.), properties of the sample (e.g., date of collection, method of collection, amount used for testing, test used, the identified solvent that the sample is being tested for, data associated with a pathology suspected or indicated, results from the testing, and/or the like.

[0105] FIG. 4 schematically illustrates an example compute device 410 for acidosis detection, according to some embodiments. Compute device 410 can be structurally and/or functionally similar to compute device 110. While a single compute device 410 is schematically depicted, it can be appreciated that the compute device 410 can be implemented as one or more compute devices. In some embodiments, compute device 410 may be configured to analyze a presence or a measured property of a solvent in a sample of bodily fluid or gas from an animal, detect a state of acidosis, predict a health status of an animal at a time of testing and following a time of testing depending on other parameters like health, medical intervention and/or supplementation, monitoring, and/or feeding, and/or generate a plan or recommendation for animal management including supplementation, feed alteration, and/or medical intervention. Compute device 410 includes a processor 420, a memory 430, and one or more input/output interface(s) 450.

[0106] Memory 430 may be, for example, a random access memory (RAM), a memory buffer, a hard drive, a database, an erasable programmable read-only memory (EPROM), an electrically erasable read-only memory (EEPROM), a read-only memory (ROM), and/or so forth. In some embodiments, memory 430 stores instructions that cause processor 420 to execute modules, processes, and/or functions associated with solvent analysis 422, acidosis detection 424, and optionally health prediction 426, and/or animal management 428. Memory 430 can store one or more test data 432, and optionally health data 434, and/or feed data 436. Test data 434 can include information associated with samples processed by a sample examining device (e.g., SE device 120, 320) to perform the solvent analysis 422 and acidosis detection 424, and optionally the health prediction 426, and/or animal management 428. Health data 434 and feed data 436 can be used to perform health prediction 426 and/or animal management 428.

[0107] In some implementations, health data 434 and/or feed data 436 can include data obtained from a data source e.g., data source 260 of system 100 described with reference to FIG. 2 including datasets obtained from farms, research facilities, testing laboratories, veterinary hospitals, feed or medical supplement suppliers or providers, regulatory agencies overseeing animal feed and health management (e.g., The Association of American Feed Control Officials (AAFCO), and/or the like.

[0108] In some embodiments, health data 434 can include one or more physical health parameters of an animal in a cohort (e.g., age, temperature, respiratory state, blood, or serum analysis, etc.) a diet of the animal, a feed uptake by the animal, living space, condition of its pen or holding chamber, rationing of feed, feed mixing, mechanism or means of feed delivery, water availability, drinking behavior, feed intake, intake schedule, frequency, etc. A health status can include a physical state of an animal in the context of animal or livestock management. For example, a phase of livestock management associated with a dairy cow such as a pregnancy phase, transition phase, calving phase, a post-calving, negative energy balance phase, post-calving acclimatization phase with an identified milk yield, and/or the like). In some implementations, health data can include data related to a quantity/quality of bioproduct, for example, milk, produced by an animal. For example, health data 436 can include an indication of milk yield, an amount of fat in milk, an amount of protein in milk, a quantity milk fat and/or milk protein, a number of days producing milk, an average rate of milk production, an amount of dry extract in milk, a number of liters of milk per day, an amount of urea in milk, a bacterial biomass associated with a bodily fluid tested from the cow, bacterial count in milk, inhibitors in milk, an amount of casein in milk, and/or the like. In some embodiments, an indication of health status can include an indication of a pathology onset or a risk of imminent pathology onset, or an on going pathology, medical interventions and/or feed supplements provided, schedule of medical interventions and/or feed supplements, and/or the like.

[0109] Feed data 436 can include a range of diets used or potentially could be used for an animal in a given cohort or in a given health status. Feed data 436 can include data associated with feed composition, feeding schedule, feeding mechanism, watering schedule, history of feeding, feed supplements available, history of feed supplements used and the resulting changes in health of an animal, and/or the like. In some embodiments, the feed data 436 can include information associated with potential carriers that can be used as a feed supplement including Zeolite, charcoal, activated granulated charcoal, bone ash, bone charcoal, diatomaceous earth, kaolin, bentonite, and clay. In some embodiments, charcoals associated with various properties can be suitably used as potential carriers. Some properties of interest can include porosity, surface area (e.g., component having more surface area can be used to absorb more solvent) and ash content (e.g., a component having less ash content can be selected to have better absorptive ability). In some implementations, powdered charcoal and/or granulated charcoal can be selected to use as carriers. IN some implementations, granulated activated charcoal can show improved performance than for example, powdered charcoal (e.g., sometimes because the ash content of powdered charcoal can be greater than granulated charcoal). In some embodiments, tests can be performed to compare the performance or efficacy of two or more materials and the results can be used to suitably select one or more carriers to use. In some embodiments, the feed data 436 can include information associated with potential microbial growth inhibitors that can be included with feed to provide an animal to induce a change in a health status. As an example, potential microbial growth inhibitors can include ascorbic acid, benzoic acid, propionic acid, sodium sulfite, sulfur dioxide, sodium nitrite, and fumaric acid.

[0110] The processor 420 may be any suitable processing device configured to run and/or execute any of the functions described herein. In some embodiments, processor 420 may be a general purpose processor, a Field Programmable Gate Array (FPGA), an Application Specific Integrated Circuit (ASIC), a Digital Signal Processor (DSP), a Dedicated Graphics Processing Unit (GPU), and/or the like. In some embodiments, the processor 420 can be configured to perform one or more of solvent analysis 422, acidosis detection 424, optionally health prediction 426 and animal management 428. The processes of solvent analysis 422, acidosis detection 424, optionally health prediction 426 and animal management 428 can be implemented as one or more programs and/or applications that are tied to hardware components (e.g., processor 420, memory 430, input/output interface(s) 450). In some embodiments, a system bus (not shown) may be configured to enable processor 420, memory 430, input/output interface(s) 450, and/or other components of the compute device 410 to communicate with each other.

[0111] While a single processor 420 that is located on a single compute device 410 is depicted in FIG. 4, it can be appreciated that processor 420 can be one or more processors that are located on the same compute device and/or different compute devices. In some embodiments, systems, devices, and methods described herein, including, for example, solvent analysis 422, acidosis detection 424, optionally health prediction 426 and animal management 428 can be implemented in a cloud platform (e.g., using one or more remote compute devices). The cloud platform can be connected to one or more databases, such as, for example, farm and/or veterinary hospital databases, via a network (e.g., network 150). As such, systems, devices, and methods described herein can receive information from those databases (e.g., animal health information, acidosis detection test data, feed data, etc.) and/or send information to those databases (e.g., acidosis detection results, amount or concentration of solvent measured in a sample of biological fluid, health status of animal, yield, or properties of bioproduct yielded by an animal, etc.)

[0112] The input/output interface(s) 450 may include one or more components that are configured to receive inputs and send outputs to other devices (e.g., data source(s) 160, Se device(s) 120, 320, etc.). In some embodiments, the input/output interface(s) 450 can include a user interface, which can include one or more components that are configured to receive input and/or present output to a user. For example, input/output interface 450 may include a display device (e.g., a display, a touch screen, etc.), an audio device (e.g., a microphone, a speaker), a keypad, and/or other interfaces for receiving information from and/or presenting information to users. In some embodiments, the input/output interface 450 can include a communications interface for communicating with other devices, and can include conventional electronics for data communication using a standard communication protocol, e.g., Wi-Fi, Bluetooth®, etc.

### 2. Methods

[0113] Systems, devices, and methods described herein can perform detection of an identified solvent or gas in a sample of bodily fluid obtained from a nasal or oral cavity of an animal, measurement of a property associated with the detected solvent or gas, and based optionally based on the detection of solvent and/or measurement of the property associated with the solvent or gas determine a health status, such as acidosis, of the animal from which the sample was obtained. In some embodiments, systems and devices and methods described herein can perform such solvent measurement/analysis, acidosis detection, in combination with health prediction and animal management, as described herein. FIG. 5 illustrates a progression of acidosis in ruminants including an acidosis stage 1 that is indicated by an increase in microbial biomass and increase in carbon dioxide, followed by an acidosis stage 2 indicated by an increase in fermentation acids and increase in fermentation solvents. Acidosis stage 2 is followed by pathophysiologies described herein In some embodiments, the methods and systems described herein can be used to test samples of bodily fluids to detect a health status that can include a state of healthfulness, a state of risk of onset of acidosis, a state of onset of acidosis stage 1, a state of acidosis stage 2, and/or a state of pathophysiology past the acidosis stage 2.

[0114] As described above, a compute device (e.g., compute devices 110, 410) for performing solvent measurement/analysis, acidosis detection, health prediction, and/or animal management can implement one or more algorithms, routines, analyses, calculations, and/or models. In some embodiments, the algorithms or models can include statistical, mathematical, and/or machine learning models or tools, which can be trained using labeled training datasets and/or validated using designated validation datasets.

[0115] In some embodiments, an ADS (e.g., system 100) can perform solvent detection and/or measurement of a property associated with a solvent from a sample of bodily fluid using a sample examining device. FIG. 6 is a flow chart illustrating an example method 600 of determining a state of health of an animal using an ADS, according to an implementation. The method 600 can be performed by any ADS described herein, e.g., ADS 100 of FIG. 2, and/or any of the sample examining devices and/or compute devices thereof. For example, the method 600 can be implemented using an SE device such as the SE device 320 of FIG. 3. In some implementations, the method 600 can be implemented by a combination of an SE device (e.g., SE device 320) and a compute device (e.g., compute device 110 of FIG. 1 and/or compute device 410 of FIG. 4.

[0116] As shown in FIG. 6, the method 600 includes receiving a sample pf a bodily fluid or gas from an oral or nasal cavity of an animal at 602. As described herein, the bodily fluid can be any suitable bodily fluid including saliva, nasal secretions, buccal secretions, and/or any suitable bodily fluid of oronasopharyngeal origin. The sample can be received in a sample examining device (e.g., SE device 320), for example in a sampling structure. In some example embodiments, the SE device can be configured to receive a sample in a sampling structure adapted to receive the sample, contain the sample, and convey the sample to a sample processor. In some example embodiments, the SE device can be a test kit or a test strip of a material (e.g., absorbent, or sieving material) including a sampling structure configured to receive a sample to be tested and convey the sample to a sample processing area.

[0117] The method 600, at 604, includes measuring a property associated with at least one of an identified solvent or an identified gas in the sample. In some embodiments, the SE device can be configured such that a sample processor includes a test reagent configured to react with a sample containing the identified solvent or gas. The sample processor can be configured to receive the sample or a portion of the sample, from the sampling structure, and conduct or cause the conduction of a testing process, i.e., initiate or cause a reaction of the test reagent with the identified solvent or gas, if present in the portion of sample. In some embodiments, the SE device can be a test kit or test strip that includes a defined sample processing area that includes a reagent configured to react with the identified solvent, for example, ethanol (or gas, e.g., carbon dioxide). defined a sample processor configured to conduct or cause the conduction of a testing process when the sample is conveyed to the sample processor, and an indicator area configured to provide or indicate a result of the testing process, i.e., indicate a presence/absence of an identified solvent or gas and/or a measurement of a property associated with the identified solvent or gas. For example, the solvent can be ethanol and the sample processor can be configured to measure a concentration of ethanol detected in the sample. In some embodiments, the sample processor can be configured to cause a change or transformation in a regent that causes an indication of the measure concentration. The testing process can be any suitable testing process (e.g., an enzymatic assay, a chromatographic test, an immunoassay, a colorimetric assay, a peroxidase based assay an/or the like). The change or transformation can be indicated in any suitable forma. For example, through an appearance or disappearance of one or more visible markings (e.g., in an indicator area), a color change, a fluorescent emission, and/or the like. In some embodiments the sample processor can be configured to measure a concentration of ethanol as low as 0 or 0.001 mM and to measurements of around 1.5 mM-10 mM (e.g., daily measurements can fluctuate between 2 mM-5 mM) to up to 30 mM, 40 mM, and/or 50 mM.

[0118] In some embodiments, the testing process can be such that the reagent is configured to undergo a first change when a certain first threshold criterion is met and/or a certain second change when a certain second threshold criterion is met. For example, the reagent can undergo a first change or transformation (e.g., emitting or causing an emission of a first color) when a first criterion of a mere presence of a solvent is met but when the concentration of the solvent is below a first threshold concentration (i.e., presence is mere trace amounts or is comparable to a baseline concentration) greater than the first threshold. The reagent can undergo a second change or transformation (e.g., emitting or causing an emission of a second color different than the first color) when a second criterion of a presence of a first threshold concentration of the solvent is met. The reagent can undergo a third change or transformation (e.g., emitting or causing an emission of a third color different than the first and second colors) when a third criterion of a presence of a second threshold concentration of the solvent is met, and so on. In some embodiments, the reagent can be configured to transform incrementally with increase in concentration. In some embodiments, the reagent can be configured to under the change or transformation corresponding the concentration of the solvent regardless of any lower threshold criteria.

[0119] In some embodiments, the sample processing area and the indicator are can be configured to include multiple reagents each reagent configured to undergo a change when a certain threshold criterion is met, for example, a first reagent having a first criterion of a mere presence of a solvent, a second reagent having a second criterion of a presence of a first threshold concentration of the solvent, a third reagent having a third criterion of a presence of a second threshold concentration of the solvent that is greater than the first threshold concentration, and so on.

[0120] As described herein, the testing process can be suitably selected and the sample examining device can be suitably configured such that a wide range of properties of solvents can be detected and/or indicated. For example, in some embodiments, the solvent can be ethanol and any concentration between 0 and 50 mM of ethanol can be detected, measured and/or indicated. In some embodiments, the method 604 can include detecting and measuring a presence of a concentration of ethanol within a predetermined window e.g., between 0 and 1, 1 and 1.5 Mm, 1 and 2 mM, 1 and 5 mM, 2-5 mM, 5-8 mM, 8-10 mM, 1-10 mM, 1-20 mM, 10-20 mM, 20-30 mM, 30-40 mM, 40-50 mM, and so on. In some embodiments, the method 600 at 604 can include indicating a lower threshold of concentration of ethanol detected and measured. For example, the method can include indicating if the concentration of ethanol detected is greater than 1 mM, 5 mM, 10 mM, 25 mM, 35 mM, 50 mM, and so on (including all intermediary values in between the example illustrated here). While described to measure a concentration of ethanol, for illustration purposes, in some implementations, the method 600 at 604 can be suitably used to measure any suitable property like quantity, mass, volume, pH associated with any suitable solvent including ethanol, propanol, isopropanol, butanol, acetone, acetaldehyde, succinate, and/or the like.

[0121] The method 600 at 606 includes determining a state of health associated with the animal based on the property associated with the identified solvent. In some implementations, the ADS can utilize a compute device (e.g., compute device 110, 410 to determine a state of health associated with an animal from an indication of a property associated with an identified solvent (e.g., concentration of ethanol) in a bodily fluid like saliva obtained from the animal.

[0122] FIG. 7 is a flow chart illustrating an example method 700 of determining a state of health of an animal based on information associated with a solvent in a sample of bodily fluid from the animal, using an ADS, according to an implementation. The method 700 can be performed by any ADS described herein, e.g., ADS 100 of FIG. 2, and/or any of the compute devices thereof (e.g., compute device 110, 410).

[0123] As shown in FIG. 7, the method 1000 includes, at 710, obtaining a measurement of a property associated with a solvent in a sample of bodily fluid from an animal. For example, obtaining a concentration of a solvent ethanol in a sample of saliva from a dairy cow. At 720, the method includes comparing the measurement of the property associated with the solvent against a predetermined baseline measurement of the property associated with the solvent. As an example, the measured concentration of ethanol can be a test measurement. The ADS can obtain a predetermined baseline measurement of ethanol that is expected in a saliva of a dairy cow that is known to be healthy (without any known pathophysiology). The ADS can be used to compare the test measurement against the predetermined baseline measurement of ethanol in the saliva of a dairy cow. In some implementations, the method can include comparison against more than one predetermined measurements as described herein. For example, in some implementations, the method can include comparing a test measurement against a predetermined lower threshold or a baseline measurement or a negative control measurement, as well as an upper threshold or a positive control measurement, or a measurement of concentration of ethanol from a saliva of a dairy cow known to have a state of acidosis (e.g., acidosis stage 1, acidosis stage 2, pathophysiology, etc.).

[0124] The comparison at 720 can result in one of two outcomes. Either the test measurement can indicate a statistically higher concentration of ethanol compared to the predetermined baseline measurement, or the test measurement can be statistically comparable concentration of ethanol compared to the predetermined baseline measurement.

[0125] At 730A, the method 700 includes determining a state of acidosis based on the measurement being greater than the predetermined baseline measurement. In some implementations, the method can include more than one predetermined baseline measurements to determine more than one state of acidosis. For example, the method at 730A can include determining a first state of acidosis (e.g., an acidosis stage 1) based on a test measurement of concentration of ethanol being greater than a first predetermined baseline measurement but the test measurement being less than a second predetermined positive control measurement associated with a stage further progressed than acidosis stage 1. The method at 730A can include determining a second state of acidosis (e.g., an acidosis stage 2) based on a test measurement of concentration of ethanol being greater than a first predetermined baseline measurement and also greater that the second predetermined positive control measurement associated with a stage further progressed than acidosis stage 1, for example, acidosis stage 2, and so on.

[0126] Following 730A, the method includes, at 740A, generating a feed recommendation based on the determination of the state of acidosis at 730A. And at 750A the method includes predicting a progression of the state of acidosis and/or a prediction of progression of recovery from the state of acidosis. In some implementations, an ADS can be used to generate a health prediction for example an expected progression of the acidosis. In some implementation, the method can include recommending a feed supplement or a change in diet to counter the effects of acidosis based on the determination at 730A. For example, in some implementations, an ADS can be used (implementing a health prediction and/or an animal management process described herein) to recommend addition of (i) a synthetic microbial ensemble including one or more identified microorganism strains (e.g., one or more microbes described in sections below with reference to Tables 1, 2, 3, 4, 5, and/or 6, including for example microbes expected to counter the effects of acidosis), or (ii) a carrier configured to adsorb a solvent or to counter the effects of solventogenesis leading to acidosis. As examples, the carrier can be at least one of Zeolite, charcoal, activated granulated charcoal, bone ash, bone charcoal, diatomaceous earth, kaolin, and clay. In some implementations, an ADS can be used (implementing a health prediction and/or an animal management process described herein) to recommend a feed supplement to be provided to the animal, the feed supplement including a microbial growth inhibitor configured to inhibit the increase in microbial lead that eventually leads to solventogenesis and configured to induce a recovery from the state of acidosis. In some implementations, the microbial growth inhibitor can be at least one of ascorbic acid, benzoic acid, propionic acid, sodium sulfite, sulfur dioxide, sodium nitrite, and fumaric acid. In some embodiments, the microbial growth inhibitor can be combinations of the above listed ingredients, that is, combinations of adsorptive ingredients, combinations of microbial growth inhibitors, and/or combinations of adsorptive ingredient(s) and inhibitor(s). The method at 750 can include predicting a progression of a state of acidosis and/or a state of recovery given the recommended interventions and/or feed supplements. In some example embodiments, an example amount of additive to be included can be approximately 0.5 g-2 kg 268 g (5 lbs) per head per day for each non-microbe ingredient. In some embodiments, in addition to the additives one or more carriers can be added (e.g., the remaining volume can be filled with calcium carbonate).

[0127] Alternatively and/or additionally, the method at 730B, the method 700 includes determining a state of no acidosis based on the measurement being lesser than the predetermined baseline measurement. In some implementations, the method can include more than one predetermined baseline measurements to also determine a risk of onset of acidosis. For example, the method at 730B can include determining a state of no acidosis based on a test measurement of concentration of ethanol being lesser than a first predetermined baseline measurement but the test measurement being within range of a second predetermined positive control measurement associated with a stage associated with a statistically significant risk of onset of acidosis unless averted by positive action.

[0128] At 740B, the method includes generating a feed recommendation based on the determination of the state of no acidosis and/or a state of risk of onset of acidosis. And at 750B, the method includes predicting a state of health and/or prevention of a state of acidosis if following a recommended animal management plan including one or more feed supplements. As described herein, the feed supplements can include one or more of a synthetic microbial ensemble configure to counteract the biomass shift towards acidosis, a carrier configured to absorb a solvent associate with acidosis, and/or a microbial growth inhibitor configured to inhibit solventogenesis, as described above.

### Microbial Ensembles

[0129] In some embodiments, the disclosure provides microbial products produced by the methods described herein and comprising at least one microorganism, wherein the at least one microorganism is disclosed in one or more of the following: U.S. Pat. App. Pub. Nos. 2018/0310592, 2018/0333443, 2018/0223325, 2022/0174992, 2022/0265732, and PCT Pub. Nos. 2020/227442, 2021/163212, 2021/202804, 2022/226367, and 2022/081992, (each being herein expressly incorporated by reference for all purposes).

### Isolated Microbes—Source Material

[0130] The microbes of the present disclosure were obtained, among other places, at various locales in the United States from the gastrointestinal tract of cows.

### Isolated Microbes—Microbial Culture Techniques

[0131] The microbes of Tables 1, 2, 3, 4, 5, and/or 6 were matched to their nearest taxonomic groups by utilizing classification tools of the Ribosomal Database Project (RDP) for 16s IRNA sequences and the User-friendly Nordic ITS Ectomycorrhiza (UNITE) database for ITS rRNA sequences. Examples of matching microbes to their nearest taxa may be found in Lan et al. (2012. PLOS one. 7(3):e32491), Schloss and Westcott (2011. Appl. Environ. Microbiol. 77(10):3219-3226), and Koljalg et al. (2005. New Phytologist. 166(3):1063-1068).

[0132] The isolation, identification, and culturing of the microbes of the present disclosure can be effected using standard microbiological techniques. Examples of such techniques may be found in Gerhardt, P. (ed.) Methods for General and Molecular Microbiology. American Society for Microbiology, Washington, D.C. (1994) and Lennette, E. H. (ed.) Manual of Clinical Microbiology, Third Edition. American Society for Microbiology, Washington, D.C. (1980), each of which is incorporated by reference.

[0133] Isolation can be effected by streaking the specimen on a solid medium (e.g., nutrient agar plates) to obtain a single colony, which is characterized by the phenotypic traits described hereinabove (e.g., positive/negative, Gram capable of forming spores aerobically/anaerobically, cellular morphology, carbon source metabolism, acid/base production, enzyme secretion, metabolic secretions, etc.) and to reduce the likelihood of working with a culture which has become contaminated.

[0134] For example, for microbes of the disclosure, biologically pure isolates can be obtained through repeated subculture of biological samples, each subculture followed by streaking onto solid media to obtain individual colonies or colony forming units. Methods of preparing, thawing, and growing lyophilized bacteria are commonly known, for example, Gherna, R. L. and C. A. Reddy. 2007. Culture Preservation, p 1019-1033. In C. A. Reddy, T. J. Beveridge, J. A. Breznak, G. A. Marzluf, T. M. Schmidt, and L. R. Snyder, eds. American Society for Microbiology, Washington, D.C., 1033 pages; herein incorporated by reference. Thus freeze dried liquid formulations and cultures stored long term at −70° C. in solutions containing glycerol are contemplated for use in providing formulations of the present disclosure.

[0135] The microbes of the disclosure can be propagated in a liquid medium under aerobic conditions, or alternatively anaerobic conditions. Medium for growing the bacterial strains of the present disclosure includes a carbon source, a nitrogen source, and inorganic salts, as well as specially required substances such as vitamins, amino acids, nucleic acids and the like. Examples of suitable carbon sources which can be used for growing the microbes include, but are not limited to, starch, peptone, yeast extract, amino acids, sugars such as glucose, arabinose, mannose, glucosamine, maltose, and the like; salts of organic acids such as acetic acid, fumaric acid, adipic acid, propionic acid, citric acid, gluconic acid, malic acid, pyruvic acid, malonic acid and the like; alcohols such as ethanol and glycerol and the like; oil or fat such as soybean oil, rice bran oil, olive oil, corn oil, sesame oil. The amount of the carbon source added varies according to the kind of carbon source and is typically between 1 to 100 gram(s) per liter of medium. Preferably, glucose, starch, and/or peptone is contained in the medium as a major carbon source, at a concentration of 0.1-5% (W/V). Examples of suitable nitrogen sources which can be used for growing the bacterial strains of the present disclosure include, but are not limited to, amino acids, yeast extract, tryptone, beef extract, peptone, potassium nitrate, ammonium nitrate, ammonium chloride, ammonium sulfate, ammonium phosphate, ammonia or combinations thereof. The amount of nitrogen source varies according to the type of nitrogen source, typically between 0.1 to 30 gram per liter of medium. The inorganic salts, potassium dihydrogen phosphate, dipotassium hydrogen phosphate, disodium hydrogen phosphate, magnesium sulfate, magnesium chloride, ferric sulfate, ferrous sulfate, ferric chloride, ferrous chloride, manganous sulfate, manganous chloride, zinc sulfate, zinc chloride, cupric sulfate, calcium chloride, sodium chloride, calcium carbonate, sodium carbonate can be used alone or in combination. The amount of inorganic acid varies according to the kind of the inorganic salt, typically between 0.001 to 10 gram per liter of medium. Examples of specially required substances include, but are not limited to, vitamins, nucleic acids, yeast extract, peptone, meat extract, malt extract, dried yeast and combinations thereof. Cultivation can be effected at a temperature, which allows the growth of the microbial strains, essentially, between 20° C. and 46° C. In some aspects, a temperature range is 30° C.-39° C. For optimal growth, in some embodiments, the medium can be adjusted to pH 6.0-7.4. It will be appreciated that commercially available media may also be used to culture the microbial strains, such as Nutrient Broth or Nutrient Agar available from Difco, Detroit, MI. It will be appreciated that cultivation time may differ depending on the type of culture medium used and the concentration of sugar as a major carbon source.

[0136] In some aspects, cultivation lasts between 24-96 hours. Microbial cells thus obtained are isolated using methods, which are well known in the art. Examples include, but are not limited to, membrane filtration and centrifugal separation. The pH may be adjusted using sodium hydroxide and the like and the culture may be dried using a freeze dryer, until the water content becomes equal to 4% or less. Microbial co-cultures may be obtained by propagating each strain as described hereinabove. In some aspects, microbial multi-strain cultures may be obtained by propagating two or more of the strains described hereinabove. It will be appreciated that the microbial strains may be cultured together when compatible culture conditions can be employed.

[0137] In some embodiments, the microorganisms of the present disclosure are subjected to a serial preservation challenge to improve microbial viability. In some embodiments, the microorganisms are subjected to a serial preservation challenge to improve stability. In some embodiments, the microorganisms of the present disclosure are subjected to at least one preservation challenge. In some embodiments, the microorganisms of the present disclosure are subjected to at least two, three, four, five, or more preservation challenges.

[0138] In some embodiments, the serial preservation method comprises: (a) subjecting a population of target microbial cells to a first preservation challenge to provide a first population of challenged microbial cells; (b) harvesting viable challenged microbial cells from the first population of challenged microbial cells to provide a first population of viable challenged microbial cells; (c) subjecting the first population of viable challenged microbial cells to a second preservation challenge to provide a second population of challenged microbial cells; (d) harvesting viable challenged microbial cells from the second population of challenged microbial cells to provide a second population of viable challenged microbial cells; (e) subjecting the second population of viable challenged microbial cells to a third preservation challenge to provide a third population of challenged microbial cells; (f) harvesting viable challenged microbial cells from the third population of challenged microbial cells to provide a third population of viable challenged microbial cells; (g) preserving the third population of viable challenged microbial cells to provide a population of preserved viability-enhanced microbial cells; and (h) preparing a product using the population of preserved viability-enhanced microbial cells.

[0139] In some embodiments, each of the preservation challenges are the same type of preservation challenge. For example, in some embodiments, the microorganisms of the present disclosure are subjected to two, three, four, five, or more preservation challenges before final preservation for storage and/or incorporation into a product, wherein each of the preservation challenges are of the same type. Types of preservation challenges include, but are not limited to, freeze drying/lyophilization, vitrification/glass formation, evaporation, foam formation, vaporization, cryopreservation, spray drying, adsorptive drying, extrusion, and fluid bed drying. Methods of microbial preservation are further described in PCT Application No. PCT/US2020/020311, herein incorporated by reference in its entirety.

[0140] In some embodiments, the preservation challenges are different types of preservation challenges. For example, in some embodiments, the microorganisms of the present disclosure are subjected to a first and a second preservation challenge, wherein the first and the second preservation challenges are different challenges types. For example, in some embodiments, the first preservation challenge is a cryopreservation challenge and the second preservation challenge is a freeze-drying preservation challenge.

[0141] In some embodiments, any one of the microorganisms listed in Table 1, 2 or 3 may be subjected to serial preservation challenge. In some embodiments, a microorganism comprising a 16S nucleic acid sequence with at least 95% sequence identity to SEQ ID NOs: 1-30, 2045-2103, 2108, or 2125-4945 is subjected to serial preservation challenge. In some embodiments, a microorganism comprising an ITS nucleic acid sequence with at least 95% sequence identity to SEQ ID NOs: 31-60 and 2104-2107 is subjected to serial preservation challenge.

[0142] In some embodiments, serial preservation results in one or more mutations in the genome of a microorganism. In some embodiments, serial preservation results in one or more mutations in the genome of any one of the microorganisms listed in Table 1, 2 or 3. In some embodiments, serial preservation results in one or more mutations in a microorganism comprising a 16S nucleic acid sequence with at least 95% sequence identity to SEQ ID NOs: 1-30, 2045-2103, 2108, or 2125-4945. In some embodiments, serial preservation results in one or more mutations in a microorganism comprising an ITS nucleic acid sequence with at least 95% sequence identity to SEQ ID NOs: 31-60 and 2104-2107.

[0143] In some embodiments, serial preservation results in one or more mutations in Ruminococcus bovis comprising a 16S nucleic acid sequence of SEQ ID NO: 2108. In some embodiments, the one or more mutations are located in the whole genome of Ruminococcus bovis comprising a 16S nucleic acid sequence of SEQ ID NO: 2108. In some embodiments, the one or mutations are not located in the 16S nucleic acid sequence of SEQ ID NO: 2108 of Ruminococcus bovis.

### Isolated Microbes—Microbial Strains

[0144] Microbes can be distinguished into a genus based on polyphasic taxonomy, which incorporates all available phenotypic and genotypic data into a consensus classification (Vandamme et al. 1996. Polyphasic taxonomy, a consensus approach to bacterial systematics. Microbiol Rev 1996, 60:407-438). One accepted genotypic method for defining species is based on overall genomic relatedness, such that strains which share approximately 70% or more relatedness using DNA-DNA hybridization, with 5° C. or less ΔTm (the difference in the melting temperature between homologous and heterologous hybrids), under standard conditions, are considered to be members of the same species. Thus, populations that share greater than the aforementioned 70% threshold can be considered to be variants of the same species. Another accepted genotypic method for defining species is to isolate marker genes of the present disclosure, sequence these genes, and align these sequenced genes from multiple isolates or variants. The microbes are interpreted as belonging to the same species if one or more of the sequenced genes share at least 97% sequence identity.

[0145] The 16S or 18S rRNA sequences or ITS sequences are often used for making distinctions between species and strains, in that if one of the aforementioned sequences share less than a specified percent sequence identity from a reference sequence, then the two organisms from which the sequences were obtained are said to be of different species or strains.

[0146] Thus, one could consider microbes to be of the same species, if they share at least 80%, 85%, 90%, 95%, 97%, 98%, or 99% sequence identity across the 16S or 18S rRNA sequence, or the ITS1 or ITS2 sequence.

[0147] Further, one could define microbial strains of a species, as those that share at least 80%, 85%, 90%, 95%, 97%, 98%, or 99% sequence identity across the 16S or 18S rRNA sequence, or the ITS1 or ITS2 sequence.

[0148] In one embodiment, microbial strains of the present disclosure include those that comprise polynucleotide sequences that share at least 70%, 75%, 80%, 81%, 82%, 83%, 84%, 85%, 86%, 87%, 88%, 89%, 90%, 91%, 92%, 93%, 94%, 95%, 96%, 97%, 98%, 99% or 100% sequence identity with any one of SEQ ID NOs: 1, 2, 3, 4, 5, 6, 7, 8, 9, 10, 11, 12, 13, 14, 15, 16, 17, 18, 19, 20, 21, 22, 23, 24, 25, 26, 27, 28, 39, 30, 31, 32, 33, 34, 35, 36, 37, 38, 39, 40, 41, 42, 43, 44, 45, 46, 47, 48, 49, 50, 51, 52, 53, 54, 55, 56, 57, 58, 59, 60, 2045, 2046, 2047, 2048, 2049, 2050, 2051, 2052, 2053, 2054, 2055, 2056, 2057, 2058, 2059, 2060, 2061, 2062, 2063, 2064, 2065, 2066, 2067, 2068, 2069, 2070, 2071, 2072, 2073, 2074, 2075, 2076, 2077, 2078, 2079, 2080, 2081, 2082, 2083, 2084, 2085, 2086, 2087, 2088, 2089, 2090, 2091, 2092, 2093, 2094, 2095, 2096, 2097, 2098, 2099, 2100, 2101, 2102, 2103, 2104, 2105, 2106, 2107, 2108, and 2125-4945. In a further embodiment, microbial strains of the present disclosure include those that comprise polynucleotide sequences that share at least 70%, 75%, 80%, 81%, 82%, 83%, 84%, 85%, 86%, 87%, 88%, 89%, 90%, 91%, 92%, 93%, 94%, 95%, 96%, 97%, 98%, 99% or 100% sequence identity with any one of SEQ ID NOs: 1-4945.

[0149] In one embodiment, microbial strains of the present disclosure include those that comprise polynucleotide sequences that share at least 97%, 97.1%, 97.2%, 97.3%, 97.4%, 97.5%, 97.6%, 97.7%, 97.8%, 97.9%, 98%, 98.1%, 98.2%, 98.3%, 98.4%, 98.5%, 98.6%, 98.7%, 98.8%, 98.9%, 99%, 99.1%, 99.2%, 99.3%, 99.4%, 99.5%, 99.6%, 99.7%, 99.8%, 99.9%, or 100% sequence identity with any one of SEQ ID NOs: 1, 2, 3, 4, 5, 6, 7, 8, 9, 10, 11, 12, 13, 14, 15, 16, 17, 18, 19, 20, 21, 22, 23, 24, 25, 26, 27, 28, 39, 30, 31, 32, 33, 34, 35, 36, 37, 38, 39, 40, 41, 42, 43, 44, 45, 46, 47, 48, 49, 50, 51, 52, 53, 54, 55, 56, 57, 58, 59, 60, 2045, 2046, 2047, 2048, 2049, 2050, 2051, 2052, 2053, 2054, 2055, 2056, 2057, 2058, 2059, 2060, 2061, 2062, 2063, 2064, 2065, 2066, 2067, 2068, 2069, 2070, 2071, 2072, 2073, 2074, 2075, 2076, 2077, 2078, 2079, 2080, 2081, 2082, 2083, 2084, 2085, 2086, 2087, 2088, 2089, 2090, 2091, 2092, 2093, 2094, 2095, 2096, 2097, 2098, 2099, 2100, 2101, 2102, 2103, 2104, 2105, 2106, 2107, 2108, and 2125-4945.

[0150] Comparisons may also be made with 23S rRNA sequences against reference sequences.

[0151] Unculturable microbes often cannot be assigned to a definite species in the absence of a phenotype determination, the microbes can be given a candidatus designation within a genus provided their 16S or 18S rRNA sequences or ITS sequences subscribes to the principles of identity with known species.

[0152] One approach is to observe the distribution of a large number of strains of closely related species in sequence space and to identify clusters of strains that are well resolved from other clusters. This approach has been developed by using the concatenated sequences of multiple core (house-keeping) genes to assess clustering patterns, and has been called multilocus sequence analysis (MLSA) or multilocus sequence phylogenetic analysis. MLSA has been used successfully to explore clustering patterns among large numbers of strains assigned to very closely related species by current taxonomic methods, to look at the relationships between small numbers of strains within a genus, or within a broader taxonomic grouping, and to address specific taxonomic questions. More generally, the method can be used to ask whether bacterial species exist—that is, to observe whether large populations of similar strains invariably fall into well-resolved clusters, or whether in some cases there is a genetic continuum in which clear separation into clusters is not observed.

[0153] In order to more accurately make a determination of genera, a determination of phenotypic traits, such as morphological, biochemical, and physiological characteristics are made for comparison with a reference genus archetype. The colony morphology can include color, shape, pigmentation, production of slime, etc. Features of the cell are described as to shape, size, Gram reaction, extracellular material, presence of endospores, flagella presence and location, motility, and inclusion bodies. Biochemical and physiological features describe growth of the organism at different ranges of temperature, pH, salinity and atmospheric conditions, growth in presence of different sole carbon and nitrogen sources. One of ordinary skill in the art would be reasonably apprised as to the phenotypic traits that define the genera of the present disclosure.

[0154] In one embodiment, the microbes taught herein were identified utilizing 16S rRNA gene sequences and ITS sequences. It is known in the art that 16S rRNA contains hypervariable regions that can provide species/strain-specific signature sequences useful for bacterial identification, and that ITS sequences can also provide species/strain-specific signature sequences useful for fungal identification.

[0155] Phylogenetic analysis using the rRNA genes and/or ITS sequences are used to define “substantially similar” species belonging to common genera and also to define “substantially similar” strains of a given taxonomic species. Furthermore, physiological and/or biochemical properties of the isolates can be utilized to highlight both minor and significant differences between strains that could lead to advantageous behavior in ruminants.

[0156] Compositions of the present disclosure may include combinations of fungal spores and bacterial spores, fungal spores and bacterial vegetative cells, fungal vegetative cells and bacterial spores, fungal vegetative cells and bacterial vegetative cells. In some embodiments, compositions of the present disclosure comprise bacteria only in the form of spores. In some embodiments, compositions of the present disclosure comprise bacteria only in the form of vegetative cells. In some embodiments, compositions of the present disclosure comprise bacteria in the absence of fungi. In some embodiments, compositions of the present disclosure comprise fungi in the absence of bacteria.

[0157] Bacterial spores may include endospores and akinetes. Fungal spores may include statismospores, ballistospores, autospores, aplanospores, zoospores, mitospores, megaspores, microspores, meiospores, chlamydospores, urediniospores, teliospores, oospores, carpospores, tetraspores, sporangiospores, zygospores, ascospores, basidiospores, ascospores, and asciospores.

[0158] In some embodiments, spores of the composition germinate upon administration to animals of the present disclosure. In some embodiments, spores of the composition germinate only upon administration to animals of the present disclosure.

### Microbial Compositions

[0159] In some embodiments, the microbes of the disclosure are combined into microbial compositions.

[0160] In some embodiments, the microbial compositions include ruminant feed, such as cereals (barley, maize, oats, and the like); starches (tapioca and the like); oilseed cakes; and vegetable wastes. In some embodiments, the microbial compositions include vitamins, minerals, amino acids, enzymes, trace elements, emulsifiers, aromatizing products, binders, colorants, odorants, thickening agents, and the like. In some embodiments, the microbial compositions are combined with medicines or vaccines.

[0161] In some embodiments, the microbial compositions of the present disclosure are solid. Where solid compositions are used, it may be desired to include one or more carrier materials including, but not limited to: mineral earths such as silicas, talc, kaolin, limestone, chalk, clay, dolomite, diatomaceous earth; calcium sulfate; magnesium sulfate; magnesium oxide; products of vegetable origin such as cereal meals, tree bark meal, wood meal, and nutshell meal.

[0162] In some embodiments, the microbial compositions of the present disclosure are liquid. In further embodiments, the liquid comprises a solvent that may include water or an alcohol, and other animal-safe solvents. In some embodiments, the microbial compositions of the present disclosure include binders such as animal-safe polymers, carboxymethylcellulose, starch, polyvinyl alcohol, and the like.

[0163] In some embodiments, the microbial compositions of the present disclosure comprise thickening agents such as silica, clay, natural extracts of seeds or seaweed, synthetic derivatives of cellulose, guar gum, locust bean gum, alginates, and methylcelluloses. In some embodiments, the microbial compositions comprise anti-settling agents such as modified starches, polyvinyl alcohol, xanthan gum, and the like.

[0164] In some embodiments, the microbial compositions of the present disclosure comprise colorants including organic chromophores classified as nitroso; nitro; azo, including monoazo, bisazo and polyazo; acridine, anthraquinone, azine, diphenylmethane, indamine, indophenol, methine, oxazine, phthalocyanine, thiazine, thiazole, triarylmethane, xanthene. In some embodiments, the microbial compositions of the present disclosure comprise trace nutrients such as salts of iron, manganese, boron, copper, cobalt, molybdenum and zinc.

[0165] In some embodiments, the microbial compositions of the present disclosure comprise an animal-safe virucide or nematicide.

[0166] In some embodiments, microbial compositions of the present disclosure comprise saccharides (e.g., monosaccharides, disaccharides, trisaccharides, polysaccharides, oligosaccharides, and the like), polymeric saccharides, lipids, polymeric lipids, lipopolysaccharides, proteins, polymeric proteins, lipoproteins, nucleic acids, nucleic acid polymers, silica, inorganic salts and combinations thereof. In a further embodiment, microbial compositions comprise polymers of agar, agarose, gelrite, gellan gumand the like. In some embodiments, microbial compositions comprise plastic capsules, emulsions (e.g., water and oil), membranes, and artificial membranes. In some embodiments, emulsions or linked polymer solutions may comprise microbial compositions of the present disclosure. See Harel and Bennett (U.S. Pat. No. 8,460,726B2).

[0167] In some embodiments, microbial compositions of the present disclosure occur in a solid form (e.g., dispersed lyophilized spores) or a liquid form (microbes interspersed in a storage medium).

[0168] In some embodiments, microbial compositions of the present disclosure comprise one or more preservatives. The preservatives may be in liquid or gas formulations. The preservatives may be selected from one or more of monosaccharide, disaccharide, trisaccharide, polysaccharide, acetic acid, ascorbic acid, calcium ascorbate, erythorbic acid, iso-ascorbic acid, erythrobic acid, potassium nitrate, sodium ascorbate, sodium erythorbate, sodium iso-ascorbate, sodium nitrate, sodium nitrite, nitrogen, benzoic acid, calcium sorbate, ethyl lauroyl arginate, methyl-p-hydroxy benzoate, methyl paraben, potassium acetate, potassium benzoiate, potassium bisulphite, potassium diacetate, potassium lactate, potassium metabisulphite, potassium sorbate, propyl-p-hydroxy benzoate, propyl paraben, sodium acetate, sodium benzoate, sodium bisulphite, sodium nitrite, sodium diacetate, sodium lactate, sodium metabisulphite, sodium salt of methyl-p-hydroxy benzoic acid, sodium salt of propyl-p-hydroxy benzoic acid, sodium sulphate, sodium sulfite, sodium dithionite, sulphurous acid, calcium propionate, dimethyl dicarbonate, natamycin, potassium sorbate, potassium bisulfite, potassium metabisulfite, propionic acid, sodium diacetate, sodium propionate, sodium sorbate, sorbic acid, ascorbic acid, ascorbyl palmitate, ascorbyl stearate, butylated hydro-xyanisole, butylated hydroxytoluene (BHT), butylated hydroxyl anisole (BHA), citric acid, citric acid esters of mono-and/or diglycerides, L-cysteine, L-cysteine hydrochloride, gum guaiacum, gum guaiac, lecithin, lecithin citrate, monoglyceride citrate, monoisopropyl citrate, propyl gallate, sodium metabisulphite, tartaric acid, tertiary butyl hydroquinone, stannous chloride, thiodipropionic acid, dilauryl thiodipropionate, distearyl thiodipropionate, ethoxyquin, sulfur dioxide, formic acid, or tocopherol(s).

[0169] In some embodiments, microbial compositions of the present disclosure include bacterial and/or fungal cells in spore form, vegetative cell form, and/or lysed cell form. In one embodiment, the lysed cell form acts as a mycotoxin binder, e.g. mycotoxins binding to dead cells.

[0170] In some embodiments, the microbial compositions are shelf stable in a refrigerator (35-40° F.) for a period of at least 1, 2, 3, 4, 5, 6, 7, 8, 9, 10, 11, 12, 13, 14, 15, 16, 17, 18, 19, 20, 21, 22, 23, 24, 25, 26, 27, 28, 29, 30, 31, 32, 33, 34, 35, 36, 37, 38, 39, 40, 41, 42, 43, 44, 45, 46, 47, 48, 49, 50, 51, 52, 53, 54, 55, 56, 57, 58, 59, or 60 days. In some embodiments, the microbial compositions are shelf stable in a refrigerator (35-40° F.) for a period of at least 1, 2, 3, 4, 5, 6, 7, 8, 9, 10, 11, 12, 13, 14, 15, 16, 17, 18, 19, 20, 21, 22, 23, 24, 25, 26, 27, 28, 29, 30, 31, 32, 33, 34, 35, 36, 37, 38, 39, 40, 41, 42, 43, 44, 45, 46, 47, 48, 49, 50, 51, 52, 53, 54, 55, 56, 57, 58, 59, or 60 weeks.

[0171] In some embodiments, the microbial compositions are shelf stable at room temperature (68-72° F.) or between 50-77° F. for a period of at least 1, 2, 3, 4, 5, 6, 7, 8, 9, 10, 11, 12, 13, 14, 15, 16, 17, 18, 19, 20, 21, 22, 23, 24, 25, 26, 27, 28, 29, 30, 31, 32, 33, 34, 35, 36, 37, 38, 39, 40, 41, 42, 43, 44, 45, 46, 47, 48, 49, 50, 51, 52, 53, 54, 55, 56, 57, 58, 59, or 60 days. In some embodiments, the microbial compositions are shelf stable at room temperature (68-72° F.) or between 50-77° F. for a period of at least 1, 2, 3, 4, 5, 6, 7, 8, 9, 10, 11, 12, 13, 14, 15, 16, 17, 18, 19, 20, 21, 22, 23, 24, 25, 26, 27, 28, 29, 30, 31, 32, 33, 34, 35, 36, 37, 38, 39, 40, 41, 42, 43, 44, 45, 46, 47, 48, 49, 50, 51, 52, 53, 54, 55, 56, 57, 58, 59, or 60 weeks.

[0172] In some embodiments, the microbial compositions are shelf stable at −23-35° F. for a period of at least 1, 2, 3, 4, 5, 6, 7, 8, 9, 10, 11, 12, 13, 14, 15, 16, 17, 18, 19, 20, 21, 22, 23, 24, 25, 26, 27, 28, 29, 30, 31, 32, 33, 34, 35, 36, 37, 38, 39, 40, 41, 42, 43, 44, 45, 46, 47, 48, 49, 50, 51, 52, 53, 54, 55, 56, 57, 58, 59, or 60 days. In some embodiments, the microbial compositions are shelf stable at −23-35° F. for a period of at least 1, 2, 3, 4, 5, 6, 7, 8, 9, 10, 11, 12, 13, 14, 15, 16, 17, 18, 19, 20, 21, 22, 23, 24, 25, 26, 27, 28, 29, 30, 31, 32, 33, 34, 35, 36, 37, 38, 39, 40, 41, 42, 43, 44, 45, 46, 47, 48, 49, 50, 51, 52, 53, 54, 55, 56, 57, 58, 59, or 60 weeks.

[0173] In some embodiments, the microbial compositions are shelf stable at 77-100° F. for a period of at least 1, 2, 3, 4, 5, 6, 7, 8, 9, 10, 11, 12, 13, 14, 15, 16, 17, 18, 19, 20, 21, 22, 23, 24, 25, 26, 27, 28, 29, 30, 31, 32, 33, 34, 35, 36, 37, 38, 39, 40, 41, 42, 43, 44, 45, 46, 47, 48, 49, 50, 51, 52, 53, 54, 55, 56, 57, 58, 59, or 60 days. In some embodiments, the microbial compositions are shelf stable at 77-100° F. for a period of at least 1, 2, 3, 4, 5, 6, 7, 8, 9, 10, 11, 12, 13, 14, 15, 16, 17, 18, 19, 20, 21, 22, 23, 24, 25, 26, 27, 28, 29, 30, 31, 32, 33, 34, 35, 36, 37, 38, 39, 40, 41, 42, 43, 44, 45, 46, 47, 48, 49, 50, 51, 52, 53, 54, 55, 56, 57, 58, 59, or 60 weeks.

[0174] In some embodiments, the microbial compositions are shelf stable at 101-213° F. for a period of at least 1, 2, 3, 4, 5, 6, 7, 8, 9, 10, 11, 12, 13, 14, 15, 16, 17, 18, 19, 20, 21, 22, 23, 24, 25, 26, 27, 28, 29, 30, 31, 32, 33, 34, 35, 36, 37, 38, 39, 40, 41, 42, 43, 44, 45, 46, 47, 48, 49, 50, 51, 52, 53, 54, 55, 56, 57, 58, 59, or 60 days. In some embodiments, the microbial compositions are shelf stable at 101-213° F. for a period of at least 1, 2, 3, 4, 5, 6, 7, 8, 9, 10, 11, 12, 13, 14, 15, 16, 17, 18, 19, 20, 21, 22, 23, 24, 25, 26, 27, 28, 29, 30, 31, 32, 33, 34, 35, 36, 37, 38, 39, 40, 41, 42, 43, 44, 45, 46, 47, 48, 49, 50, 51, 52, 53, 54, 55, 56, 57, 58, 59, or 60 weeks.

[0175] In some embodiments, the microbial compositions of the present disclosure are shelf stable at refrigeration temperatures (35-40° F.), at room temperature (68-72° F.), between 50-77° F., between −23-35° F., between 70-100° F., or between 101-213° F. for a period of about 1 to 100, about 1 to 95, about 1 to 90, about 1 to 85, about 1 to 80, about 1 to 75, about 1 to 70, about 1 to 65, about 1 to 60, about 1 to 55, about 1 to 50, about 1 to 45, about 1 to 40, about 1 to 35, about 1 to 30, about 1 to 25, about 1 to 20, about 1 to 15, about 1 to 10, about 1 to 5, about 5 to 100, about 5 to 95, about 5 to 90, about 5 to 85, about 5 to 80, about 5 to 75, about 5 to 70, about 5 to 65, about 5 to 60, about 5 to 55, about 5 to 50, about 5 to 45, about 5 to 40, about 5 to 35, about 5 to 30, about 5 to 25, about 5 to 20, about 5 to 15, about 5 to 10, about 10 to 100, about 10 to 95, about 10 to 90, about 10 to 85, about 10 to 80, about 10 to 75, about 10 to 70, about 10 to 65, about 10 to 60, about 10 to 55, about 10 to 50, about 10 to 45, about 10 to 40, about 10 to 35, about 10 to 30, about 10 to 25, about 10 to 20, about 10 to 15, about 15 to 100, about 15 to 95, about 15 to 90, about 15 to 85, about 15 to 80, about 15 to 75, about 15 to 70, about 15 to 65, about 15 to 60, about 15 to 55, about 15 to 50, about 15 to 45, about 15 to 40, about 15 to 35, about 15 to 30, about 15 to 25, about 15 to 20, about 20 to 100, about 20 to 95, about 20 to 90, about 20 to 85, about 20 to 80, about 20 to 75, about 20 to 70, about 20 to 65, about 20 to 60, about 20 to 55, about 20 to 50, about 20 to 45, about 20 to 40, about 20 to 35, about 20 to 30, about 20 to 25, about 25 to 100, about 25 to 95, about 25 to 90, about 25 to 85, about 25 to 80, about 25 to 75, about 25 to 70, about 25 to 65, about 25 to 60, about 25 to 55, about 25 to 50, about 25 to 45, about 25 to 40, about 25 to 35, about 25 to 30, about 30 to 100, about 30 to 95, about 30 to 90, about 30 to 85, about 30 to 80, about 30 to 75, about 30 to 70, about 30 to 65, about 30 to 60, about 30 to 55, about 30 to 50, about 30 to 45, about 30 to 40, about 30 to 35, about 35 to 100, about 35 to 95, about 35 to 90, about 35 to 85, about 35 to 80, about 35 to 75, about 35 to 70, about 35 to 65, about 35 to 60, about 35 to 55, about 35 to 50, about 35 to 45, about 35 to 40, about 40 to 100, about 40 to 95, about 40 to 90, about 40 to 85, about 40 to 80, about 40 to 75, about 40 to 70, about 40 to 65, about 40 to 60, about 40 to 55, about 40 to 50, about 40 to 45, about 45 to 100, about 45 to 95, about 45 to 90, about 45 to 85, about 45 to 80, about 45 to 75, about 45 to 70, about 45 to 65, about 45 to 60, about 45 to 55, about 45 to 50, about 50 to 100, about 50 to 95, about 50 to 90, about 50 to 85, about 50 to 80, about 50 to 75, about 50 to 70, about 50 to 65, about 50 to 60, about 50 to 55, about 55 to 100, about 55 to 95, about 55 to 90, about 55 to 85, about 55 to 80, about 55 to 75, about 55 to 70, about 55 to 65, about 55 to 60, about 60 to 100, about 60 to 95, about 60 to 90, about 60 to 85, about 60 to 80, about 60 to 75, about 60 to 70, about 60 to 65, about 65 to 100, about 65 to 95, about 65 to 90, about 65 to 85, about 65 to 80, about 65 to 75, about 65 to 70, about 70 to 100, about 70 to 95, about 70 to 90, about 70 to 85, about 70 to 80, about 70 to 75, about 75 to 100, about 75 to 95, about 75 to 90, about 75 to 85, about 75 to 80, about 80 to 100, about 80 to 95, about 80 to 90, about 80 to 85, about 85 to 100, about 85 to 95, about 85 to 90, about 90 to 100, about 90 to 95, or 95 to 100 weeks

[0176] In some embodiments, the microbial compositions of the present disclosure are shelf stable at refrigeration temperatures (35-40° F.), at room temperature (68-72° F.), between 50-77° F., between −23-35° F., between 70-100° F., or between 101-213° F. for a period of 1 to 100, 1 to 95, 1 to 90, 1 to 85, 1 to 80, 1 to 75, 1 to 70, 1 to 65, 1 to 60, 1 to 55, 1 to 50, 1 to 45, 1 to 40, 1 to 35, 1 to 30, 1 to 25, 1 to 20, 1 to 15, 1 to 10, 1 to 5, 5 to 100, 5 to 95, 5 to 90, 5 to 85, to 80, 5 to 75, 5 to 70, 5 to 65, 5 to 60, 5 to 55, 5 to 50, 5 to 45, 5 to 40, 5 to 35, 5 to 30, 5 to 25, 5 to 20, 5 to 15, 5 to 10, 10 to 100, 10 to 95, 10 to 90, 10 to 85, 10 to 80, 10 to 75, 10 to 70, to 65, 10 to 60, 10 to 55, 10 to 50, 10 to 45, 10 to 40, 10 to 35, 10 to 30, 10 to 25, 10 to 20, 10 to 15, 15 to 100, 15 to 95, 15 to 90, 15 to 85, 15 to 80, 15 to 75, 15 to 70, 15 to 65, 15 to 60, to 55, 15 to 50, 15 to 45, 15 to 40, 15 to 35, 15 to 30, 15 to 25, 15 to 20, 20 to 100, 20 to 95, to 90, 20 to 85, 20 to 80, 20 to 75, 20 to 70, 20 to 65, 20 to 60, 20 to 55, 20 to 50, 20 to 45, 20 to 40, 20 to 35, 20 to 30, 20 to 25, 25 to 100, 25 to 95, 25 to 90, 25 to 85, 25 to 80, 25 to 75, to 70, 25 to 65, 25 to 60, 25 to 55, 25 to 50, 25 to 45, 25 to 40, 25 to 35, 25 to 30, 30 to 100, to 95, 30 to 90, 30 to 85, 30 to 80, 30 to 75, 30 to 70, 30 to 65, 30 to 60, 30 to 55, 30 to 50, 30 to 45, 30 to 40, 30 to 35, 35 to 100, 35 to 95, 35 to 90, 35 to 85, 35 to 80, 35 to 75, 35 to 70, to 65, 35 to 60, 35 to 55, 35 to 50, 35 to 45, 35 to 40, 40 to 100, 40 to 95, 40 to 90, 40 to 85, to 80, 40 to 75, 40 to 70, 40 to 65, 40 to 60, 40 to 55, 40 to 50, 40 to 45, 45 to 100, 45 to 95, to 90, 45 to 85, 45 to 80, 45 to 75, 45 to 70, 45 to 65, 45 to 60, 45 to 55, 45 to 50, 50 to 100, to 95, 50 to 90, 50 to 85, 50 to 80, 50 to 75, 50 to 70, 50 to 65, 50 to 60, 50 to 55, 55 to 100, to 95, 55 to 90, 55 to 85, 55 to 80, 55 to 75, 55 to 70, 55 to 65, 55 to 60, 60 to 100, 60 to 95, to 90, 60 to 85, 60 to 80, 60 to 75, 60 to 70, 60 to 65, 65 to 100, 65 to 95, 65 to 90, 65 to 85, 65 to 80, 65 to 75, 65 to 70, 70 to 100, 70 to 95, 70 to 90, 70 to 85, 70 to 80, 70 to 75, 75 to 100, 75 to 95, 75 to 90, 75 to 85, 75 to 80, 80 to 100, 80 to 95, 80 to 90, 80 to 85, 85 to 100, 85 to 95, 85 to 90, 90 to 100, 90 to 95, or 95 to 100 weeks.

[0177] In some embodiments, the microbial compositions of the present disclosure are shelf stable at refrigeration temperatures (35-40° F.), at room temperature (68-72° F.), between 50-77° F., between −23-35° F., between 70-100° F., or between 101-213° F. for a period of about 1 to 36, about 1 to 34, about 1 to 32, about 1 to 30, about 1 to 28, about 1 to 26, about 1 to 24, about 1 to 22, about 1 to 20, about 1 to 18, about 1 to 16, about 1 to 14, about 1 to 12, about 1 to 10, about 1 to 8, about 1 to 6, about 1 one 4, about 1 to 2, about 4 to 36, about 4 to 34, about 4 to 32, about 4 to 30, about 4 to 28, about 4 to 26, about 4 to 24, about 4 to 22, about 4 to 20, about 4 to 18, about 4 to 16, about 4 to 14, about 4 to 12, about 4 to 10, about 4 to 8, about 4 to 6, about 6 to 36, about 6 to 34, about 6 to 32, about 6 to 30, about 6 to 28, about 6 to 26, about 6 to 24, about 6 to 22, about 6 to 20, about 6 to 18, about 6 to 16, about 6 to 14, about 6 to 12, about 6 to 10, about 6 to 8, about 8 to 36, about 8 to 34, about 8 to 32, about 8 to 30, about 8 to 28, about 8 to 26, about 8 to 24, about 8 to 22, about 8 to 20, about 8 to 18, about 8 to 16, about 8 to 14, about 8 to 12, about 8 to 10, about 10 to 36, about 10 to 34, about 10 to 32, about 10 to 30, about 10 to 28, about 10 to 26, about 10 to 24, about 10 to 22, about 10 to 20, about 10 to 18, about 10 to 16, about 10 to 14, about 10 to 12, about 12 to 36, about 12 to 34, about 12 to 32, about 12 to 30, about 12 to 28, about 12 to 26, about 12 to 24, about 12 to 22, about 12 to 20, about 12 to 18, about 12 to 16, about 12 to 14, about 14 to 36, about 14 to 34, about 14 to 32, about 14 to 30, about 14 to 28, about 14 to 26, about 14 to 24, about 14 to 22, about 14 to 20, about 14 to 18, about 14 to 16, about 16 to 36, about 16 to 34, about 16 to 32, about 16 to 30, about 16 to 28, about 16 to 26, about 16 to 24, about 16 to 22, about 16 to 20, about 16 to 18, about 18 to 36, about 18 to 34, about 18 to 32, about 18 to 30, about 18 to 28, about 18 to 26, about 18 to 24, about 18 to 22, about 18 to 20, about 20 to 36, about 20 to 34, about 20 to 32, about 20 to 30, about 20 to 28, about 20 to 26, about 20 to 24, about 20 to 22, about 22 to 36, about 22 to 34, about 22 to 32, about 22 to 30, about 22 to 28, about 22 to 26, about 22 to 24, about 24 to 36, about 24 to 34, about 24 to 32, about 24 to 30, about 24 to 28, about 24 to 26, about 26 to 36, about 26 to 34, about 26 to 32, about 26 to 30, about 26 to 28, about 28 to 36, about 28 to 34, about 28 to 32, about 28 to 30, about 30 to 36, about 30 to 34, about 30 to 32, about 32 to 36, about 32 to 34, or about 34 to 36 months.

[0178] In some embodiments, the microbial compositions of the present disclosure are shelf stable at refrigeration temperatures (35-40° F.), at room temperature (68-72° F.), between 50-77° F., between −23-35° F., between 70-100° F., or between 101-213° F. for a period of 1 to 36 1 to 34 1 to 32 1 to 30 1 to 28 1 to 26 1 to 24 1 to 22 1 to 20 1 to 18 1 to 16 1 to 14 1 to 12 1 to 10 1 to 8 1 to 6 1 one 4 1 to 2 4 to 36 4 to 34 4 to 32 4 to 30 4 to 28 4 to 26 4 to 24 4 to 22 4 to 20 4 to 18 4 to 16 4 to 14 4 to 12 4 to 10 4 to 8 4 to 6 6 to 36 6 to 34 6 to 32 6 to 30 6 to 28 6 to 26 6 to 24 6 to 22 6 to 20 6 to 18 6 to 16 6 to 14 6 to 12 6 to 10 6 to 8 8 to 36 8 to 34 8 to 32 8 to 30 8 to 28 8 to 26 8 to 24 8 to 22 8 to 20 8 to 18 8 to 16 8 to 14 8 to 12 8 to 10 10 to 36 10 to 34 10 to 32 10 to 30 10 to 28 10 to 26 10 to 24 10 to 22 10 to 20 10 to 18 10 to 16 10 to 14 10 to 12 12 to 36 12 to 34 12 to 32 12 to 30 12 to 28 12 to 26 12 to 24 12 to 22 12 to 20 12 to 18 12 to 16 12 to 14 14 to 36 14 to 34 14 to 32 14 to 30 14 to 28 14 to 26 14 to 24 14 to 22 14 to 20 14 to 18 14 to 16 16 to 36 16 to 34 16 to 32 16 to 30 16 to 28 16 to 26 16 to 24 16 to 22 16 to 20 16 to 18 18 to 36 18 to 34 18 to 32 18 to 30 18 to 28 18 to 26 18 to 24 18 to 22 18 to 20 20 to 36 20 to 34 20 to 32 20 to 30 20 to 28 20 to 26 20 to 24 20 to 22 22 to 36 22 to 34 22 to 32 22 to 30 22 to 28 22 to 26 22 to 24 24 to 36 24 to 34 24 to 32 24 to 30 24 to 28 24 to 26 26 to 36 26 to 34 26 to 32 26 to 30 26 to 28 28 to 36 28 to 34 28 to 32 28 to 30 30 to 36 30 to 34 30 to 32 32 to 36 32 to 34, or about 34 to 36.

[0179] In some embodiments, the microbial compositions of the present disclosure are shelf stable at any of the disclosed temperatures and/or temperature ranges and spans of time at a relative humidity of at least 1, 2, 3, 4, 5, 6, 7, 8, 9, 10, 11, 12, 13, 14, 15, 16, 17, 18, 19, 20, 21, 22, 23, 24, 25, 26, 27, 28, 29, 30, 31, 32, 33, 34, 35, 36, 37, 38, 39, 40, 41, 42, 43, 44, 45, 46, 47, 48, 49, 50, 51, 52, 53, 54, 55, 56, 57, 58, 59, 60, 61, 62, 63, 64, 65, 66, 67, 68, 69, 70, 71, 72, 73, 74, 75, 76, 77, 78, 79, 80, 81, 82, 83, 84, 85, 86, 87, 88, 89, 90, 91, 92, 93, 94, 95, 96, 97, or 98%.

### Encapsulated Compositions

[0180] In some embodiments, the microbes or microbial compositions of the disclosure are encapsulated in an encapsulating composition. An encapsulating composition protects the microbes from external stressors prior to entering the gastrointestinal tract of ungulates. Encapsulating compositions further create an environment that may be beneficial to the microbes, such as minimizing the oxidative stresses of an aerobic environment on anaerobic microbes. See Kalsta et al. (U.S. Pat. No. 5,104,662A), Ford (U.S. Pat. No. 5,733,568A), and Mosbach and Nilsson (U.S. Pat. No. 4,647,536A) for encapsulation compositions of microbes, and methods of encapsulating microbes.

[0181] In one embodiment, the encapsulating composition comprises microcapsules having a multiplicity of liquid cores encapsulated in a solid shell material. For purposes of the disclosure, a “multiplicity” of cores is defined as two or more.

[0182] A first category of useful fusible shell materials is that of normally solid fats, including fats which are already of suitable hardness and animal or vegetable fats and oils which are hydrogenated until their melting points are sufficiently high to serve the purposes of the present disclosure. Depending on the desired process and storage temperatures and the specific material selected, a particular fat can be either a normally solid or normally liquid material. The terms “normally solid” and “normally liquid” as used herein refer to the state of a material at desired temperatures for storing the resulting microcapsules. Since fats and hydrogenated oils do not, strictly speaking, have melting points, the term “melting point” is used herein to describe the minimum temperature at which the fusible material becomes sufficiently softened or liquid to be successfully emulsified and spray cooled, thus roughly corresponding to the maximum temperature at which the shell material has sufficient integrity to prevent release of the choline cores. “Melting point” is similarly defined herein for other materials which do not have a sharp melting point.

[0183] Specific examples of fats and oils useful herein (some of which require hardening) are as follows: animal oils and fats, such as beef tallow, mutton tallow, lamb tallow, lard or pork fat, fish oil, and sperm oil; vegetable oils, such as canola oil, cottonseed oil, peanut oil, corn oil, olive oil, soybean oil, sunflower oil, safflower oil, coconut oil, palm oil, linseed oil, tung oil, and castor oil; fatty acid monoglycerides and diglycerides; free fatty acids, such as stearic acid, palmitic acid, and oleic acid; and mixtures thereof. The above listing of oils and fats is not meant to be exhaustive, but only exemplary.

[0184] Specific examples of fatty acids include linoleic acid, y-linoleic acid, dihomo-y-linolenic acid, arachidonic acid, docosatetraenoic acid, vaccenic acid, nervonic acid, mead acid, erucic acid, gondoic acid, elaidic acid, oleic acid, palitoleic acid, stearidonic acid, eicosapentaenoic acid, valeric acid, caproic acid, enanthic acid, caprylic acid, pelargonic acid, capric acid, undecylic acid, lauric acid, tridecylic acid, myristic acid, pentadecylic acid, palmitic acid, margaric acid, stearic acid, nonadecyclic acid, arachidic acid, heneicosylic acid, behenic acid, tricosylic acid, lignoceric acid, pentacosylic acid, cerotic acid, heptacosylic acid, montanic acid, nonacosylic acid, melissic acid, henatriacontylic acid, lacceroic acid, psyllic acid, geddic acid, ceroplastic acid, hexatriacontylic acid, heptatriacontanoic acid, and octatriacontanoic acid.

[0185] Another category of fusible materials useful as encapsulating shell materials is that of waxes. Representative waxes contemplated for use herein are as follows: animal waxes, such as beeswax, lanolin, shell wax, and Chinese insect wax; vegetable waxes, such as carnauba, candelilla, bayberry, and sugar cane; mineral waxes, such as paraffin, microcrystalline petroleum, ozocerite, ceresin, and montan; synthetic waxes, such as low molecular weight polyolefin (e.g., CARBOWAX), and polyol ether-esters (e.g., sorbitol); Fischer-Tropsch process synthetic waxes; and mixtures thereof. Water-soluble waxes, such as CARBOWAX and sorbitol, are not contemplated herein if the core is aqueous.

[0186] Still other fusible compounds useful herein are fusible natural resins, such as rosin, balsam, shellac, and mixtures thereof.

[0187] Various adjunct materials are contemplated for incorporation in fusible materials according to the present disclosure. For example, antioxidants, light stabilizers, dyes and lakes, flavors, essential oils, anti-caking agents, fillers, pH stabilizers, sugars (monosaccharides, disaccharides, trisaccharides, and polysaccharides) and the like can be incorporated in the fusible material in amounts which do not diminish its utility for the present disclosure.

[0188] The core material contemplated herein constitutes from about 0.1% to about 50%, about 1% to about 35%. or about 5% to about 30% by weight of the microcapsules. In some embodiments, the core material contemplated herein constitutes no more than about 30% by weight of the microcapsules. In some embodiments, the core material contemplated herein constitutes about 5% by weight of the microcapsules. The core material is contemplated as either a liquid or solid at contemplated storage temperatures of the microcapsules.

[0189] The cores may include other additives well-known in the pharmaceutical art, including edible sugars, such as sucrose, glucose, maltose, fructose, lactose, cellobiose, monosaccharides, disaccharides, trisaccharides, polysaccharides, and mixtures thereof; artificial sweeteners, such as aspartame, saccharin, cyclamate salts, and mixtures thereof; edible acids, such as acetic acid (vinegar), citric acid, ascorbic acid, tartaric acid, and mixtures thereof; edible starches, such as corn starch; hydrolyzed vegetable protein; water-soluble vitamins, such as Vitamin C; water-soluble medicaments; water-soluble nutritional materials, such as ferrous sulfate; flavors; salts; monosodium glutamate; antimicrobial agents, such as sorbic acid; antimycotic agents, such as potassium sorbate, sorbic acid, sodium benzoate, and benzoic acid; food grade pigments and dyes; and mixtures thereof. Other potentially useful supplemental core materials will be apparent to those of ordinary skill in the art.

[0190] Emulsifying agents may be employed to assist in the formation of stable emulsions. Representative emulsifying agents include glyceryl monostearate, polysorbate esters, ethoxylated mono-and diglycerides, and mixtures thereof.

[0191] For ease of processing, and particularly to enable the successful formation of a reasonably stable emulsion, the viscosities of the core material and the shell material should be similar at the temperature at which the emulsion is formed. In particular, the ratio of the viscosity of the shell to the viscosity of the core, expressed in centipoise or comparable units, and both measured at the temperature of the emulsion, should be from about 22:1 to about 1:1, desirably from about 8:1 to about 1:1, and preferably from about 3:1 to about 1:1. A ratio of 1:1 would be ideal, but a viscosity ratio within the recited ranges is useful.

[0192] Encapsulating compositions are not limited to microcapsule compositions as disclosed above. In some embodiments encapsulating compositions encapsulate the microbial compositions in an adhesive polymer that can be natural or synthetic without toxic effect. In some embodiments, the encapsulating composition may be a matrix selected from sugar matrix, gelatin matrix, polymer matrix, silica matrix, starch matrix, foam matrix, etc. In some embodiments, the encapsulating composition may be selected from polyvinyl acetates; polyvinyl acetate copolymers; ethylene vinyl acetate (EVA) copolymers; polyvinyl alcohols; polyvinyl alcohol copolymers; celluloses, including ethylcelluloses, methylcelluloses, hydroxymethylcelluloses, hydroxypropylcelluloses and carboxymethylcellulose; polyvinylpyrolidones; polysaccharides, including starch, modified starch, dextrins, maltodextrins, alginate and chitosans; monosaccharides; fats; fatty acids, including oils; proteins, including gelatin and zeins; gum arabics; shellacs; vinylidene chloride and vinylidene chloride copolymers; calcium lignosulfonates; acrylic copolymers; polyvinylacrylates; polyethylene oxide; acrylamide polymers and copolymers; polyhydroxyethyl acrylate, methylacrylamide monomers; and polychloroprene.

[0193] In some embodiments, the encapsulating shell of the present disclosure can be up to 10 μm, 20 μm, 30 μm, 40 μm, 50 μm, 60 μm, 70 μm, 80 μm, 90 μm, 100 μm, 110 μm, 120 μm, 130 μm, 140 μm, 150 μm, 160 μm, 170 μm, 180 μm, 190 μm, 200 μm, 210 μm, 220 μm, 230 μm, 240 μm, 250 μm, 260 μm, 270 μm, 280 μm, 290 μm, 300 μm, 310 μm, 320 μm, 330 μm, 340 μm, 350 μm, 360 μm, 370 μm, 380 μm, 390 μm, 400 μm, 410 μm, 420 μm, 430 μm, 440 μm, 450 μm, 460 μm, 470 μm, 480 μm, 490 μm, 500 μm, 510 μm, 520 μm, 530 μm, 540 μm, 550 μm, 560 μm, 570 μm, 580 μm, 590 μm, 600 μm, 610 μm, 620 μm, 630 μm, 640 μm, 650 μm, 660 μm, 670 μm, 680 μm, 690 μm, 700 μm, 710 μm, 720 μm, 730 μm, 740 μm, 750 μm, 760 μm, 770 μm, 780 μm, 790 μm, 800 μm, 810 μm, 820 μm, 830 μm, 840 μm, 850 μm, 860 μm, 870 μm, 880 μm, 890 μm, 900 μm, 910 μm, 920 μm, 930 μm, 940 μm, 950 μm, 960 μm, 970 μm, 980 μm, 990 μm, 1000 μm, 1010 μm, 1020 μm, 1030 μm, 1040 μm, 1050 μm, 1060 μm, 1070 μm, 1080 μm, 1090 μm, 1100 μm, 1110 μm, 1120 μm, 1130 μm, 1140 μm, 1150 μm, 1160 μm, 1170 μm, 1180 μm, 1190 μm, 1200 μm, 1210 μm, 1220 μm, 1230 μm, 1240 μm, 1250 μm, 1260 μm, 1270 μm, 1280 μm, 1290 μm, 1300 μm, 1310 μm, 1320 μm, 1330 μm, 1340 μm, 1350 μm, 1360 μm, 1370 μm, 1380 μm, 1390 μm, 1400 μm, 1410 μm, 1420 μm, 1430 μm, 1440 μm, 1450 μm, 1460 μm, 1470 μm, 1480 μm, 1490 μm, 1500 μm, 1510 μm, 1520 μm, 1530 μm, 1540 μm, 1550 μm, 1560 μm, 1570 μm, 1580 μm, 1590 μm, 1600 μm, 1610 μm, 1620 μm, 1630 μm, 1640 μm, 1650 μm, 1660 μm, 1670 μm, 1680 μm, 1690 μm, 1700 μm, 1710 μm, 1720 μm, 1730 μm, 1740 μm, 1750 μm, 1760 μm, 1770 μm, 1780 μm, 1790 μm, 1800 μm, 1810 μm, 1820 μm, 1830 μm, 1840 μm, 1850 μm, 1860 μm, 1870 μm, 1880 μm, 1890 μm, 1900 μm, 1910 μm, 1920 μm, 1930 μm, 1940 μm, 1950 μm, 1960 μm, 1970 μm, 1980 μm, 1990 μm, 2000 μm, 2010 μm, 2020 μm, 2030 μm, 2040 μm, 2050 μm, 2060 μm, 2070 μm, 2080 μm, 2090 μm, 2100 μm, 2110 μm, 2120 μm, 2130 μm, 2140 μm, 2150 μm, 2160 μm, 2170 μm, 2180 μm, 2190 μm, 2200 μm, 2210 μm, 2220 μm, 2230 μm, 2240 μm, 2250 μm, 2260 μm, 2270 μm, 2280 μm, 2290 μm, 2300 μm, 2310 μm, 2320 μm, 2330 μm, 2340 μm, 2350 μm, 2360 μm, 2370 μm, 2380 μm, 2390 μm, 2400 μm, 2410 μm, 2420 μm, 2430 μm, 2440 μm, 2450 μm, 2460 μm, 2470 μm, 2480 μm, 2490 μm, 2500 μm, 2510 μm, 2520 μm, 2530 μm, 2540 μm, 2550 μm, 2560 μm, 2570 μm, 2580 μm, 2590 μm, 2600 μm, 2610 μm, 2620 μm, 2630 μm, 2640 μm, 2650 μm, 2660 μm, 2670 μm, 2680 μm, 2690 μm, 2700 μm, 2710 μm, 2720 μm, 2730 μm, 2740 μm, 2750 μm, 2760 μm, 2770 μm, 2780 μm, 2790 μm, 2800 μm, 2810 μm, 2820 μm, 2830 μm, 2840 μm, 2850 μm, 2860 μm, 2870 μm, 2880 μm, 2890 μm, 2900 μm, 2910 μm, 2920 μm, 2930 μm, 2940 μm, 2950 μm, 2960 μm, 2970 μm, 2980 μm, 2990 μm, or 3000 μm thick.

### Animal Feed

[0194] In some embodiments, compositions of the present disclosure are mixed with animal feed. In some embodiments, animal feed may be present in various forms such as pellets, capsules, granulated, powdered, liquid, or semi-liquid.

[0195] In some embodiments, compositions of the present disclosure are mixed into the premix at the feed mill (e.g., Carghill or Western Millin), alone as a standalone premix, and/or alongside other feed additives such as MONENSIN, vitamins, etc. In one embodiment, the compositions of the present disclosure are mixed into the feed at the feed mill. In another embodiment, compositions of the present disclosure are mixed into the feed itself.

[0196] In some embodiments, feed of the present disclosure may be supplemented with water, premix or premixes, forage, fodder, beans (e.g., whole, cracked, or ground), grains (e.g., whole, cracked, or ground), bean- or grain-based oils, bean-or grain-based meals, bean- or grain-based haylage or silage, bean-or grain-based syrups, fatty acids, sugar alcohols (e.g., polyhydric alcohols), commercially available formula feeds, and mixtures thereof.

[0197] In some embodiments, forage encompasses hay, haylage, and silage. In some embodiments, hays include grass hays (e.g., sudangrass, orchardgrass, or the like), alfalfa hay, and clover hay. In some embodiments, haylages include grass haylages, sorghum haylage, and alfalfa haylage. In some embodiments, silages include maize, oat, wheat, alfalfa, clover, and the like.

[0198] In some embodiments, premix or premixes may be utilized in the feed. Premixes may comprise micro-ingredients such as vitamins, minerals, amino acids; chemical preservatives; pharmaceutical compositions such as antibiotics and other medicaments; fermentation products, and other ingredients. In some embodiments, premixes are blended into the feed.

[0199] In some embodiments, the feed may include feed concentrates such as soybean hulls, sugar beet pulp, molasses, high protein soybean meal, ground corn, shelled corn, wheat midds, distiller grain, cottonseed hulls, rumen-bypass protein, rumen-bypass fat, and grease. See Luhman (U.S. Publication US20150216817A1), Anderson et al. (U.S. Pat. No. 3,484,243) and Porter and Luhman (U.S. Pat. No. 9,179,694B2) for animal feed and animal feed supplements capable of use in the present compositions and methods.

[0200] In some embodiments, feed occurs as a compound, which includes, in a mixed composition capable of meeting the basic dietary needs, the feed itself, vitamins, minerals, amino acids, and other necessary components. Compound feed may further comprise premixes.

[0201] In some embodiments, microbial compositions of the present disclosure may be mixed with animal feed, premix, and/or compound feed. Individual components of the animal feed may be mixed with the microbial compositions prior to feeding to ruminants. The microbial compositions of the present disclosure may be applied into or on a premix, into or on a feed, and/or into or on a compound feed.

### Administration of Microbial Compositions

[0202] In some embodiments, the microbial compositions of the present disclosure are administered to ruminants. In some embodiments, the microbial compositions of the present disclosure are administered to cattle such as steers, bulls, cows, heifers, or calves. In some embodiments, the microbial compositions of the present disclosure are administered to cows. In some embodiments, the microbial compositions of the present disclosure are administered to calves.

[0203] In some embodiments, the microbial compositions of the present disclosure are administered to ruminants via the oral route. In some embodiments the microbial compositions are administered via a direct injection route into the gastrointestinal tract. In further embodiments, the direct injection administration delivers the microbial compositions directly to the rumen. In some embodiments, the microbial compositions of the present disclosure are administered to animals anally. In further embodiments, anal administration is in the form of an inserted suppository.

[0204] In some embodiments, the microbial composition is administered in a dose comprise a total of, or at least, 1 mL, 2 mL, 3 mL, 4 mL, 5 mL, 6 mL, 7 mL, 8 mL, 9 mL, 10 mL, 11 mL, 12 mL, 13 mL, 14 mL, 15 mL, 16 mL, 17 mL, 18 mL, 19 mL, 20 mL, 21 mL, 22 mL, 23 mL, 24 mL, 25 mL, 26 mL, 27 mL, 28 mL, 29 mL, 30 mL, 31 mL, 32 mL, 33 mL, 34 mL, 35 mL, 36 mL, 37 mL, 38 mL, 39 mL, 40 mL, 41mL, 42 mL, 43 mL, 44 mL, 45 mL, 46 mL, 47 mL, 48 mL, 49 mL, 50 mL, 60 mL, 70 mL, 80 mL, 90 mL, 100 mL, 200 mL, 300 mL, 400 mL, 500 mL, 600 mL, 700 mL, 800 mL, 900 mL, or 1,000 mL.

[0205] In some embodiments, the microbial composition is administered in a dose comprising a total of, or at least, 10¹⁸, 10¹⁷, 10¹⁶, 10¹⁵, 10¹⁴, 10¹³, 10¹², 10¹¹, 10¹⁰, 10⁹, 10⁸, 10⁷, 10⁶10⁵, 10⁴, 10³, or 10² microbial cells.

[0206] In some embodiments, the microbial compositions are mixed with feed, and the administration occurs through the ingestion of the microbial compositions along with the feed. In some embodiments, the dose of the microbial composition is administered such that there exists 10² to 10¹², 10³to 10¹², 10⁴ to 10¹², 10⁵ to 10¹², 10₆ to 10¹², 10⁷ to 10¹², 10⁸ to 10¹², 10⁹ to 10¹², 10¹⁰ to 10¹², 10¹¹ to 10¹², 10² to 10¹¹, 10³ to 10¹¹, 10⁴ to 10¹¹, 10⁵ to 10¹¹, 10⁶ to 10¹¹, 10⁷ to 10¹¹, 10⁸ to 10¹¹, 10⁹ to 10¹¹, 10¹⁰ to 10¹¹, 10² 10¹⁰, 10³ to 10¹⁰, 10⁴ to 10¹⁰, 10⁵ to 10¹⁰, 10⁶ to 10¹⁰, 10⁷ to 10¹⁰, 10⁸ to 10¹⁰, 10⁹ to 10¹⁰, 10² to 10⁹, 10³ to 10⁹, 10⁴ to 10⁹, 10⁵ to 10⁹, 10⁶ to 10⁹, 10⁷ to 10⁹, 10⁸ to 10⁹, 10² to 10⁸, 10³ to 10⁸, 10⁴ to 10⁸, 10⁵ to 10⁸, 10⁶ to 10⁸, 10⁷ to 10⁸, 10² to 10⁷, 10³ to 10⁷, 10⁴ to 10⁷, 10⁵ to 10⁷, 10⁶ to 10⁷, 10² to 10⁶, 10³ to 10⁶, 10⁴ to 10⁶, 10⁵ to 10⁶, 10² to 10⁵, 10³ to 10⁵, 10⁴ to 10⁵, 10² to 10⁴, 10³ to 10⁴, 10² to 10³, 10¹², 10¹¹, 10¹⁰, 10⁹, 10⁸, 10⁷, 10⁶, 10⁵, 10⁴, 10³, or 10² total microbial cells per gram or milliliter of the composition.

[0207] In some embodiments, the microbial compositions are mixed with feed, and the administration occurs through the ingestion of the microbial compositions along with the feed. In some embodiments, the dose of the microbial composition is administered such that there exists 10² to 10¹², 10³to 10¹², 10⁴ to 10¹², 10⁵ to 10¹², 10₆ to 10¹², 10⁷ to 10¹², 10⁸ to 10¹², 10⁹ to 10¹², 10¹⁰ to 10¹², 10¹¹ to 10¹², 10² to 10¹¹, 10³ to 10¹¹, 10⁴ to 10¹¹, 10⁵ to 10¹¹, 10⁶ to 10¹¹, 10⁷ to 10¹¹, 10⁸ to 10¹¹, 10⁹ to 10¹¹, 10¹⁰ to 10¹¹, 10² 10¹⁰, 10³ to 10¹⁰, 10⁴ to 10¹⁰, 10⁵ to 10¹⁰, 10⁶ to 10¹⁰, 10⁷ to 10¹⁰, 10⁸ to 10¹⁰, 10⁹ to 10¹⁰, 10² to 10⁹, 10³ to 10⁹, 10⁴ to 10⁹, 10⁵ to 10⁹, 10⁶ to 10⁹, 10⁷ to 10⁹, 10⁸ to 10⁹, 10² to 10⁸, 10³ to 10⁸, 10⁴ to 10⁸, 10⁵ to 10⁸, 10⁶ to 10⁸, 10⁷ to 10⁸, 10² to 10⁷, 10³ to 10⁷, 10⁴ to 10⁷, 10⁵ to 10⁷, 10⁶ to 10⁷, 10² to 10⁶, 10³ to 10⁶, 10⁴ to 10⁶, 10⁵ to 10⁶, 10² to 10⁵, 10³ to 10⁵, 10⁴ to 10⁵, 10² to 10⁴, 10³ to 10⁴, 10² to 10³, 10¹², 10¹¹, 10¹⁰, 10⁹, 10⁸, 10⁷, 10⁶, 10⁵, 10⁴, 10³, or 10² colony forming units per gram or milliliter of the composition.

[0208] In some embodiments, the administered dose of the microbial composition comprises 10² to 10¹⁸, 10³ to 10¹⁸, 10⁴ to 10¹⁸, 10⁵ to 10¹⁸, 10⁶ to 10¹⁸, 10⁷ to 10¹⁸, 10⁸ to 10¹⁸, 10⁹ to 10¹⁸, 10¹⁰ to 10¹⁸, 10¹¹ to 10¹⁸, 10¹² to 10¹⁸, 10¹³ to 10¹⁸, 10¹⁴ to 10¹⁸, 10¹⁵ to 10¹⁸, 10¹⁶ to 10¹⁸, 10¹⁷ to 10¹⁸, 10² to 10¹², 10³ to 10¹², 10⁴ to 10¹², 10⁵ to 10¹², 10⁶ to 10¹², 10⁷ to 10¹², 10⁸ to 10¹², 10⁹ to 10¹², 10¹⁰ to 10¹², 10¹¹ to 10¹², 10² to 10¹¹, 10³ to 10¹¹, 10⁴ to 10¹¹, 10⁵ to 10¹¹, 10⁶ to 10¹¹, 10⁷ to 10¹¹, 10⁸ to 10¹¹, 10⁹ to 10¹¹, 10¹⁰ to 10¹¹, 10² to 10¹⁰, 10³ to 10¹⁰, 10⁴ to 10¹⁰, 10⁵ to 10¹⁰, 10⁶ to 10¹⁰, 10⁷ to 10¹⁰, 10⁸ to 10¹⁰, 10⁹ to 10¹⁰, 10² to b 10⁹, 10³ to 10⁹, 10⁴ to 10⁹, 10⁵ to 10⁹, 10⁶ to 10⁹, 10⁷ to 10⁹, 10⁸ to 10⁹, 10² to 10⁸, 10³ to 10⁸, 10⁴ to 10⁸, 10⁵ to 108, 10⁶ to 10⁸, 10⁷ to 10⁸, 10²to 10⁷, 10³ to 10⁷, 10⁴ to 10⁷, 10⁵ to 10⁷, 10⁶ to 10⁷, 10² to 10⁶, 10³ to 10⁶, 10⁴ to 10⁶, 10⁵ to 10⁶, 10² to 10⁵, 10³ to 10⁵, 10⁴ to 10⁵, 10² to 10⁴, 10³ to 10⁴, 10² to 10³, 10¹⁸, 10¹⁷, 10¹⁶, 10¹⁵, 10¹⁴, 10¹³, 10¹², 10¹¹, 10¹⁰, 10⁹, 10⁸, 10⁷, 10⁶, 10⁵, 10⁴, 10³, or 10² total microbial cells.

[0209] In some embodiments, the administered dose of each microbe in the microbial composition is at least about, at least about 10³ colony forming units (CFU), at least about 10⁴ CFU, at least about 10⁵ CFU, at least about 10⁶ CFU, at least about 107 CFU, at least about 10⁸ CFU, at least about 10⁹ CFU, at least about 10¹⁰ CFU, at least about 10¹¹ CFU, at least about 10¹² CFU, at least about 10¹³ CFU, at least about 10¹⁴ CFU, at least about 10¹⁵ CFU, at least about 10¹⁶ CFU, at least about 10¹⁷ CFU, at least about 10¹⁸ CFU, at least about 10¹⁹ CFU, or at least about 10²⁰ CFU.

[0210] In some embodiments, the composition is administered 1 or more times per day. In some aspects, the composition is administered with food each time the animal is fed. In some embodiments, the composition is administered 1 to 10, 1 to 9, 1 to 8, 1 to 7, 1 to 6, 1 to 5, 1 to 4, 1 to 3, 1 to 2, 2 to 10, 2 to 9, 2 to 8, 2 to 7, 2 to 6, 2 to 5, 2 to 4, 2 to 3, 3 to 10, 3 to 9, 3 to 8, 3 to 7, 3 to 6, 3 to 5, 3 to 4, 4 to 10, 4 to 9, 4 to 8, 4 to 7, 4 to 6, 4 to 5, 5 to 10, 5 to 9, 5 to 8, 5 to 7, 5 to 6, 6 to 10, 6 to 9, 6 to 8, 6 to 7, 7 to 10, 7 to 9, 7 to 8,8 to 10, 8 to 9, 9 to 10, 1, 2, 3, 4, 5, 6, 7, 8, 9, or 10 times per day.

[0211] In some embodiments, the microbial composition is administered 1 to 10, 1 to 9, 1 to 8, 1 to 7, 1 to 6, 1 to 5, 1 to 4, 1 to 3, 1 to 2, 2 to 10, 2 to 9, 2 to 8, 2 to 7, 2 to 6, 2 to 5, 2 to 4, 2 to 3, 3 to 10, 3 to 9, 3 to 8, 3 to 7, 3 to 6, 3 to 5, 3 to 4, 4 to 10, 4 to 9, 4 to 8, 4 to 7, 4 to 6, 4 to 5, 5 to 10, 5 to 9, 5 to 8, 5 to 7, 5 to 6, 6 to 10, 6 to 9, 6 to 8, 6 to 7, 7 to 10, 7 to 9, 7 to 8,8 to 10, 8 to 9, 9 to 10, 1, 2, 3, 4, 5, 6, 7, 8, 9, or 10 times per week.

[0212] In some embodiments, the microbial composition is administered 1 to 10, 1 to 9, 1 to 8, 1 to 7, 1 to 6, 1 to 5, 1 to 4, 1 to 3, 1 to 2, 2 to 10, 2 to 9, 2 to 8, 2 to 7, 2 to 6, 2 to 5, 2 to 4, 2 to 3, 3 to 10, 3 to 9, 3 to 8, 3 to 7, 3 to 6, 3 to 5, 3 to 4, 4 to 10, 4 to 9, 4 to 8, 4 to 7, 4 to 6, 4 to 5, 5 to 10, 5 to 9, 5 to 8, 5 to 7, 5 to 6, 6 to 10, 6 to 9, 6 to 8, 6 to 7, 7 to 10, 7 to 9, 7 to 8,8 to 10, 8 to 9, 9 to 10, 1, 2, 3, 4, 5, 6, 7, 8, 9, or 10 times per month.

[0213] In some embodiments, the microbial composition is administered 1 to 10, 1 to 9, 1 to 8, 1 to 7, 1 to 6, 1 to 5, 1 to 4, 1 to 3, 1 to 2, 2 to 10, 2 to 9, 2 to 8, 2 to 7, 2 to 6, 2 to 5, 2 to 4, 2 to 3, 3 to 10, 3 to 9, 3 to 8, 3 to 7, 3 to 6, 3 to 5, 3 to 4, 4 to 10, 4 to 9, 4 to 8, 4 to 7, 4 to 6, 4 to 5, 5 to 10, 5 to 9, 5 to 8, 5 to 7, 5 to 6, 6 to 10, 6 to 9, 6 to 8, 6 to 7, 7 to 10, 7 to 9, 7 to 8,8 to 10, 8 to 9, 9 to 10, 1, 2, 3, 4, 5, 6, 7, 8, 9, or 10 times per year.

[0214] In some embodiments, the feed can be uniformly coated with one or more layers of the microbes and/or microbial compositions disclosed herein, using conventional methods of mixing, spraying, or a combination thereof through the use of treatment application equipment that is specifically designed and manufactured to accurately, safely, and efficiently apply coatings. Such equipment uses various types of coating technology such as rotary coaters, drum coaters, fluidized bed techniques, spouted beds, rotary mists, or a combination thereof. Liquid treatments such as those of the present disclosure can be applied via either a spinning “atomizer” disk or a spray nozzle, which evenly distributes the microbial composition onto the feed as it moves though the spray pattern. In some aspects, the feed is then mixed or tumbled for an additional period of time to achieve additional treatment distribution and drying.

[0215] In some embodiments, the feed coats of the present disclosure can be up to 10 μm, 20 μm, 30 μm, 40 μm, 50 μm, 60 μm, 70 μm, 80 μm, 90 μm, 100 μm, 110 μm, 120 μm, 130 μm, 140 μm, 150 μm, 160 μm, 170 μm, 180 μm, 190 μm, 200 μm, 210 μm, 220 μm, 230 μm, 240 μm, 250 μm, 260 μm, 270 μm, 280 μm, 290 μm, 300 μm, 310 μm, 320 μm, 330 μm, 340 μm, 350 μm, 360 μm, 370 μm, 380 μm, 390 μm, 400 μm, 410 μm, 420 μm, 430 μm, 440 μm, 450 μm, 460 μm, 470 μm, 480 μm, 490 μm, 500 μm, 510 μm, 520 μm, 530 μm, 540 μm, 550 μm, 560 μm, 570 μm, 580 μm, 590 μm, 600 μm, 610 μm, 620 μm, 630 μm, 640 μm, 650 μm, 660 μm, 670 μm, 680 μm, 690 μm, 700 μm, 710 μm, 720 μm, 730 μm, 740 μm, 750 μm, 760 μm, 770 μm, 780 μm, 790 μm, 800 μm, 810 μm, 820 μm, 830 μm, 840 μm, 850 μm, 860 μm, 870 μm, 880 μm, 890 μm, 900 μm, 910 μm, 920 μm, 930 μm, 940 μm, 950 μm, 960 μm, 970 μm, 980 μm, 990 μm, 1000 μm, 1010 μm, 1020 μm, 1030 μm, 1040 μm, 1050 μm, 1060 μm, 1070 μm, 1080 μm, 1090 μm, 1100 μm, 1110 μm, 1120 μm, 1130 μm, 1140 μm, 1150 μm, 1160 μm, 1170 μm, 1180 μm, 1190 μm, 1200 μm, 1210 μm, 1220 μm, 1230 μm, 1240 μm, 1250 μm, 1260 μm, 1270 μm, 1280 μm, 1290 μm, 1300 μm, 1310 μm, 1320 μm, 1330 μm, 1340 μm, 1350 μm, 1360 μm, 1370 μm, 1380 μm, 1390 μm, 1400 μm, 1410 μm, 1420 μm, 1430 μm, 1440 μm, 1450 μm, 1460 μm, 1470 μm, 1480 μm, 1490 μm, 1500 μm, 1510 μm, 1520 μm, 1530 μm, 1540 μm, 1550 μm, 1560 μm, 1570 μm, 1580 μm, 1590 μm, 1600 μm, 1610 μm, 1620 μm, 1630 μm, 1640 μm, 1650 μm, 1660 μm, 1670 μm, 1680 μm, 1690 μm, 1700 μm, 1710 μm, 1720 μm, 1730 μm, 1740 μm, 1750 μm, 1760 μm, 1770 μm, 1780 μm, 1790 μm, 1800 μm, 1810 μm, 1820 μm, 1830 μm, 1840 μm, 1850 μm, 1860 μm, 1870 μm, 1880 μm, 1890 μm, 1900 μm, 1910 μm, 1920 μm, 1930 μm, 1940 μm, 1950 μm, 1960 μm, 1970 μm, 1980 μm, 1990 μm, 2000 μm, 2010 μm, 2020 μm, 2030 μm, 2040 μm, 2050 μm, 2060 μm, 2070 μm, 2080 μm, 2090 μm, 2100 μm, 2110 μm, 2120 μm, 2130 μm, 2140 μm, 2150 μm, 2160 μm, 2170 μm, 2180 μm, 2190 μm, 2200 μm, 2210 μm, 2220 μm, 2230 μm, 2240 μm, 2250 μm, 2260 μm, 2270 μm, 2280 μm, 2290 μm, 2300 μm, 2310 μm, 2320 μm, 2330 μm, 2340 μm, 2350 μm, 2360 μm, 2370 μm, 2380 μm, 2390 μm, 2400 μm, 2410 μm, 2420 μm, 2430 μm, 2440 μm, 2450 μm, 2460 μm, 2470 μm, 2480 μm, 2490 μm, 2500 μm, 2510 μm, 2520 μm, 2530 μm, 2540 μm, 2550 μm, 2560 μm, 2570 μm, 2580 μm, 2590 μm, 2600 μm, 2610 μm, 2620 μm, 2630 μm, 2640 μm, 2650 μm, 2660 μm, 2670 μm, 2680 μm, 2690 μm, 2700 μm, 2710 μm, 2720 μm, 2730 μm, 2740 μm, 2750 μm, 2760 μm, 2770 μm, 2780 μm, 2790 μm, 2800 μm, 2810 μm, 2820 μm, 2830 μm, 2840 μm, 2850 μm, 2860 μm, 2870 μm, 2880 μm, 2890 μm, 2900 μm, 2910 μm, 2920 μm, 2930 μm, 2940 μm, 2950 μm, 2960 μm, 2970 μm, 2980 μm, 2990 μm, or 3000 μm thick.

[0216] In some embodiments, the microbial cells can be coated freely onto any number of compositions or they can be formulated in a liquid or solid composition before being coated onto a composition. For example, a solid composition comprising the microorganisms can be prepared by mixing a solid carrier with a suspension of the spores until the solid carriers are impregnated with the spore or cell suspension. This mixture can then be dried to obtain the desired particles.

[0217] In some other embodiments, it is contemplated that the solid or liquid microbial compositions of the present disclosure further contain functional agents e.g., activated carbon, minerals, vitamins, and other agents capable of improving the quality of the products or a combination thereof.

[0218] Methods of coating and compositions in use of said methods that are known in the art can be particularly useful when they are modified by the addition of one of the embodiments of the present disclosure. Such coating methods and apparatus for their application are disclosed in, for example: U.S. Pat. Nos. 8,097,245, and 7,998,502; and PCT Pat. App. Publication Nos. WO 2008/076975, WO 2010/138522, WO 2011/094469, WO 2010/111347, and WO 2010/111565 each of which is incorporated by reference herein.

[0219] In some embodiments, the microbes or microbial consortia of the present disclosure exhibit a synergistic effect, on one or more of the traits described herein, in the presence of one or more of the microbes or consortia coming into contact with one another. The synergistic effect obtained by the taught methods can be quantified, for example, according to Colby's formula (i.e., (E)=X+Y−(X*Y/100)). See Colby, R. S., “Calculating Synergistic and Antagonistic Responses of Herbicide Combinations,” 1967. Weeds. Vol. 15, pp. 20-22, incorporated herein by reference in its entirety. Thus, “synergistic” is intended to reflect an outcome/parameter/effect that has been increased by more than an additive amount.

[0220] In some embodiments, the microbes or microbial consortia of the present disclosure may be administered via bolus. In one embodiment, a bolus (e.g., capsule containing the composition) is inserted into a bolus gun, and the bolus gun is inserted into the buccal cavity and/or esophagas of the animal, followed by the release/injection of the bolus into the animal's digestive tract. In one embodiment, the bolus gun/applicator is a BOVIKALC bolus gun/applicator. In another embodiment, the bolus gun/applicator is a QUADRICAL gun/applicator.

[0221] In some embodiments, the microbes or microbial consortia of the present disclosure may be administered via drench. In one embodiment, the drench is an oral drench. A drench administration comprises utilizing a drench kit/applicator/syringe that injects/releases a liquid comprising the microbes or microbial consortia into the buccal cavity and/or esophagas of the animal.

[0222] In some embodiments, the microbes or microbial consortia of the present disclosure may be administered in a time-released fashion. The composition may be coated in a chemical composition, or may be contained in a mechanical device or capsule that releases the microbes or microbial consortia over a period of time instead all at once. In one embodiment, the microbes or microbial consortia are administered to an animal in a time-release capsule. In one embodiment, the composition may be coated in a chemical composition, or may be contained in a mechanical device or capsul that releases the mcirobes or microbial consortia all at once a period of time hours post ingestion.

[0223] In some embodiments, the microbes or microbial consortia are administered in a time-released fashion between 1 to 5, 1 to 10, 1 to 15, 1 to 20, 1 to 24, 1 to 25, 1 to 30, 1 to 35, 1 to 40, 1 to 45, 1 to 50, 1 to 55, 1 to 60, 1 to 65, 1 to 70, 1 to 75, 1 to 80, 1 to 85, 1 to 90, 1 to 95, or 1 to 100 hours.

[0224] In some embodiments, the microbes or microbial consortia are administered in a time-released fashion between 1 to 2, 1 to 3, 1 to 4, 1 to 5, 1 to 6, 1 to 7, 1 to 8, 1 to 9, 1 to 10, 1 to 11, 1 to 12, 1 to 13, 1 to 14, 1 to 15, 1 to 16, 1 to 17, 1 to 18, 1 to 19, 1 to 20, 1 to 21, 1 to 22, 1 to 23, 1 to 24, 1 to 25, 1 to 26, 1 to 27, 1 to 28, 1 to 29, or 1 to 30 days.

### Microorganisms

[0225] As used herein the term “microorganism” should be taken broadly. It includes, but is not limited to, the two prokaryotic domains, Bacteria and Archaea, as well as eukaryotic fungi, protists, and viruses.

[0226] By way of example, the microorganisms may include species of the genera of: Clostridium, Ruminococcus, Roseburia, Hydrogenoanaerobacterium, Saccharofermentans, Papillibacter, Pelotomaculum, Butyricicoccus, Tannerella, Prevotella, Butyricimonas, Piromyces, Pichia, Candida, Vrystaatia, Orpinomyces, Neocallimastix, and Phyllosticta. The microorganisms may further include species belonging to the family of Lachnospiraceae, and the order of Saccharomycesles. In some embodiments, the microorganisms may include species of any genera disclosed herein.

[0227] In certain embodiments, the microorganism is unculturable. This should be taken to mean that the microorganism is not known to be culturable or is difficult to culture using methods known to one skilled in the art.

[0228] In one embodiment, the microbes are obtained from animals (e.g., mammals, reptiles, birds, and the like), soil (e.g., rhizosphere), air, water (e.g., marine, freshwater, wastewater sludge), sediment, oil, plants (e.g., roots, leaves, stems), agricultural products, and extreme environments (e.g., acid mine drainage or hydrothermal systems). In a further embodiment, microbes obtained from marine or freshwater environments such as an ocean, river, or lake. In a further embodiment, the microbes can be from the surface of the body of water, or any depth of the body of water (e.g., a deep sea sample).

[0229] The microorganisms of the disclosure may be isolated in substantially pure or mixed cultures. They may be concentrated, diluted, or provided in the natural concentrations in which they are found in the source material. For example, microorganisms from saline sediments may be isolated for use in this disclosure by suspending the sediment in fresh water and allowing the sediment to fall to the bottom. The water containing the bulk of the microorganisms may be removed by decantation after a suitable period of settling and either administered to the GI tract of an ungulate, or concentrated by filtering or centrifugation, diluted to an appropriate concentration and administered to the GI tract of an ungulate with the bulk of the salt removed. By way of further example, microorganisms from mineralized or toxic sources may be similarly treated to recover the microbes for application to the ungulate to minimize the potential for damage to the animal.

[0230] In another embodiment, the microorganisms are used in a crude form, in which they are not isolated from the source material in which they naturally reside. For example, the microorganisms are provided in combination with the source material in which they reside; for example, fecal matter, cud, or other composition found in the gastrointestinal tract. In this embodiment, the source material may include one or more species of microorganisms.

[0231] In some embodiments, a mixed population of microorganisms is used in the methods of the disclosure.

[0232] In embodiments of the disclosure where the microorganisms are isolated from a source material (for example, the material in which they naturally reside), any one or a combination of a number of standard techniques which will be readily known to skilled persons may be used. However, by way of example, these in general employ processes by which a solid or liquid culture of a single microorganism can be obtained in a substantially pure form, usually by physical separation on the surface of a solid microbial growth medium or by volumetric dilutive isolation into a liquid microbial growth medium. These processes may include isolation from dry material, liquid suspension, slurries or homogenates in which the material is spread in a thin layer over an appropriate solid gel growth medium, or serial dilutions of the material made into a sterile medium and inoculated into liquid or solid culture media.

[0233] Whilst not essential, in one embodiment, the material containing the microorganisms may be pre-treated prior to the isolation process in order to either multiply all microorganisms in the material. Microorganisms can then be isolated from the enriched materials as disclosed above.

[0234] In certain embodiments, as mentioned herein before, the microorganism(s) may be used in crude form and need not be isolated from an animal or a media. For example, cud, feces, or growth media which includes the microorganisms identified to be of benefit to increased milk production in ungulates may be obtained and used as a crude source of microorganisms for the next round of the method or as a crude source of microorganisms at the conclusion of the method. For example, fresh feces could be obtained and optionally processed.

### Microbiome Shift and Abundance of Microbes

[0235] In some embodiments, the microbiome of a ruminant, including the rumen microbiome, comprises a diverse arrive of microbes with a wide variety of metabolic capabilities. The microbiome is influenced by a range of factors including diet, variations in animal metabolism, and breed, among others. Most bovine diets are plant-based and rich in complex polysaccharides that enrich the gastrointestinal microbial community for microbes capable of breaking down specific polymeric components in the diet. The end products of primary degradation sustains a chain of microbes that ultimately produce a range of organic acids together with hydrogen and carbon dioxide. Because of the complex and interlinked nature of the microbiome, changing the diet and thus substrates for primary degradation may have a cascading effect on rumen microbial metabolism, with changes in both the organic acid profiles and the methane levels produced, thus impacting the quality and quantity of animal production and or the products produced by the animal. See Menezes et al. (2011. FEMS Microbiol. Ecol. 78(2):256-265.)

[0236] In some aspects, the present disclosure is drawn to administering microbial compositions described herein to modulate or shift the microbiome of a ruminant.

[0237] In some embodiments, the microbiome is shifted through the administration of one or more microbes to the gastrointestinal tract. In further embodiments, the one or more microbes are those selected from Table 1, 3 or 14. In some embodiments, the microbiome shift or modulation includes a decrease or loss of specific microbes that were present prior to the administration of one or more microbes of the present disclosure. In some embodiments, the microbiome shift or modulation includes an increase in microbes that were present prior to the administration of one or more microbes of the present disclosure. In some embodiments, the microbiome shift or modulation includes a gain of one or more microbes that were not present prior to the administration of one or more microbes of the present disclosure. In a further embodiment, the gain of one or more microbes is a microbe that was not specifically included in the administered microbial consortium.

[0238] In some embodiments, the administration of microbes of the present disclosure results in a sustained modulation of the microbiome such that the administered microbes are present in the microbiome for a period of at least 1 to 10, 1 to 9, 1 to 8, 1 to 7, 1 to 6, 1 to 5, 1 to 4, 1 to 3, 1 to 2, 2 to 10, 2 to 9, 2 to 8, 2 to 7, 2 to 6, 2 to 5, 2 to 4, 2 to 3, 3 to 10, 3 to 9, 3 to 8, 3 to 7, 3 to 6, 3 to 5, 3 to 4, 4 to 10, 4 to 9, 4 to 8, 4 to 7, 4 to 6, 4 to 5, 5 to 10, 5 to 9, 5 to 8, 5 to 7, 5 to 6, 6 to 10, 6 to 9, 6 to 8, 6 to 7, 7 to 10, 7 to 9, 7 to 8,8 to 10, 8 to 9, 9 to 10, 1, 2, 3, 4, 5, 6, 7, 8, 9, or 10 days.

[0239] In some embodiments, the administration of microbes of the present disclosure results in a sustained modulation of the microbiome such that the administered microbes are present in the microbiome for a period of at least 1 to 10, 1 to 9, 1 to 8, 1 to 7, 1 to 6, 1 to 5, 1 to 4, 1 to 3, 1 to 2, 2 to 10, 2 to 9, 2 to 8, 2 to 7, 2 to 6, 2 to 5, 2 to 4, 2 to 3, 3 to 10, 3 to 9, 3 to 8, 3 to 7, 3 to 6, 3 to 5, 3 to 4, 4 to 10, 4 to 9, 4 to 8, 4 to 7, 4 to 6, 4 to 5, 5 to 10, 5 to 9, 5 to 8, 5 to 7, 5 to 6, 6 to 10, 6 to 9, 6 to 8, 6 to 7, 7 to 10, 7 to 9, 7 to 8,8 to 10, 8 to 9, 9 to 10, 1, 2, 3, 4, 5,

[0240] In some embodiments, the administration of microbes of the present disclosure results in a sustained modulation of the microbiome such that the administered microbes are present in the microbiome for a period of at least 1 to 10, 1 to 9, 1 to 8, 1 to 7, 1 to 6, 1 to 5, 1 to 4, 1 to 3, 1 to 2, 2 to 10, 2 to 9, 2 to 8, 2 to 7, 2 to 6, 2 to 5, 2 to 4, 2 to 3, 3 to 10, 3 to 9, 3 to 8, 3 to 7, 3 to 6, 3 to 5, 3 to 4, 4 to 10, 4 to 9, 4 to 8, 4 to 7, 4 to 6, 4 to 5, 5 to 10, 5 to 9, 5 to 8, 5 to 7, 5 to 6, 6 to 10, 6 to 9, 6 to 8, 6 to 7, 7 to 10, 7 to 9, 7 to 8,8 to 10, 8 to 9, 9 to 10, 1, 2, 3, 4, 5, 6, 7, 8, 9, 10, 11, or 12 months.

[0241] In some embodiments, the presence of the administered microbes are detected by sampling the gastrointestinal tract and using primers to amplify the 16S or 18S rDNA sequences, or the ITS rDNA sequences of the administered microbes. In some embodiments, the administered microbes are one or more of those selected from Table 1, 3 or 14, and the corresponding rDNA sequences are those selected from SEQ ID NOs: 1-60, SEQ ID NOs: 2045-2108 and the SEQ ID NOs identified in Table 3. In some embodiments, the administered microbes are any one of SEQ ID NOs: 2125-4945.

[0242] In some embodiments, the microbiome of a ruminant is measured by amplifying polynucleotides collected from gastrointestinal samples, wherein the polynucleotides may be 16S or 18S rDNA fragments, or ITS rDNA fragments of microbial rDNA. In one embodiment, the microbiome is fingerprinted by a method of denaturing gradient gel electrophoresis (DGGE) wherein the amplified rDNA fragments are sorted by where they denature, and form a unique banding pattern in a gel that may be used for comparing the microbiome of the same ruminant over time or the microbiomes of multiple ruminants. In another embodiment, the microbiome is fingerprinted by a method of terminal restriction fragment length polymorphism (T-RFLP), wherein labelled PCR fragments are digested using a restriction enzyme and then sorted by size. In a further embodiment, the data collected from the T-RFLP method is evaluated by nonmetric multidimensional scaling (nMDS) ordination and PERMANOVA statistics identify differences in microbiomes, thus allowing for the identification and measurement of shifts in the microbiome. See also Shanks et al. (2011. Appl. Environ. Microbiol. 77(9):2992-3001), Petri et al. (2013. PLOS one. 8(12):e83424), and Menezes et al. (2011. FEMS Microbiol. Ecol. 78(2):256-265.)

[0243] In some embodiments, the administration of microbes of the present disclosure results in a modulation or shift of the microbiome which further results in a desired phenotype or improved trait.

### Experiment I: Effects of Acidosis

[0244] FIG. 8 illustrates a trial schedule associate with an example experiment designed to study effects associated with acidosis, using an ADS according to an embodiment.

[0245] Experiment I was designed to be a pen study with 2×2 factorial design, using 200steers, 10 steers per pen. Of the animals, 50 were designated to form the control group that had no step up including microbial feed supplement (MFS) dosing, and 50 were designated to form the treatment group, that had no step up and were supplemented with CO₂ utilizing rumen microorganisms, 50 were designated to form a control group that had a step up phase, and finally a 50 were designated to form a treatment group that experienced a step up phase where the animals were also supplemented with CO₂ utilizing rumen microorganisms.

[0246] As shown by the schedule in FIG. 8, the trial lasted 109 days with an acclimation period of 8 days, MFS were administered for the treatment groups prior to diet change in the step up period (the step-up period being either 0 days for the control groups or 21 days for the treatment groups), followed by a grow-out period that lasted 101 for the control groups or 80 days for the treatment groups. The product was mixed into feed daily, animals were fed ad-libitum.

[0247] Rumen measurements were taken including measurement of pH, dCO₂ (dissolved CO₂). VFAs, and Microbiome composition. Physiological measurements including body weight (˜monthly), average daily gain (ADG) which is a measurement of daily body weight change in animal on a feed test, weigh backs, and feed conversion ratio (FCR).

[0248] The results indicated that the step-up process allows the rumen microbiome to adapt and balance the production of VFAs, CO₂, and solvents. In the presence of alternative electron disposing pathway (anaerobic acetogenesis), CO₂ acted as an important electron sink. FIGS. 9A and 9B show plots of dissolved CO₂ as a function of rumen pH measured in the rumen. The measurements obtained from the treatment groups that underwent the step up phase showed an elevated amount of dissolved CO2 that was associated with relatively higher (less acidic) pH (indicating a reduced accumulation of VFAs) compared to the control groups that did not undergo the step up phase. Animals with the step up also showed a more gradual shift in pH and CO₂ over time, while the animals without the step up tended to have more severe spikes and lower pH values.

[0249] FIG. 10 shows a plot that illustrates a progression of acidosis in rumen of ruminants on diets that are extremely fermentable, for example finishing diets. Changes in microbial biomass resulting from highly fermentable diets is hypothesized to induce a unique microbial oscillation based on the differences in nutrient availability. A balance of microbial life in a biome depends on pathways for electron exchange. In the rumen, acidosis can be interpreted as an inability of the rumen to continue the cycle and regenerate its electron pool. In the absence of fiber and forages, a new oscillation forms between acidogenesis, solventogenesis, acetogenesis, and methanogenesis to regenerate electron pools. This hypothesis redefines acidosis as a consequence of disrupted electron exchange rather than a consequence of accumulation of concentration of lactate, a low pH, or the concentration of dCO2 which can all be correlated with and consequences of an interrupted cycle of electron exchange.

### Experiment II: Solvent Detection

[0250] This experiment was designed to test detection of solvents in saliva under baseline conditions and under conditions of induced acidosis challenge.

[0251] In a first phase of the experiment, the goal was to establish a predetermined baseline concentration of ethanol in a saliva of normal, lactating dairy cow over 1 day.

[0252] The study used one mid lactation dairy cow (days in milk DIM˜200), consuming standard farm total mixed ration (TMR) the constituents of which are shown in table form in FIG. 11A.

[0253] Data collection in the experiment included collecting saliva and blood serum hourly from the animal for ethanol measurements using bench test methods, an hourly measure of dry matter intake (DMI—an amount of feed a cow consumes per day on a moisture-free basis), and an hourly measurement of ethanol using an ADS using systems and/or methods described herein Saliva strip measurement.

[0254] FIG. 11B illustrates the predetermined measurement of baseline concentration of ethanol present in the saliva of a healthy lactating cow using bench test methods (potentially due to digestive products from ingesting silage, etc.). As shown the predetermined measurement of baseline concentration of ethanol in the saliva of a healthy cow consuming a typical TMR ration is between 0.00 mM to 0.1 mM over the course of an average day fluctuating based on feeding times of the day as shown by the correspondence of changes in ethanol concentration with changes in intake). Testing measurements from saliva showed test measurements were below noticeable threshold (i.e., indicated no detectable color change). There also was no ethanol detected in blood samples over the course of the day.

[0255] FIG. 12A is a schematic illustration of a schedule for induction of acidosis through an acidotic challenge protocol in a second phase of Experiment II. Determine saliva and ruminal ethanol concentrations in dairy cows undergoing acidosis/milk fat depression.

[0256] The study used three mid lactation dairy cows (days in milk (DIM) ˜200), consuming standard farm total mixed ration (see FIG. 11A). The animals were put on a schedule illustrated in FIG. 12A. As shown, days 1 and 2 were allocated for adaptation, days 3-8 were allocated for acidosis induction, and days 9 and 10 were allocated for recovery.

[0257] On day 1, the cows were switched to a test diet the constituents of which are shown in tabulated form in FIG. 12B. Data collection in the experiment included collecting milk yield and milk components such as milk fat, milk protein, (daily), collecting measure of dry matter intake DMI (daily), collecting rumen fluid for pH and microbiome analysis on day 2 (adaptation), on days 5 and 8 (acidosis challenge day 3 and 6, respectively), and day 10 (recovery day 2), collecting saliva and blood serum samples for ethanol measurements (3× per day, before feeding, 5 hr post feeding, and 10 hr. post feeding, as shown in the schedule in FIG. 12A), collecting sample of saliva for examination and ethanol detection and measurement using an ADS using systems and/or method described herein, and collecting sample of diet sampling for analysis.

[0258] FIGS. 13A, 13B, and 13C display results associated with pH measurements obtained from the three cows in the study during the course of the study. As shown, samples from all three cows exhibited progressive decrease in pH with the induction of acidosis challenge. FIGS. 14A, 14B, and 14C display results associated with changes in rumen biomass obtained from the three cows in the study during the course of the study. As shown, samples from all three cows exhibited progressive increase in rumen biomass with the induction of acidosis challenge.

[0259] FIGS. 15A, 15B, and 15C display results associated with measurements of concentration of ethanol and measurements of intake obtained from the three cows in the study during the course of the study. As shown, concentration of ethanol increased to elevated levels in samples from all three cows with the induction of acidosis challenge. Notably, animal with ID 5 (results of which is shown in FIG. 14C), was found to have had limited access to feed before day 1 of the study, and was observed to be slug feeding on day 1. This animal showed clinical signs of bathypnea (deep breathing) at time point 20 after days of high intake.

[0260] FIGS. 16A, 16B, and 16C display results associated with measurements of concentration of ethanol obtained from the three cows in the study during the course of the study, using systems and methods disclosed herein. As shown, concentration of ethanol increased to statistically greater amount compared to a predetermined baseline measurement (see FIG. 11B) in samples from all three cows with the induction of acidosis challenge. The three lines in each plot correspond to the three different sampling time per day, as indicated in the schedule in FIG. 12A.

[0261] FIGS. 17A, 17B, and 17C display results associated with changes in milk production, fat content in the milk, and protein content in the milk, obtained from the three cows in the study during the course of the study, using systems and methods disclosed herein. As shown, diet changes induced acidosis in the lactating dairy cows, which is reflected by the reduced milk production and reduced components produced during the acidosis challenge (period between the dotted lines).

[0262] FIG. 18A is a plot showing a relationship between rumen pH and a concentration of ethanol in the saliva sample of the animal. As shown, there is a statistically significant negative correlational relationship between rumen pH and the measure concentration of ethanol in the saliva (correlation coefficient=−0.37, p-value 0.259). This result showed that measuring ethanol concentration in the saliva can be used as an accurate measure of a corresponding change in rumen pH that is associated with a state of acidosis in the animal.

### Experiment III: Solvent Removal

[0263] This experiment was designed to study a rate or efficiency of solvent removal using high porosity food grade components. The results from the study were used to generate indicators for an ADS described herein, to recommend potential carriers that can be used to define food supplements. Such food supplements can be recommended to bring an animal on a state or path to recovery from acidosis and/or pathophysiologies associated with acidosis.

[0264] The study included preparing a series of samples, each sample in the series containing a predetermined amount of ethanol. Five samples designated treatment samples also contained an additive in the form of a carrier configured to absorb ethanol. One sample that was designated control did not have any additive. Sample preparation included producing a 1 L volume of 0.5% Ethanol (w/w)-ethanol solution. Exactly 45 mLs of the ethanol solution was transferred in aliquots into 12 serum bottles. About 5.0 g of the following components were added into each bottle (in duplicates) in sequence—Control (no additive) bottles 1 and 2, Kaolin in bottles 3 and 4, Bentonite in bottles 5 and 6, Charcoal Powder in bottles 7 and 8, Bone Meal in bottles 9 and 10, and Charcoal Granules in bottles 11 and 12.

[0265] The contents of the bottles were mixed and then immediately 1 mL was removed from each bottle at a first timepoint (Timepoint “0 hr”). Serum was prepared in a serum bottle. The serum bottle was stoppered and incubated at 37-39° C. Following incubation, the 1 mL aliquot was centrifuged for more than 10,000×g for 5 minutes. The contents were then filtered, and the supernatant was extracted with a 0.22 μm sterile syringe and filtered into an HPLC vial. This was done for each treatment sample, and the vials were stored refrigerated at 4° C. until they were ready to analyze.

[0266] At 1 hr, 2 hr, and 5 hr timepoints, the contents of the bottles were mixed and immediately 1 mL was removed from each bottle at the corresponding timepoint (Timepoint “1 hr”, “2 hr” and “5 hr”), the serum bottle was stoppered and incubated at 37-39° C. Following incubation, the 1mL aliquot was centrifuged for more than 10,000×g for 5 minutes. The contents were then filtered, and the supernatant was extracted with a 0.22 μm sterile syringe and filtered into an HPLC vial. This was again done for each treatment sample in duplicates and at each time point, and the vials were stored refrigerated at 4° C. until they were ready to analyze.

[0267] For measuring a change in amount of ethanol, HPLC analysis was used. The procedure was as follows:
[0268] (a) Produce a 5-point standard curve for ethanol by creating solutions at 0.5%, 0.4%, 0.3%, 0.2% and 0.1% Ethanol (w/w). Sterile filter the solutions into HPLC vials, as described above.
[0269] (b) Load standards and samples into HPLC. Run samples through a 250 mM Agilent Hi-Plex H Column at 0.5 mLs/min, 10 minute run time, 35° C. column temperature, 35° C. RI detector with a 5 mM H₂SO₄ mobile phase. (parameters provided as an example, similar analysis can also be performed alternatively using, for example, a Bio-Rad Column Aminex HPX-87P #1250098 at a rate of 0.6 mL/min, at a column temperature of 85° C. Column Temp, 55° C. RI detector for 22-40 minutes with a water mobile phase.)
[0270] (c) Determine the peak area generated from the analysis of the standards and create a calibration curve.
[0271] (d) Calculate the concentration of each sample.

[0272] Examples of the curves generated are shown in FIG. 19A (control sample 1 at 5 hr. Timepoint) and 19B (sample with Charcoal granules 1 at 5 hr. Timepoint), and the summary of the results of the study are shown in the plot in FIG. 20. As shown in the summary in FIG. 20, Charcoal granules exhibited the best ability to absorb a quantity of ethanol. Charcoal powder was second best in the list tested, while the remaining did not deviate from the control sample significantly. Given the results, charcoal granules and charcoal powder appear to be top additives recommended as carriers for feed supplements to provide an animal diagnosed to have a state of acidosis, using systems and/or methods described herein.

[0273] While various inventive embodiments have been described and illustrated herein, those of ordinary skill in the art will readily envision a variety of other means and/or structures for performing the function and/or obtaining the results and/or one or more of the advantages described herein, and each of such variations and/or modifications is deemed to be within the scope of the inventive embodiments described herein. More generally, those skilled in the art will readily appreciate that all parameters, dimensions, materials, and configurations described herein are meant to be exemplary and that the actual parameters, dimensions, materials, and/or configurations will depend upon the specific application or applications for which the inventive teachings is/are used. Those skilled in the art will recognize, or be able to ascertain using no more than routine experimentation, many equivalents to the specific inventive embodiments described herein. It is, therefore, to be understood that the foregoing embodiments are presented by way of example only and that, within the scope of the appended claims and equivalents thereto; inventive embodiments may be practiced otherwise than as specifically described and claimed. Inventive embodiments of the present disclosure are directed to each individual feature, system, article, material, kit, and/or method described herein. In addition, any combination of two or more such features, systems, articles, materials, kits, and/or methods, if such features, systems, articles, materials, kits, and/or methods are not mutually inconsistent, is included within the inventive scope of the present disclosure.

[0274] Also, various inventive concepts may be embodied as one or more methods, of which examples have been provided. The acts performed as part of the methods may be ordered in any suitable way. Accordingly, embodiments may be constructed in which acts are performed in an order different than illustrated, which may include performing some acts simultaneously, even though shown as sequential acts in illustrative embodiments.

[0275] As used herein, the terms “about” and/or “approximately” when used in conjunction with numerical values and/or ranges generally refer to those numerical values and/or ranges near to a recited numerical value and/or range. In some instances, the terms “about” and “approximately” may mean within ±10% of the recited value. For example, in some instances, “about 100 [units]” may mean within ±10% of 100 (e.g., from 90 to 110). The terms “about” and “approximately” may be used interchangeably.

[0276] Any and all references to publications or other documents, including but not limited to, patents, patent applications, articles, webpages, books, etc., presented anywhere in the present application, are herein incorporated by reference in their entirety. Moreover, all definitions, as defined and used herein, should be understood to control over dictionary definitions, definitions in documents incorporated by reference, and/or ordinary meanings of the defined terms.

[0277] Some embodiments and/or methods described herein can be performed by a different software (executed on hardware), hardware, or a combination thereof. Hardware modules may include, for example, a general-purpose processor, a field programmable gate array (FPGA), and/or an application specific integrated circuit (ASIC). Software modules (executed on hardware) can be expressed in a variety of software languages (e.g., computer code), including C, C++, Java™, Python, Ruby, Visual Basic™, and/or other object-oriented, procedural, or other programming language and development tools. Examples of computer code include, but are not limited to, micro-code or micro-instructions, machine instructions, such as produced by a compiler, code used to produce a web service, and files containing higher-level instructions that are executed by a computer using an interpreter. For example, embodiments may be implemented using imperative programming languages (e.g., C, Fortran, etc.), functional programming languages (Haskell, Erlang, etc.), logical programming languages (e.g., Prolog), object-oriented programming languages (e.g., Java, C++, etc.) or other suitable programming languages and/or development tools. Additional examples of computer code include, but are not limited to, control signals, encrypted code, and compressed code.

Lengthy table referenced here
US20250314672A1-20251009-T00001
Please refer to the end of the specification for access instructions.

Lengthy table referenced here
US20250314672A1-20251009-T00002
Please refer to the end of the specification for access instructions.

Lengthy table referenced here
US20250314672A1-20251009-T00003
Please refer to the end of the specification for access instructions.

Lengthy table referenced here
US20250314672A1-20251009-T00004
Please refer to the end of the specification for access instructions.

Lengthy table referenced here
US20250314672A1-20251009-T00005
Please refer to the end of the specification for access instructions.

Lengthy table referenced here
US20250314672A1-20251009-T00006
Please refer to the end of the specification for access instructions.

### INCORPORATION BY REFERENCE

[0278] All references, articles, publications, patents, patent publications, and patent applications cited herein are incorporated by reference in their entireties for all purposes, including PCT Application Nos. PCT/US2017/012573, PCT/US2020/020311, and PCT/US2021/025264.

[0279] However, mention of any reference, article, publication, patent, patent publication, and patent application cited herein is not, and should not be taken as, an acknowledgment or any form of suggestion that they constitute valid prior art or form part of the common general knowledge in any country in the world.

LENGTHY TABLES
The patent application contains a lengthy table section. A copy of the table is available in electronic form from the USPTO web site (https://seqdata.uspto.gov/?pageRequest=docDetail&DocID=US20250314672A1). An electronic copy of the table will also be available from the USPTO upon request and payment of the fee set forth in 37 CFR 1.19(b)(3).

1. A method of diagnosing a state of health of an animal, comprising:
receiving a sample of a bodily fluid or gas from an oral or nasal cavity of the animal;
measuring a quantity of at least one of an identified solvent or an identified gas in the sample; and
determining a state of health associated with the animal based on the quantity of the identified solvent.

2. The method of claim 1, wherein the identified solvent is at least one of an alcohol, acetone, succinate, or an acetaldehyde.

3. The method of claim 1, wherein the identified solvent is at least one of ethanol, isopropanol, acetone, or butanol.

4. The method of claim 1, wherein the identified gas is carbon dioxide

5. The method of claim 1, wherein the animal is a ruminant, and the sample is a sample of bodily fluid, and the bodily fluid is saliva.

6. The method of claim 1, further comprising:
comparing the quantity of the at least one of an identified solvent or an identified gas with a predetermined baseline value; and
determining the state of health associated with the animal to include a state of acidosis based on the quantity of the at least one of an identified solvent or an identified gas being greater than the predetermined value.

7. The method of claim 1, further comprising:
comparing the quantity of the at least one of an identified solvent or an identified gas with a predetermined value; and
determining the state of health associated with the animal to not include a state of acidosis based on the quantity of the at least one of an identified solvent or an identified gas being greater than the predetermined value.

8. The method of claim 6, further comprising:
preparing a feed supplement including at least one of (i) a synthetic microbial ensemble including one or more identified microorganism strains, or (ii) a carrier configured to adsorb a solvent; and
combining feed supplement with feed to provide the animal, the feed supplement configured to induce a recovery from the state of acidosis.

9. The method of claim 8, wherein the carrier is at least one of Zeolite, charcoal, activated granulated charcoal, bone ash, bone charcoal, diatomaceous earth, kaolin, and clay.

10. The method of claim 6, further comprising:
preparing a feed supplement including a microbial growth inhibitor configured to inhibit solventogenesis; and
combining feed supplement with feed to provide the animal, the feed supplement configured to induce a recovery from the state of acidosis.

11. The method of claim 10, wherein the microbial growth inhibitor is at least one of ascorbic acid, benzoic acid, propionic acid, sodium sulfite, sulfur dioxide, sodium nitrite, and fumaric acid.

12. A method of providing a feed supplement to an animal comprising:
identifying at least one of a synthetic microbial ensemble including one or more identified microorganism strains, or a carrier configured to adsorb a solvent; and
generating a feed supplement by combining an amount of the synthetic microbial ensemble or an amount of the carrier with feed, the feed supplement configured to be provided to the animal.

13. The method of claim 12, further comprising:
receiving an indication that the animal is associated with a state of acidosis; and
determining the amount of the carrier based on the indication, the feed supplement configured to induce a recovery from the state of acidosis.

14. The method of claim 13, wherein the indication is a first indication, the amount is a first amount and the feed supplement is a first feed supplement, the method further comprising:
receiving a second indication that the animal is associated with a recovery from the state of acidosis; and
determining a second amount of the carrier based on the second indication, the feed supplement configured to induce a maintenance of the recovery from the state of acidosis.

15. The method of claim 12, wherein the carrier is at least one of Zeolite, charcoal, activated granulated charcoal, bone ash, bone charcoal, diatomaceous earth, kaolin, and clay.

16. The method of claim 12, wherein the solvent is ethanol.

17. The method of claim 12, wherein the identifying the carrier is based on absorptive properties of the carrier for ethanol.

18. A method of providing a feed supplement to an animal comprising:
identifying a microbial growth inhibitor configured to inhibit solventogenesis; and
generating a feed supplement by combining an amount of the microbial growth inhibitor with feed to provide an animal, the feed supplement configured to induce in the animal a change in a health status.

19. The method of claim 18, wherein the health status is a state of acidosis, the change in health status being a recovery from the state of acidosis.

20. The method of claim 18, wherein the microbial growth inhibitor is at least one of ascorbic acid, benzoic acid, propionic acid, sodium sulfite, sulfur dioxide, sodium nitrite, and fumaric acid.

21. The method of claim 18, wherein the microbial growth inhibitor is at least one of ascorbic acid, benzoic acid, propionic acid, sodium sulfite, sulfur dioxide, sodium nitrite, and fumaric acid.

22. An apparatus, comprising:
a sampling structure configured to capture a sample, the sample being at least one of a bodily fluid or a gas from an oral or nasal cavity of an animal; and
a chamber operatively coupled to the sampling structure to access at least a portion of the sample, the chamber configured to process the sample to quantify an amount of at least one of a solvent or gas in the sample.

23. The apparatus of claim 22, wherein the sampling structure includes a test strip of material configured to detect an amount of the at least one of a solvent or gas in the sample.

24. The apparatus of claim 23, wherein the material is configured to detect the amount of the at least one of a solvent or gas in the sample based on at least one of a peroxidase based assay or a colorimetric assay.

25. The apparatus of claim 23, wherein the material is configured to provide a visible indication based on a detection of an amount of a solvent that is within a predetermined range of concentrations.

26. The apparatus of claim 25, wherein the solvent is ethanol and the predetermined range of concentrations is 0 mM-10 mM.

27. A non-transitory processor-readable medium storing code representing instructions to be executed by a processor, the instructions comprising code to cause the processor to:
obtain a measurement of a property associated with a solvent in a sample of bodily fluid from an animal;
compare the measurement of the property associated with the solvent against a predetermined baseline measurement of the property associated with the solvent; and
determine (i) a state of acidosis based on the measurement being greater than the predetermined baseline measurement, or (ii) a state of no acidosis based on the measurement being lesser than the predetermined baseline measurement.

28. The non-transitory processor-readable medium of claim 27, further comprising code to cause the process to:
generate a feed recommendation in response to the determination of (i) the state of acidosis, or (ii) the state of no acidosis.

29. The non-transitory processor-readable medium of claim 28, wherein the feed recommendation includes providing the animal a feed supplement including at least one of (i) a synthetic microbial ensemble including one or more identified microorganism strains, or (ii) a carrier configured to absorb a solvent, the feed supplement configured to induce a recovery from the state of acidosis.

30. The non-transitory processor-readable medium of claim 29, wherein the carrier is at least one of Zeolite, charcoal, activated granulated charcoal, bone ash, bone charcoal, diatomaceous earth, kaolin, and clay.

31. The non-transitory processor-readable medium of claim 27, further comprising code to cause the processor to:
predict, in response to the determination of the state of acidosis, a prediction of progression of the state of acidosis.

32. The non-transitory processor-readable medium of claim 27, further comprising code to cause the processor to:
predict, in response to the determination of the state of acidosis and an indication of providing the feed supplement, a prediction of progression of recovery from the state of acidosis.

The application's sequence listing, which the Patent Office published only in electronic form, follows.

SEQUENCE LISTING (10940 sequences)

SEQ ID NO: 1 - DNA, 225 bp, unidentified
  misc_feature 1..225: note = Encodes 16S rRNA from Ruminococcus bovis sp. nov.
  source 1..225: mol_type = genomic DNA
agagtttgatcctggctcaggatgaacgctggcggcgtgcctaacacatgcaagtcgaacggaacttctttgacagaattcttcggaaggaagttgattaagtttagtggcggacgggtgagtaacgcgtgagtaacctgcctttgagaggggaataacttcccgaaagggatgctaataccgcataaagcatagaagtcgcatggcttttatgccaaagattta

SEQ ID NO: 2 - DNA, 225 bp, unidentified
  misc_feature 1..225: note = Encodes 16S rRNA from Ruminococcus
  source 1..225: mol_type = genomic DNA
agagtttgatcatggctcaggacgaacgctggcggcgtgcctaacacatgcaagtcgaacggaactattttgactgattccttcgggatgaagaatttttagtttagtggcggacgggtgagtaacgcgtgagtaacctgcctctgagaggggaataacgttctgaaaagaacgctaataccgcataacacatatttgccgcatgacagatatgtcaaagatttt

SEQ ID NO: 3 - DNA, 225 bp, unidentified
  misc_feature 1..225: note = Encodes 16S rRNA from Clostridium
  source 1..225: mol_type = genomic DNA
agagtttgatcatggctcaggatgaacgctggcggcgtgcctaacacatgcaagtcgaacgaagctcgatcctcggagatttcggtcaaagaggaaagatgacttagtggcggacgggtgagtaatgcgtgagcaacctgccttggagtgggggacaacagttggaaacgactgctaataccgcataatgtatttggggggcatcctctgaataccaaagattta

SEQ ID NO: 4 - DNA, 225 bp, unidentified
  misc_feature 1..225: note = Encodes 16S rRNA from Roseburia
  source 1..225: mol_type = genomic DNA
agagtttgatcctggctcaggatgaacgctggcggcgtgcttaacacatgcaagtcgaacgaggttcctatttacgatcccttcggggtgacgagtttgaaccgagtggcggacgggtgagtaacgcgtggggaacctgcctcatgccgggggataccagagggaaacttctgttaataccgcataagcgcacggtgtggcatcacacagtgtgaaaaactccgg

SEQ ID NO: 5 - DNA, 225 bp, unidentified
  misc_feature 1..225: note = Encodes 16S rRNA from Hydrogenoanaerobacterium
  source 1..225: mol_type = genomic DNA
agagtttgatcatggctcaggacgaacgctggcggcgtgcctaacacatgcaagtcgaacgaagcatttggagctgatctcttcggagtgacgcaccttatgacttagtggcggacgggtgagtaacacgtgagcaacctgcctttcagagtggaataacagttggaaacggctgctaataccgcataacgtcatagtaccgcatgataccttgaccaaagattt

SEQ ID NO: 6 - DNA, 225 bp, unidentified
  misc_feature 1..225: note = Encodes 16S rRNA from Clostridium
  source 1..225: mol_type = genomic DNA
agagtttgatcatggctcaggatgaacgctggcggcgtgcctaacacatgcaagttgaacgaagcaatcaagacagaatccttcgggaggaagatttgattgactgagtggcggacgggtgagtaacgcgtgggtaacctgccttgtacagggggataacagttagaaatgactgctaataccgcataagcgcacagtactgcatggtacagtgtgaaaaactcc

SEQ ID NO: 7 - DNA, 225 bp, unidentified
  misc_feature 1..225: note = Encodes 16S rRNA from Saccharofermentans
  source 1..225: mol_type = genomic DNA
agagtttgatcatggctcaggatgaacgctggcggcgtgcctaacacatgcaagtcgaacggagttacgagagcttgcttttgtaacttagtggcggacgggtgagtaatgtatgagcaacctgcctttcagagggggacaacagttggaaacgactgctaataccgcataatgtatttgggtggcatcacctggataccaaaggagcaatccgctgaaagatgg

SEQ ID NO: 8 - DNA, 225 bp, unidentified
  misc_feature 1..225: note = Encodes 16S rRNA from Saccharofermentans
  source 1..225: mol_type = genomic DNA
agagtttgatcatggctcaggatgaacgctggcggcgtgcttaacacatgcaagtcgaacggggtttaagaaggaagcttgctttcattttaaacctagtggcggacgggtgagtaacgcgtgaggaacctgcccttcagtggggaacaacaactagaaatggttgctaataccgcataatgtcggagagccgcatgacattccgaccaaaggatttattcgctg

SEQ ID NO: 9 - DNA, 225 bp, unidentified
  misc_feature 1..225: note = Encodes 16S rRNA from Butyricicoccus
  source 1..225: mol_type = genomic DNA
agagtttgatcatggctcaggacgaacgctggcggcatgcctaacacatgcaagtcgaacggagatattgagagcttgcttttgatatcttagtggcggacgggtgagtaacgcgtgagcaacctgcctttcagtggggaataatacttcgaaagaggtactaataccgcataacgtattgagatcgcatggttttgataccaaagatttatcgctgagagatgg

SEQ ID NO: 10 - DNA, 225 bp, unidentified
  misc_feature 1..225: note = Encodes 16S rRNA from Papillibacter
  source 1..225: mol_type = genomic DNA
agagtttgatcatggctcaggatgaacgctggcggcgtgcctaacacatgcaagtcgaacgaagcactttggatggagattcgtcaaaatctgatttgacttagtggcggacgggtgagtaatgtgtgagcaacctgcctttcagagggggacaacagttggaaacggctgctaataccgcataatgtatattgagggcatcctcgatataccaaaggagcaatc

SEQ ID NO: 11 - DNA, 225 bp, unidentified
  misc_feature 1..225: note = Encodes 16S rRNA from Ruminococcus
  source 1..225: mol_type = genomic DNA
agagtttgatcatggctcaggacgaacgctggcggcgtgcctaacacatgcaagtcgaacggagttgaggagcttgctccttaacttagtggcggacgggtgagtaacgcgtgagtaacctgcctctgagaggggaataacgttctgaaaagaacgctaataccgcatgacacatatttgccgcatgacagatatgtcaaagattttatcgctcagagatggact

SEQ ID NO: 12 - DNA, 225 bp, unidentified
  misc_feature 1..225: note = Encodes 16S rRNA from Hydrogenoanaerobacterium
  source 1..225: mol_type = genomic DNA
agagtttgatcatggctcaggacgaacgctggcggcacgcttaacacatgcaagtcgaacggagtttagagagcttgctttttaaacttagtggcggacgggtgagtaacacgtgagcaacctgccttcaagcgaggaataatgagtggaaacgctctgtaatacctcataacgtatttttaccgcatgataggaataccaaagatttatcacttgaagatgggc

SEQ ID NO: 13 - DNA, 225 bp, unidentified
  misc_feature 1..225: note = Encodes 16S rRNA from Pelotomaculum
  source 1..225: mol_type = genomic DNA
agagtttgatcatggctcaggacgaacgctggcggcgtgcctaacacatgcaagtcgaacggagtaagaatttcggtttttacttagtggcgaacgggtgagtaacgcgtgaacaacctgccttcctgagggggataacacctggaaacaagtgctaataccgcataagaccacatgtccgcatggacgaggggtcaaaggagcaatccgcagggagaggggttc

SEQ ID NO: 14 - DNA, 225 bp, unidentified
  misc_feature 1..225: note = Encodes 16S rRNA from Saccharofermentans
  source 1..225: mol_type = genomic DNA
agagtttgatcatggctcaggatgaacgctggcggcgtgcctaacacatgcaagtcgagcggagttatgagaggtgcttgcaccacttttaacttagcggcggacgggtgagtaacacgtgagtaacctgcccttgagtggggaacaacatcgagaaatcggtgctaataccgcataatatctctttgccgcatgacagagagatcaaaggatttattcgcttga

SEQ ID NO: 15 - DNA, 225 bp, unidentified
  misc_feature 1..225: note = Encodes 16S rRNA from Lachnospiraceae incertae sedis
  source 1..225: mol_type = genomic DNA
agagtttgatcatggctcaggatgaacgctggcggcgtgcttaacacatgcaagtcgaacggagttatcaatgaaacctagtgatttgataacttagtggcggacgggtgagtaacgcgtgggtaacctgccttatccggggggataacagttagaaatgactgctaataccgcataagcgcacagaatcgcatgattccgtgtgaaaagatttatcgggataag

SEQ ID NO: 16 - DNA, 225 bp, unidentified
  misc_feature 1..225: note = Encodes 16S rRNA of Butyricicoccus - sensu stricto
  source 1..225: mol_type = genomic DNA
agagtttgatcatggctcaggacgaacgctggcggcatgcctaacacatgcaagtcgaacggagtttaaggggcttgctccttaaacttagtggcggacgggtgagtaacgcgtgagcaacctgcctctcagtggggaataatgtactgaaaaggacactaataccgcatgacgtaccggagtcgcatggcactggtaccaaagatttatcgctgagagatgggc

SEQ ID NO: 17 - DNA, 225 bp, unidentified
  misc_feature 1..225: note = Encodes 16S rRNA from Lachnospiraceae incertae sedis
  source 1..225: mol_type = genomic DNA
agagtttgatcatggctcaggatgaacgctggcggcgtgcttaacacatgcaagtcgaacggagtttagatgaaagcttgcttttgactaaacttagtggcggacgggtgagtaacgcgtgggtaacctgccttataccgggggacaacagttggaaacggctgctaataccgcataagcgcacgaggaggcatctcctagtgtgaaaaactccggtggtataag

SEQ ID NO: 18 - DNA, 225 bp, unidentified
  misc_feature 1..225: note = Encodes 16S rRNA from Anaeroplasma
  source 1..225: mol_type = genomic DNA
agagtttgatcatggctcaggattaacgctggcggcgtgcctaatacatgcaagtcgaatggtagcaataccatggcgaacgggtgagtaacacgtaggtaacctgtctttaagacgaggataaccgttggaaacgacggataatactcgataggtgattttagggcatcctagaatcattaaagatttatcacttagagaggggcctgcggcgcattagctaga

SEQ ID NO: 19 - DNA, 225 bp, unidentified
  misc_feature 1..225: note = Encodes 16S rRNA from Clostridium sensu stricto
  source 1..225: mol_type = genomic DNA
agagtttgatcatggctcaggacgaacgctggcggcgtgcctaacacatgcaagtcgagcggggacattgcgacggagacgaagtactcgtacggagtcaaagatgtaatgttctagcggcggacgggtgagtaacgcgtgagcaacctgtcccttacagggggataacacagcgaaagttgtactaataccgcatgagaccacaggatgacatcatccaggggt

SEQ ID NO: 20 - DNA, 225 bp, unidentified
  misc_feature 1..225: note = Encodes 16S rRNA from Butyricicoccus
  source 1..225: mol_type = genomic DNA
agagtttgatcatggctcaggataaacgctggcggcgcacataagacatgcaagtcgaacggacttaaccgttagtttactaatggagcggttagtggcggactggtgagtaacgcgtaagcaatctgcctgttagagggggataacagtgagaaatcactgctaataccgcatatgctgtgaacatcacatgatgtaaacaggaaaggagcaatccgctaatag

SEQ ID NO: 21 - DNA, 225 bp, unidentified
  misc_feature 1..225: note = Encodes 16S rRNA from Butyricicoccus
  source 1..225: mol_type = genomic DNA
agagtttgatcatggctcaggataaacgctggcggcgcacataagacatgcaagtcgaacgaacttaatcttttagtttactattagaagcggttagtggcggactggtgagtaacgcgtaaacaatctgcctatcagaggggaacaacagtgagaaatcactgctaataccgcatatgctgtgagtacggcatcgtacaaacaggaaaggagcaatccgctgat

SEQ ID NO: 22 - DNA, 225 bp, unidentified
  misc_feature 1..225: note = Encodes 16S rRNA from Rikenella
  source 1..225: mol_type = genomic DNA
agagtttgatcatggctcaggatgaacgctagcggcaggcttaacacatgcaagtcgaggggcagcaggcggtagcaataccgtgctggcgaccggcgcacgggtgcgtaacgcgtatgcaacctacccactacagggggataacggagggaaacttccactaatatcccatggagttgttttttcgcatggagagacaactaaagctacggtggtagtggatgg

SEQ ID NO: 23 - DNA, 225 bp, unidentified
  misc_feature 1..225: note = Encodes 16S rRNA from Tannerella
  source 1..225: mol_type = genomic DNA
agagtttgatcatggctcaggatgaacgctagcggcaggcttaacacatgcaagtcgaggggcagcggggtgtagcaatacactgccggcgaccggcgcacgggtgcgtaacgcgtatgcaacctgcccgtaacagggggataactcggggaaacccgaactaataccccgtattgacaaggggccgcatggtcttttgtcgaaagcttcggtggttacggatgg

SEQ ID NO: 24 - DNA, 225 bp, unidentified
  misc_feature 1..225: note = Encodes 16S rRNA from Howardella
  source 1..225: mol_type = genomic DNA
agagtttgatcatggctcaggataaacgctggcggcgcacataagacatgcaagtcgaacggaagtcgttgtaatgatgtggacatgaacggagaacttgttcaaagagagtgaaaattgacttacaacaatggctttagtggcggactggtgagtaatgtataagtaacctgcctatcagaggggaacaacagttggaaacgactgctaataccgcatatgcca

SEQ ID NO: 25 - DNA, 225 bp, unidentified
  misc_feature 1..225: note = Encodes 16S rRNA from Prevotella
  source 1..225: mol_type = genomic DNA
agagtttgatcatggctcaggatgaacgctagcggcaggcttaacacatgcaagtcgaggggcagcgtggagtagcaatactctgacggcgaccggcgaaagggtgagtaacgcgtgagcaacatgcccgtagttgggggatagtcgatggaaacgtcgcgtaataccccgtaacaacagaggccgcatgacctttgtttaagagatttattgtctacggattgg

SEQ ID NO: 26 - DNA, 225 bp, unidentified
  misc_feature 1..225: note = Encodes 16S rRNA from Butyricimonas
  source 1..225: mol_type = genomic DNA
agagtttgatcatggctcaggatgaacgctagcggcaggcttaacacatgcaagtcgaggggcagcgggtgtagcaatacatgccggcgaccggcgaaagggtgagtaacgcgtgagcaacgtgcccgtatgtgggggatagtcgatggaaacgtcgcgtaataccccgtaacacattttcccgcatgggaatatgttgaaagatttattgcatacggatcggct

SEQ ID NO: 27 - DNA, 225 bp, unidentified
  misc_feature 1..225: note = Encodes 16S rRNA from Clostridium sensu stricto
  source 1..225: mol_type = genomic DNA
agagtttgatcatggctcaggacgaacgctggcggcgtgcctaacacatgcaagtcgagcggggacatgcgacggataggaagttttcggatggaattgaagatgtatgttctagcggcggacgggtgagtaacgcgtgagcaacctgtccttcacagggggataacacagcgaaagttgtactaataccgcataagaccacagtgagacatctcacaggggtca

SEQ ID NO: 28 - DNA, 225 bp, unidentified
  misc_feature 1..225: note = Encodes 16S rRNA from Clostridium sensu stricto
  source 1..225: mol_type = genomic DNA
agagtttgatcctggctcaggacgaacgctggcggcgtgcttaacacatgcaagtcgagcgatgaagttccttcgggaatggattagcggcggacgggtgagtaacacgtgggtaacctgcctcatagaggggaatagcctttcgaaaggaagattaataccgcataagattgtagcaccgcatggtgcagcaattaaaggagtaatccgctatgagatggaccc

SEQ ID NO: 29 - DNA, 225 bp, unidentified
  misc_feature 1..225: note = Encodes 16S rRNA from Saccharofermentans
  source 1..225: mol_type = genomic DNA
agagtttgatcctggctcaggatgaacgctggcggcgtgcctaacacatgcaagtcgaacggagttactagagcttgctttggtaacttagtggcggacgggtgagtaatgtatgagcaacctgcctttcagagggggacaacagttggaaacgactgctaataccgcataatgtgcgaagggggcatcccttttgtaccaaaggagcaatccgctgaaagatgg

SEQ ID NO: 30 - DNA, 225 bp, unidentified
  misc_feature 1..225: note = Encodes 16S rRNA from Lachnospiraceae incertae sedis
  source 1..225: mol_type = genomic DNA
agagtttgatcatggctcaggatgaacgctggcggcgtgcttaacacatgcaagtcgaacgaagcatttttcgattcttcggaaaagaggaatgactgagtggcggacgggtgagtaacgcgtgggaaacctgccttataccgggggatagcagttggaaacgactggtaaaaccgcataagcgcacgggtacgcatgtatctgtgtgaaaaactctggtggtat

SEQ ID NO: 31 - DNA, 225 bp, unidentified
  misc_feature 1..225: note = ITS2 sequence of Pyromyces
  source 1..225: mol_type = genomic DNA
tcctccgcttattgatatgcttaagttcagcgggtactcttatctgatttgagatcaagttatttaattaaattttcctttgttggattttttctaaaaaaatacaaaattgtttaggttattcctttttacgggaaaattttatccaattttatattaaaattagaaaaaatttcaataatcaaaaaatttaaagtgaaacaacttgtatcgttgtaaaacact

SEQ ID NO: 32 - DNA, 225 bp, unidentified
  misc_feature 1..225: note = ITS2 sequence of Candida xylopsoci
  source 1..225: mol_type = genomic DNA
tcctccgcttattgatatgcttaagttcagcgggtattcctacctgatttgaggtcgagctttttgttgtctcgcaacactcgctctcggccgccaagcgtccctgaaaaaaagtctagttcgctcggccagcttcgctccctttcaggcgagtcgcagctccgacgctctttacacgtcgtccgctccgctcccccaactctgcgcacgcgcaagatggaaacg

SEQ ID NO: 33 - DNA, 225 bp, unidentified
  misc_feature 1..225: note = ITS2 Sequence of Orpinomyces
  source 1..225: mol_type = genomic DNA
tcctccgcttattgatatgcttaagttcagcgggtactcttatctgatttgagatcaagttagttttataattaaatttccttttttgtaggtcaatttaagttttaactttaaaactgaaaagtttattcctttttacgggaaaattttatccaattttaaaaataaaaccaaattggcttattaaaaaaatcaatttaaagtgaaacaacttgttatcgttgt

SEQ ID NO: 34 - DNA, 225 bp, unidentified
  misc_feature 1..225: note = ITS2 sequence of Orpinomyces
  source 1..225: mol_type = genomic DNA
tcctccgcttattgatatgcttaagttcagcgggtactcttatctgatttgagatcaagttatttataaataaatttcctttaactgtacggtatggaaactattaaaatttctaaaaaactgaaatagctttattcctttttacgggaaaattttatccaattttttaaaaaaattaaaatcgttccaaccgacgatttcaattaaaatccatttaaagtgaaa

SEQ ID NO: 35 - DNA, 225 bp, unidentified
  misc_feature 1..225: note = ITS2 sequence of Orpinomyces
  source 1..225: mol_type = genomic DNA
tcctccgcttattgatatgcttaagttcagcgggtactcttatctgatttgagatcaagttagtttataaattaaatttccttttttcaaggtcaatttaggattttatttttaaaactgaaaagtttattcctttttacgggaaaattttatccaattttaataataaaaccaaattggctttttaaaaaatcaatttaaagtgaaacaacttgttatcgttgt

SEQ ID NO: 36 - DNA, 225 bp, unidentified
  misc_feature 1..225: note = ITS2 sequence of Candida apicol
  source 1..225: mol_type = genomic DNA
tcctccgcttattgatatgcttaagttcagcgggtagccttgcttgattggaggccaaaagattgtaagtaactgcacagagttatctaacgtgtgcacttccattcttttgactcctaaaaggagcagaacctcgtactacaatgaagtagtatgagagaaagatcggcgctccaacaagcatgccattaggagaacctaatggcgcaatgtgcgttcaaagat

SEQ ID NO: 37 - DNA, 225 bp, unidentified
  misc_feature 1..225: note = ITS2 sequence of Candida rugosa
  source 1..225: mol_type = genomic DNA
tcctccgcttattgatatgcttaagttcagcgggtagtcctacctgatttgagaataagatcaagagtctgtaacaagcttaactgttttagacaatttcgtttctggcagacgcctgccggcgtggtgcccaacaccttgcgagagagaaatattgctcaaacaggcatgctgtgtggaatgccacacagcgcaatgtgcgttcaaagattcgatgattcacga

SEQ ID NO: 38 - DNA, 225 bp, unidentified
  misc_feature 1..225: note = ITS2 sequence of Neocallimastix
  source 1..225: mol_type = genomic DNA
tcctccgcttattgatatgcttaagttcagcgggtactcttatctgatttgagatcaagttatttaaataaatttccttttaaaatcggaccgtttgttggtaataattaaaaaactgaaaagtttattcctttttacgggaaaattttatccaattttttattaaaaccataaatggtcttaaattaaaatgaatttaaagtgaaacaacttgtttatcgttgt

SEQ ID NO: 39 - DNA, 225 bp, unidentified
  misc_feature 1..225: note = ITS2 sequence of Orpinomyces
  source 1..225: mol_type = genomic DNA
tcctccgcttattgatatgcttaagttcagcgggtactcttatctgatttgagatcaagttatttagttaaatttccttttaattaggcacaattaagttttaactattaaaactgaaaagttattcctttttacgggaaaattttatccaattttattagataaaaccaaaaattggcttttaaaaatcaatttaaagtgaaacaacttgtttatcgttgtaaa

SEQ ID NO: 40 - DNA, 225 bp, unidentified
  misc_feature 1..225: note = ITS2 sequence of Orpinomyces
  source 1..225: mol_type = genomic DNA
tcctccgcttattgatatgcttaagttcagcgggtactcttatctgatttgagatcaagttatttataaataaatttcctttaactgtacggtatggaaactattaaaatttctaaaaaaactgaaatagcttattccttttttacgggaaaattttatccaattttttaaaaaaaattaaaatcgttcccaaccgacgatttcaattaaaatccatttaaagtg

SEQ ID NO: 41 - DNA, 225 bp, unidentified
  misc_feature 1..225: note = ITS2 sequence of Neocallimastix
  source 1..225: mol_type = genomic DNA
tcctccgcttattgatatgcttaagttcagcgggtactcttatctgatttgagatcaagttatttaaataaatttccttttaaaatcggaccgagatttctctaactaaaactgaaaagtttattcctttttacgggaaaattttatccaattttaattattaaaaccataaaggtcttaattaaaatgaatttaaagtgaaacaacttgtttatcgttgtaaaa

SEQ ID NO: 42 - DNA, 225 bp, unidentified
  misc_feature 1..225: note = ITS2 sequence of Neocallimastix
  source 1..225: mol_type = genomic DNA
tcctccgcttattgatatgcttaagttcagcgggtactcttatctgatttgagatcaagttatttaaattataaatttccttttaaaatcggaccgtttgttggtaataattaaaaaaactgaaaagtttattcctttttacgggaaaattttatccaatttttttttattaaaaccaaaaatggtcttaaattaaaatgaatttaaagtgaaacaacttgttta

SEQ ID NO: 43 - DNA, 225 bp, unidentified
  misc_feature 1..225: note = ITS2 sequence of Ascomycota
  source 1..225: mol_type = genomic DNA
tcctccgcttattgatatgcttaagttcagcgggtagtcttgcttgatttgaggccaaatataaaaatatagtgttaatggctgcataactagaaccaagaatgcttagcactcgggctagtcacactgaccaccttctggctacatttagattcggtcctgagacttgaatcaaatcgcattgctgcataaaggtatgcggcactcaaacaaacatgcctcaaa

SEQ ID NO: 44 - DNA, 225 bp, unidentified
  misc_feature 1..225: note = ITS2 sequence of Piromyces
  source 1..225: mol_type = genomic DNA
tcctccgcttattgatatgcttaagttcagcgggtactcttatctgatttgagatcaagttaatttttacttttttcctttttttatcaagaaaaatcaaaccaattttaattttttaaaattgtttaggttattcctttttacgggaaaattttatccaattttaaaaaatctttaaaattagcttttaatgattttttttgatgacaaagaatttaaagtgaa

SEQ ID NO: 45 - DNA, 225 bp, unidentified
  misc_feature 1..225: note = ITS2 sequence of Orpinomyces
  source 1..225: mol_type = genomic DNA
tcctccgcttattgatatgcttaagttcagcgggtactcttatctgatttgagatcaagttagttttataattaaatttccttttttcaaggtcaattaggattttatttttaaaactgaaaagtttattccttttttacgggaaaattttatccaattttaataataaaaaccaaattggctttttaaaaaatcaatttaaagtgaaacaacttgttatcgttg

SEQ ID NO: 46 - DNA, 225 bp, unidentified
  misc_feature 1..225: note = ITS2 sequence of Cyllamyces
  source 1..225: mol_type = genomic DNA
tcctccgcttattgatatgcttaagttcagcgggtactcttatctgatttgagatcaagttaatttgacttttcctttttatgtcaaaagaaatcgctaattttaatattttttaaaattgtttaggttattcctttttacaggaaaattttatccaattttaaaaaaaatctttaaaattagtttaatgattttttttgataacaaagaatttaaagtgaaaca

SEQ ID NO: 47 - DNA, 225 bp, unidentified
  misc_feature 1..225: note = ITS2 sequence of Piromyces
  source 1..225: mol_type = genomic DNA
tcctccgcttattgatatgcttaagttcagcgggtactcttatctgatttgagatcaagttaatttgactttttccttttttaattcaaaaagaaatcaaaccaatttcatttttcttaaaattgtttaggttattccttttttacgggaaaattttatccaattttaaaaaaaatctttaaaattagtttttaaatgattttttttgataacaaagaatttaaa

SEQ ID NO: 48 - DNA, 225 bp, unidentified
  misc_feature 1..225: note = ITS2 sequence of Cyllamyces
  source 1..225: mol_type = genomic DNA
tcctccgcttattgatatgcttaagttcagcgggtactcttatctgatttgagatcaagttaatttttacttttttttccttgttagatctttttaaaaaatcaaactaattcatttattaaaattgtttaggttattcctttttacgggaaaattttatccaattttaaaaaaaaatcagtttttaaatgattttttaataagacaaagaatttaaagtgaaac

SEQ ID NO: 49 - DNA, 225 bp, unidentified
  misc_feature 1..225: note = ITS2 sequence of Piromyces
  source 1..225: mol_type = genomic DNA
tcctccgcttattgatatgcttaagttcagcgggtactcttatctgatttgagatcaagttatttaattaaattttcctttacttgggattttttctaaaaaaaatacaaaattgtttaggttattcctttttacgggaaaattttatccaattttatattaaaattagaaaaaatttcaataacaaaaaatttaaagtgaaacaacttgtatcgttgtaaaaca

SEQ ID NO: 50 - DNA, 225 bp, unidentified
  misc_feature 1..225: note = ITS2 sequence of Piromyces
  source 1..225: mol_type = genomic DNA
tcctccgcttattgatatgcttaagttcagcgggtactcttatctgatttgagatcaagttaatttttactttttcctttttttatcaagaaaaatcaaaccaattttaattttttaaaattgtttaaggttattcctttttacgggaaaattttatccaattttaaaaaatctttaaaattagcttttaatgatttttttgatgacaaagaatttaaagtgaaa

SEQ ID NO: 51 - DNA, 225 bp, unidentified
  misc_feature 1..225: note = ITS2 sequence of Neocallimastix
  source 1..225: mol_type = genomic DNA
tcctccgcttattgatatgcttaagttcagcgggtactcttatctgatttgagatcaagttatttaaaataaatttccttttaaaatcggaccgagatttctctaactaaaactgaaaagtttattcctttttacgggaaaattttatccaattttaattattaaaaccataaggtcttaaattaaaatgaatttaaagtgaaacaacttgtttatcgttataaa

SEQ ID NO: 52 - DNA, 225 bp, unidentified
  misc_feature 1..225: note = ITS2 sequence of Piromyces
  source 1..225: mol_type = genomic DNA
tcctccgcttattgatatgcttaagttcagcgggtactcttatctgatttgagatcaagttatttttaaataaattttccttttattttgaaaaattctaattaaaaattaaaattgtttaggttattcctttttacaggaaaattttatccaattttattttaaaattagaaaaaaatttcaaattttaaaaaaatttaaagtgaaacaacttgtatcgttgta

SEQ ID NO: 53 - DNA, 225 bp, unidentified
  misc_feature 1..225: note = ITS2 sequence of Neocallimastix
  source 1..225: mol_type = genomic DNA
tcctccgcttattgatatgcttaagttcagcgggtactcttatctgatttgagatcaagttatttaaattataaatttccttttaaaatcggaccgagatttctctaactaaaactgaaaagtttattccttttttacgggaaaattttatccaattttaattattaaaaccatattggtcttaattaaaatgaatttaaagtgaaacaacttatttatcgttgt

SEQ ID NO: 54 - DNA, 225 bp, unidentified
  misc_feature 1..225: note = ITS2 sequence of Saccharomycetales
  source 1..225: mol_type = genomic DNA
tcctccgcttattgatatgcttaagttcagcgggtattcctacctgatctgaggtcgagctcatagtgctcggagaccccaagcgtcctgttctagttcgctcgtggcctcgtttcttttcggcggggccgtggccgggccagctctgcgcaactctcgtcttgcaagaaggaaacgacgctcagacaggcatgcccgccggaatgccgacgggcgcaatgtgcg

SEQ ID NO: 55 - DNA, 225 bp, unidentified
  misc_feature 1..225: note = ITS2 sequence of Piromyces
  source 1..225: mol_type = genomic DNA
tcctccgcttattgatatgcttaagttcagcgggtactctcttatctgatttgagatcaagttatttaattaaattttccttttggattttttctaaaaaaatacaaaattgtttaggttattcctttttacgggaaaattttatccaattttatattaaaattagaaaaaatttcaataacaaaaaatttaaagtgaaacaacttgtatcgttgtaaaacactc

SEQ ID NO: 56 - DNA, 225 bp, unidentified
  misc_feature 1..225: note = ITS2 sequence of Orpinomyces
  source 1..225: mol_type = genomic DNA
tcctccgcttattgatatgcttaagttcagcgggtactcttatctgatttgagatcaagttatttataaataaatttcctttaactgtaccggtatggaaattattaaaattagaaaaaatttcaataatcaaaaaatttaaagtgaaacaacttgtatcgttgtaaaacactcatcaccataaaaacaaaaaagtttttatgagaatattttactgatactcaa

SEQ ID NO: 57 - DNA, 225 bp, unidentified
  misc_feature 1..225: note = ITS2 sequence of Piromyces
  source 1..225: mol_type = genomic DNA
tcctccgcttattgatttgcttaagttcagcgggtactcttatctgatttgagatcaagttatttaattaaattttcctttacttgggattttttctaaaaaaaatacaaaattgtttaggttattcctttttacgggaaaattttatccaattttatattaaaattagaaaaaatttcaataatcaaaaaatttaaagtaaaacaacttgtttatcgttgtaaa

SEQ ID NO: 58 - DNA, 225 bp, unidentified
  misc_feature 1..225: note = ITS2 sequence of Phyllosticta capitalensis
  source 1..225: mol_type = genomic DNA
tcctccgcttattgatatgcttaagttcagcgggtagtcctacctgatttgaggtcagagattaagaaatattggtgttgtaagcagacactgaccactcgggtgacgaaacttattacgtcaagctaatgggtcatccactaacgcatttaaggcgagccagatggcaacgcccaagtccaagccgattaggaaaccctaatggttgatatttcatgacactca

SEQ ID NO: 59 - DNA, 225 bp, unidentified
  misc_feature 1..225: note = ITS2 sequence of Orpinomyces
  source 1..225: mol_type = genomic DNA
tcctccgcttattgatatgcttcagttcagcgggtactcttatctgatttgagatcaagttatttataaataaatttcctttaaactgtacggtatggaaactattaaaatttctaaaaaactgaaatagtttattcctttttacgggaaaattttatccaattttttaaaaaaattaaatcgttccaaccgacgatttcaattaaaatccatttaaagtgaaac

SEQ ID NO: 60 - DNA, 225 bp, unidentified
  misc_feature 1..225: note = ITS2 sequence of Orpinomyces
  source 1..225: mol_type = genomic DNA
tcctcgcttattgatatgcttagttcagcgggtactcttatctgatttgagatcaagttatttataaataaatttcctttaactgtacggtatggaaactaattaaaatttctaaaaaactgaaatagcttattccttttttacgggaaaattttatccaattttttaaaaaaattaaaatcgttcccaaccgacgatttcaattaaaatccatttaaagtgaaa

SEQ ID NO: 61 - DNA, 225 bp, unidentified
  misc_feature 1..225: note = Encodes 16S rRNA from Corynebacterium
  source 1..225: mol_type = genomic DNA
agagtttgatcctggctcaggacgaacgctggcggcgtgcttaacacatgcaagtcgaacggaaaggcccagcttgctgggtgctcgagtggcgaacgggtgagtaacacgtgggtgatctgcccctaacttcgggataagcttgggaaactgggtctaataccggataggacaatcgtttagtgtcggttgtggaaagttttttcggttagggatgagcccgcg

SEQ ID NO: 62 - DNA, 225 bp, unidentified
  misc_feature 1..225: note = Encodes 16S rRNA from Prevotella
  source 1..225: mol_type = genomic DNA
agagtttgatcatggctcaggatgaacgctagctacaggcttaacacatgcaagtcgaggggtaacatgaagaaagcttgctttctttgatgacgaccggcgcacgggtgagtatcgcgtatccaacctgcccataagtagggaatagccttgcgaaagtaagattaatgccctatggtttccattaaagacatctgagatggaataaagatttatcgcttatgg

SEQ ID NO: 63 - DNA, 225 bp, unidentified
  misc_feature 1..225: note = Encodes 16S rRNA from Comamonas
  source 1..225: mol_type = genomic DNA
agagtttgatcctggctcagattgaacgctggcggcatgccttacacatgcaagtcgaacggtaacgggtccttcgggatgccgacgagtggcgaacgggtgagtaatacatcggaacgtgcctggtagtgggggataactactcgaaagagtggctaataccgcatgagatctcaggatgaaagcaggggaccctcgggccttgcgctatcagagcggccgatg

SEQ ID NO: 64 - DNA, 225 bp, unidentified
  misc_feature 1..225: note = Encodes 16S rRNA from Clostridium XlVa
  source 1..225: mol_type = genomic DNA
agagtttgatcctggctcaggatgaacgctggcggcgtgcctaacacatgcaagtcgaacgagcgagagatgaaacctagtgattctcaagcgagtggcggacgggtgagtaacgcgtgggtaacctgccttacagagggggataacagtctgaaaagactgctaataccgcataagcacacagtaccgcatggtacagggtgaaaagatttatcactgtaagat

SEQ ID NO: 65 - DNA, 225 bp, unidentified
  misc_feature 1..225: note = Encodes 16S rRNA from Hippea
  source 1..225: mol_type = genomic DNA
agagtttgatcatggctcagagttaacgctggcggcgtgcctaacacatgcaagtcgagcgaattcttacagagtatcgtaagagttagcggcaaacgggtgagtaacacatgggaaacctcccttagaatggggaacatctccgtgaaaacggagctaataccgcataagaccacagtttggcatcaaacaggggtaaaagcagcaatgcgttctaagatggtc

SEQ ID NO: 66 - DNA, 225 bp, unidentified
  misc_feature 1..225: note = Encodes 16S rRNA from Anaerovorax
  source 1..225: mol_type = genomic DNA
agagtttgatcatggctcaggatgaacgctggcggcgtgcctaacacatgcaagtcgagcgagaaacctgtaattgacgcttcggtagattttacaggcggaaagcggcggacgggtgagtaacgcgtaggcaacctgccccatgcacagggatagcctcgggaaaccgggattaaaacctgatgataccgcattgtcacatgacggagcggtcaaagatttatc

SEQ ID NO: 67 - DNA, 225 bp, unidentified
  misc_feature 1..225: note = Encodes 16S rRNA from Clostridium XlVa
  source 1..225: mol_type = genomic DNA
agagtttgatcatggctcaggatgaacgctggcggcgtgcctaacacatgcaagtcgaacggaaatgtttagatgaagttttcggatggattcttttcattttagtggcggacgggtgagtaacacgtgggtaacctgccctgtaccgggggataacacttagaaataggtgataataccgcataagcgcacactgacgcatgtcagagtgtgaaaaactccggt

SEQ ID NO: 68 - DNA, 225 bp, unidentified
  misc_feature 1..225: note = Encodes 16S rRNA from Rummeliibacillus
  source 1..225: mol_type = genomic DNA
agagtttgatcctggctcaggacgaacgctggcggcgtgcctaatacatgcaagtcgagcgaatgacgaggagcttgctcctctgatttagcggcggacgggtgagtaacacgtgggtaacctgccctgtagactgggataacttcgggaaaccggagctaataccggataatccttttaacctcatggttttaagttgaaaggcgcttcggcgtcactacagga

SEQ ID NO: 69 - DNA, 225 bp, unidentified
  misc_feature 1..225: note = Encodes 16S rRNA from Clostridium XlVa
  source 1..225: mol_type = genomic DNA
agagtttgatcctggctcaggatgaacgctggcggcgtgcctaacacatgcaagtcgaacggaaatgttttgatgaagatttcggttggattcatttcattttagtggcggacgggtgagtaacacgtgggtaacctgccctgtaccgggggataacacttagaaataggtgataataccgcataagcgcacactgacgcatgtcagagtgtgaaaaactccggt

SEQ ID NO: 70 - DNA, 225 bp, unidentified
  misc_feature 1..225: note = Encodes 16S rRNA from Lachnospiracea incertae sedis
  source 1..225: mol_type = genomic DNA
agagtttgatcctggctcaggatgaacgctggcggcgtgcttaacacatgcaagtcgagcgaagcactctggaagattccttcgggatgattccttagtgacttagcggcggacgggtgagtaacgcgtgggcaacctgccttgtacagggggataacagttagaaatgactgctaataccgcataagcacacagcatggcatcatgcagtgtgaaaaactccgg

SEQ ID NO: 71 - DNA, 225 bp, unidentified
  misc_feature 1..225: note = Encodes 16S rRNA from Prevotella
  source 1..225: mol_type = genomic DNA
agagtttgatcatggctcaggatgaacgctagctacaggcttaacacatgcaagtcgaggggcatcaggacggtagcttgctatcgttgctggcgaccggcgcacgggtgagtaacgcgtatccaaccttcccatgactccggttcagcccgccgaaaggcggattactcccggatggtttccgaagagggcatctgatttggaataaagattgatcggtcatgg

SEQ ID NO: 72 - DNA, 225 bp, unidentified
  misc_feature 1..225: note = Encodes 16S rRNA from Anaerovorax
  source 1..225: mol_type = genomic DNA
agagtttgatcatggctcaggatgaacgctggcggcgtgcctaacacatgcaagtcgagcgagaaacctgcaaatgaagtttcgacagattttacaggcggaaagcggcggacgggtgagtaacgcgtaggcaacctgccccttgcacagggatagcctcgggaaaccgggattaaaacctgataacaccgcactttcacatgtaagagcggtcaaagatttatc

SEQ ID NO: 73 - DNA, 225 bp, unidentified
  misc_feature 1..225: note = Encodes 16S rRNA from Pseudoflavonifractor
  source 1..225: mol_type = genomic DNA
agagtttgatcatggctcaggacgaacgctggcggcgtgcttaacacatgcaagtcgaacggacgatttcccttcggggagaaagttagtggcggacgggtgagtaacgcgtgagtaacctgccttggaatgggggataacacagggaaacctgtgctaataccgcataacatcgcgttggggcatcccaatgcgatcaaagatttattgttccaagatgggctc

SEQ ID NO: 74 - DNA, 225 bp, unidentified
  misc_feature 1..225: note = Encodes 16S rRNA from Prevotella
  source 1..225: mol_type = genomic DNA
agagtttgatcatggctcaggatgaacgctagctacaggcttaacacatgcaagtcgaggggcagcatgtatctggcttgccagatatgatggcgaccggcgcacgggtgcgtaacgcgtgttcgacctaccctttactcgggaacagcccatcgaaagatggattaatgcccgatgttctccctatatcgcatggtatttggagcaaagatttatcggtagagg

SEQ ID NO: 75 - DNA, 225 bp, unidentified
  misc_feature 1..225: note = Encodes 16S rRNA from Clostridium XlVa
  source 1..225: mol_type = genomic DNA
agagtttgatcctggctcaggatgaacgctggcggcgtgcctaacacatgcaagtcgagcggagatacttgataagcttgcttaatgagtatcttagcggcggatgggtgaggaacgcgtggagaacctgcccttcacagggggataacagctggaaacggctgttaataccgcatatgctcacagcgccgcatggcgcagggaggaaagcgcacagtggtgaag

SEQ ID NO: 76 - DNA, 225 bp, unidentified; identical to SEQ ID NO: 75
  misc_feature 1..225: note = Encodes 16S rRNA from Clostridium XlVa
  source 1..225: mol_type = genomic DNA

SEQ ID NO: 77 - DNA, 184 bp, unidentified
  misc_feature 1..184: note = Encodes 16S rRNA from Coprococcus
  source 1..184: mol_type = genomic DNA
agagtttgatcatggctcaggataaacgctggcggcgtgctttggacaatgggggaaaccctgatccagcgacgccgcgtgaacgatgaagtatttcggtatgtaaagttctatcagcagggaagataatgacggtacctgactaagaagcaccggctaaatacgtgccagcagccgcggtaat

SEQ ID NO: 78 - DNA, 225 bp, unidentified
  misc_feature 1..225: note = Encodes 16S rRNA from Pyramidobacter
  source 1..225: mol_type = genomic DNA
agagtttgatcatggctcaggatgaacgctggcggcgtgcttaacacatgcaagttgcgcggggatctgacgatgagacttcggtggatttgttagatccaagcggcggacgggtgagtaaagcacaaggacgtgtccgagcgagggggacaactgcgggaaaccgtagctaataccccgtaagccgagaggtgaaagcagcaatgcgcgagcggagcgacttgt

SEQ ID NO: 79 - DNA, 225 bp, unidentified
  misc_feature 1..225: note = Encodes 16S rRNA from Syntrophococcus
  source 1..225: mol_type = genomic DNA
agagtttgatcctggctcaggatgaacgctggcggcgtgcctaacacatgcaagtcgagcggagtgtgacgagtgcttgcacatgtcatacttagcggcggatgggtgaggaacgcgtggagaacctgcctctcacagggggataacagttggaaacgactgttaataccgcatatgctcacggtgccgcatggcacagggaggaaagatttcatcggtgagaga

SEQ ID NO: 80 - DNA, 225 bp, unidentified
  misc_feature 1..225: note = Encodes 16S rRNA from Prevotella
  source 1..225: mol_type = genomic DNA
agagtttgatcctggctcaggatgaacgctagctacaggcttaacacatgcaagtcgaggggcagcatgttgtgtgcttgcacacaatgatggcgaccggcgcacgggtgagtaacgcgtatccaaccttcccatgactccggttcagcccgccgaaaggcggattactcccggatggtttccgaagagggcatctgatttggaataaagattgatcggtcatgg

SEQ ID NO: 81 - DNA, 225 bp, unidentified
  misc_feature 1..225: note = Encodes 16S rRNA from Clostridium XlVa
  source 1..225: mol_type = genomic DNA
agagtttgatcctggctcaggatgaacgctggcggcgtgcctaacacatgcaagtcgaacgaagcactttggaagcttgcttttaaagtgactgagtggcggacgggtgagtaacgcgtggataacctgcctcacacagggggataacagttagaaatgactgctaataccgcatatgcctacagtaccgcatggtacaggagggaaagatttatcggtgtgaga

SEQ ID NO: 82 - DNA, 225 bp, unidentified
  misc_feature 1..225: note = Encodes 16S rRNA from Prevotella
  source 1..225: mol_type = genomic DNA
agagtttgatcatggctcaggatgaacgctagctacaggcttaacacatgcaagtcgcggggcatcatgacgatagcttgctattgttgatggcgaccggcgcacgggtgagtaacgcgtatccaacctgcccccaagtagggcacagcccggcgaaagtcggattaattccctatgtggtcatgttatggcatcagtatatgactaaaggctttggttgcttgg

SEQ ID NO: 83 - DNA, 225 bp, unidentified
  misc_feature 1..225: note = Encodes 16S rRNA from Roseburia
  source 1..225: mol_type = genomic DNA
agagtttgatcatggctcaggatgaacgctggcggcgtgcttaacacatgcaagtcgaacgaagcacctggtcacgatcccttcggggtgacgaccttgtgactgagtggcggacgggtgagtaacgcgtgggaaacctgccatgtactgggggataacagttggaaacgactgctaataccgcataaaactgtcggatcgcatgatctgatagccaaaactccg

SEQ ID NO: 84 - DNA, 225 bp, unidentified
  misc_feature 1..225: note = Encodes 16S rRNA from Clostridium XlVa
  source 1..225: mol_type = genomic DNA
agagtttgatcctggctcaggatgaacgctggcggcgtgcctaacacatgcaagtcgagcggagaggttgcggagattcaatcgatgatctgcttcttcttagcggcggatgggtgagtaacacgtgggtaacctgccctgcactggggaataacagttggaaacgactgttaataccgcatatgcgcacggggtcgcatgaccccgggcggaaagatttatcgg

SEQ ID NO: 85 - DNA, 225 bp, unidentified
  misc_feature 1..225: note = Encodes 16S rRNA from Lachnospiracea incertae sedis
  source 1..225: mol_type = genomic DNA
agagtttgatcctggctcaggatgaacgctggcggcgtgcttaacacatgcaagtcgagcgaagcactctggaagattccttcgggatgattccttagtgacttagcggcggacgggtgagtaacgcgtgggcaacctgccttgtacagggggataacagttagaaatgactgctaataccgcataagcgcacagcatggcatcatgcagtgcgaaaaactccgg

SEQ ID NO: 86 - DNA, 225 bp, unidentified
  misc_feature 1..225: note = Encodes 16S rRNA from Clostridium XlVa
  source 1..225: mol_type = genomic DNA
agagtttgatcctggctcaggatgaacgctggcggcgtgcttaatacatgcaagtcgaacggagtacttagaagaagttttcggaccaattctttgtacttagtggcggacgggtgagtaacgcgtgggtaacctgccgtatgcagggggacaacagccggaaacagctgctaataccgcataagccggcagcaccgcatggtgcagtcggaaaagatttatcgg

SEQ ID NO: 87 - DNA, 225 bp, unidentified
  misc_feature 1..225: note = Encodes 16S rRNA from Acidothermus
  source 1..225: mol_type = genomic DNA
agagtttgatcctggctcaggatgaacgctggcggcgtgcttaacacatgcaagtcgaacgagaacgttcccttcggggaactagtaaagtggcgaacgggtgagtaacacgtgggcaacctaccccttacattgggataacgcagagaaatttgcgctaataccggatacttcgttttgagggcatcctcgttacgagaaagcttttgcggtaagggatgggcc

SEQ ID NO: 88 - DNA, 225 bp, unidentified
  misc_feature 1..225: note = Encodes 16S rRNA from Adlercreutzia
  source 1..225: mol_type = genomic DNA
agagtttgatcctggctcaggatgaacgctggcggcgtgcctaacacatgcaagtcgaacggttaaaccggcttcggccggaaatagagtggcgaacgggtgagtaacacgtgaccaacctgccccgcgcaccgggatagccccccgaaagggggattaataccggatgcgccgggagggccgcatggccctcccgggaaagcctttgcggcgcgggatggggtc

SEQ ID NO: 89 - DNA, 225 bp, unidentified
  misc_feature 1..225: note = Encodes 16S rRNA from Prevotella
  source 1..225: mol_type = genomic DNA
agagtttgatcctggctcaggatgaacgctagctacaggcttaacacatgcaagtcgaggggcagcatgggagttgcttgcaattcccgatggcgaccggcgcacgggtgagtaacgcgtatccaaccttcccttaactccggaatagcccgctgaaaggcggattaatgccggatgcggtccagcgagggcatctgacccggaccaaaggttttctccggttaa

SEQ ID NO: 90 - DNA, 225 bp, unidentified
  misc_feature 1..225: note = Encodes 16S rRNA from Lachnospiracea incertae sedis
  source 1..225: mol_type = genomic DNA
agagtttgatcctggctcaggatgaacgctggcggcgtgcctaacacatgcaagtcgaacggggtaaggacaccggatgaagattcgtcagattccaccgtccttacttagtggcggacgggtgagtaacgcgtgggcaacctgccctgtacaggggaatagcagctggaaacggctggtaaaaccgcatatgcgcgcagtaccgcatggtacagcgcggaaaac

SEQ ID NO: 91 - DNA, 225 bp, unidentified
  misc_feature 1..225: note = Encodes 16S rRNA from Proteiniclasticum
  source 1..225: mol_type = genomic DNA
agagtttgatcatggctcaggacgaacgctggcggcgtgcctaacacatgcaagtcgagcggggattatgctggaaggttttcggactggaaggtatgatcttagcggcggacgggtgagtaacgcgtgagcaacctgccttcaacagggggataacgcatcgaaagatgtgctaataccgcgtaagaccatagtaccgcatggtacaggggtcaaaggagcaat

SEQ ID NO: 92 - DNA, 225 bp, unidentified
  misc_feature 1..225: note = Encodes 16S rRNA from Lachnospiracea incertae sedis
  source 1..225: mol_type = genomic DNA
agagtttgatcctggctcaggataaacgctggcggcgtgcttaacacatgcaagtcgaacggggttatttcgagtagcttgctacatgaaataacctagtggcggacgggtgagtaacgcgtgggaaacctgcctcgtactgggggataacagttggaaacgactgttaataccgcataagcgcacgatgtcgcatgacatagtgtgaaaaactccggtggtacg

SEQ ID NO: 93 - DNA, 225 bp, unidentified
  misc_feature 1..225: note = Encodes 16S rRNA from Anaerovorax
  source 1..225: mol_type = genomic DNA
agagtttgatcctggctcaggatgaacgctggcggcgtgcctaacacatgcaagtcgagcgtgattcactgaaatgatacttcggtagaaatttcagtgatgaaagcggcggacgggtgagtaacgcgtaggcaacctgccctttgcagggggatagccgttggaaacgacgattaaaaccccataatgcagcctgatctcctgttcgggctgccaaagatttat

SEQ ID NO: 94 - DNA, 225 bp, unidentified
  misc_feature 1..225: note = Encodes 16S rRNA from Prevotella
  source 1..225: mol_type = genomic DNA
agagtttgatcctggctcaggatgaacgctagctacaggcttaacacatgcaagtcgaggggcagcagggcaatagcttgctattgttgctggcgaccggcgcacgggtgagtaacgcgtatccaacctaccccgcggtcagggacagcccggcgaaagtcggattaatacctgatgcagtcagaagagggcatctgattttgacgaaagattgatcgcctcggg

SEQ ID NO: 95 - DNA, 225 bp, unidentified
  misc_feature 1..225: note = Encodes 16S rRNA from Bacteroides
  source 1..225: mol_type = genomic DNA
agagtttgatcctggctcaggatgaacgctagctacaggcctaacacatgcaagtcgcggggcagcattgaggtagcaatacctcagatggcgaccggcgcacgggtgcgtaacgcgtatccaacctggcccttactcgggtatagccctgcgaaagtaggattaatccccgatgttgtcaagatggagccttttttcttgaccaaaggcattagtcggtaaggg

SEQ ID NO: 96 - DNA, 225 bp, unidentified
  misc_feature 1..225: note = Encodes 16S rRNA from Clostridium III
  source 1..225: mol_type = genomic DNA
agagtttgatcatggctcaggacgaacgctggcggcatgcctaacacatgcaagtcgaacggagttacaagagcttgcttttgtaacttagtggcggacgggtgagtaacgcgtgagcaacctacccttcagtggggaataatgttttgaaaagaacactaataccgcatgacatatgaccaccgcatgatggacatatcaaaggatttatttgctgaaggatgg

SEQ ID NO: 97 - DNA, 225 bp, unidentified
  misc_feature 1..225: note = Encodes 16S rRNA from Prevotella
  source 1..225: mol_type = genomic DNA
agagtttgatcatggctcaggatgaacgctagctacaggcttaacacatgcaagtcgaggggcagcgggaggaaagcttgctttccttgccggcgaccggcgcacgggtgcgtaacgcgtatcgaacctggcccatacacggggatagtctcctgaaagggaggttaatacccggcggtcccacttggtcgcatgactgtgtgggtgaagattcatcggtatggg

SEQ ID NO: 98 - DNA, 225 bp, unidentified
  misc_feature 1..225: note = Encodes 16S rRNA from Acinetobacter
  source 1..225: mol_type = genomic DNA
agagtttgatcatggctcagattgaacgctggcggcaggcttaacacatgcaagtcgagcggagataggtagcttgctactgattcttagcggcggacgggtgagtaatgcttaggaatctgcctattagtgggggacaacgtttcgaaagggacgctaataccgcatacgccctacgggggaaagcaggggatcttcggaccttgcgctaatagatgagcctaa

SEQ ID NO: 99 - DNA, 225 bp, unidentified
  misc_feature 1..225: note = Encodes 16S rRNA from Erysipelothrix
  source 1..225: mol_type = genomic DNA
agagtttgatcctggctcaggataaacgctggcggcgtgcctaatacatgcaagtcgaacggacatagcttgctatgtcagtggcgaacgggtgagtaatacataagcaacctgcctacagggaccgggataacacttggaaacgagcgctaataccggataggcaggatcggggcatcctgatcctgttaaagttgagagacacaagtagatgggcttatggcg

SEQ ID NO: 100 - DNA, 225 bp, unidentified
  misc_feature 1..225: note = Encodes 16S rRNA from Bacteroides
  source 1..225: mol_type = genomic DNA
agagtttgatcatggctcaggatgaacgctagctacaggcttaacacatgcaagtcgaggggcagcattaagtcagcttgctgatttagatggcgaccggcgcacgggtgagtaacgcgtatccaacctgccccctacccggggatagccttgcgaaagtaagattaatacccggtgcagttatgattccgcatgggaatataacgaaagattcatcggtagggg

SEQ ID NO: 101 - DNA, 225 bp, unidentified
  misc_feature 1..225: note = Encodes 16S rRNA from Clostridium XlVa
  source 1..225: mol_type = genomic DNA
agagtttgatcctggctcaggatgaacgctggcggcgtgcctaacacatgcaagtcgaacggagatattacggatgaaggattcgtctggaatctgttttatcttagtggcggacgggtgagtaacgcgtggagaacctgcctctttccgggggatagcagttggaaacgactggtaataccgcatgagcgcacagtaccgcatggtacggggtgaaaagattta

SEQ ID NO: 102 - DNA, 225 bp, unidentified
  misc_feature 1..225: note = Encodes 16S rRNA from Butyrivibrio
  source 1..225: mol_type = genomic DNA
agagtttgatcatggctcaggatgaacgctggcggcgtgcctaacacatgcaagtcgaacggagtttagatgaaacctagtgattctaaacttagtggcggacgggtgagtaacgcgtgggtaacctgccctatagagtgggatagcagttagaaatgactgataataccacataagaccacagtacggcatcgtacaggggtcaaagatttatcgctataggat

SEQ ID NO: 103 - DNA, 225 bp, unidentified
  misc_feature 1..225: note = Encodes 16S rRNA from Eubacterium
  source 1..225: mol_type = genomic DNA
agagtttgatcctggctcaggatgaacgctggcggcgtgcctaacacatgcaagtcgagcgagatatccatgacgaattcttcggatgcctgaatggatggaaagcggcggacgggtgagtaacgcgtaggtaacctgccctgtacaaggggatagccactggaaacggtgattaataccttatgacaccgcagcatcacatggtgaagcggtcaaagattttat

SEQ ID NO: 104 - DNA, 225 bp, unidentified
  misc_feature 1..225: note = Encodes 16S rRNA from Prevotella
  source 1..225: mol_type = genomic DNA
agagtttgatcctggctcaggatgaacgctagctacaggcttaacacatgcaagtcgaggggcagcatgaaggaagcttgcttcctttgatggcgaccggcgcacgggtgagtaacgcgtatccaaccttcccttaacttgggaatagcccggtgaaaaccggattaatgcccgatgtggtccagcgagggcatctgacccggaccaaagagtttttcggttaag

SEQ ID NO: 105 - DNA, 225 bp, unidentified
  misc_feature 1..225: note = Encodes 16S rRNA from Eubacterium
  source 1..225: mol_type = genomic DNA
agagtttgatcatggctcaggatgaacgctggcggcgtgcttaacacatgcaagtcgagcgagaaacttacagatgacgcttcggttgattcagtaagcggaaagcggcggacgggtgagtaacgcgtaggcaacctgcccctggcagagggatagcatcgggaaactgatattaagacctcataacgcatccatatcacatgatgaggatgccaaagatttatc

SEQ ID NO: 106 - DNA, 225 bp, unidentified
  misc_feature 1..225: note = Encodes 16S rRNA from Prevotella
  source 1..225: mol_type = genomic DNA
agagtttgatcatggctcaggatgaacgctagctacaggcttaacacatgcaagtcgaggggcagcatgacgagtgcttgcacttgttgatggcgaccggcgcacgggtgcgtaacgcgtatcgaaccttccccttactcgggaatagcccggtgaaaaccgaattaatgcccgatatatatttagatggcatcagaagagtatgaaagatttatcggtaaggga

SEQ ID NO: 107 - DNA, 225 bp, unidentified
  misc_feature 1..225: note = Encodes 16S rRNA from Lachnospiracea incertae sedis
  source 1..225: mol_type = genomic DNA
agagtttgatcatggctcaggatgaacgctggcggcgtgcctaacacatgcaagtcgaacggaccttttacagactgcgattcgtcaaaggaagttcaaggttagtggcggacgggtgagtaacgcgtgggtaacctgcctcgtagagggggataacagttggaaacgattgctaataccgcataagcccacaggaccgcatggtccagggggaaaagattcatc

SEQ ID NO: 108 - DNA, 225 bp, unidentified
  misc_feature 1..225: note = Encodes 16S rRNA from Coprococcus
  source 1..225: mol_type = genomic DNA
agagtttgatcatggctcaggatgaacgctggcggcgtgcctaacacatgcaagtcgaacggagtgttacttcttcggagggaacacttagtggcggacgggtgagtaacgcgtgggtaacctgcctcatacagggggatagcagttggaaacgactgataataccgcataagcgcacagtaccgcatggtacagtgtgaaaaactccggtggtatgagatggac

SEQ ID NO: 109 - DNA, 204 bp, unidentified
  misc_feature 1..204: note = Encodes 16S rRNA from Prevotella
  source 1..204: mol_type = genomic DNA
agagtttgatcatggctcaggatgaacgctagctacaggctttggtcaatgggcgagagcctgaaccagccaagtagcgtgcaggatgacggccctatgggttgtaaactgcttttgtatggggataaagtgctccacgtgtggagttttgtaggtaccatacgaataaggaccggctaattccgtgccagcagccgcggtaat

SEQ ID NO: 110 - DNA, 225 bp, unidentified
  misc_feature 1..225: note = Encodes 16S rRNA from Clostridium XlVa
  source 1..225: mol_type = genomic DNA
agagtttgatcatggctcaggatgaacgctggcggcgtgcttaacacatgcaagtcgaacgaagcattttggttcaaagccttcgggcagcgaaacttaatgacttagtggcggacgggtgagtaacgcgtgggtaacctgccttgtactgggggataacagttagaaatgactgctaataccgcataagcccacggtttcgcatggaactgtgagaaaagattt

SEQ ID NO: 111 - DNA, 225 bp, unidentified
  misc_feature 1..225: note = Encodes 16S rRNA from Prevotella
  source 1..225: mol_type = genomic DNA
agagtttgatcatggctcaggatgaacgctagctacaggcttaacacatgcaagtcgaggggcagcatgtaggttgcttgcaacctatgatggcgaccggcgcacgggtgcgtaacgcgtatccaaccttccccgcagtagggtgcagcccgttgaaagacggattaatcccctatgttgtccattgacggcatccgatttggacgaaagatttcatcgctgcgg

SEQ ID NO: 112 - DNA, 225 bp, unidentified
  misc_feature 1..225: note = Encodes 16S rRNA from Catonella
  source 1..225: mol_type = genomic DNA
agagtttgatcctggctcaggatgaacgctggcggcgtgcctaacacatgcaagtcgaacggaggacttcggaagaagtcttcggatggattccgatgttcttagtggcggacgggtgagtaacgcgtgggtaatctgccctgtatcggggaatagcagctggaaacggctggtaataccgcgtacgccggttggatcgcatgatccgatcgggaaactttttaa

SEQ ID NO: 113 - DNA, 225 bp, unidentified
  misc_feature 1..225: note = Encodes 16S rRNA from Methanobrevibacter
  source 1..225: mol_type = genomic DNA
agagtttgatcatggcagaagctactgctattgggattcgattaagccatgcaagtcgaacgaatttagattcgtggcgtacggctcagtaacacgtggataacctacccttaggactgggataactctgggaaactggggctaataccggatagatgatttttcttggaatgggattttgtttaaatgttttttcgcctaaggatgggtctgcggcagattagg

SEQ ID NO: 114 - DNA, 225 bp, unidentified
  misc_feature 1..225: note = Encodes 16S rRNA from Ruminococcus
  source 1..225: mol_type = genomic DNA
agagtttgatcctggctcaggacgaacgctggcggcacgcctaacacatgcaagtcgaacggtgaatacttagcttgctttgtattcatagtggcggacgggtgagtaacacgtgagcaacctgcctctgagagagggatagcttctggaaacggatggtaatacctcatgatatagcgttctcgcatgagaatgctatcaaacgaatttcgctcagagatgggc

SEQ ID NO: 115 - DNA, 225 bp, unidentified
  misc_feature 1..225: note = Encodes 16S rRNA from Lachnospiracea incertae sedis
  source 1..225: mol_type = genomic DNA
agagtttgatcatggctcaggatgaacgctggcggcacgcttaacacatgcaagtcgaacgaggcgaggagtgcttgcacaccgaacctagtggcggacgggtgcgtaacgcgtgggtaacctgccctaaacagggggataacgtatagaaatgtacgctaataccgcataagctcacggaaccgcatggttttgagggaaaaggatttccggtttaggatgggc

SEQ ID NO: 116 - DNA, 184 bp, unidentified
  misc_feature 1..184: note = Encodes 16S rRNA from Coprococcus
  source 1..184: mol_type = genomic DNA
agagtttgatcatggctcaggataaacgctggcggcgtgctttgcacaatgggggaaaccctgatgcagcgacgccgcgtgagtgatgaagtatctcggtatgtaaagctctatcagcagggaagataatgacggtacctgactaagaagcaccggctaaatacgtgccagcagccgcggtaat

SEQ ID NO: 117 - DNA, 225 bp, unidentified
  misc_feature 1..225: note = Encodes 16S rRNA from Clostridium XlVa
  source 1..225: mol_type = genomic DNA
agagtttgatcatggctcaggatgaacgctggcggcgtgcctaacacatgcaagtcgaacgaagcacttaattacgatcccttcggggtgacgattttgtgacttagtggcggacgggtgagtaacgcgtgggtaacctgccctgtactgggggacaacagttggaaacggctgctaataccgcataagcgcacgatatcgcatggtattgtgtgaaaaactccg

SEQ ID NO: 118 - DNA, 225 bp, unidentified
  misc_feature 1..225: note = Encodes 16S rRNA from Lachnospiracea incertae sedis
  source 1..225: mol_type = genomic DNA
agagtttgatcatggctcaggataaacgctggcggcgtgcttaacacatgcaagtcgaacggggttatttcgagaagcttgcttcatgaaataacctagtggcggacgggtgagtaacgcgtgggaaacctgcctcgtactgggggataacagttggaaacgactgttaataccgcataagcgcacaatgttgcatgacatagtgtgaaaaactccggtggtacg

SEQ ID NO: 119 - DNA, 225 bp, unidentified
  misc_feature 1..225: note = Encodes 16S rRNA from Prevotella
  source 1..225: mol_type = genomic DNA
agagtttgatcctggctcaggatgaacgctagctacaggcttaacacatgcaagtcgcggggcagcatgttgtgtgcttgcacacaatgatggcgaccggcgcacgggtgcgtaacgcgtatccaacctgccccttactctggaatagcccggcgaaagtcggattaatgccggatgttgtcagatgaggacatctgagtttgaccaaaggcttctgccggtaag

SEQ ID NO: 120 - DNA, 225 bp, unidentified
  misc_feature 1..225: note = Encodes 16S rRNA from Anaerovorax
  source 1..225: mol_type = genomic DNA
agagtttgatcatggctcaggatgaacgctggcggcgtgcctaacacatgcaagtcgagcgagaaacttatgattgacgcttcggttgatttcataagcggaaagcggcggacgggtgagtaacgcgtaggcaacctgccccttgcagagggatagcctcgggaaaccgggattaaaacctcataatgctgatcctacacatgtttgatcagccaaagatttatc

SEQ ID NO: 121 - DNA, 225 bp, unidentified
  misc_feature 1..225: note = Encodes 16S rRNA from Asteroleplasma
  source 1..225: mol_type = genomic DNA
agagtttgatcctggctcaggataaacgccggcggcgtgcctaatacatgcaagtcgaacgagaggtagcaatacctcgagtggcgtacgggtgagtaacacgttgggaacctgccccagggaccggaataccagacggaaacgtctgctaatgccggatgacgatccggaagcgtcggcttccggatccaaaggcggccttcaagccgcgccacgggatggccc

SEQ ID NO: 122 - DNA, 225 bp, unidentified
  misc_feature 1..225: note = Encodes 16S rRNA from Clostridium XlVa
  source 1..225: mol_type = genomic DNA
agagtttgatcctggctcaggatgaacgctggcggcgcgcataacacatgcaagtcgaacggagtttagatgaaacctagtgattttaaacttagtggcggacgggtgagtaacgcgtgggtaacctacctggtattgggggacaacagttagaaatgactgctaataccgcatacgacatcggagaggcatctctctgatgtgaaaggagcaatccgatagcag

SEQ ID NO: 123 - DNA, 225 bp, unidentified
  misc_feature 1..225: note = Encodes 16S rRNA from Caulobacter
  source 1..225: mol_type = genomic DNA
agagtttgatcatggctcagaacgaacgctggcggcatgcctaacacatgcaagtcgaacgagaccttcgggtctagtggcgcacgggtgcgtaacgcgtgggaatctgcccttgggttcggaataactcgccgaaaggcgtgctaataccggatgatgtcgtaagaccaaagatttatcgcccagggatgagcccgcgtaagattaggtagttggtgaggtaaa

SEQ ID NO: 124 - DNA, 225 bp, unidentified
  misc_feature 1..225: note = Encodes 16S rRNA from Lachnospiracea incertae sedis
  source 1..225: mol_type = genomic DNA
agagtttgatcatggctcaggataaacgctggcggcgtgcttaacacatgcaagtcgaacggggttatttcgagtagcttgctacatgaaataacctagtggcggacgggtgagtaacgcgtgggaaacctgcctcgtactgggggataacagttggaaacgactgttaataccgcataagcgcacagtgtcgcatgacacagtgtgaaaaactccggtggtacg

SEQ ID NO: 125 - DNA, 225 bp, unidentified
  misc_feature 1..225: note = Encodes 16S rRNA from Roseburia
  source 1..225: mol_type = genomic DNA
agagtttgatcatggctcaggatgaacgctggcggcgtgcctaacacatgcaagtcgagcggacctgattgagtgattagcttgctatgaactcatgactggttagcggcggacgggtgagtaacgcgtgggtaacctgcctcatacagggggatagcagttggaaacgactggtaataccgcataagcgcacagtaccgcatggtacggtgtgaaaaactccgg

SEQ ID NO: 126 - DNA, 225 bp, unidentified
  misc_feature 1..225: note = Encodes 16S rRNA from Clostridium XlVa
  source 1..225: mol_type = genomic DNA
agagtttgatcatggctcaggatgaacgctggcggcgtgcctaacacatgcaagtcgaacggagtatcaatgaagcctagcgatttgatacttagtggcggacgggtgagtaacgcgtggataacctgcctcacacattgggataacagttagaaatggctgctaataccgaataagcccacagtgccgcatgacacagggggaaaagattttatcggtgtgaga

SEQ ID NO: 127 - DNA, 225 bp, unidentified
  misc_feature 1..225: note = Encodes 16S rRNA from Acinetobacter
  source 1..225: mol_type = genomic DNA
agagtttgatcctggctcagattgaacgctggcggcaggcttaacacatgcaagtcgagcggagataggtagcttgctactgattcttagcggcggacgggtgagtaatgcttaggaatctgcctattagtgggggacaacgtttcgaaagggacgctaataccgcatacgccctacgggggaaagcaggggatcttcggaccttgcgctaatagatgagcctaa

SEQ ID NO: 128 - DNA, 225 bp, unidentified
  misc_feature 1..225: note = Encodes 16S rRNA from Bacteroides
  source 1..225: mol_type = genomic DNA
agagtttgatcatggctcaggatgaacgctagctacaggcttaacacatgcaagtcgaggggcagcattaaggaagcttgctttcttagatggcgaccggcgcacgggtgagtaacgcgtatccaacctgccccctacccggggatagccttgcgaaagtaagattaatacccggtgctgttatgattccgcatgggaatataacgaaagattcatcggtagggg

SEQ ID NO: 129 - DNA, 225 bp, unidentified
  misc_feature 1..225: note = Encodes 16S rRNA from Erysipelothrix
  source 1..225: mol_type = genomic DNA
agagtttgatcatggctcaggatgaacgctggcggcgtgcttaatacatgcaagtcgaacgcaagcgatcacttcggtggtcaattgagtggcgaacgggtgagtaatacataaggaacctgcccgtctgactgggataacagttggaaacgactgctaataccggataggtaaccttaaggcatcttgaggttattaaagttgagatacacagacggatggcct

SEQ ID NO: 130 - DNA, 225 bp, unidentified
  misc_feature 1..225: note = Encodes 16S rRNA from Coprococcus
  source 1..225: mol_type = genomic DNA
agagtttgatcatggctcaggatgaacgctggcggcgtgcctaacacatgcaagtcgaacggggtgtctgatcttcggactggacacttagtggcggacgggtgagtaacgcgtgggtaacctgcctcatacagggggatagcagttggaaacgactgataataccgcataagcgcacagtaccgcatggtacagtgtgaaaaactccggtggtatgagatggac

SEQ ID NO: 131 - DNA, 225 bp, unidentified
  misc_feature 1..225: note = Encodes 16S rRNA from Clostridium XlVa
  source 1..225: mol_type = genomic DNA
agagtttgatcctggctcaggatgaacgctggcggcgtgcctaacacatgcaagtcgaacggacccaaggaagagagtagcttgctatgaacttccggaaggttagtggcggacgggtgagtaacgcgtgggcaacctgccctgtactgggggatagcagctggaaacggctggtaataccgcataagcgcacagtaccgcatggtacagtgtgaaaagctccga

SEQ ID NO: 132 - DNA, 198 bp, unidentified
  misc_feature 1..198: note = Encodes 16S rRNA from Bacteroides
  source 1..198: mol_type = genomic DNA
agagtttgatcatggctcaggatgaacgctagctacaggcttaacacatgcaagtcgaggggcagcatgaacttagcttgctaagtttgatggcgaccggcgcacgggtgagtaacgcgtatccgaccttccctttgctcggggatagcccagtgaaaactggattaagacccgatgtagtccagcagccgcggtaat

SEQ ID NO: 133 - DNA, 225 bp, unidentified
  misc_feature 1..225: note = Encodes 16S rRNA from Coprococcus
  source 1..225: mol_type = genomic DNA
agagtttgatcatggctcaggatgaacgctggcggcgtgcctaacacatgcaagtcgaacggggtgtcatttcttcggagacgacacttagtggcggacgggtgagtaacgcgtgggtaacctgcctcatacagggggatagcagttggaaacgactgataataccgcataagcgcacagtaccgcatggtacagtgtgaaaaactccggtggtatgagatggac

SEQ ID NO: 134 - DNA, 225 bp, unidentified
  misc_feature 1..225: note = Encodes 16S rRNA from Anaerovorax
  source 1..225: mol_type = genomic DNA
agagtttgatcctggctcaggatgaacgctggcggcgtgcctaacacatgcaagtcgagcgagaaacttacagatgacgcttcggtcgattcagtaagcggaaagcggcggacgggtgagtaacgcgtaggcaacctgcccttcacacagggatagcctctggaaacggggattaaaacctgataacgcataactgttgcatatcagatatgccaaagatttatc

SEQ ID NO: 135 - DNA, 225 bp, unidentified
  misc_feature 1..225: note = Encodes 16S rRNA from Pseudoflavonifractor
  source 1..225: mol_type = genomic DNA
agagtttgatcatggctcaggatgaacgctggcggcgcgcctaacacatgcaagtcgaacggtgaagtcccttcgggggcggatcagtggcggacgggtgagtaacgcgtgagtaacctgcccttacgagcggaataacgtccggaaacagacgctaataccgcatgacacgtgcttccggcatcggaggcacgtcaaagatttatcgcgtaaggatggactcgc

SEQ ID NO: 136 - DNA, 225 bp, unidentified; identical to SEQ ID NO: 135
  misc_feature 1..225: note = Encodes 16S rRNA from Pseudoflavonifractor
  source 1..225: mol_type = genomic DNA

SEQ ID NO: 137 - DNA, 225 bp, unidentified
  misc_feature 1..225: note = Encodes 16S rRNA from Prevotella
  source 1..225: mol_type = genomic DNA
agagtttgatcatggctcaggatgaacgctagctacaggcttaacacatgcaagtcgaggggcagcatgacgagagcttgctcttgttgatggcgaccggcgcacgggtgcgtaacgcgtatccaaccttccccctgccagggaacagcccgttgaaagacggattaatgccctatgttgtgcgaagatggcatcagatttgcacgaaagattttatcggcatgg

SEQ ID NO: 138 - DNA, 185 bp, unidentified
  misc_feature 1..185: note = Encodes 16S rRNA from Lachnospiracea incertae sedis
  source 1..185: mol_type = genomic DNA
agagtttgatcatggctcaggatgaacgctggcggcgtgcctatgcacaatggaggaaactctgatgcagcaacgccgcgtgagtgatgaagtagttcgctacgtaaagctctatcagtagggaagataatgacggtacctacacaagaagctccggctaaatacgtgccagcagccgcggtaat

SEQ ID NO: 139 - DNA, 225 bp, unidentified
  misc_feature 1..225: note = Encodes 16S rRNA from Roseburia
  source 1..225: mol_type = genomic DNA
agagtttgatcatggctcaggatgaacgctggcggcgtgcctaacacatgcaagtcgagcggagatgcagaacggaagccttcgggtggaagatctgttatcttagcggcggacgggtgagtaacgcgtgggtaacctggctcatacagggggataacagagagaaatttctgctaataccgcataagcgcacagcatcgcatggtgcagtgtgaaaaactccgg

SEQ ID NO: 140 - DNA, 204 bp, unidentified
  misc_feature 1..204: note = Encodes 16S rRNA from Prevotella
  source 1..204: mol_type = genomic DNA
agagtttgatcatggctcaggatgaacgctagctacaggctttggtcaatggatgagaatctgaaccagccaagtagcgtgcaggacgacggccctatgggttgtaaactgcttttgtacggggataaaggagcttacgtgtaagtttttgcaggtaccgtacgaataaggaccggctaattccgtgccagcagccgcggtaat

SEQ ID NO: 141 - DNA, 225 bp, unidentified
  misc_feature 1..225: note = Encodes 16S rRNA from Ruminococcus
  source 1..225: mol_type = genomic DNA
agagtttgatcatggctcaggacgaacgctggcggcacgcctaacacatgcaagtcgaacggtagatacttagcttgctttgtatctatagtggcggacgggtgagtaacacgtgagcaacctgcctctgagagagggatagcttctggaaacggatggtaatacctcatgatatagcgttctcgcatgggaatgctatcaaaagaaattcgctcagagatgggc

SEQ ID NO: 142 - DNA, 225 bp, unidentified
  misc_feature 1..225: note = Encodes 16S rRNA from Atopobium
  source 1..225: mol_type = genomic DNA
agagtttgatcctggctcaggatgaacgctggcggcgcgcctaacacatgcaagtcgaacgattaagacaccttcgggtgtgtataaagtggcgaacggctgagtaacacgtgggcaacctacccctctctctgggatagcctcgagaaatcgtgggtaataccggatactccggatccatcgcatggtggatccgggaaagctccgacggtgagggatgggccc

SEQ ID NO: 143 - DNA, 225 bp, unidentified
  misc_feature 1..225: note = Encodes 16S rRNA from Eubacterium
  source 1..225: mol_type = genomic DNA
agagtttgatcctggctcaggatgaacgctggcggcgtgcttaacacatgcaagtcgaacggaacttattgaatgaagttttcggatggattttgataagtttagtggcggacgggtgagtaacgcgtgggtaacctgccctgtacagggggataacagttagaaatgactgttaataccgcataagaccacagcaccgcatggtgcaggggtaaaagctccgac

SEQ ID NO: 144 - DNA, 225 bp, unidentified
  misc_feature 1..225: note = Encodes 16S rRNA from Robinsoniella
  source 1..225: mol_type = genomic DNA
agagtttgatcctggctcaggatgaacgctggcggcgtgcctaacacatgcaagtcgaacggggtgtcagctcttcggaacggacacttagtggcggacgggtgagtaacgcgtgggtaacctgcctcatacagggggatagcagttggaaacgactgataataccgcataagcgcacagtaccgcatggtacagtgtgaaaaactccggtggtatgagatggac

SEQ ID NO: 145 - DNA, 225 bp, unidentified
  misc_feature 1..225: note = Encodes 16S rRNA from Neisseria
  source 1..225: mol_type = genomic DNA
agagtttgatcctggctcagattgaacgctggcggcatgctttacacatgcaagtcggacggcagcatcaagaagcttgcttcttggatggcgagtggcgaacgggtgagtaatgcatcggaatgtaccgagtaatgggggataactaatcgaaagattagctaataccgcatacgacctgagggtgaaagcaggggatcttcggaccttgcgttattcgagcag

SEQ ID NO: 146 - DNA, 225 bp, unidentified
  misc_feature 1..225: note = Encodes 16S rRNA from Ruminococcus
  source 1..225: mol_type = genomic DNA
agagtttgatcctggctcaggacgaacgctggcggcacgcttaacacatgcaagtcgaacggagataatagcttcggttattaacttagtggcggacgggtgagtaacacgtgagcaacctgccttacagagcggaataatgactggaaacggtcactaataccacataacatatggagatcgcatggtatccatatcaaagatttatcgctgtaagatgggctc

SEQ ID NO: 147 - DNA, 225 bp, unidentified
  misc_feature 1..225: note = Encodes 16S rRNA from Prevotella
  source 1..225: mol_type = genomic DNA
agagtttgatcatggctcaggatgaacgctagctacaggcttaacacatgcaagtcgaggggcagcatgcaggaagcttgctttctgtgatggcgaccggcgcacgggtgcgtaacgcgtatccaatctaccctgcacacgggaatagccctgcgaaagtaggattaatgcccgatgttctttttttgttgcatgacagagaaagcaaagatttatcggtacagg

SEQ ID NO: 148 - DNA, 225 bp, unidentified
  misc_feature 1..225: note = Encodes 16S rRNA from Slackia
  source 1..225: mol_type = genomic DNA
agagtttgatcatggctcaggatgaacgctggcggcgtgcttaacacatgcaagtcgaacggttaaagcccacttcggtgggtgcataaagtggcgaacgggtgagtaacacgtgaccaacccgccccccgcaccgggataaccggcggaaacgcccgctaataccggatactccgcgacggccgcatggccgacgcgggaaagcccaggcggcgggggatgggg

SEQ ID NO: 149 - DNA, 225 bp, unidentified
  misc_feature 1..225: note = Encodes 16S rRNA from Prevotella
  source 1..225: mol_type = genomic DNA
agagtttgatcatggctcaggatgaacgctagctacaggcttaacacatgcaagtcgcggggcatcatgaagggagcttgctctctttgatggcgaccggcgcacgggtgagtaacgcgtatccaacctgccccctagtagggaacagcccgtagaaatgcggattaatgccctatgttctccgaagacggcatcagattcggagcaaaggccttttggttgcta

SEQ ID NO: 150 - DNA, 225 bp, unidentified
  misc_feature 1..225: note = Encodes 16S rRNA from Clostridium XlVa
  source 1..225: mol_type = genomic DNA
agagtttgatcctggctcaggatgaacgctggcggcgtgcctaacacatgcaagtcgagcggagttataagagcttgcttttataacttagcggcggatgggtgaggaacgcgtggataacctgcctcacactgggggataacagctggaaacggctgttaataccgcatatgctcacagtaccgcatggtacagggaggaaagatttatcggtgtgagatggat

SEQ ID NO: 151 - DNA, 225 bp, unidentified; identical to SEQ ID NO: 100
  misc_feature 1..225: note = Encodes 16S rRNA from Bacteroides
  source 1..225: mol_type = genomic DNA

SEQ ID NO: 152 - DNA, 225 bp, unidentified
  misc_feature 1..225: note = Encodes 16S rRNA from Anaerorhabdus
  source 1..225: mol_type = genomic DNA
agagtttgatcatggctcaggatgaacgctggcggcgtgcctaatacatgcaagtcgaacggggtaccttcgggtacctagtggcgaacgggtgagtaacacataaacaatctgccctggagactgggataccgtcgggaaaccgacgctaataccggataggcagtaagggggcatccccatactgttaaagctgggttgcagcgctgcaggatgagtttatgt

SEQ ID NO: 153 - DNA, 225 bp, unidentified
  misc_feature 1..225: note = Encodes 16S rRNA from Bacteroides
  source 1..225: mol_type = genomic DNA
agagtttgatcctggctcaggatgaacgctagctacaggcttaacacatgcaagtcgaggggcagcatggaagtagcttgctacttccgatggcgaccggcgaatgggtgagtaacgcgtatccaacctgccgtgtgctcatggatagcccttagaaatgaggattaatacatgatggtctcctttgatcgcctgagattgggagtaaagattcatcggcacacg

SEQ ID NO: 154 - DNA, 225 bp, unidentified
  misc_feature 1..225: note = Encodes 16S rRNA from Prevotella
  source 1..225: mol_type = genomic DNA
agagtttgatcctggctcaggatgaacgctagctacaggcttaacacatgcaagtcgaggggcagcatgacggtagcttgctactgttgatggcgaccggcgcacgggtgagtaacgcgtatccaaccttcccacaaataaggaatagcccggtgaaaatcgaattaataccttatgtggtcataagaggacatctgattatgattaaagatttatcgtttgtgg

SEQ ID NO: 155 - DNA, 225 bp, unidentified
  misc_feature 1..225: note = Encodes 16S rRNA from Corynebacterium
  source 1..225: mol_type = genomic DNA
agagtttgatcctggctcaggacgaacgctggcggcgtgcttaacacatgcaagtcgaacggtaaggctccagcttgctggggtacacgagtggcgaacgggtgagtaacacgtgggtgacctgccctgcacttcgggataagcctgggaaactgggtctaataccggataggactgcaccgtgagggtgtggtggaaagttttttcggtgtgggatgggcccgc

SEQ ID NO: 156 - DNA, 225 bp, unidentified
  misc_feature 1..225: note = Encodes 16S rRNA from Atopobium
  source 1..225: mol_type = genomic DNA
agagtttgatcctggctcaggatgaacgctggcggcgcgcttaacacatgcaagtcgaacggttaaagccccttcgggggtgtataaagtggcgaacggctgagtaacacgtgggcaacctacccccctctttgggatagcctcgggaaaccgggaataataccgaatactccggacacaccgcatgatgtgaccgggaaagctccggcggagagggatgggccc

SEQ ID NO: 157 - DNA, 225 bp, unidentified
  misc_feature 1..225: note = Encodes 16S rRNA from unidentified taxa
  source 1..225: mol_type = genomic DNA
agagtttgatcctggctcaggatgaacgctggcggcatgcttaacacatgcaagtcgaacgggaagtggtgtttccagtggcgaacgggtgagtaacgcgtaagaacctgcccttgggaggggaacaacaactggaaacggttgctaataccccgtaggctgaggagcaaaaggagaaatccgcccaaggaggggctcgcgtctgattagctagttggtgaggca

SEQ ID NO: 158 - DNA, 225 bp, unidentified
  misc_feature 1..225: note = Encodes 16S rRNA from Prevotella
  source 1..225: mol_type = genomic DNA
agagtttgatcatggctcaggatgaacgctagctacaggcttaacacatgcaagtcgcggggcagcatggaggttgcttgcaacctctgatggcgaccggcgcacgggtgagtaacgcgtatccaacctgccctgcggtagggaacagcccggcgaaagtcggattaatgccctatgtgctcatttgaaggcatctgattttgagcaaaggatttattcgccaca

SEQ ID NO: 159 - DNA, 225 bp, unidentified
  misc_feature 1..225: note = Encodes 16S rRNA from Roseburia
  source 1..225: mol_type = genomic DNA
agagtttgatcatggctcaggatgaacgctggcggcgtgcctaacacatgcaagtcgaacgagagaggaaggtgcttgcaccgaccaatcgagtggcggacgggtgagtaacgcgtgggtaacctgcctcatacagggggataacaactggaaacggttgataataccgcataagcgcacagcatcgcatgatgcagtgtgaaaaactccggtggtatgagatgg

SEQ ID NO: 160 - DNA, 225 bp, unidentified
  misc_feature 1..225: note = Encodes 16S rRNA from Prevotella
  source 1..225: mol_type = genomic DNA
agagtttgatcctggctcaggatgaacgctagctacaggcttaacacatgcaagtcgcggggcagcatggaggttgcttgcaacctctgatggcgaccggcgcacgggtgcgtaacgcgtatccaacctgccccttactctggaatagcccggcgaaagtcggattaatgccggatgttgtcagacgaggacatctgaatctgaccaaaggcccgaaagggttgg

SEQ ID NO: 161 - DNA, 225 bp, unidentified
  misc_feature 1..225: note = Encodes 16S rRNA from Prevotella
  source 1..225: mol_type = genomic DNA
agagtttgatcctggctcaggatgaacgctagctacaggcttaacacatgcaagtcgaggggtagcgtgagagaagcttgcttctcttgacgacgaccggcgaatgggtgagtaacgcgtatccaacctgcccttatctcaaggatagcccttagaaatgaggattaaaacttgatagtttccattgaccgcatgggtgatggaataaagatttattggataagg

SEQ ID NO: 162 - DNA, 225 bp, unidentified
  misc_feature 1..225: note = Encodes 16S rRNA from Eubacterium
  source 1..225: mol_type = genomic DNA
agagtttgatcctggctcaggattaacgctggcggcgtgcctaacacatgcaagtcgagcgagaaatagtgaagagatacttcggttgaacagatctatggacagcggcggacgggtgagtaacgcgtgggcaacctgcccctttccggaggatagccaagggaaactttgaataatactccataaagcagagatgtcgcatggcaattctgccaaagatttatc

SEQ ID NO: 163 - DNA, 225 bp, unidentified
  misc_feature 1..225: note = Encodes 16S rRNA from Rhodocista
  source 1..225: mol_type = genomic DNA
agagtttgatcatggctcagaacgaacgctggcggcaggcttaacacatgcaagttgaacggtatgttgagtgcttgcacttagcagagagtagcgcactggtgagtaacacgtgggaacatgccctaaagtacgggatagcgtctggaaacggacgataatacggtatacgccctgagggggaaagatttatcgctttaggattggcccgcggcagattaggta

SEQ ID NO: 164 - DNA, 225 bp, unidentified
  misc_feature 1..225: note = Encodes 16S rRNA from Prevotella
  source 1..225: mol_type = genomic DNA
agagtttgatcatggctcaggatgaacgctagctacaggcttaacacatgcaagtcgaggggtaacatgattggagcttgctccgattgatgacgaccggcgcacgggtgcgtaacgcgtatccaaccttccccctaccagggaatagcccgttgaaagacggattaatgccctatgttgtgtgataatggcatcagagttacacgaaagactttgtcggtatgg

SEQ ID NO: 165 - DNA, 225 bp, unidentified
  misc_feature 1..225: note = Encodes 16S rRNA from Clostridium XlVa
  source 1..225: mol_type = genomic DNA
agagtttgatcctggctcaggatgaacgctggcggcgtgcctaacacatgcaagtcgaacggagctgcgacgctgaggagtggagtacttgtacaaagcgaatcttgtcgtagcttagtggcggacgggtgagtaacgtgtggataacctggtccatccagggggatagcagctggaaacggctggtaataccgcataagcgcacagtagggcatcctacggtgt

SEQ ID NO: 166 - DNA, 225 bp, unidentified
  misc_feature 1..225: note = Encodes 16S rRNA from Prevotella
  source 1..225: mol_type = genomic DNA
agagtttgatcctggctcaggatgaacgctagctacaggcttaacacatgcaagtcgaggggcagcatgtcgtgtgcttgcacacgatgatggcgaccggcgcacgggtgagtaacgcgtatccaacctgcccatgactccgggatagcccgctgaaaagcggattaacaccggatgcggtcgaacgaggacatctgatttcgaccaaagcttcggcggtcatgg

SEQ ID NO: 167 - DNA, 225 bp, unidentified
  misc_feature 1..225: note = Encodes 16S rRNA from Prevotella
  source 1..225: mol_type = genomic DNA
agagtttgatcctggctcaggatgaacgctagctacaggcttaacacatgcaagtcgaggggcagcatgtcgtgtgcttgcacacgatgatggcgaccggcgcacgggtgagtaacgcgtatccaacctgcccatgaccccgggatagcccgctgaaaagcggattaacaccggatggggtcgaacgaggacatctgatttcgaccaaagcttcggcggtcatgg

SEQ ID NO: 168 - DNA, 225 bp, unidentified
  misc_feature 1..225: note = Encodes 16S rRNA from unidentified taxa
  source 1..225: mol_type = genomic DNA
agagtttgatcatggctcaggatgaacgctggcggcatgccttacacatgcaagtcggacgggaagtggtgtttccagtggcggacgggtgagtaacgcgtaagaacctacccttgggaggggaacaacagctggaaacggctgctaataccccgtaggctgaggagcaaaaggaggaatccgcccgaggaggggctcgcgtctgattagctagttggtgaggca

SEQ ID NO: 169 - DNA, 225 bp, unidentified
  misc_feature 1..225: note = Encodes 16S rRNA from Ochrobactrum
  source 1..225: mol_type = genomic DNA
agagtttgatcatggctcagaacgaacgctgtcgacatgctttacacatgcaagtcttacgggtataacttgttataccagtggcaaacgggtgagtaatacgtagaaatgtacccaatagtcttgaataacaattggaaacgattgataatacaagatattatggtaacataaaaggtttagtaataaactgctattggagcagtctacggtggattagattgt

SEQ ID NO: 170 - DNA, 225 bp, unidentified
  misc_feature 1..225: note = Encodes 16S rRNA from Mogibacterium
  source 1..225: mol_type = genomic DNA
agagtttgatcatggctcaggatgaacgctggcggcgtgcctaatacatgcaagtcgagcgagaatctcctttgaagcgttttcggacaattctgtggagaggaaagcggcggacgggtgagtaacgcgtaggcaacctgcccttagcagagggatagccattggaaacgatgattaaaacctcataatgctgaagagtcacatgtctcttcagccaaagattta

SEQ ID NO: 171 - DNA, 225 bp, unidentified
  misc_feature 1..225: note = Encodes 16S rRNA from Adlercreutzia
  source 1..225: mol_type = genomic DNA
agagtttgatcctggctcaggatgaacgctggcggcgtgcttaacacatgcaagtcgaacggttaaaccgccttcgggcggacatagagtggcgaacgggtgagtaacacgtgaccaacctgccccgcgcaccgggacagccccccgaaagggggattaataccggatactccggcggccccgcatggggcggccgggaaggctccggcggcgcgggatggggtc

SEQ ID NO: 172 - DNA, 225 bp, unidentified
  misc_feature 1..225: note = Encodes 16S rRNA from Prevotella
  source 1..225: mol_type = genomic DNA
agagtttgatcctggctcaggatgaacgctagctacaggcttaacacatgcaagtcgaggggtaacgtgagagaagcttgcttctcttgacgacgaccggcgaatgggtgagtaacgcgtatccaacctgccgcacgcccgggaacagcccttggaaacgaggattaaatcccgataccttgtgagctcgcatgagcatacaagaaaacaggcatgcgatgggga

SEQ ID NO: 173 - DNA, 225 bp, unidentified
  misc_feature 1..225: note = Encodes 16S rRNA from Riemerella
  source 1..225: mol_type = genomic DNA
agagtttgatcctggctcaggatgaacgctagcgggaggcctaacacatgcaagccgagcggtagaaagtagcttgctacttttgagagcggcgtacgggtgcgtaacacgtgtgcaacctgcctttatctggggaatagcctttcgaaaggaagattaatgctccataacatattgaatggcatcatttaatattgaaagctccggcggatagagatgggcacg

SEQ ID NO: 174 - DNA, 225 bp, unidentified
  misc_feature 1..225: note = Encodes 16S rRNA from Prevotella
  source 1..225: mol_type = genomic DNA
agagtttgatcctggctcaggatgaacgctagctacaggcttaacacatgcaagtcgaggggtaacaggagggaagcttgctttcctcgctgacgaccggcgaatgggtgagtaacgcgtatccaacctgccgcacgcccgggaacagcccttggaaacgaggattaaatcccgataccttgcccttccgcatgaaggggcaagaaaacaggcatgcgatgggga

SEQ ID NO: 175 - DNA, 225 bp, unidentified
  misc_feature 1..225: note = Encodes 16S rRNA from Roseburia
  source 1..225: mol_type = genomic DNA
agagtttgatcatggctcaggatgaacgctggcggcgtgcttaacacatgcaagtcgaacgaggtttgagcggaagcccttcgggacggaagcttttaccgagtggcggacgggtgagtaacgcgtgggtaacctgccctgtactgggggacaacagttggaaacgactgctaataccgcataagcgcacgggatcgcatggtcttgtgtgaaaaactccggtgg

SEQ ID NO: 176 - DNA, 225 bp, unidentified
  misc_feature 1..225: note = Encodes 16S rRNA from Slackia
  source 1..225: mol_type = genomic DNA
agagtttgatcctggctcaggatgaacgctggcggcgcgcctaacacatgcaagtcgaacggtgatactttcttcggaaagaggatcagtggcgaacgggtgagtaacgcgtgggtaacctgcccttgacacagggatagcaaagggaaacttttggtaatacctgatgacctcaaaaagtgacatctctttttgagcaaagaatttcggtcgaggatggacccg

SEQ ID NO: 177 - DNA, 225 bp, unidentified
  misc_feature 1..225: note = Encodes 16S rRNA from Clostridium IV
  source 1..225: mol_type = genomic DNA
agagtttgatcatggctcaggacgaacgctggcggcgtgcctaacacatgcaagtcgaacggagttattagagtgaagttttcggatggaatgataataacttagtggcggacgggtgagtaacgcgtgagtaacctgcccatgagagggggataacgttctgaaaagaacgctaataccgcataacatatttagttcgcatggactgaatatcaaaggagcgat

SEQ ID NO: 178 - DNA, 225 bp, unidentified
  misc_feature 1..225: note = Encodes 16S rRNA from Syntrophococcus
  source 1..225: mol_type = genomic DNA
agagtttgatcatggctcaggatgaacgctggcggcgtgcctaacacatgcaagtcgagcggaaccataaagaagcttgctttttaatggtttagcggcggatgggtgaggaacgcgtgggcaacctgcccttcacagggggataacagctggaaacggctgttaataccgcatatgctcacgatgccgcatggcattgggaggaaaactccggtggtgaaggat

SEQ ID NO: 179 - DNA, 225 bp, unidentified
  misc_feature 1..225: note = Encodes 16S rRNA from Prevotella
  source 1..225: mol_type = genomic DNA
agagtttgatcctggctcaggatgaacgctagctacaggcttaacacatgcaagtcgaggggtaacgtgagagaagcttgcttctcttgacgacgaccggcgaatgggtgagtaacgcgtatccaacctgccgcacgcccgggaacagcccttggaaacgaggattaaatcccgataccttatcgttccgcatggagtgataagaaaacaggcatgcgatgggga

SEQ ID NO: 180 - DNA, 225 bp, unidentified
  misc_feature 1..225: note = Encodes 16S rRNA from Treponema
  source 1..225: mol_type = genomic DNA
agagtttgatcatggctcagaatgaacgctggcggcgggtcttaagcatgcaagtcggacggcaagggagtgcttgcactcccctagagtggcggactggtgaggaacacgttggtgacgtaccctttggatggggatagccggtagaaataccgggtaataccgaataaggtcggtggtctcggaagccaccgaggaaagcagcttcggctgcgccgaaggaac

SEQ ID NO: 181 - DNA, 225 bp, unidentified
  misc_feature 1..225: note = Encodes 16S rRNA from Prevotella
  source 1..225: mol_type = genomic DNA
agagtttgatcatggctcaggatgaacgctagctacaggcttaacacatgcaagtcgcggggcagcatgttgtgtgcttgcacacaatgatggcgaccggcgcacgggtgcgtaacgcgtatccaacctgccccttactctggaatagcccggcgaaagtcggattaatgccggatgttgtcagatgaggacatctgagtttgaccaaaggcttctgccggtaag

SEQ ID NO: 182 - DNA, 225 bp, unidentified
  misc_feature 1..225: note = Encodes 16S rRNA from Anaerovorax
  source 1..225: mol_type = genomic DNA
agagtttgatcctggctcaggatgaacgctggcggcgtgcctaacacatgcaagtcgagcgagaaacctttgattgacgcttcggttgatttcaaaggcggaaagcggcggacgggtgagtaacgcgtaggcaacctgccccttgcagagggatagcctcgggaaaccgggattaaaacctcataatgctgatcctacacatgtttgatcagccaaagatttatc

SEQ ID NO: 183 - DNA, 225 bp, unidentified
  misc_feature 1..225: note = Encodes 16S rRNA from Prevotella
  source 1..225: mol_type = genomic DNA
agagtttgatcctggctcaggatgaacgctagctacaggcttaacacatgcaagtcgaggggcagcatgaatcaagcttgcttgatttgatggcgaccggcgcacgggtgcgtaacgcgtgtccaacctacccaccgctcagggatagcccatcgaaagatgaattaatacctgatgttgtatgggaatcacatggcttccatactaaagatttatcggcgatgg

SEQ ID NO: 184 - DNA, 225 bp, unidentified
  misc_feature 1..225: note = Encodes 16S rRNA from Methanobrevibacter
  source 1..225: mol_type = genomic DNA
agagtttgatcatggcagaagctactgctattgggattcgattaagccatgcaagtcgaacgaatttagattcgtggcgtacggctcagtaacacgtggataacctacccttaggaccgggataaccctgggaaactggggctaatactggatagatgatttttcctggaatggttttttgtttaaatgttttttcgcctaaggatgggtctgcggcagattagg

SEQ ID NO: 185 - DNA, 225 bp, unidentified
  misc_feature 1..225: note = Encodes 16S rRNA from Corynebacterium
  source 1..225: mol_type = genomic DNA
agagtttgatcatggctcaggacgaacgctggcggcgtgcttaacacatgcaagtcgaacggaaaggccctgcttgcagggtactcgagtggcgaacgggtgagtaacacgtgggtgatctgccctgcacttcgggataagcctgggaaactgggtctaataccggataggaccatcgtttagtgtcggtggtggaaagtttttcggtgcaggatgagctcgcgg

SEQ ID NO: 186 - DNA, 225 bp, unidentified
  misc_feature 1..225: note = Encodes 16S rRNA from Clostridium XlVa
  source 1..225: mol_type = genomic DNA
agagtttgatcatggctcaggatgaacgctggcggcgcgcctaacacatgcaagtcgaacggagcatcattaatgagactttcgggtggatttgatgatgacttagtggcggacgggtgagtaacgcgtggggaacctgccctgtacagggggacaacagccggaaacagctgctaataccgcataagcgcacagtgccgcatggtacagtgtgaaaagccgaga

SEQ ID NO: 187 - DNA, 166 bp, unidentified
  misc_feature 1..166: note = Encodes 16S rRNA from Alkaliphilus
  source 1..166: mol_type = genomic DNA
agagtttgatcatggctcaggatgaacgctggcggcgtgcctaacacatgcaagtcgagcgagaatcagggaaatgaagcttcggtagattggaactgaggacagcggcggacgggtgagtaacgcgtgggcaacctgccccttactggtggatagccgcggtaat

SEQ ID NO: 188 - DNA, 225 bp, unidentified
  misc_feature 1..225: note = Encodes 16S rRNA from Ruminococcus
  source 1..225: mol_type = genomic DNA
agagtttgatcatggctcaggacgaacgctggcggcacgcctaacacatgcaagtcgaacggacgagaaggagcttgcttcttcaagttagtggcggacgggtgagtaacacgtgagcaacctgcctttaagagagggatagcttctggaaacggatggtaatacctcataacacatcgggaccgcatgattctgatgtcaaagatttatcgcttaaagatgggc

SEQ ID NO: 189 - DNA, 225 bp, unidentified
  misc_feature 1..225: note = Encodes 16S rRNA from Clostridium XlVa
  source 1..225: mol_type = genomic DNA
agagtttgatcatggctcaggatgaacgctggcggcgtgcttaacacatgcaagtcgaacggaacttattgaatgaagttttcggatggattttgataagtttagtggcggacgggtgagtaacgcgtgggtaacctgccctgtacagggggataacagttagaaatgactgttaataccgcataagaccacagtgccgcatggcacaggggtaaaagctgcgac

SEQ ID NO: 190 - DNA, 225 bp, unidentified
  misc_feature 1..225: note = Encodes 16S rRNA from Eubacterium
  source 1..225: mol_type = genomic DNA
agagtttgatcatggctcaggatgaacgctggcggcgtgcctaacacatgcaagtcgagcgagaagagaatgacctattcttcggatgaagccattctcggacagcggcggacgggtgagtaacacgtaggaaacctgccctttactgggggatagccgagggaaacttcgagtaataccccataacgcgttatgatcgcatgatcgaaacgccaaagatttatc

SEQ ID NO: 191 - DNA, 225 bp, unidentified
  misc_feature 1..225: note = Encodes 16S rRNA from Bacteroides
  source 1..225: mol_type = genomic DNA
agagtttgatcctggctcaggatgaacgctagctacaggcttaacacatgcaagtcgaggggcagcatgaacttagcttgctaagtttgatggcgaccggcgcacgggtgagtaacacgtatccaacctgcccatgactcagggatagccctctgaaaggaggattaatacctgatgcggttgactggggacatcccctttcaaccaaagattcatcggtcatgg

SEQ ID NO: 192 - DNA, 225 bp, unidentified
  misc_feature 1..225: note = Encodes 16S rRNA from Roseburia
  source 1..225: mol_type = genomic DNA
agagtttgatcctggctcaggatgaacgctggcggcgtgcctaacacatgcaagtcgaacggacccatggaaaagattagcttgctatgattttccggaaggttagtggcggacgggtgagtaacgcgtgggtaacctgcctcatacagggggatagcagttggaaacgactggtaataccgcataagcgcacagtaccgcatggtacagtgtgaaaaactccgg

SEQ ID NO: 193 - DNA, 225 bp, unidentified
  misc_feature 1..225: note = Encodes 16S rRNA from Lentisphaera
  source 1..225: mol_type = genomic DNA
agagtttgatcctggctcagaatgaacgctggcggcatggattaggcatgcaagtcgaacgagaaagcccgcaagggcgagtaaagtggcgaaagggtgagtaacacgtgagcaacctgcccccgagaccggaacaagcctgggaaaccgggtctgaaaccggatgaggaccgggaaggcatcttcccgcctccaaacattcatggctcggggatgggctcgcgg

SEQ ID NO: 194 - DNA, 225 bp, unidentified
  misc_feature 1..225: note = Encodes 16S rRNA from Eubacterium
  source 1..225: mol_type = genomic DNA
agagtttgatcctggctcaggattaacgctggcggcgtgcctaacacatgcaagtcgagcgagaattaaatgaatgattcttcggatgaattcgtttaaggacagcggcggacgggtgagtaacgcgtgggcaacctgcccctttccggaggatagccaagggaaactttgaataatactccataaagcatttttgccgcatgacagagatgccaaagatttatc

SEQ ID NO: 195 - DNA, 225 bp, unidentified
  misc_feature 1..225: note = Encodes 16S rRNA from Roseburia
  source 1..225: mol_type = genomic DNA
agagtttgatcatggctcaggatgaacgctggcggcgtgcctaacacatgcaagtcgagcggaccttagagagtgaacagcttgctgggatctttcgaaaggttagcggcggacgggtgagtaacgcgtgggtaacctgcctcatacagggggatagcagttggaaacgactggtaataccgcataagcgcacagtaccgcatggtacggtgtgaaaaactccgg

SEQ ID NO: 196 - DNA, 225 bp, unidentified
  misc_feature 1..225: note = Encodes 16S rRNA from Clostridium IV
  source 1..225: mol_type = genomic DNA
agagtttgatcatggctcaggatgaacgctggcggcatgcctaacacatgcaagtcgaacggagttattagacggaagccttcgggtggaagattaataacttagtggcggacgggtgagtaacgcgtgagtaacctgcctctcagagggggataacgttctgaaaagaacgctaataccgcatataatcaagaaaccgcatgattttttgatgaaaggagcaat

SEQ ID NO: 197 - DNA, 215 bp, unidentified
  misc_feature 1..215: note = Encodes 16S rRNA from Hahella
  source 1..215: mol_type = genomic DNA
agagtttgatcatggctcaggatgaacgctagctacaggcttaacacatgcaagtcgaggggaaaccctgatgcagccatgccgcgtgtgtgaagaaggccttcgggttgtaaagcacttttgcattcgaggaagacagcgtataaataaatgcgctatttgacgttagagtgtgaataagcaccggcaaactccgtgccagcagccgcggtaat

SEQ ID NO: 198 - DNA, 225 bp, unidentified
  misc_feature 1..225: note = Encodes 16S rRNA from Butyricicoccus
  source 1..225: mol_type = genomic DNA
agagtttgatcatggctcaggataaacgctggcggcgtgcataacacattcaagtcgaacggacgatacgagaaacttcggttttttgtaaagttagtggcggacgggtgagtaacgcgtgagcaatctgcctttgatagagggataacacatggaaacgtgtgctaataccgcataacgttaaagaaccgcatgattctttaaccaaagctccggcgatcaaag

SEQ ID NO: 199 - DNA, 225 bp, unidentified
  misc_feature 1..225: note = Encodes 16S rRNA from Clostridium IV
  source 1..225: mol_type = genomic DNA
agagtttgatcatggctcaggacgaacgctggcggcgtgcctaacacatgcaagtcgagcggacttgtatttggaaagtgcttgcaccggaagaatacaagttagcggcggacgggtgagtaacgcgtgagcaacctgtcctctacagggggataagatctcgaaagggattctaataccgcatgagaccacagcagggcatcctgcgggggtcaaaggaggaat

SEQ ID NO: 200 - DNA, 225 bp, unidentified
  misc_feature 1..225: note = Encodes 16S rRNA from Prevotella
  source 1..225: mol_type = genomic DNA
agagtttgatcatggctcaggatgaacgctagctacaggcttaacacatgcaagtcgcggggcagcatgggagttgcttgcaatttccgatggcgaccggcgcacgggtgcgtaacgcgtatccaacctacccgcaagtcagggccagcccggcgaaagtcggattaatccctgatgtggtgcgaagaggacatctgattcacattaaaggagcgatttgcttgc

SEQ ID NO: 201 - DNA, 225 bp, unidentified
  misc_feature 1..225: note = Encodes 16S rRNA from Clostridium IV
  source 1..225: mol_type = genomic DNA
agagtttgatcatggcttaggatgaacgctggcggcgtgcataacacattcaagtcgaacggtgaagggacttcggtcccggatcagtggcggacgggtgagtaacgcgtgagcaacctgccctgcagtgcgggataacagagggaaacttctgctaataccgcatatagcatcggaaccgcatgattccggtatgaaagatttattgctgcaggatgggctcgc

SEQ ID NO: 202 - DNA, 225 bp, unidentified
  misc_feature 1..225: note = Encodes 16S rRNA from Desulfovibrio
  source 1..225: mol_type = genomic DNA
agagtttgatcctggctcagattgaacgctggcggcgtgcttaacacatgcaagtcgaacgcgaaaggggcttcggccccgagtagagtggcgcacgggtgagtaacgcgtggataatctgcccctgcaactggaatagcgactggaaacggtcgataataccggatacgcccttgtcttacaatgaggggaaaggagacctctgcttgcaagtttccgtgcagg

SEQ ID NO: 203 - DNA, 225 bp, unidentified
  misc_feature 1..225: note = Encodes 16S rRNA from Sphingobacterium
  source 1..225: mol_type = genomic DNA
agagtttgatcatggctcaggatgaacgctagcggcaggcctaatacatgcaagtcgaacgggatctatgagtaagcttgcttacttttagtgagagtggcgcacgggtgcgtaacgcgtgagcaacctacccatatcagggggatagcccggagaaatccggattaacaccgcatgacacagcaattcggcatcgaatcactgttaaatatttataggatatgg

SEQ ID NO: 204 - DNA, 225 bp, unidentified
  misc_feature 1..225: note = Encodes 16S rRNA from Roseburia
  source 1..225: mol_type = genomic DNA
agagtttgatcctggctcaggatgaacgctggcggcgtgcctaacacatgcaagtcgagcggacctgattaagtgaatagcttgctatgaacttatgactggttagcggcggacgggtgagtaacgcgtgggtaacctgcctcatacagggggatagcagttggaaacgactggtaataccgcataagcgcacagtaccgcatggtacagtgtgaaaaactccgg

SEQ ID NO: 205 - DNA, 225 bp, unidentified
  misc_feature 1..225: note = Encodes 16S rRNA from Bacteroides
  source 1..225: mol_type = genomic DNA
agagtttgatcctggctcaggatgaacgctagcgacaggcctaacacatgcaagtcgaggggcagcatgagagtagcaatacttttgatggcgaccggcgcacgggtgcgtaacaggtgtgcaatctgtccataatcggggaatagcccgccgaaaggtgaattaacgctccatgtgtaatgaagaggcatctctttattatgaaacgtaaggattatgggtgag

SEQ ID NO: 206 - DNA, 225 bp, unidentified
  misc_feature 1..225: note = Encodes 16S rRNA from Ruminococcus
  source 1..225: mol_type = genomic DNA
agagtttgatcatggctcaggacgaacgctggcggcacgcctaacacatgcaagtcgaacggtgtttatcagcttgctggtaaacatagtggcggacgggtgagtaacacgtgagcaacctgccttcaagagagggatagcttctggaaacggatggtaataccttataatatatactggccgcatgaccggtatatcaaacgaattttgcttgaagatgggctc

SEQ ID NO: 207 - DNA, 225 bp, unidentified
  misc_feature 1..225: note = Encodes 16S rRNA from Prevotella
  source 1..225: mol_type = genomic DNA
agagtttgatcatggctcaggatgaacgctagcggcaggcttaacacatgcaagtcgaggggcatcgggtccagcaatggatgccggcgaccggcgaaagggtgagtaacgcgtgagcaacgtgcccgtctgagggggatagtcattggaaacgatgcgtaataccccgtaacaacagtcaccgcatggtgggtgtttgaaagatttattgcagacggatcggct

SEQ ID NO: 208 - DNA, 225 bp, unidentified
  misc_feature 1..225: note = Encodes 16S rRNA from Asteroleplasma
  source 1..225: mol_type = genomic DNA
agagtttgatcctggctcaggataaacgccggcggcgtgcctaatacatgcaagtcgaacgaggctcttcggagccgagtggcgtacgggtgagtaacacgttggtaacctgccctccagaccggaataccagagagaaatctctgctaatgccggatgacgtcatatggtcgcaagaccacttgaccaaaggcggcaactgccgcgctgaaggatggacctgcg

SEQ ID NO: 209 - DNA, 225 bp, unidentified
  misc_feature 1..225: note = Encodes 16S rRNA from Syntrophococcus
  source 1..225: mol_type = genomic DNA
agagtttgatcatggctcaggatgaacgctggcggcgtgcctaacacatgcaagtcgagcggacttatgatgagattcttcggatgatttttataagttagcggcggatgggtgaggaacgcgtggagaacctgcccttcacagggggataacagttggaaacgactgttaataccgcatatgctcacgcgaccgcatggtcgagtgaggaaagctccggcggtg

SEQ ID NO: 210 - DNA, 225 bp, unidentified
  misc_feature 1..225: note = Encodes 16S rRNA from Victivallis
  source 1..225: mol_type = genomic DNA
agagtttgatcatggctcagaatgaacgctggcggcatggattaggcatgcaagtcgaacgccccggtccctcgggtccggggagtggcgaaagggtgcgcaacgcgtggggaacccgcccccgggcccgggacaagcgctggaaacggcgtctaataccggatggaggggccgccggcatcggcggctgccgaaagtcttctcgcccggggagggccccgcgtc

SEQ ID NO: 211 - DNA, 225 bp, unidentified
  misc_feature 1..225: note = Encodes 16S rRNA from Lachnobacterium
  source 1..225: mol_type = genomic DNA
agagtttgatcctggctcaggatgaacgctggcggcgtgcttaacacatgcaagtcgaacgaagcacctggtcacgatcccttcggggtgacgaccttgtgactgagtggcggacgggtgagtaacgcgtgggaaacctgccatgtactgggggataacagttggaaacggctgctaataccgcataacactgttggatcgcatgatccgatagccaaaactccg

SEQ ID NO: 212 - DNA, 225 bp, unidentified
  misc_feature 1..225: note = Encodes 16S rRNA from Lachnospiracea incertae sedis
  source 1..225: mol_type = genomic DNA
agagtttgatcatggctcaggatgaacgctggcggcgtgcttaacacatgcaagtcgaacgaagctcttacgacagatctcttcggagtgaagatgtttgagactgagtggcggacgggtgagtaacgcgtgggtaacctgcctcatagagggggacaacagttggaaacgactgctaataccgcatagtaagaaagaaccgcatgattttttcttgaaagcttt

SEQ ID NO: 213 - DNA, 225 bp, unidentified
  misc_feature 1..225: note = Encodes 16S rRNA from Clostridium IV
  source 1..225: mol_type = genomic DNA
agagtttgatcatggctcaggatgaacgctggcggcgtgcataacacattcaagtcgaacggacgccttcgggcgccagtggcggacgggtgagtaacgcgtgaggaacctgccgcggattggggaataacgaccggaaacagtcgctaataccgcataacgcacagaggccgcatgacctttgtgccaaagatttatcgatccgcgatggactcgcgtccaatt

SEQ ID NO: 214 - DNA, 225 bp, unidentified
  misc_feature 1..225: note = Encodes 16S rRNA from Anaerorhabdus
  source 1..225: mol_type = genomic DNA
agagtttgatcctggctcaggataaacgctggcggcgtgcctaatacatgcaagtcggacgaggattgagacttcggttttaatccgagtggcgaacgggtgagtaaaacgtaagcaacctgcctacaaggaccgggataacacctggaaacgggcgctaaaaccggataggcaataagggggcatcctcatattgttaaaggtgagaaacacaagtagatgggc

SEQ ID NO: 215 - DNA, 225 bp, unidentified
  misc_feature 1..225: note = Encodes 16S rRNA from Altererythrobacter
  source 1..225: mol_type = genomic DNA
agagtttgatcatggctcagaacgaacgctggcggcatgcttaacacatgcaagtcgaacggtgttttctagtacttgtattaggaaacatagtggcaaacgggtgagtaacgcgtgggaatgtaccctttggtattgaataacgtctggaaacggacgctaatacaatataagctcgagagaggaaagagaaatcgctgaaggagtagcccgcgttagattagg

SEQ ID NO: 216 - DNA, 225 bp, unidentified
  misc_feature 1..225: note = Encodes 16S rRNA from Clostridium XlVa
  source 1..225: mol_type = genomic DNA
agagtttgatcatggctcaggatgaacgctggcggcgtgcctaacacatgcaagtcgaacggagaaagatgcttcggtatctttcttagtggcggacgggtgagtaacgcgtgggtaacctgccccatacaggggaacaacagctggaaacggctgctaataccgcataagcgcacggtaccgcatggtacagtgtgaaaagattgtatcggtatgggatggacc

SEQ ID NO: 217 - DNA, 225 bp, unidentified
  misc_feature 1..225: note = Encodes 16S rRNA from Clostridium XlVa
  source 1..225: mol_type = genomic DNA
agagtttgatcctggctcaggatgaacgctggcggcgtgcctaacacatgcaagtcgaacggaacttttattaatggagattcgtcaaagttgatttaagtttagtggcggacgggtgagtaacgcgtgggtaacctgcctcatagagggggataacggctggaaacgaccgctaataccgcataagcccacagtaccgcatggtacagggggaaaagatttatc

SEQ ID NO: 218 - DNA, 225 bp, unidentified
  misc_feature 1..225: note = Encodes 16S rRNA from Proteiniclasticum
  source 1..225: mol_type = genomic DNA
agagtttgatcatggctcaggacgaacgctggcggtatgcctaacacatgcaagtcgaacgaaaaacgagggcttgctctcgtttttagtggcgcacgggtgagtaacgcgtgagtaatctgccttaaagtgggggacaacatttggaaacgaatgctaataccgcgtaatatacagttttcgcatggattttgtattatagatttatcgctttaagatgagctc

SEQ ID NO: 219 - DNA, 225 bp, unidentified
  misc_feature 1..225: note = Encodes 16S rRNA from Bifidobacterium
  source 1..225: mol_type = genomic DNA
agagtttgatcctggctcaggacgaacgctggcggcgtgcttaacacatgcaagtcgaacgggatcctgcaagcttgcttgcgggtgagagtggcgaacgggtgagtaatgcgtgaccaacctgccccattctccggaatagctcctggaaacgggtggtaatgccggatgctccgccccctcgcatggggggtcgggaaggcttttgcggaatgggatggggtc

SEQ ID NO: 220 - DNA, 225 bp, unidentified
  misc_feature 1..225: note = Encodes 16S rRNA from Clostridium XlVa
  source 1..225: mol_type = genomic DNA
agagtttgatcctggctcaggatgaacgctggcggcgtgcctaacacatgcaagtcgagcggagtgaatcgagtgcttgcacatgattcacttagcggcggatgggtgaggaacgcgtggagaacctgcctcacacagggggataacagttggaaacgactgttaataccgcatatgctcacggtaccgcatggtacagggaggaaagatttatcggtgtgagat

SEQ ID NO: 221 - DNA, 225 bp, unidentified
  misc_feature 1..225: note = Encodes 16S rRNA from Clostridium XlVa
  source 1..225: mol_type = genomic DNA
agagtttgatcctggctcaggatgaacgctggcggcgtgcctaacacatgcaagtcgaacgaagttgtttccacccgacagattatcttcggatatgaagtcaccggaaacgcttagtggcggacgggtgagtaacgcgtgggcaacctgccctacacagggggatagcggttggaaacgaccggtaataccgcatacctttattttgccgcatgacagaataaa

SEQ ID NO: 222 - DNA, 225 bp, unidentified
  misc_feature 1..225: note = Encodes 16S rRNA from Desulfovibrio
  source 1..225: mol_type = genomic DNA
agagtttgatcatggctcaggacaaacgctggcggcgtgcctaacacatgcaagtcgaacgagcccttcggggctagtggcagacgggtgagtaacgcgtaggtaatgtacctcttcgctggggataccgttccgaaaggaacgttaataccgaatgaattcatcgggcggcatcgcttgatgaataaaccgcaagggcgaggagatcagcttgcgtactatcag

SEQ ID NO: 223 - DNA, 225 bp, unidentified
  misc_feature 1..225: note = Encodes 16S rRNA from Clostridium XlVa
  source 1..225: mol_type = genomic DNA
agagtttgatcatggctcaggatgaacgctggcggcgtgcctaacacatgcaagtcgaacggcggatgcatttcggtgtatctgcagtggcggacgggtgagtaacgcgtgggtaatctgccctgtacaggggaatagcagttggaaacgactgataaaaccgcataagcacacaggaccgcatggtcccgggtgaaaaactccggtggtacaggatgagcccgc

SEQ ID NO: 224 - DNA, 225 bp, unidentified
  misc_feature 1..225: note = Encodes 16S rRNA from Nitrobacter
  source 1..225: mol_type = genomic DNA
agagtttgatcatggctcagagcgaacgctagcggaatgctttatacatgcaagtcgaacgaatgagtttatattgagtagcaatacgatttataaatgagttagtggcgaacgggtgagtaatagataggaacttgccgagtagtgggggacaacagatagaaatgtctgctaataccgcatacgcccgagaggggaaagatttatcgctatttgagaggccta

SEQ ID NO: 225 - DNA, 225 bp, unidentified
  misc_feature 1..225: note = Encodes 16S rRNA from Enterorhabdus
  source 1..225: mol_type = genomic DNA
agagtttgatcctggctcaggatgaacgctggcggcgtgcttaacacatgcaagtcgaacggttaaaccggcttcggccggacatacagtggcgaacgggtgagtaacacgtgaccaacctgccccgcgctccgggacagccccccgaaagggggattaataccgggtactccgggaggggcgcatgccccgcccgggaaagcccaggcggcgcgggatggggtc

SEQ ID NO: 226 - DNA, 225 bp, unidentified
  misc_feature 1..225: note = Encodes 16S rRNA from Clostridium sensu stricto
  source 1..225: mol_type = genomic DNA
agagtttgatcctggctcaggacgaacgctggcggcgtgcttaacacatgcaagtcgagcggggataatgagacggaaggcttcggccggaagacttattattctagcggcggacgggtgagtaacgcgtgaatgatctgtctcttacagggggataacacttggaaacaggtgctaataccgcataagaccacggggctgcatggccttgaggtaaaaggagcg

SEQ ID NO: 227 - DNA, 225 bp, unidentified
  misc_feature 1..225: note = Encodes 16S rRNA from Oscillibacter
  source 1..225: mol_type = genomic DNA
agagtttgatcctggctcaggacgaacgctggcggcgtgcctaacacatgcaagtcgaacgggacttattggaatgagacttcggtcaaaggaaaataagtttagtggcggacgggtgagtaacgcgtgagcaacctgcctttcagagggggacaacagttggaaacgactgctaataccgcataacgtacagaggaggcatcttccctgtaccaaagatttatc

SEQ ID NO: 228 - DNA, 225 bp, unidentified
  misc_feature 1..225: note = Encodes 16S rRNA from Nautilia
  source 1..225: mol_type = genomic DNA
agagtttgatcatggctcagagttaacgctggcggcgtgcctaacacatgcaagtcgagcgaattcttacagagtatcgtaagagttagcggcaaacgggtgagtaacacatgggaaacctcccttagaatggggaatatctccgtgaaaacggagctaataccgcataagaccacagtttggcatcaaacaggggtaaaagcagcaatgcgttctaagatggtc

SEQ ID NO: 229 - DNA, 225 bp, unidentified
  misc_feature 1..225: note = Encodes 16S rRNA from Corynebacterium
  source 1..225: mol_type = genomic DNA
agagtttgatcctggctcaggacgaacgctggcggcgtgcttaacacatgcaagtcgaacggaaaggccctgcttgcagggtactcgagtggcgaacgggtgagtaacacgtgggtgatctgccctgcacttcgggataagcctgggaaactgggtctaataccggataggaccatcgtttagtgtcggtggtggaaagtttttcggtgcaggatgagctcgcgg

SEQ ID NO: 230 - DNA, 225 bp, unidentified
  misc_feature 1..225: note = Encodes 16S rRNA from Ruminococcus
  source 1..225: mol_type = genomic DNA
agagtttgatcatggctcaggacgaacgctggcggcacgcctaacacatgcaagtcgagcggtgaattttggatttattcgagattcatagcggcggacgggtgagtaacacgtgagcaacctacctctaagtgagggatagcttctggaaacggatggtaataccttataatatatatttatcacatgatagatatatcaaagatttattgcttagagatgggc

SEQ ID NO: 231 - DNA, 225 bp, unidentified
  misc_feature 1..225: note = Encodes 16S rRNA from Coprococcus
  source 1..225: mol_type = genomic DNA
agagtttgatcctggctcaggatgaacgctggcggcgtgcctaacacatgcaagtcgaacgaagtgtcatttcttcggaggtaacacttagtggcggacgggtgagtaacgcgtgggtaacctgcctcatacagggggatagcagttggaaacgactgataataccgcataagcgcacagcatcgcatggtgcagtgtgaaaaactccggtggtatgagatggac

SEQ ID NO: 232 - DNA, 225 bp, unidentified
  misc_feature 1..225: note = Encodes 16S rRNA from Eubacterium
  source 1..225: mol_type = genomic DNA
agagtttgatcatggctcaggattaacgctggcggcgtgcctaacacatgcaagtcgagcgagaaatagtgaagagattcttcggatgaacagatctatggacagcggcggacgggtgagtaacgcgtgggcaacctgcccctttccggaggatagccaagggaaactttgaataatactccataaagcagagatgtcgcatggcaattctgccaaagatttatc

SEQ ID NO: 233 - DNA, 225 bp, unidentified
  misc_feature 1..225: note = Encodes 16S rRNA from Rikenella
  source 1..225: mol_type = genomic DNA
agagtttgatcctggctcaggatgaacgctagcggcaggcttaacacatgcaagtcgaggggcagcgagttgtagcaatacaatgtcggcgaccggcggaagggtgcgtaacgcgtgagcaacatgcccgtatctgggggataggagatggaaacgtcttataataccccataacaacagaggctgcatggcctttgtttgaaagattcattggatacggattgg

SEQ ID NO: 234 - DNA, 225 bp, unidentified
  misc_feature 1..225: note = Encodes 16S rRNA from Clostridium XlVa
  source 1..225: mol_type = genomic DNA
agagtttgatcctggctcaggatgaacgctggcggcgtgcctaacacatgcaagtcgagcggacttaagaaaagaatcttcggatgaaatttttaagttagcggcggatgggtgaggaacgcgtggagaacctgcccttcacagggggataacagctggaaacggctgttaataccgcatatgctcacggagccgcatggccccgggaggaaagctccggcggtg

SEQ ID NO: 235 - DNA, 225 bp, unidentified
  misc_feature 1..225: note = Encodes 16S rRNA from Paenibacillus
  source 1..225: mol_type = genomic DNA
agagtttgatcatggctcaggatgaacgctggcggcgtgcttaatacatgcaagtcgaacggatgagttttctagcttgctagaagatgattcagtggcgaacgggtgagtaatacgtaggcaacctgccccaaagcgggggatagcagttggaaacgactattaataccgcataggtaatcttaaggcatcttgagattattaaaggtgcgtttgcaccgctgt

SEQ ID NO: 236 - DNA, 225 bp, unidentified
  misc_feature 1..225: note = Encodes 16S rRNA from Ruminococcus
  source 1..225: mol_type = genomic DNA
agagtttgatcatggctcaggacgaacgctggcggcacgcctaacacatgcaagtcgaacggtagatacttagcttgctttgtatctatagtggcggacgggtgagtaacacgtgagcaacctgcctctgagagagggatagcttctggaaacggatggtaatacctcatgacatagtgtcttcgcatggagatgctatcaaacgaatctcgctcagagatgggc

SEQ ID NO: 237 - DNA, 225 bp, unidentified
  misc_feature 1..225: note = Encodes 16S rRNA from Prevotella
  source 1..225: mol_type = genomic DNA
agagtttgatcctggctcaggatgaacgctagctacaggcttaacacatgcaagtcgaggggcagcatggggatggcttgccattcccgatggcgaccggcgcacgggtgagtaacgcgtatccaacctgcccgcaaccgcggaatagcccgccgaaaggcggattaatgccgcatgagctcgcgtgaggacatctgcccgcgagcaaaggttcgttccggttgc

SEQ ID NO: 238 - DNA, 225 bp, unidentified
  misc_feature 1..225: note = Encodes 16S rRNA from Haematobacter
  source 1..225: mol_type = genomic DNA
agagtttgatcatggctcagaacgaacgctggcggcaggcctaacacatgcaagtcgagcgagatcttcggatctagcggcggacgggtgagtaacgcgtgggaacgtaccctttgcttcggaatagcctcgggaaactgggagtaataccgaatgtgccctacgggggaaagatttatcggcaaaggatcggcccgcgttggattaggtagttggtgaggtaat

SEQ ID NO: 239 - DNA, 225 bp, unidentified
  misc_feature 1..225: note = Encodes 16S rRNA from Prevotella
  source 1..225: mol_type = genomic DNA
agagtttgatcctggctcaggatgaacgctagctacaggcttaacacatgcaagtcgaggggcatcatgggggttgtttacaatccctgatggcgaccggcgcacgggtgagtaacgcgtatccaacctgccttcgagtcagggataaccttccgaaagggagcctaatacctgatgcagtgcgatgatggcatcagaattgcactaaagctttagcgctcggag

SEQ ID NO: 240 - DNA, 225 bp, unidentified
  misc_feature 1..225: note = Encodes 16S rRNA from Clostridium XlVa
  source 1..225: mol_type = genomic DNA
agagtttgatcctggctcaggatgaacgctggcggcgtgcctaacacatgcaagtcgaacggagatatcacggatgaaggattcgtctgaattctgttttatcttagtggcggacgggtgagtaacgcgtggagaacctgcctctttccgggggatagcagttggaaacgactggtaataccgcatgagcgcacagtaccgcatggtacggggtgaaaagattta

SEQ ID NO: 241 - DNA, 225 bp, unidentified
  misc_feature 1..225: note = Encodes 16S rRNA from Lachnospiracea incertae sedis
  source 1..225: mol_type = genomic DNA
agagtttgatcctggctcaggatgaacgctggcggcgtgcttaacacatgcaagtcgagcgaagcgctttggaagattccttcgggatgaatcctttgtgacttagcggcggacgggtgagtaacgcgtgggcaacctgccttgtacagggggataacagttagaaatgactgctaataccgcataagcgcacagcatggcatcatgcagtgcgaaaaactccgg

SEQ ID NO: 242 - DNA, 164 bp, unidentified
  misc_feature 1..164: note = Encodes 16S rRNA from Enterorhabdus
  source 1..164: mol_type = genomic DNA
agagtttgatcatggctcaggatgaacgctggcggcgtgcctaacacatgcaagtcgaacgaagcacttttgcattcgaggaagacagcacgtaaataaacgtgttatttgacgttagagtgtgaataagcaccggcaaactccgtgccagcagccgcggtaat

SEQ ID NO: 243 - DNA, 225 bp, unidentified
  misc_feature 1..225: note = Encodes 16S rRNA from Blautia
  source 1..225: mol_type = genomic DNA
agagtttgatcatggctcaggatgaacgctggcggcgtgcctaacacatgcaagtcgaacggagattcattggaaataagcttcggcagaaataagatggatcttagtggcggacgggtgagtaacgcgtggagaacctgccctgtacagggggataacatccagaaatggatgctaaaaccgcataagcgcacatgaccgcatggtcaagtgtgaaaaactccg

SEQ ID NO: 244 - DNA, 225 bp, unidentified
  misc_feature 1..225: note = Encodes 16S rRNA from Sporobacter
  source 1..225: mol_type = genomic DNA
agagtttgatcatggctcaggatgaacgctggcggcgtgcctaacacattcaagtcgaacggagaagggacttcggtcccggatcagtggcggacgggtgagtaacgcgtgagcaacctgcctttgcccgggggataacagccggaaacagctgctaataccgcataacgtacggacgccgcatgacgaccgtaccaaagatttattgggcaaagatgggctcgc

SEQ ID NO: 245 - DNA, 225 bp, unidentified
  misc_feature 1..225: note = Encodes 16S rRNA from Oscillibacter
  source 1..225: mol_type = genomic DNA
agagtttgatcatggctcaggacgaacgctggcggcgtgcctaacacatgcaagtcgaacgggacttaatggaatgagacttcggtcaaaggaagttaagtttagtggcggacgggtgagtaacgcgtgagcaacctgcctttcagagggggacaacagttggaaacgactgctaataccgcataacgtacggaggaggcatctttttcgtaccaaagatttatc

SEQ ID NO: 246 - DNA, 225 bp, unidentified
  misc_feature 1..225: note = Encodes 16S rRNA from Clostridium XlVa
  source 1..225: mol_type = genomic DNA
agagtttgatcctggctcaggatgaacgctggcggcgtgcctaacacatgcaagtcgaacggggatagagagaagttttcggacagacctttatcttagtggcggacgggtgagtaacgcgtggataacctgcctttttctgggggatagcagttggaaacgactgataataccgcataagctccgattcccgcatgggagccggaggaaagatttatcgggaga

SEQ ID NO: 247 - DNA, 225 bp, unidentified
  misc_feature 1..225: note = Encodes 16S rRNA from Atopobium
  source 1..225: mol_type = genomic DNA
agagtttgatcatggctcaggatgaacgctggcggcgcgcctaacacatgcaagtcgaacggttaaagccccttcgggggtgtataaagtggcgaacggctgagtaacacgtgggcaacctacctcttgctctgggatagcctcgagaaatcgtgggtaataccggatactccgtaaccgtcgcatggcggatacgggaaagcgcatacggcaagagatgggccc

SEQ ID NO: 248 - DNA, 225 bp, unidentified
  misc_feature 1..225: note = Encodes 16S rRNA from Sporobacter
  source 1..225: mol_type = genomic DNA
agagtttgatcatggcttaggatgaacgctggcggcgtgcataacacattcaagtcgaacgatgaacggacttcggtccgggattagtggcggacgggtgagtaacgcgtgagcaacctgccccggagtgagggataacagacggaaacatctgctaatacctcatatagcatcgggttcgcatgtacctggtatgaaaggtttactgctccgggatgggctcgc

SEQ ID NO: 249 - DNA, 225 bp, unidentified
  misc_feature 1..225: note = Encodes 16S rRNA from Clostridium XlVa
  source 1..225: mol_type = genomic DNA
agagtttgatcctggctcaggatgaacgctggcggcgtgcctaacacatgcaagtcgaacggggtgtccgatcttcggactggacacttagtggcggacgggtgagtaacgcgtgggtaacctgcctcatacagggggatagcagttggaaacgactgataataccgcataagcgcacagcatcgcatgatgcagtgtgaaaaactccggtggtatgagatggac

SEQ ID NO: 250 - DNA, 225 bp, unidentified
  misc_feature 1..225: note = Encodes 16S rRNA from unidentified taxa
  source 1..225: mol_type = genomic DNA
agagtttgatcatggctcaggatgaacgctggcggcgtgtttaaggcatgcaagtcgaatgggtttagacccatggcaaacgggagagtaatactttggtaatttaccccttagtcgtgaataactattcgaaagattagataatacacgatggtctcaaagaactcgagttttttgagtaaagatttatcgctaagggagaagcctaaggactatcagctagtt

SEQ ID NO: 251 - DNA, 225 bp, unidentified
  misc_feature 1..225: note = Encodes 16S rRNA from Oscillibacter
  source 1..225: mol_type = genomic DNA
agagtttgatcatggctcaggatgaacgctggcggcgtgcctaacacatgcaagtcgaacggagcttaatggaaggagacttcggtcaacggaagataagcttagtggcggacgggtgagtaacgcgtgagcaacctgcctcagagtgggggacaacagctggaaacggctgctaataccgcataaaattgttagaaggcatcttctgataatcaaagcttaatg

SEQ ID NO: 252 - DNA, 225 bp, unidentified
  misc_feature 1..225: note = Encodes 16S rRNA from Clostridium XlVa
  source 1..225: mol_type = genomic DNA
agagtttgatcatggctcaggatgaacgctggcggcgtgcttaacacatgcaagtcgaacgaggtttaagacttcggttttaaaccgagtggcggacgggtgagtaacgcgtgggtaacctgccgtatgcagggggacaacagttagaaatgactgctaataccgcataagcttacagtatcgcatgatacagtgagaaaagatttatcggcatacgatggaccc

SEQ ID NO: 253 - DNA, 225 bp, unidentified
  misc_feature 1..225: note = Encodes 16S rRNA from Clostridium IV
  source 1..225: mol_type = genomic DNA
agagtttgatcctggctcaggacgaacgctggcggtatgcttaatacatgcaagtcgaacggagcttagcggaagcttgcttctgcgaaagcttagtggcggacgggtgagtaacgcgtgagtaacctgccttaaagagggggataacacagagaaatttgtgctaataccgcataatgtagcgaagccgcatgactttgctaccaaaggtcagccgctttaaga

SEQ ID NO: 254 - DNA, 225 bp, unidentified
  misc_feature 1..225: note = Encodes 16S rRNA from Mogibacterium
  source 1..225: mol_type = genomic DNA
agagtttgatcatggctcaggatgaacgctggcggcgtgcctaatacatgcaagtcgagcgagaatctcttcagaagcgttttcggacaattccgaggagaggaaagcggcggacgggtgagtaacgcgtaggcaacctgcccttagcagagggatagccattggaaacgatgattaaaacctcataatgccatctttacacatgtttagatggccaaagattta

SEQ ID NO: 255 - DNA, 225 bp, unidentified
  misc_feature 1..225: note = Encodes 16S rRNA from Roseburia
  source 1..225: mol_type = genomic DNA
agagtttgatcatggctcaggatgaacgctggcggcgtgcttaacacatgcaagtcgaacgaatttttttctgaaggaagcttcggcagacggaaggaagaagtgagtggcggacgggtgagtaacgcgtgggtaacctgcctcacattgggggataccagtcggaaacgactgctaataccgcataagaccacggcaccgcatggtgctgtggccaaaactccg

SEQ ID NO: 256 - DNA, 225 bp, unidentified
  misc_feature 1..225: note = Encodes 16S rRNA from Lachnospiracea incertae sedis
  source 1..225: mol_type = genomic DNA
agagtttgatcctggctcaggatgaacgctggcggcgtgcttaacacatgcaagtcgagcgaagcgctctggaagattcctttgggatgattccttagtgacttagcggcggacgggtgagtaacgcgtgggcaacctgccttgtacagggggataacagttagaaatgactgctaataccgcataagcgcacagcatggcatcatgcagtgtgaaaaactccgg

SEQ ID NO: 257 - DNA, 225 bp, unidentified
  misc_feature 1..225: note = Encodes 16S rRNA from Pelotomaculum
  source 1..225: mol_type = genomic DNA
agagtttgatcatggctcaggacgaacgctggcggcgtgcctaacacatgcaagtcgaacggagattaagatttcggttttaatctgagtggcgaacgggtgagtaacgcgtgagcaacctgcccttcagagggggataaccgctggaaacagcagctaataccgcataagaccacagcccggcatcggggaggggtcaaaggagcaatccgctgaaggaggggc

SEQ ID NO: 258 - DNA, 225 bp, unidentified
  misc_feature 1..225: note = Encodes 16S rRNA from Pelotomaculum
  source 1..225: mol_type = genomic DNA
agagtttgatcctggctcaggacgaacgctggcggcgtgcctaacacatgcaagtcgaacggagcaggggacttcggttctctgctgagtggcgaacgggtgagtaacgcgtgagcaacctgaccttgagagggggataacgacgggaaactgtcgctaataccgcatgagaccacagcccggcatcggggaggggtcaaaggagaaatccgctgaaggaggggc

SEQ ID NO: 259 - DNA, 225 bp, unidentified
  misc_feature 1..225: note = Encodes 16S rRNA from Clostridium XlVa
  source 1..225: mol_type = genomic DNA
agagtttgatcatggctcaggatgaacgctggcggcgtgcctaacacatgcaagtcgaacggagctgcgacgctgaggagtggagtacttgtacaaagcgaatcttgtcgtagcttagtggcggacgggtgagtaacgtgtggataacctggtccatccagggggatagcagctggaaacggctggtaataccgcataagcgcacagagaggcatctctcggtgt

SEQ ID NO: 260 - DNA, 225 bp, unidentified
  misc_feature 1..225: note = Encodes 16S rRNA from Robinsoniella
  source 1..225: mol_type = genomic DNA
agagtttgatcctggctcaggatgaacgctggcggcacgcttaacacatgcaagtcgaacgagggaaaaggagcttgctcctttgacctagtggcggacgggtgcgtaacgcgtgggtaatctgccctgcacagggggataacgtatagaaatgtacgctaataccgcataagcccacagagtggcatcactcagggggaaaagcgaatacggtgcaggatgagc

SEQ ID NO: 261 - DNA, 225 bp, unidentified
  misc_feature 1..225: note = Encodes 16S rRNA from Coprococcus
  source 1..225: mol_type = genomic DNA
agagtttgatcatggctcaggataaacgctggcggcgtgcttaacacatgcaagtcgaacggactgattaggtagcttgctacttatgaaagttagtggcggacgggtgagtaacgcgtgggtaacctgcctcacacagggggataacagttggaaacgactgttaataccgcataagcgcacaggatcgcatggtctagtgtgaaaaactccggtggtgtgaga

SEQ ID NO: 262 - DNA, 225 bp, unidentified
  misc_feature 1..225: note = Encodes 16S rRNA from Wautersiella
  source 1..225: mol_type = genomic DNA
agagtttgatcctggctcaggatgaacgctagcgggaggcttaacacatgcaagccgaggggtatttgtggcttgctacaaagagaccggcgcacgggtgcgtaacgcgtatgcaacttgccctactgaaagggatagccttttgaaaagaagattaataccttataatagtgagactggcatcagtaacacttgaaagatttatcgcagtaggataggcatgcg

SEQ ID NO: 263 - DNA, 184 bp, unidentified
  misc_feature 1..184: note = Encodes 16S rRNA from Lachnospiracea incertae sedis
  source 1..184: mol_type = genomic DNA
agagtttgatcatggctcaggatgaacgctggcggcgtgctttgcacaatgggggaaaccctgatgcagcgacgccgcgtgagtgatgaagtatttcggtacgtaaaactctatcagcagggaagaaaatgacggtacctgactaagaagcaccggctaaatacgtgccagcagccgcggtaat

SEQ ID NO: 264 - DNA, 225 bp, unidentified
  misc_feature 1..225: note = Encodes 16S rRNA from Planctomyces
  source 1..225: mol_type = genomic DNA
agagtttgatcctggctcagaatgaacgttggcggcatggattaggcatgcaagtcgtacggtgaaggggagcttgctcctccgatcagtggcgaaagggatagtaacgcgtagacacctaccttctggacggggatagctgcgggaaactgcaggtaatacccgataatgacgagagtccaaaggtgtaattccttcagaagacggatctgcgtcctaccagat

SEQ ID NO: 265 - DNA, 225 bp, unidentified
  misc_feature 1..225: note = Encodes 16S rRNA from Treponema
  source 1..225: mol_type = genomic DNA
agagtttgatcctggctcagaacgaacgctggcggcgcgtcttaagcatgcaagtcgagcgggaataagggagcttgcttccttatgagagcggcggactggtgagtaacacgtgggtaacgcaccctcctgacggggacagcctgtggaaacacagggtaataccggatgagatggacttctggaagggagttcatgaaaggagctacggctccgcagggggaa

SEQ ID NO: 266 - DNA, 225 bp, unidentified
  misc_feature 1..225: note = Encodes 16S rRNA from Coprococcus
  source 1..225: mol_type = genomic DNA
agagtttgatcatggctcaggatgaacgctggcggcgtgcctaacacatgcaagtcgaacgagagagattggtgcttgcaccgatcaatcgagtggcggacgggtgagtaacgcgtgggtaacctgcctcatacagggggataacaactggaaacggttgataataccgcataagcgcacggtatcgcatgatacagtgtgaaaaactccggtggtatgagatgg

SEQ ID NO: 267 - DNA, 225 bp, unidentified
  misc_feature 1..225: note = Encodes 16S rRNA from Paracoccus
  source 1..225: mol_type = genomic DNA
agagtttgatcctggctcagaacgaacgctggcggcaggcctaacacatgcaagtcgagcgaacccttcggggttagcggcggacgggtgagtaacgcgtgggaacgtgccctttgctacggaatagccccgggaaactgggagtaataccgtatacgcccttagggggaaagatttatcggcaagggatcggcccgcgttggattaggtagttggtggggtaat

SEQ ID NO: 268 - DNA, 225 bp, unidentified
  misc_feature 1..225: note = Encodes 16S rRNA from Ruminococcus
  source 1..225: mol_type = genomic DNA
agagtttgatcatggctcaggacgaacgctggcggcacgcctaacacatgcaagtcgaacggtgaatgatcagtttactgaacattcatagtggcggacgggtgagtaacacgtgagcaacctgcctctgagagagggatagcttctggaaacggatggtaatacctcatgatatagcgttctcgcatgggaatgctatcaaaagaaattcgctcagagatgggc

SEQ ID NO: 269 - DNA, 225 bp, unidentified
  misc_feature 1..225: note = Encodes 16S rRNA from Atopobium
  source 1..225: mol_type = genomic DNA
agagtttgatcatggctcaggatgaacgctggcggcgcgcctaacacatgcaagtcgaacggttaaagccccttcgggggtgtataaagtggcgaacggctgagtaacacgtgggcaacctacctcttgctctgggatagcctcgggaaaccgtgggtaataccggatactctgtaactgtcgcatggcggatacaggaaagcgcatacggcaagagatgggccc

SEQ ID NO: 270 - DNA, 225 bp, unidentified
  misc_feature 1..225: note = Encodes 16S rRNA from Prevotella
  source 1..225: mol_type = genomic DNA
agagtttgatcctggctcaggatgaacgctagctacaggcttaacacatgcaagtcgaggggcagcatggaggtagcttgctatctccgatggcgaccggcgcacgggtgagtaacgcgtatccaaccttccctgaggtaggggacagcccggtgaaaaccggattaataccctatgttgtcacgataaggcatctgagcgtgacgaaagattcatcgcctcagg

SEQ ID NO: 271 - DNA, 225 bp, unidentified
  misc_feature 1..225: note = Encodes 16S rRNA from Clostridium IV
  source 1..225: mol_type = genomic DNA
agagtttgatcatggctcaggatgaacgctggcggcgtgcctaacacattcaagtcgaacggtgaagggacttcggtcccggatcagtggcggacgggtgagtaacgcgtgagcaacctaccttcttgtgggggataacacagggaaacttgtgctaataccgcataacgtatctgacccgcatggggcggataccaaagatttattgcagggagatgggctcgc

SEQ ID NO: 272 - DNA, 225 bp, unidentified
  misc_feature 1..225: note = Encodes 16S rRNA from Clostridium XlVa
  source 1..225: mol_type = genomic DNA
agagtttgatcatggctcaggatgaacgctggcggcgtgcctaacacatgcaagtcgagcggagttacattagcttgcttttgtaacttagcggcggatgggtgaggaacgcgtggataacctgcctcacactgggggataacagctggaaacggctgttaataccgcatatgctcacagtaccgcatggtacagggaggaaagatttatcggtgtgagatggat

SEQ ID NO: 273 - DNA, 225 bp, unidentified
  misc_feature 1..225: note = Encodes 16S rRNA from Clostridium XlVa
  source 1..225: mol_type = genomic DNA
agagtttgatcctggctcaggatgaacgctggcggcgtgcctaacacatgcaagtcgagcggaggatcacattggaagccttcgggtggaagaagtgaaacttagcggcggacgggtgagtaacgcgtgggtaacctggctcatacagggggataacagagagaaatttctgctaataccgcataagcgcacagcaccgcatggtgcagtgtgaaaaactccggt

SEQ ID NO: 274 - DNA, 225 bp, unidentified
  misc_feature 1..225: note = Encodes 16S rRNA from Clostridium XlVa
  source 1..225: mol_type = genomic DNA
agagtttgatcatggctcaggatgaacgctggcggcgtgcttaacacatgcaagtcgaacgaagcatttcggaatgcggcttcggccaaatgaagaactgacttagtggcggacgggtgagtaacgcgtgggtaacctgccttgtactgggggataacagttagaaatgactgctaataccgcataagcccacggtttcgcatggaactgtgagaaaagatttat

SEQ ID NO: 275 - DNA, 225 bp, unidentified
  misc_feature 1..225: note = Encodes 16S rRNA from Prevotella
  source 1..225: mol_type = genomic DNA
agagtttgatcctggctcaggatgaacgctagctacaggcttaacacatgcaagtcgaggggcatcgagaagaaagcttgctttctttgtcggcgaccggcgcacgggtgagtaacgcgtatccaacctaccctttacactgggatagcccgttgaaaagcggattaataccagatgcagtcctttgcggacatctaagtaggacgaaaggtttttccggtagag

SEQ ID NO: 276 - DNA, 225 bp, unidentified
  misc_feature 1..225: note = Encodes 16S rRNA from Dethiosulfovibrio
  source 1..225: mol_type = genomic DNA
agagtttgatcatggctcaggatgaacgctggcggcgtgcataacacattcaagtcgaacgaagcgccgggacggaacccttcggggggaagacccgatgacttagtggcggacgggtgagtaacgcgtgagcaacctgcctgcgatagagggataacaccgggaaaccggtgctaataccacatgacgcagcggggtcacatggccctgttgttaaagatttat

SEQ ID NO: 277 - DNA, 225 bp, unidentified
  misc_feature 1..225: note = Encodes 16S rRNA from Clostridium XI
  source 1..225: mol_type = genomic DNA
agagtttgatcctggctcaggacgaacgctggcggcgtgcttaacacatgcaagtcgaacgaagatacggagcggaacccttcggggggaagatctgtagactgagtggcggacgggtgagtaacgcgtgagcaacctgcctacaagagggggacaacagctggaaacggctgctaataccgcataagaccacgctatcgcatggtagaggggtcaaagatttat

SEQ ID NO: 278 - DNA, 225 bp, unidentified
  misc_feature 1..225: note = Encodes 16S rRNA from Clostridium IV
  source 1..225: mol_type = genomic DNA
agagtttgatcatggctcaggacgaacgctggcggcgtgcttaacacatgcaagtcgaacgaagttccgttgaatgagatttcggtcaaaggagacggacacttagtggcggacgggtgagtaacgcgtgagtaacctgcctttcagaggggaataacatttggaaacgaatggtaataccgcataacatcaaggagccgcatggcactttgatcaaaggagcaa

SEQ ID NO: 279 - DNA, 225 bp, unidentified
  misc_feature 1..225: note = Encodes 16S rRNA from Saccharofermentans
  source 1..225: mol_type = genomic DNA
agagtttgatcatggctcaggatgaacgctggcggcgtgcctaacacattcaagtcgaacggagatatacggaagcttgcttttgtatattttagtggcggacgggtgagtaatgcatgagcaacctgccttaaagagggggataacacagagaaatttgtgctaataccgcataagctgcgaaggaggcatctcccatgcagaaaaggagcaatccgctttaag

SEQ ID NO: 280 - DNA, 225 bp, unidentified
  misc_feature 1..225: note = Encodes 16S rRNA from Clostridium sensu stricto
  source 1..225: mol_type = genomic DNA
agagtttgatcatggctcaggacgaacgctggcggcgcgcctaacacatgcaagtcgaacggaacttttgagtgacttcggtctctcttgagtttagtggcggacgggtgagtaaagcatgagtaactttcccttgagtggggaataacttttggaaacagaagataataccgcatacttcaaaggatcgcatgatcttttggcaaagattttcgcttttggata

SEQ ID NO: 281 - DNA, 225 bp, unidentified
  misc_feature 1..225: note = Encodes 16S rRNA from Roseburia
  source 1..225: mol_type = genomic DNA
agagtttgatcatggctcaggatgaacgctggcggcgtgcctaacacatgcaagtcgaacgaagcatagagattagatttcttcggattgaagatttttatgacttagtggcgaacgggtgagtaacgcgtgggtaacctgcctcatgcagggggataacaattagaaatgattgctaataccgcataagaccgcagaaccgcatggttgagcggccaaagattt

SEQ ID NO: 282 - DNA, 225 bp, unidentified
  misc_feature 1..225: note = Encodes 16S rRNA from Lachnospiracea incertae sedis
  source 1..225: mol_type = genomic DNA
agagtttgatcctggctcaggatgaacgctggcggcgtgcttaacacatgcaagtcgaacgaagcacttacacttgatttcttcggattgaaagagtttgtgactgagtggcggacgggtgagtaacgcgtggataacctgcccttcacagggggataacagttagaaatgactgctaataccgcataagcgcacactaaggcatcttagggtgtgaaaagctcc

SEQ ID NO: 283 - DNA, 225 bp, unidentified
  misc_feature 1..225: note = Encodes 16S rRNA from unidentified taxa
  source 1..225: mol_type = genomic DNA
agagtttgatcatggctcaggatgaacgctagcagaatgcttaacacatgcaagtcgaacgaatcttcggattagtggcagacgagcgagtaacacgtacttaacttgcccttgagttgggaacaactatagagatatagctaattcccaatatgctcacgatggtgaaatcccgatgtgaggaaagatttatcgctcaaggagaggggtgcgtcctatcaggta

SEQ ID NO: 284 - DNA, 225 bp, unidentified
  misc_feature 1..225: note = Encodes 16S rRNA from Hydrogenoanaerobacterium
  source 1..225: mol_type = genomic DNA
agagtttgatcatggctcaggacgaacgctggcggcgcgcctaacacatgcaagtcgaacgggattgtttacaatccagtggcggacgggtgagtaatgcatgagtaatctgcctgaaagagggggatagcttctggaaacagaagataataccgcatatttcaaaatttccgcatggtttttttggcaaaggagcaatccactttcagatgagctcatgtccga

SEQ ID NO: 285 - DNA, 225 bp, unidentified
  misc_feature 1..225: note = Encodes 16S rRNA from Victivallis
  source 1..225: mol_type = genomic DNA
agagtttgatcatggctcagaacgaacgctggcggcatggattaggcatgcaagtcgaacgaagcagcaatgcttagtggcggaagggtgaggaacgcgtgagcaacctgccctcaagttgggaataacagttggaaacgactgctaataccgaatgtggcttttgaaccgcatggtttattggctaaagatttattgcttgaggatgggctcgcgtcccattag

SEQ ID NO: 286 - DNA, 225 bp, unidentified
  misc_feature 1..225: note = Encodes 16S rRNA from Clostridium IV
  source 1..225: mol_type = genomic DNA
agagtttgatcatggctcaggacgaacgctggcggcgtgcctaacacatgcaagtcgaacggagttcttacagatgaagcttcggccgatgaagtttgaacttagtggcggacgggtgagtaacgcgtgagcaacctgccttacagagggggacaacagttggaaacgactgctaataccgcataacgtatttggagggcatcctctggataccaaagatttatc

SEQ ID NO: 287 - DNA, 225 bp, unidentified
  misc_feature 1..225: note = Encodes 16S rRNA from Pelotomaculum
  source 1..225: mol_type = genomic DNA
agagtttgatcatggctcaggacgaacgctggcggcgtgcctaacacatgcaagtcgaacggagtaaagagcttcggttttttacttagtggcgaacgggtgagtaacgcgtgagcaacctgactctttgagggggataacagtcggaaacaactgctaataccgcataagaccacgaaccggcatcggtatgaggtcaaaggagcaatccgcagagagaggggc

SEQ ID NO: 288 - DNA, 225 bp, unidentified
  misc_feature 1..225: note = Encodes 16S rRNA from Clostridium XlVa
  source 1..225: mol_type = genomic DNA
agagtttgatcatggctcaggatgaacgctggcggcgtgcctaacacatgcaagtcgaacgaagcacttctcccgtcaaagtagattagcttgctatgaagcggagacatttgaagtgacttagtggcggacgggtgagtaacgcgtgggtaacctgccctgtactgggggacaacagttggaaacggctgctaataccgcataagcgcacagcatcgcatggtg

SEQ ID NO: 289 - DNA, 225 bp, unidentified
  misc_feature 1..225: note = Encodes 16S rRNA from Saccharofermentans
  source 1..225: mol_type = genomic DNA
agagtttgatcatggctcaggatgaacgctggcggcgtgcttaacacattcaagtcgaacgagcgaggggaagcaattccctttgctagtggcggacgggtgagtaacgcgtgagcaacctacctttacgagtgggataacaattggaaacgattgctaataccgcataacgtatagatatcgcatgacatttataccaaagaaaatcgcgtaaagatgggctcg

SEQ ID NO: 290 - DNA, 225 bp, unidentified
  misc_feature 1..225: note = Encodes 16S rRNA from Lachnospiracea incertae sedis
  source 1..225: mol_type = genomic DNA
agagtttgatcatggctcaggatgaacgctggcggcgtgcctaacacatgcaagtcgaacgggaaccttgtgacggagacttcggtcaaagatgcaagaattctagtggcggacgggtgagtaacgcgtgggtaacctgcccttaagaggcgaataacagtgagaaatcactgctaatacgccatatgcttacggaatcgcatgattttgtgaggaaaagaattt

SEQ ID NO: 291 - DNA, 225 bp, unidentified
  misc_feature 1..225: note = Encodes 16S rRNA from Coprococcus
  source 1..225: mol_type = genomic DNA
agagtttgatcctggctcaggatgaacgctggcggcgtgcttaacacatgcaagtcgaacgaagcacttacgattgactggagagcttgctcgaagggattttgtttgtgacttagtggcggacgggtgagtaacgcgtgggtaacctgcctcatacagggggataacagttggaaacgactgttaataccgcataagcgcacggtatcgcatgatacagtgtga

SEQ ID NO: 292 - DNA, 225 bp, unidentified
  misc_feature 1..225: note = Encodes 16S rRNA from Clostridium XlVa
  source 1..225: mol_type = genomic DNA
agagtttgatcatggctcaggatgaacgctggcggcgtgcttaatacatgcaagtcgaacgaggaattgcgattgaagttttcggatggatttcgcttttccgagtggcggacgggtgagtaacgcgtgggtaacctgccttacacagggggacaacagctggaaacggctgctaataccgcataacccgctagagtcgcatgactcagacggaaaagatttatc

SEQ ID NO: 293 - DNA, 225 bp, unidentified
  misc_feature 1..225: note = Encodes 16S rRNA from Clostridium XlVb
  source 1..225: mol_type = genomic DNA
agagtttgatcatggctcaggatgaacgctggcggcgtgcttaacacatgcaagtcgagcgaaggacaaagagcttgctctttgttacttagcggcggacgggtgagtaacgtgtgggcaatctgccctatgcagaggaataacatagagaaatttatgctaatgcctcataaactcttagtactgcatggtacatagagaaaagatttatcggcataggaggag

SEQ ID NO: 294 - DNA, 225 bp, unidentified
  misc_feature 1..225: note = Encodes 16S rRNA from Papillibacter
  source 1..225: mol_type = genomic DNA
agagtttgatcatggctcaggatgaacgctggcggcgtgcctaacacattcaagtcgaacggacgagagggggcttgctccctcaagttagtggcggacgggtgagtaacgcgtgagcaacctgccttttttcgggggataacacggggaaaccggtgctaataccgcataacgtaccgagaccgcatgatcatggtaccaaaggagcaatccgaggaaagatgg

SEQ ID NO: 295 - DNA, 225 bp, unidentified
  misc_feature 1..225: note = Encodes 16S rRNA from Bartonella
  source 1..225: mol_type = genomic DNA
agagtttgatcctggctcagaacgaacgctgtcgacatgcttaacacatgcaagtcgtacgggtataacttgttataccagtggcaaacgggtgagtaatgcgtaggaatgtacccaatagtctcgaataacaattggaaacgattgataatacgagatacaatggaacatgggaccatgtgacatgaaaggttcagcaatggactgctataggagcagcctacg

SEQ ID NO: 296 - DNA, 225 bp, unidentified
  misc_feature 1..225: note = Encodes 16S rRNA from Clostridium IV
  source 1..225: mol_type = genomic DNA
agagtttgatcatggctcaggatgaacgctggcggcgtgcttaacacattcaagtcgaacgagcgagaggaagcaattccttttgctagtggcggacgggtgagtaacgcgtgagcaacctacctttgtgagtgggataacaattggaaacgattgctaataccgcataacgtatagatattgcatgataactataccaaagaaattcgcacaaagatgggctcg

SEQ ID NO: 297 - DNA, 225 bp, unidentified
  misc_feature 1..225: note = Encodes 16S rRNA from Eubacterium
  source 1..225: mol_type = genomic DNA
agagtttgatcatggctcaggattaacgctggcggcgtgcctaacacatgcaagtcgagcgagaattaaagaaatgattcttcggatgaatttctttaaggacagcggcggacgggtgagtaacgcgtgggcaacctgcccctttccggaggatagccaagggaaactttgaataatactccataaagcatttttgccgcatgacagagatgccaaagatttatc

SEQ ID NO: 298 - DNA, 225 bp, unidentified
  misc_feature 1..225: note = Encodes 16S rRNA from Asaccharobacter
  source 1..225: mol_type = genomic DNA
agagtttgatcctggctcaggatgaacgctggcggcgtgcttaacacatgcaagtcgaacgggaaagcgccctcgggcgcgagtacagtggcgaacgggtgagtaacacgtgaccaacctgccccccgcaccgggatagccgggcgaaagcccgggtaataccggatgaccccgcaccgcggcatcgcggcgcgggcaaagcccagacggcgggggatggggtcg

SEQ ID NO: 299 - DNA, 225 bp, unidentified
  misc_feature 1..225: note = Encodes 16S rRNA from Clostridium IV
  source 1..225: mol_type = genomic DNA
agagtttgatcatggctcaggatgaacgctggcggcgtgcataacacattcaagtcgaacggactgatttgatagcttgctattgatgaaagttagtggcggacgggtgagtaacgcgtgagcaacctgcccctatgtgcgggataacgtttggaaacggacgctaataccgcataatccaatggaatcgcatggttttattggcaaagatttattgcataggga

SEQ ID NO: 300 - DNA, 225 bp, unidentified
  misc_feature 1..225: note = Encodes 16S rRNA from Blautia
  source 1..225: mol_type = genomic DNA
agagtttgatcatggctcaggatgaacgctggcggcgtgcctaacacatgcaagtcgaacggagcttattttttggagacttcggtcaaagaagcttaagcttagtggcggacgggtgagtaacgcgtggagaacctgccctgtaccgggggataacagccggaaacggctgctaataccgcataagcgcacgaggccgcatggccctgtgtgaaaaactccggt

SEQ ID NO: 301 - DNA, 225 bp, unidentified
  misc_feature 1..225: note = Encodes 16S rRNA from Prevotella
  source 1..225: mol_type = genomic DNA
agagtttgatcatggctcaggatgaacgctagctacaggcttaacacatgcaagtcgaggggcatcactggggtggcttgccatccctggtggcgaccggcgcacgggtgagtaacgcgtatccaacctgccccgaaccgcggtatagcccgccgaaaggcggattaatcccgcatgtggtcgtgagatgacatctgaccacgactaaaggtattttccggttcg

SEQ ID NO: 302 - DNA, 225 bp, unidentified
  misc_feature 1..225: note = Encodes 16S rRNA from Ruminococcus
  source 1..225: mol_type = genomic DNA
agagtttgatcatggctcaggacgaacgctggcggcacgcttaacacatgcaagtcgaacgaattagtttcaccgtagcttgctacaccgagactaattagtggcggacgggtgagtaacacgtgagcaatctgcctttcagagggggataccagttggaaacgactgttaataccgcataacatatgtttaccgcatgatagacatatcaaagatttatcgctg

SEQ ID NO: 303 - DNA, 150 bp, unidentified
  misc_feature 1..150: note = Encodes 16S rRNA from Selenomonas
  source 1..150: mol_type = genomic DNA
agagtttgatcatggctcaggatgaacgctagctacaggcttaacacatgcaagtcgaggggacgaatgttgaggcctagaacataggtttcaaatgacggtacctgacgaggaagccacggctaactacgtgccagcagccgcggtaat

SEQ ID NO: 304 - DNA, 225 bp, unidentified
  misc_feature 1..225: note = Encodes 16S rRNA from Treponema
  source 1..225: mol_type = genomic DNA
agagtttgatcatggctcagaacgaacgctggcggcgcgtcttaagcatgcaagtcgaacgggatccacgcgcttgcgcgtggtgagagtggcggactggtgagtaacgcgtaggtgacgtaccctccggacggggatagcccttagaaataaggggtaataccggatacggttccgtgtgtcagaggcacggaaggaaaggagcttcggctccgccgggggatc

SEQ ID NO: 305 - DNA, 225 bp, unidentified
  misc_feature 1..225: note = Encodes 16S rRNA from Adlercreutzia
  source 1..225: mol_type = genomic DNA
agagtttgatcatggctcaggatgaacgctggcggcgtgcttaacacatgcaagtcgaacgattaaagccccttcgggggtgtatagagtggcgaacgggtgagtaacacgtgagcaacctacctctcacaccgggataacatatggaaacgtatgctaataccggatactccggaacttacgcatgttcgttccgggaaagctccgacggtgagagatgggctc

SEQ ID NO: 306 - DNA, 225 bp, unidentified
  misc_feature 1..225: note = Encodes 16S rRNA from Butyricicoccus
  source 1..225: mol_type = genomic DNA
agagtttgatcatggctcaggacgaacgctggcggcgtgcctaacacatgcaagtcgaacggaactattttgactgattccttcgggatgaagaatttttagtttagtggcgatcggtagccggactgagaggttgaacggccacattgggactgagacacggcccagactcctacgggaggcagcagtgggggatattgcgcaatgggggcaaccctgacgcag

SEQ ID NO: 307 - DNA, 225 bp, unidentified
  misc_feature 1..225: note = Encodes 16S rRNA from Pseudoflavonifractor
  source 1..225: mol_type = genomic DNA
agagtttgatcatggctcaggacgaacgctggcggcgtgcttaacacatgcaagtcgaacgaggaatgttgaaaagcttgctttttaacatttcgagtggcggacgggtgagtaacgcgtgaggaacctgtcttctacagggggataacgtcccgaaagggacgctaataccgcataagaccacggtatcgcatgatacaggggtcaaaggagcaatccggtaga

SEQ ID NO: 308 - DNA, 225 bp, unidentified
  misc_feature 1..225: note = Encodes 16S rRNA from Corynebacterium
  source 1..225: mol_type = genomic DNA
agagtttgatcctggctcaggacgaacgctggcggcgtgcttaacacatgcaagtcgaacggtaaggccccagcttgctggggtacacgagtggcgaacgggtgagtaacacgtgggtgacctgccccgcacttcgggataagcctgggaaactgggtctaataccggataggaccgcaccgtgagggtgtggtggaaagtttttcggtgtgggatgggcccgcg

SEQ ID NO: 309 - DNA, 225 bp, unidentified
  misc_feature 1..225: note = Encodes 16S rRNA from Adlercreutzia
  source 1..225: mol_type = genomic DNA
agagtttgatcatggctcaggatgaacgctggcggcgtgcttaacacatgcaagtcgaacggttaaagccccttcgggggtgtataaagtggcgaacgggtgagtaacacgtgagcaacctacctctcacaccgggataacaactggaaacggttgataataccggatactccgattggatcgcatgttcctttcgggaaagctccgacggtgagagatgggctc

SEQ ID NO: 310 - DNA, 225 bp, unidentified
  misc_feature 1..225: note = Encodes 16S rRNA from Selenomonas
  source 1..225: mol_type = genomic DNA
agagtttgatcctggctcaggacgaacgctggcggcgtgcttaacacatgcaagtcgaacgagacgattgaaagcttgcttttgagagtcgagtggcaaacgggtgagtaacgcgtagacaacctgccgcaaagatggggacaacagtccgaaaggactgctaataccgaatgttgtgcaatctccgcatggaggatgcattaaagatggcctctacttgtaagc

SEQ ID NO: 311 - DNA, 225 bp, unidentified
  misc_feature 1..225: note = Encodes 16S rRNA from Coraliomargarita
  source 1..225: mol_type = genomic DNA
agagtttgatcatggctcagagtgaacgctggcgacgtggctaagacatgcaagtcgagcgagaaggtgccttcgggtgccggaaagcggcaaacgggtgcgtaacacgtaagtaacctgcccttaagacgggaatagcttgatgaaaattgagataatgcccgatatcgaattcttccgcatgggagaagtttgaaaggtttgtgatgacgcttaaggaggggc

SEQ ID NO: 312 - DNA, 225 bp, unidentified
  misc_feature 1..225: note = Encodes 16S rRNA from Paraprevotella
  source 1..225: mol_type = genomic DNA
agagtttgatcatggctcaggatgaacgctagcggcaggcttaacacatgcaagtcgaggggcagcgagtcggtagcaatactgatgtcggcgaccggcgcacgggtgagtaacgcgtatgcaacctttcccagacagggggatagcccagggaaacttggattaataccccgtaggccagaggagggcatcctcgtctggttaaagttccggcggtctggggtg

SEQ ID NO: 313 - DNA, 225 bp, unidentified
  misc_feature 1..225: note = Encodes 16S rRNA from Oscillibacter
  source 1..225: mol_type = genomic DNA
agagtttgatcatggctcaggacgaacgctggcggcgtgcctaacacatgcaagtcgaacgggacttattggaatgagacttcggtcaaaggaaaataagtttagtggcggacgggtgagtaacgcgtgagcaacctgcctttcagagggggacaacagttggaaacgactgctaataccgcataacgtgtattggaggcatcttcggtacaccaaagatttatc

SEQ ID NO: 314 - DNA, 225 bp, unidentified
  misc_feature 1..225: note = Encodes 16S rRNA from Anaerovorax
  source 1..225: mol_type = genomic DNA
agagtttgatcatggctcaggatgaacgctggcggcgtgcctaacacatgcaagtcgagcgagaaacctttgattgacacttcggttgatttcaaaggcggaaagcggcggacgggtgagtaacgcgtaggcaacctgccccttgcagagggatagcctcgggaaaccgggattaaaacctcataacaccgaacctacacatgttcgatcggtcaaagatttatc

SEQ ID NO: 315 - DNA, 225 bp, unidentified
  misc_feature 1..225: note = Encodes 16S rRNA from Clostridium XlVa
  source 1..225: mol_type = genomic DNA
agagtttgatcctggctcaggatgaacgctggcggcgtgcataacacatgcaagtcgaacggagttacattgaaacctagtgatatgtaacttagtggcggacgggtgagtaacgcgtgggtaacctacctggtattgggggacaacagttagaaatgactgctaataccgcatacgtcatcgagagggcatcctcttgatgagaaaggagcaatccgacatcag

SEQ ID NO: 316 - DNA, 225 bp, unidentified
  misc_feature 1..225: note = Encodes 16S rRNA from Saccharofermentans
  source 1..225: mol_type = genomic DNA
agagtttgatcatggctcaggacgaacgctggcggcgtgcctaacacatgcaagtcgagcggagtaagtggagagcttgcttgaaacttacttagcggcggacgggtgagtaacgcgtgagcaacctgtcctctgcagggggataagacagcgaaagttgttctaataccgcatgagaccacaacgtcacatggcgaaggggtcaaaggaggaatccggcagagg

SEQ ID NO: 317 - DNA, 225 bp, unidentified
  misc_feature 1..225: note = Encodes 16S rRNA from Erysipelothrix
  source 1..225: mol_type = genomic DNA
agagtttgatcatggctcaggatgaacgctggcggcgtgcctaatacatgcaagtcgaacggggtaccttcgggtacctagtggcgaacgggtgagtaacacataaacaatctgccctggagactgggataccgtcgggaaaccgacgctaataccggataggcagtaagggggcatctccatactgttaaagctgggttgcagcgctgcaggatgagtttatgt

SEQ ID NO: 318 - DNA, 225 bp, unidentified
  misc_feature 1..225: note = Encodes 16S rRNA from Agaricicola
  source 1..225: mol_type = genomic DNA
agagtttgatcatggctcagaacgaacgctggcggcaggcttaatccatgcaagtcaagggggtgtagcaatacacaaccggcgtacgggtgagtaacgcgtgggaatgtgtccatttgtggggaatagcttctggaaacggaaggtaataccgcatacgcccttcgggggaaagatttatcgcagatggagcggcccgcgttagattagctagttggtggggta

SEQ ID NO: 319 - DNA, 225 bp, unidentified
  misc_feature 1..225: note = Encodes 16S rRNA from Denitrobacterium
  source 1..225: mol_type = genomic DNA
agagtttgatcatggctcaggatgaacgctggcggcgtgcctaacacatgcaagtcgaacgaataacccgccttcgggcggtcatagagtggcgaacgggtgagtaacacgtgaccaaccttccccccgcatggggataaccgggcgaaagcccggctaatacccaatactccgggccctccgcatggaggggccgggaaagcccaggcggcgggggatggggtc

SEQ ID NO: 320 - DNA, 225 bp, unidentified
  misc_feature 1..225: note = Encodes 16S rRNA from unidentified taxa
  source 1..225: mol_type = genomic DNA
agagtttgatcatggctcaggacgaacgctagcgacgtgcctaagaaatgcaagtcgagcgatgacggtggcttcggctgcctgattagcggcgaacggtcgcgtaacacgtaagcaatctgccccaaagtttgggatagccatccgaaaggatgattaataccggatgtggaatatatatcgcatgttatatattctaaagtagcgatacgctttgggatgagc

SEQ ID NO: 321 - DNA, 225 bp, unidentified
  misc_feature 1..225: note = Encodes 16S rRNA from Asaccharobacter
  source 1..225: mol_type = genomic DNA
agagtttgatcctggctcaggatgaacgctggcggcgtgcttaacacatgcaagtcgaacgattaaaccggcttcggccggatatagagtggcgaacgggtgagtaacacgtgaccaacctgccccccgcttcgggataactgctggaaacggcagctaataccggatactccttcagcaccgcatggtgctccagggaaagatttatcggcgagggatggggtc

SEQ ID NO: 322 - DNA, 225 bp, unidentified
  misc_feature 1..225: note = Encodes 16S rRNA from Anaeroplasma
  source 1..225: mol_type = genomic DNA
agagtttgatcatggctcaggattaacgctggcggcatgcctaatacatgcaagtcgaatgaattagattcatggcgaacgggtgagtaacacgtaggtaatctaccataaagacaaggataaccattggaaacgatggataagactcgataggacacgaagtcgcatgactttgtgtttaaaggttacgctttatgaggagcctgcggtgcattagctagttgg

SEQ ID NO: 323 - DNA, 225 bp, unidentified
  misc_feature 1..225: note = Encodes 16S rRNA from Prevotella
  source 1..225: mol_type = genomic DNA
agagtttgatcctggctcaggatgaacgctagctacaggcttaacacatgcaagtcgaggggcagcatgacggtagcttgctatcgttgatggcgaccggcgcacgggtgagtaacgcgtatccaaccttcccatgactccggttcagcccgccgaaaggcggattactcccggatggtttccgaagagggcctctgatttggaataaagattcatcggtcatgg

SEQ ID NO: 324 - DNA, 225 bp, unidentified
  misc_feature 1..225: note = Encodes 16S rRNA from Lachnospiracea incertae sedis
  source 1..225: mol_type = genomic DNA
agagtttgatcctggctcaggatgaacgctggcggcgtgcttaacacatgcaagtcgaacgaggaactgtgaatgaaattttcggatggatttcgcttttccgagtggcggacgggtgagtaacgcgtggataacctgcccttcacagggggacaacagtcggaaacgactgctaataccgcataagccgacggagtcgcatgactcagccggaaaagatttatc

SEQ ID NO: 325 - DNA, 225 bp, unidentified
  misc_feature 1..225: note = Encodes 16S rRNA from Clostridium IV
  source 1..225: mol_type = genomic DNA
agagtttgatcatggctcaggacgaacgctggcggcgtgcctaacacatgcaagtcgagcggacttatagatagaaagtgcttgcactggacatttacaagttagcggcggacgggtgagtaacgcgtgagcaacctgtcctctacagggggataagatctcgaaagggattctaataccgcatgagaccacagcagggcatcctgcgggggtcaaaggaggaat

SEQ ID NO: 326 - DNA, 225 bp, unidentified
  misc_feature 1..225: note = Encodes 16S rRNA from Streptococcus
  source 1..225: mol_type = genomic DNA
agagtttgatcctggctcaggacgaacgctggcggcgtgcctaatacatgcaagtagaacgctgaagactttagcttgctaaagttggaagagttgcgaacgggtgagtaacgcgtaggtaacctgcctactagcgggggataactattggaaacgatagctaataccgcataacagcatttaacccatgttagatgcttgaaaggagcaattgcttcactagta

SEQ ID NO: 327 - DNA, 166 bp, unidentified
  misc_feature 1..166: note = Encodes 16S rRNA from Cellulosilyticum
  source 1..166: mol_type = genomic DNA
agagtttgatcatggctcaggatgaacgctggcggcgtgcttaacacatgcaagtcgaacggagtttaagaaggttttcggattgtaaactcctgtttcgagggacgataatgacggtacctcgggaggaagctccggctaactacgtgccagcagccgcggtaat

SEQ ID NO: 328 - DNA, 225 bp, unidentified
  misc_feature 1..225: note = Encodes 16S rRNA from Asaccharobacter
  source 1..225: mol_type = genomic DNA
agagtttgatcctggctcaggatgaacgctggcggcgtgcttaacacatgcaagtcgaacgattaaagcgccttcgggcgtgtatagagtggcgaacgggtgagtaacacgtgatcaacctacctcgtacttcgggatagcctcgtgaaaacgggattaataccggatactccgattaaatcgcatgattctttcgggaaagcctttacggtacgagatgggatc

SEQ ID NO: 329 - DNA, 225 bp, unidentified
  misc_feature 1..225: note = Encodes 16S rRNA from Enterorhabdus
  source 1..225: mol_type = genomic DNA
agagtttgatcctggctcaggatgaacgctggcggcgtgcctaacacatgcaagtcgaacggttaaaccggcttcggccggaaataaagtggcgaacgggtgagtaacacgtgaccaacctgccccgcgcaccgggacagccccccgaaagggggattgataccggatactccgccgggcccgcatgggcccggcgggaaagctccggcggcgcgggatggggtc

SEQ ID NO: 330 - DNA, 225 bp, unidentified
  misc_feature 1..225: note = Encodes 16S rRNA from Treponema
  source 1..225: mol_type = genomic DNA
agagtttgatcctggctcagaacgaacgctggcggcgcgtcttaagcatgcaagtcgagcgggattcatgtgcttgcacatgatgagagcggcggactggtgagtaacacgtaggtgacgtaccttgaggacggggacagccggcagaaatgccgggtaataccggataagctcgcgcgagccggaatcgcgcgaggaaaggagctaaggctccgcctctagagc

SEQ ID NO: 331 - DNA, 225 bp, unidentified
  misc_feature 1..225: note = Encodes 16S rRNA from Roseburia
  source 1..225: mol_type = genomic DNA
agagtttgatcctggctcaggatgaacgctggcggcgtgcctaacacatgcaagtcgaacggagcacattaagcgagaccttcgggtggaactttttatgcttagtggcggacgggtgagtaacgcgtgggtaacctgccttatacagggggataacagagagaaatttctgctaataccccataagcgcacagtatcgcatgatacagggtgaaaaggatttcc

SEQ ID NO: 332 - DNA, 225 bp, unidentified
  misc_feature 1..225: note = Encodes 16S rRNA from Victivallis
  source 1..225: mol_type = genomic DNA
agagtttgatcctggctcagaacgaacgctggcggcatggattaggcatgcaagtcgaacgaagcagcaatgcttagtggcggaagggtgaggaacgcgtgagtaatctgccctcaagttgggaataacagctggaaacggctgctaataccgaatgtggctgcaagaccgcatgattttgcagttaaagatttattgcttgaggatgagctcgcgtcccattag

SEQ ID NO: 333 - DNA, 225 bp, unidentified
  misc_feature 1..225: note = Encodes 16S rRNA from Prevotella
  source 1..225: mol_type = genomic DNA
agagtttgatcatggctcaggatgaacgctagctacaggcttaacacatgcaagtcgcggggcatcatgaagggagcttgctctctttgatggcgaccggcgcacgggtgagtaacgcgtatccaacctgccccctagtagggaacagcccgtagaaatgcggattaatgccctatgttctccgaagacggcatcagattcggagcaaaggcctttggccgctag

SEQ ID NO: 334 - DNA, 225 bp, unidentified
  misc_feature 1..225: note = Encodes 16S rRNA from Roseburia
  source 1..225: mol_type = genomic DNA
agagtttgatcctggctcaggatgaacgctggcggcgtgcttaacacatgcaagtcgaacggagatatcggcttcggctgatatctcagtggcggacgggtgagtaacgcgtgggtaacctgccttacaccgggggacaacagttggaaacgactgctaataccgcataagaccacggagccgcatggccctggggtaaaagatttatcgatgtaagatggaccc

SEQ ID NO: 335 - DNA, 225 bp, unidentified
  misc_feature 1..225: note = Encodes 16S rRNA from Ruminococcus
  source 1..225: mol_type = genomic DNA
agagtttgatcctggctcaggacgaacgctggcggcacgcctaacacatgcaagtcgaacggtgaatgattagcttgctagacattcatagtggcggacgggtgagtaacacgtgagcaacctgcctctgagagagggatagcttctggaaacggatggtaatacctcatgatatagcattctcgcatgggaatgctatcaaatgaatttcgctcagagatgggc

SEQ ID NO: 336 - DNA, 225 bp, unidentified
  misc_feature 1..225: note = Encodes 16S rRNA from Mogibacterium
  source 1..225: mol_type = genomic DNA
agagtttgatcatggctcaggatgaacgctggcggcgtgcctaatacatgcaagtcgagcgagaaatctttcagacgattcttcggatgagtcaggaagatggaaagcggcggacgggtgagtaacgcgtaggcaacctgccctcagcagagggatagccattggaaacgatgattaaaacctcataatgctgaaccaacacatgttggatcagccaaagattta

SEQ ID NO: 337 - DNA, 225 bp, unidentified
  misc_feature 1..225: note = Encodes 16S rRNA from Lachnospiracea incertae sedis
  source 1..225: mol_type = genomic DNA
agagtttgatcctggctcaggatgaacgctggcggcgtgcttaacacatgcaagtcgaacgaagcatagtgaatgaagttttcggatggatttcactttgacttagtggcggacgggtgagtaacgcgtgggcaacctgcccttaaccgggggacaacagttggaaacgactgctaataccgcataagcgcacgtgaccgcatggtcgagtgtgaaaaattccgg

SEQ ID NO: 338 - DNA, 225 bp, unidentified
  misc_feature 1..225: note = Encodes 16S rRNA from Prevotella
  source 1..225: mol_type = genomic DNA
agagtttgatcatggctcaggatgaacgctagctacaggcttaacacatgcaagtcgaggggcagcatgtcgtgtgcttgcacacgatgatggcgaccggcgcacgggtgagtaacgcgtatccaacctgcccatgaccccgggatagcccgctgaaaagcggattaacaccggatgcggtcgaaagaggacatctgatttcgaccaaagcttttgcggtcatgg

SEQ ID NO: 339 - DNA, 225 bp, unidentified
  misc_feature 1..225: note = Encodes 16S rRNA from Clostridium sensu stricto
  source 1..225: mol_type = genomic DNA
agagtttgatcatggctcaggacgaacgctggcggcatgcctaacccatgcaagtcgaacggacgagacgacttcggttgtcaagtcagtggcggacgggtgagtaacacgtgaacaaccaacctcatactgggggacaacatttggaaacgaatgctaataccgcataagaccacagagccgcatggctcagaggtcaaaggagaaatccggtatgagacgggt

SEQ ID NO: 340 - DNA, 225 bp, unidentified
  misc_feature 1..225: note = Encodes 16S rRNA from Victivallis
  source 1..225: mol_type = genomic DNA
agagtttgatcctggctcagaacgaacgctggcggcatggattaggcatgcaagtcgaacgaagcagcaatgcttagtggcgcaagggtgaggaacacgtgagtgacctacccgcaagtttggaacagctcctggaaacgggaattaataccggatgtgatcatgaagctgcatggtttcatgattaaagcagcaatgcgcttgcggatgggctcgcgtcccatt

SEQ ID NO: 341 - DNA, 225 bp, unidentified
  misc_feature 1..225: note = Encodes 16S rRNA from unidentified taxa
  source 1..225: mol_type = genomic DNA
agagtttgatcctggctcaggacgaacgctggcggtgtgcctcatacatgcaagtcgaacgataaggtctcttcggagatacataagtggcggacgggtgagtacaacataggaaatctgccttaaggcgggggacaacagagggaaacttctgctaataccccatatgagctaagctgaaatgcttatcttgaaagctccggcgccttgagatgagcctgtgcc

SEQ ID NO: 342 - DNA, 225 bp, unidentified
  misc_feature 1..225: note = Encodes 16S rRNA from Treponema
  source 1..225: mol_type = genomic DNA
agagtttgatcctggctcagaacgaacgctggcggcgcgtcttaagcatgcaagtcgagcgggaataagggagcttgcttccttatgagagcggcggactggtgagtaacacgtgggtaacgcatcctcctgacggggacagcctgtggaaacacagggtaataccggatgagatggacttctggaagggagttcatgaaaggagctacggctccgcagggggaa

SEQ ID NO: 343 - DNA, 225 bp, unidentified
  misc_feature 1..225: note = Encodes 16S rRNA from Stenotrophomonas
  source 1..225: mol_type = genomic DNA
agagtttgatcctggctcagagtgaacgctggcggtaggcctaacacatgcaagtcgaacggcagcacaggggagcttgctccccgggtggcgagtggcggacgggtgaggaatgcatcggaatctactctttcgtgggggataacgtagggaaacttacgctaataccgcatacgacctacgggtgaaagcaggggaccttttaggccttgcgcgattgaatga

SEQ ID NO: 344 - DNA, 225 bp, unidentified
  misc_feature 1..225: note = Encodes 16S rRNA from unidentified taxa
  source 1..225: mol_type = genomic DNA
agagtttgatcatggctcaggatgaacgctagcagaacgcctaacacatgcaagtcgaacgccccgatttatcggggagtggcagacgagcgagtaacacgtacttaacttgcccttgagatgggaacaactgcagagatgtagctaattcccaatatgctcacgatggtgaaatcccaatgtgaggaaagatttatcgctcaaggagaggggtgcgtcctatca

SEQ ID NO: 345 - DNA, 225 bp, unidentified
  misc_feature 1..225: note = Encodes 16S rRNA from Clostridium XlVa
  source 1..225: mol_type = genomic DNA
agagtttgatcctggctcaggatgaacgctggcggcgtgcctaacacatgcaagtcgaacgggaacctcacagtggagacttcggtcaaagcagtgagaattctagtggcggatgggtgagtaacgcgtgggtaacctgcctataagaattggataacagtgagaaatcactgctaatacaatataagcttacagtatcgcatgataaagtgagaaaagatttat

SEQ ID NO: 346 - DNA, 225 bp, unidentified
  misc_feature 1..225: note = Encodes 16S rRNA from Sphingobium
  source 1..225: mol_type = genomic DNA
agagtttgatcctggctcagagtgaacgctagcggaatgctttatacatgcaagtcgaacggaaaattagaaggagtagcaatacaaatttgaagtttttagtggcgaactggcgagtaatagttaggaacttaccgagtagtgggggacaacagttagaaatgactgctaataccgcatacgcccgagaggggaaagatttatcgctatttgagaggcctaacc

SEQ ID NO: 347 - DNA, 184 bp, unidentified
  misc_feature 1..184: note = Encodes 16S rRNA from Lachnospiracea incertae sedis
  source 1..184: mol_type = genomic DNA
agagtttgatcatggctcaggataaacgctggcggcgtgctttggacaatgggggcaaccctgatccagcgacgccgcgtgagcgaagaagtatctcggtatgtaaagctctatcagcagggaagataatgacggtacctgactaagaagcaccggctaaatacgtgccagcagccgcggtaat

SEQ ID NO: 348 - DNA, 225 bp, unidentified
  misc_feature 1..225: note = Encodes 16S rRNA from Oscillibacter
  source 1..225: mol_type = genomic DNA
agagtttgatcatggctcaggatgaacgctggcggcgtgcttaacacatgcaagtcgaacggacgaggcggagcttgctctgccgagttagtggcggacgggtgagtaacgcgtgagcaacctgcctttcagagggggacaacgttgggaaaccggcgctaataccgcataatatgcttttgccgcatgacagaagtatcaaaggagcaatccgctgaaagatgg

SEQ ID NO: 349 - DNA, 225 bp, unidentified
  misc_feature 1..225: note = Encodes 16S rRNA from Methylobacterium
  source 1..225: mol_type = genomic DNA
agagtttgatcatggctcagagcgaacgctggcggcaggcttaacacatgcaagtcgagcggacctttcggggtcagcggcggacgggtgagtaacgcgtgggaacgtgccttccggttcggaataaccctgggaaactagggctaataccggatacgcccttatggggaaaggtttactgccggaagatcggcccgcgtctgattagctagttggtggggtaac

SEQ ID NO: 350 - DNA, 225 bp, unidentified
  misc_feature 1..225: note = Encodes 16S rRNA from Zhangella
  source 1..225: mol_type = genomic DNA
agagtttgatcctggctcagaacgaacgctggcggcatgcttaacacatgcaagtcgaacggtgttgcatagcacttgtgttatgtaacatagtggcaaacgggtgagtaacgcgtggaaacatacccctcagtattggataacgtttggaaacgaacgctaatacaatatacgctcgagagaggaaagagagatcgctgagggagtggtccgcgtcagattaga

SEQ ID NO: 351 - DNA, 225 bp, unidentified
  misc_feature 1..225: note = Encodes 16S rRNA from Lachnospiracea incertae sedis
  source 1..225: mol_type = genomic DNA
agagtttgatcctggctcaggatgaacgctggcggcgtgcttaacacatgcaagtcgaacggagttgtttcaccgaatgaactggagagcttgctcaaaggggaattcaccgagacaacttagtggcggacgggtgagtaacgcgtgggtaacctacccttatcagggggataacagtcggaaacgactgctaataccgcataagcgcacagtatcgcatgatac

SEQ ID NO: 352 - DNA, 225 bp, unidentified
  misc_feature 1..225: note = Encodes 16S rRNA from Oscillibacter
  source 1..225: mol_type = genomic DNA
agagtttgatcatggctcaggacgaacgctggcggcgtgcctaacacatgcaagtcgaacgaagctcttttcaatgcgattcgtcaagttgaaaggatgacttagtggcgaacgggtgagtaacgcgtgagcaacctgccccggagtgggggacaacagttggaaacgactgctaataccgcatgacatgttcggatggcatcatctgaacatcaaagatttatt

SEQ ID NO: 353 - DNA, 225 bp, unidentified
  misc_feature 1..225: note = Encodes 16S rRNA from Clostridium III
  source 1..225: mol_type = genomic DNA
agagtttgatcatggctcaggacgaacgctggcggcgtgcctaacacatgcaagtcgaacgaacttactagcaatagtaagttagtggcggacgggtgagtaatacatgagtaacctgccttatacagggggataacacctagaaatgggtgctaataccgcataataactcagtatggcatcatattgagaggaaaggagcaatccggtaaaagatggactcat

SEQ ID NO: 354 - DNA, 225 bp, unidentified
  misc_feature 1..225: note = Encodes 16S rRNA from Coraliomargarita
  source 1..225: mol_type = genomic DNA
agagtttgatcctggctcagagtgaacgctggcggcgtggctaagacatgcaagtcgagcgagaaggtgccttcgggtgccggaaagcggcaaacgggtgcgtaacacgtaagtaacctgcccttaagacgggaacagcttgatgaaaattgagataatgcccgatatccgcttctttcgcatgggagaagtcggaaaggtttgtgatgacgcttaaggaggggc

SEQ ID NO: 355 - DNA, 225 bp, unidentified
  misc_feature 1..225: note = Encodes 16S rRNA from Eubacterium
  source 1..225: mol_type = genomic DNA
agagtttgatcatggctcaggattaacgctggcggcgtgcctaacacatgcaagtcgagcgagaagtggtgaaatgaaacttcggtagattggatccatggacagcggcggacgggtgagtaacgcgtgggcaacctgcccctttccggaggatagccaagggaaactttgaataatactccataaagcaagagtaccgcatgatacacttgccaaagatttatc

SEQ ID NO: 356 - DNA, 225 bp, unidentified
  misc_feature 1..225: note = Encodes 16S rRNA from Enterorhabdus
  source 1..225: mol_type = genomic DNA
agagtttgatcatggctcaggatgaacgctggcggcgtgcctaacacatgcaagtcgaacggttaaaccgccctcgggcggacatagagtggcgaacgggtgagtaacacgtgaccaacctgccccgcgcaccgggacagccccccgaaagggggattaataccggatactccggggcccccgcatgggggccccgggaaagcccaggcggcgcgggatggggtc

SEQ ID NO: 357 - DNA, 225 bp, unidentified
  misc_feature 1..225: note = Encodes 16S rRNA from Clostridium XlVa
  source 1..225: mol_type = genomic DNA
agagtttgatcatggctcaggatgaacgctggcggcgtgcttaacacatgcaagtcgaacgaatttcttattcgcggaggcttcggccgaaggggatatgaagtgagtggcggacgggtgagtaacgcgtgggtaacctgccttacaccgggggataacagagggaaacttctgctaataccgcataagaccacagtgccgcatggtacagaggtaaaagttccg

SEQ ID NO: 358 - DNA, 225 bp, unidentified
  misc_feature 1..225: note = Encodes 16S rRNA from Saccharofermentans
  source 1..225: mol_type = genomic DNA
agagtttgatcctggctcaggatgaacgctggcggcgtgcttaacacatgcaagtcgaacgggaagacttttaggaagatttcggttggaataaaagtattctagtggcggacgggtgagtaacgcgtaaacaatctgccttagagagggggataacagatagaaatatttgctaataccgcataagaccacgtttaggcatctagatggggtaaaaggagcaat

SEQ ID NO: 359 - DNA, 225 bp, unidentified
  misc_feature 1..225: note = Encodes 16S rRNA from Clostridium IV
  source 1..225: mol_type = genomic DNA
agagtttgatcatggctcaggatgaacgctggcggcgtgcttaacacattcaagtcgaacggacaagagggggcttgctcccttgcgttagtggcggacgggtgagtaacgcgtgagcaacctgcctttctccgggggataacattgggaaaccggtgctaataccgcataacgtacagagatcacatggtcattgtaccaaagatttatcggggaaagatgggc

SEQ ID NO: 360 - DNA, 225 bp, unidentified
  misc_feature 1..225: note = Encodes 16S rRNA from Clostridium sensu stricto
  source 1..225: mol_type = genomic DNA
agagtttgatcatggctcaggacgaacgctggcggcgtgcctaacacatgcaagtcgagcggggactgcacgacggatttgaagatttcggttggatatgaagatgtacagttctagcggcggacgggtgagtaacgcgtgagcaacctgtcccttacagggggataacacagcgaaagttgtactaataccgcatgagaccacgatatcacatggtataggggt

SEQ ID NO: 361 - DNA, 225 bp, unidentified
  misc_feature 1..225: note = Encodes 16S rRNA from Victivallis
  source 1..225: mol_type = genomic DNA
agagtttgatcctggctcagaacgaacgctggcggcatggattaggcatgcaagtcgaacgaagcagcaatgcttagtggcggaagggtgaggaacgcgtgagtaatctgcccccaagttgggaataacagttggaaacgactgctaataccgaatgtggctgcgaagtcgcatgattttgcagttaaagatttattgcttggggatgagctcgcgtcccattag

SEQ ID NO: 362 - DNA, 225 bp, unidentified
  misc_feature 1..225: note = Encodes 16S rRNA from Coprococcus
  source 1..225: mol_type = genomic DNA
agagtttgatcatggctcaggatgaacgctggcggcgtgcttaacacatgcaagtcgaacggagtacttacgctgatgaagcttcggcagagtcttgtaagtacttagtggcggacgggtgagtaacgcgtgggtaacctgccttataccgggggataacgtctggaaacggacgctaataccgcataagcgcacgatgaggcatcttgttgtgtgaaaaactcc

SEQ ID NO: 363 - DNA, 225 bp, unidentified
  misc_feature 1..225: note = Encodes 16S rRNA from Pseudoflavonifractor
  source 1..225: mol_type = genomic DNA
agagtttgatcatggctcaggacgaacgctggcggcgtgcttaacacatgcaagtcgaacgaggataatgacttcggttgttattcgagtggcggacgggtgagtaacgcgtgagcaatctgtccttaagagggggataacaactggaaacagttgctaataccgcataagaccacggcctcacatggggctgaggtaaaagaagcaattcgcttaagggtgagc

SEQ ID NO: 364 - DNA, 225 bp, unidentified
  misc_feature 1..225: note = Encodes 16S rRNA from Anaeroplasma
  source 1..225: mol_type = genomic DNA
agagtttgatcatggctcaggattaacgctggcggcgtgcctaatacatgcaagtcgaatggttagcttgctaaccatggcgaacgggtgagtaacacgtaggcaacctgtctaagagacgaggataaccattggaaacgatggataatactggataggatataataaggcatcttgttatatttaaagatttatcacttttagaggggcctgcggcgcattagc

SEQ ID NO: 365 - DNA, 225 bp, unidentified
  misc_feature 1..225: note = Encodes 16S rRNA from Anaeroplasma
  source 1..225: mol_type = genomic DNA
agagtttgatcatggctcaggattaacgctggcggcgtgcctaatacatgcaagtcgaatggtggtagcaatacaaaccatggcgaacgggtgagtaacacgtaggtaacctatcttactgacgaggataaccgttggaaacgacggataatactggataggacatcataaagggcatccttagatgtttaaaggagcaatccacggtaagaggggcctgcggcg

SEQ ID NO: 366 - DNA, 225 bp, unidentified
  misc_feature 1..225: note = Encodes 16S rRNA from Bacteroides
  source 1..225: mol_type = genomic DNA
agagtttgatcctggctcaggatgaacgctagctacaggcttaacacatgcaagtcgaggggcagcattaagtcagcttgctgatttagatggcgaccggcgcacgggtgagtaacgcgtatccaacctgccccctacccggggatagccttgcgaaagtaagattaatacccggtgctgttatgattccgcatgggaatataacgaaagattcatcggtagggg

SEQ ID NO: 367 - DNA, 225 bp, unidentified
  misc_feature 1..225: note = Encodes 16S rRNA from Acinetobacter
  source 1..225: mol_type = genomic DNA
agagtttgatcatggctcagattgaacgctggcggcaggcttaacacatgcaagtcgagcggggatagggtgcttgcacctgattcctagcggcggacgggtgagtaatgcttaggaatctgcctattagtgggggacaacgttccgaaagggacgctaataccgcatacgtcctacgggagaaagcaggggatcttcggaccttgcgctaatagatgagcctaa

SEQ ID NO: 368 - DNA, 225 bp, unidentified
  misc_feature 1..225: note = Encodes 16S rRNA from Victivallis
  source 1..225: mol_type = genomic DNA
agagtttgatcctggctcagaacgaacgctggcggcatggattaggcatgcaagtcgaacgaagcagcaatgcttagtggcggaagggtgaggaacgcgtgagtaatctgccctcaagttgggaataacagctggaaacggctgctaataccgaatgtggctgttgggtcgcatgatctgacagttaaagatttattgcttgaggatgagctcgcgtcccattag

SEQ ID NO: 369 - DNA, 225 bp, unidentified
  misc_feature 1..225: note = Encodes 16S rRNA from Victivallis
  source 1..225: mol_type = genomic DNA
agagtttgatcctggctcagaacgaacgctggcggcatggattaggcatgcaagtcgaacgggtgcagcaatgcaccagtggcgcaagggtgaggaacacgtgagtaatctaccctcaagattgggatagctcctggaaacgggaattaataccggatgaaacagtatgtccgcatggatgtacttttaaagcagcaatgcgcttgaggaggagctcgcgtccca

SEQ ID NO: 370 - DNA, 225 bp, unidentified
  misc_feature 1..225: note = Encodes 16S rRNA from Mogibacterium
  source 1..225: mol_type = genomic DNA
agagtttgatcatggctcaggatgaacgctggcggcgtgcctaatacatgcaagtcgagcgagattctgtcagatgagacttcggtggattcagacggatgaaagcggcggacgggtgagtaacgcgtaggcaacctgccccatgcacagggatagccactggaaacggtgattaatacctgataatgcggaccgtatgcatatacggactgccaaagatttatc

SEQ ID NO: 371 - DNA, 225 bp, unidentified
  misc_feature 1..225: note = Encodes 16S rRNA from Oscillibacter
  source 1..225: mol_type = genomic DNA
agagtttgatcatggctcaggacgaacgctggcggcgtgcttaacacatgcaagtcgaacggagtgcccttgaaagaggtttcggccaatggaaggggttacttagtggcggactggtgagtaacgcgtgaggaacctgcctttcagagggggacaacagctggaaacggctgctaataccgcatgacacattcgggcggcatcgcctggatgtcaaagatttat

SEQ ID NO: 372 - DNA, 225 bp, unidentified
  misc_feature 1..225: note = Encodes 16S rRNA from Butyricimonas
  source 1..225: mol_type = genomic DNA
agagtttgatcctggctcaggatgaacgctagcgacaggcttaacacatgcaagtcgaggggcagcacggcggtggcaacactgctggtggcgaccggcgcactggtgagtaacacgtatgcaacctgccccgcacagggggataatccgcggaaacgcggtctaataccccgtagaacctttggtcgcatgattagaggtggaaagctccggtggtgcgggatg

SEQ ID NO: 373 - DNA, 225 bp, unidentified
  misc_feature 1..225: note = Encodes 16S rRNA from Dethiosulfovibrio
  source 1..225: mol_type = genomic DNA
agagtttgatcatggctcaggatgaacgctggcggcgtgcataacacattcaagtcgaacgaagcgccgggacggaacccttcggggggaagacccgatgacttagtggcggacgggtgagtaacgcgtgagcaacctgcctgcgatagagggataacaccgggaaaccggtgctaataccacatgaggcagagaggtcacatggtctttctgttaaagatttat

SEQ ID NO: 374 - DNA, 225 bp, unidentified
  misc_feature 1..225: note = Encodes 16S rRNA from Pseudoflavonifractor
  source 1..225: mol_type = genomic DNA
agagtttgatcatggctcaggatgaacgctggcggcgcgcctaacacatgcaagtcgaacggcgaagtcccttcgggggcggaacagtggcggacgggtgagtaacgcgtgagtaacctgcccttacgagcggaatagcgtcgggaaactgacggtaataccgcatgaagcttgaccccggcatcggggagaagccaaagatttatcgcgtaaggatggactcgc

SEQ ID NO: 375 - DNA, 225 bp, unidentified
  misc_feature 1..225: note = Encodes 16S rRNA from Clostridium IV
  source 1..225: mol_type = genomic DNA
agagtttgatcatggctcaggatgaacgctggcggcgtgcctaacacatgcaagtcgaacggagctttttatgaacaagacttcggtcaagtaaattctaagcttagtggcggacgggtgagtaacgcgtgagtaacctgcctttcagagggggataacgttcggaaacgaacgctaataccgcataacatagcggaaccgcatgattctgctatcaaagatttt

SEQ ID NO: 376 - DNA, 225 bp, unidentified
  misc_feature 1..225: note = Encodes 16S rRNA from Anaeroplasma
  source 1..225: mol_type = genomic DNA
agagtttgatcatggctcaggattaacgctggcggcgtgcctaatacatgcaagtcgaatggttagcttgctaaccatggcgaacgggtgagtaacacgtaggcaacctgtcttacagacgaggataaccgttggaaacgacggataatactggatagtacatcacaatgggcatccatagatgtttaaaggagcaatccactgtaagaggggcctgcggcgcat

SEQ ID NO: 377 - DNA, 225 bp, unidentified
  misc_feature 1..225: note = Encodes 16S rRNA from Oscillibacter
  source 1..225: mol_type = genomic DNA
agagtttgatcatggctcaggatgaacgctggcggcgtgcctaacacatgcaagtcgaacggagcttattggaaggagacttcggtcaacggaagataagcttagtggcggacgggtgagtaacgcgtgagcaacctgcctcagagtgggggacaacagctggaaacggctgctaataccgcataacattgcctgaaggcatcttcgggtaatcaaagcttaatg

SEQ ID NO: 378 - DNA, 225 bp, unidentified
  misc_feature 1..225: note = Encodes 16S rRNA from Herbiconiux
  source 1..225: mol_type = genomic DNA
agagtttgatcatggctcaggacgaacgctggcggcatgcctaacacatgcaagtcgaacggacggaagtagcaatactgaagttagtggcgaacgggtgagtaacacgtgagcaacctgccctatacactgggatagcagttggaaacgactgataataccggataagaccacgctgtcgcatgacagaggggtcaaagcgctttagcggtatgggatgggctc

SEQ ID NO: 379 - DNA, 225 bp, unidentified
  misc_feature 1..225: note = Encodes 16S rRNA from Eubacterium
  source 1..225: mol_type = genomic DNA
agagtttgatcatggctcaggattaacgctggcggcgtgcctaacacatgcaagtcgagcgagaagcagtgaagggagtcttcggacaaacggaactgtggacagcggcggacgggtgagtaacgcgtgggcaacctgcccctttccggaggatagccaagggaaactttgaataatactccataaagcagagatgtcgcatggcaattctgccaaagatttatc

SEQ ID NO: 380 - DNA, 225 bp, unidentified
  misc_feature 1..225: note = Encodes 16S rRNA from unidentified taxa
  source 1..225: mol_type = genomic DNA
agagtttgatcatggctcaggacgaacgcttgcgacgtgcctaagaaatgcaagtcgagcgatgacgggggcttcggctccttgattagcggcgaacggtcgcgtaacacgtaagcaatctgccccaaagtttgggatagccatccgaaaggatgattaataccggatgtggaatatatatcgcatgttatatattctaaagcagcgatgcgctttgggatgagc

SEQ ID NO: 381 - DNA, 225 bp, unidentified
  misc_feature 1..225: note = Encodes 16S rRNA from Selenomonas
  source 1..225: mol_type = genomic DNA
agagtttgatcctggctcaggacgaacgctggcggcgtgcttaacacatgcaagtcgaacgagacgattttaagcttgcttagatgagtcgagtggcaaacgggtgagtaacgcgtagacaacctgccgcaaagatggggacaacagtccgaaaggactgctaataccgaatgttgtcaagtttccgcatgggagcttgattaaagatggcctctacttgtaagc

SEQ ID NO: 382 - DNA, 225 bp, unidentified
  misc_feature 1..225: note = Encodes 16S rRNA from Clostridium IV
  source 1..225: mol_type = genomic DNA
agagtttgatcatggctcaggacgaacgctggcggcgtgcttaacacatgcaagtcgaacgaagcttgatttaagatttcttcggaatgattaatgatatgacttagtggcggacgggtgagtaacgcgtgaggaacctgcctttcagagggggacaacatttggaaacgaatgctaataccgcataacgcatttaagggacatcccatagatgccaaagattta

SEQ ID NO: 383 - DNA, 225 bp, unidentified
  misc_feature 1..225: note = Encodes 16S rRNA from Mogibacterium
  source 1..225: mol_type = genomic DNA
agagtttgatcatggctcaggatgaacgctggcggcgtgcctaatacatgcaagtcgagcgagaatctcttcagaagcgttttcggacaattccgaggagaggaaagcggcggacgggtgagtaacgcgtaggcaacctgcccttagcagagggatagccattggaaacgatgattaaaacctcataatgctgttgtgacacatgtcagagcagccaaagattta

SEQ ID NO: 384 - DNA, 225 bp, unidentified
  misc_feature 1..225: note = Encodes 16S rRNA from Clostridium IV
  source 1..225: mol_type = genomic DNA
agagtttgatcatggctcaggatgaacgctggcggcgtgcctaacacattcaagtcgaacggagaagggggcttcggtcccctgatcagtggcggacgggtgagtaacgcgtgagcaacctgcctttgtgtggggaataacacagggaaacttgtgctaataccgcataacgcatcgacgtagcattacgatgatgccaaagatttattgcacgaagatgggctc

SEQ ID NO: 385 - DNA, 225 bp, unidentified
  misc_feature 1..225: note = Encodes 16S rRNA from Roseburia
  source 1..225: mol_type = genomic DNA
agagtttgatcatggctcaggatgaacgctggcggcgtgcttaacacatgcaagtcgaacgaagcgatcctttgtgaagcgaagaagcttgcttcctagtggaactgtggattgacttagtggcggacgggtgagtaacgcgtgggtaacctgcctcacacagggggataacagttagaaatgactgctaataccgcataaaatggcagtgtcgcatgacacaac

SEQ ID NO: 386 - DNA, 225 bp, unidentified
  misc_feature 1..225: note = Encodes 16S rRNA from Anaerovibrio
  source 1..225: mol_type = genomic DNA
agagtttgatcatggctcaggacgaacgctggcggcgtgcttaacacatgcaagtcgaacggggcgaagaggagcttgctcttcctagcctagtggcaaacgggtgagtaacgcgtaggcaacctgcccttcagatggggacaacatttcgaaaggaatgctaataccgaatgacgtgcattggtcgcatgaccgatgtaccaaaggccgggcaaccggtcactg

SEQ ID NO: 387 - DNA, 225 bp, unidentified
  misc_feature 1..225: note = Encodes 16S rRNA from Clostridium III
  source 1..225: mol_type = genomic DNA
agagtttgatcctggctcaggacgaacgctggcggtatgcttaatacatgcaagtcgaacggagctcagcggaagcttgcttctgcgaaagcttagtggcggacgggtgagtaacgcgtgagtaacctgccttaaagagggggataacacagagaaatctgtgctaataccgcataatgcagcgaagccgcatggctatgctgccaaaggtcagccgctttaaga

SEQ ID NO: 388 - DNA, 225 bp, unidentified
  misc_feature 1..225: note = Encodes 16S rRNA from Saccharofermentans
  source 1..225: mol_type = genomic DNA
agagtttgatcatggctcaggacgaacgctggcggcgtgcctaacacatgcaagtcgagcggagatgaggagaagcttgcttcgagacatcttagcggcggacgggtgagtaacgcgtgagcaacctgtcctctgcagggggataagacagcgaaagttgttctaataccgcatgagaccacaacgtcacatggcgaaggggtcaaaggagaaatccggcagagg

SEQ ID NO: 389 - DNA, 225 bp, unidentified
  misc_feature 1..225: note = Encodes 16S rRNA from Saccharofermentans
  source 1..225: mol_type = genomic DNA
agagtttgatcatggctcaggatgaacgctggcggcgtgcctaacacatgcaagtcgaacggacgatgaagctcagcttgctgagattcaaagttagtggcggactggtgagtaatgtatgagcaacctgcctttcagaggggaataacacaatgaaagttgtgctaataccgcataatattgtaatattgcatgataatacaatcaaaggagtgatccgctgag

SEQ ID NO: 390 - DNA, 225 bp, unidentified
  misc_feature 1..225: note = Encodes 16S rRNA from Prevotella
  source 1..225: mol_type = genomic DNA
agagtttgatcatggctcaggatgaacgctagctacaggcttaacacatgcaagtcgaggggcagcatgggagttgcttgcaattcccgatggcgaccggcgcacgggtgagtaacgcgtatccaaccttcccttaactccggaatagcccgctgaaaggcggattaatgccggatgcggtccagcgagggcatctgacccggaccaaaggattcgtccggttaa

SEQ ID NO: 391 - DNA, 225 bp, unidentified
  misc_feature 1..225: note = Encodes 16S rRNA from Clostridium XlVa
  source 1..225: mol_type = genomic DNA
agagtttgatcatggctcaggatgaacgctggcggcgtgcctaacacatgcaagtcgaacggaaatgttctgatgaagtcttcggatagattcattacattttagtggcggacgggtgagtaacacgtgggtaacctgccctgtaccgggggataacacttagaaataggtgataataccgcataagcgcacactgaggcatctcagagtgtgaaaaactccggt

SEQ ID NO: 392 - DNA, 225 bp, unidentified
  misc_feature 1..225: note = Encodes 16S rRNA from Robinsoniella
  source 1..225: mol_type = genomic DNA
agagtttgatcctggctcaggatgaacgctagctacaggcttaacacatgcaagtcgagcgatgaataaaccgacaaggtttcggccaaggaagtttattcagagcggcggatgggtgaggaacgcgtggggaacctgcctttcaccgggggataccagctggaaacggctgttaataccgcatatgctcacagtgccgcatggcacagggaggaaaactccggt

SEQ ID NO: 393 - DNA, 225 bp, unidentified
  misc_feature 1..225: note = Encodes 16S rRNA from Brevundimonas
  source 1..225: mol_type = genomic DNA
agagtttgatcatggctcaggacgaacgctggcggtgtgcctcatacatgcaagtcgaacgataaggcttcttcggaagtacataagtggcggacgggtgagtacaacataggaaatctgccttagggtgggggacaacagagggaaactcctgctaataccccatatgagctaacttgaaatagttatcttgaaaactccggtgccctaagatgagcctgtgcc

SEQ ID NO: 394 - DNA, 225 bp, unidentified
  misc_feature 1..225: note = Encodes 16S rRNA from Anaerotruncus
  source 1..225: mol_type = genomic DNA
agagtttgatcatggctcaggacgaacgctggcggcgcgcttaacacatgcaagtcgaacggagtgtgcttttgaaggtccttcgggaacggatgttgtacacttagtggcggacgggtgagtaacgcgtgagcaacctgcctttcagagggggataacacaacgaaagctgtgctaataccgcatgacattgcgacaccgcatggtgatgcaatcaaaggagca

SEQ ID NO: 395 - DNA, 225 bp, unidentified
  misc_feature 1..225: note = Encodes 16S rRNA from Victivallis
  source 1..225: mol_type = genomic DNA
agagtttgatcatggctcagaacgaacgctggcggcatggattaggcatgcaagtcgaacgaagcagcaatgcttagtggcgcaagggtgaggaacacgtgagtgacctacccgcaagtttggaacagctcctggaaacgggaattaataccggatgtgatcgatgaactgcatggtttattgattaaagcagcaatgcgcttgcggatgggctcgcgtcccatt

SEQ ID NO: 396 - DNA, 225 bp, unidentified
  misc_feature 1..225: note = Encodes 16S rRNA from Bacteroides
  source 1..225: mol_type = genomic DNA
agagtttgatcctggctcaggatgaacgctagcgacaggcctaacacatgcaagtcgaggggcagcatggttgaagcttgcttcaactgatggcgaccggcgcacgggtgcgtaacgggtgtgcaatttgtcctataccaagggatagcccgctgaaaggcggattaatactttatgtgagtagggggggcatcctctttatttgaaacgtgagggtataggttg

SEQ ID NO: 397 - DNA, 225 bp, unidentified
  misc_feature 1..225: note = Encodes 16S rRNA from Clostridium XlVb
  source 1..225: mol_type = genomic DNA
agagtttgatcatggctcaggacgaacgctggcggcgtgcttaatacatgcaagtcgaacgaggtatagcaatataccgagtggcgaacgggtgagtaacacgtgagcaacctgccctatacagggggacaacagctggaaacggctgctaataccgcataagaccacagcaccgcatggtgcaggggtaaaaggctacggtcggtataggatgggctcgcgtac

SEQ ID NO: 398 - DNA, 225 bp, unidentified
  misc_feature 1..225: note = Encodes 16S rRNA from Prevotella
  source 1..225: mol_type = genomic DNA
agagtttgatcctggctcaggatgaacgctagctacaggcttaacacatgcaagtcgaggggcatcatgaagtttgcttgcaagctttgatggcgaccggcgcacgggtgcgtaacgcgtatccaatctaccagttactcgggtatagccttgcgaaagtaagattaatccccgatgagtatagttactgcatggtgattatataaaagatttatcggtagctga

SEQ ID NO: 399 - DNA, 225 bp, unidentified
  misc_feature 1..225: note = Encodes 16S rRNA from Ruminococcus
  source 1..225: mol_type = genomic DNA
agagtttgatcatggctcaggacgaacgctggcggcacgcttaacacatgcaagtcgaacgagcgaagagagcttgctctccaagctagtggcggacgggtgagtaacacgtgagcaatctgcctttgggtgggggataccagttggaaacgactgttaataccgcataaaatagtaagaccgcatgatcatactatcaaagattcattgcctgaagatgagctc

SEQ ID NO: 400 - DNA, 225 bp, unidentified
  misc_feature 1..225: note = Encodes 16S rRNA from Pelobacter
  source 1..225: mol_type = genomic DNA
agagtttgatcctggctcagaattaacgctggcggcgtgcctaacacatgcaagtcgagcgaattcttacagagcatcgtaagagttagcggcaaacgggtgagtaacacatgggaaacctccctcgaaatggggaatatcttcgtgaaaacggagttaataccgcataagaccacagtttggcatcagacaggggtcaaagcagcaatgcgtttcgagatggtc

SEQ ID NO: 401 - DNA, 225 bp, unidentified
  misc_feature 1..225: note = Encodes 16S rRNA from Clostridium XlVa
  source 1..225: mol_type = genomic DNA
agagtttgatcatggctcaggatgaacgctggcggcgtgcttaacacatgcaagtcgaacgaatttcttacggatcgcgacttcggtcaagagaagtttgaagtgagtggcggacgggtgagtaacgcgtgggtaacctgccttacaccgggggataacagagggaaacttctgctaataccgcataagaccacagtgccgcatggtacagaggtaaaagttccg

SEQ ID NO: 402 - DNA, 225 bp, unidentified
  misc_feature 1..225: note = Encodes 16S rRNA from Clostridium XlVa
  source 1..225: mol_type = genomic DNA
agagtttgatcatggctcaggatgaacgctggcggcgtgcctaacacatgcaagtcgagcggagataagttgaagcctagcgattcttatcttagcggcggatgggtgagtaacacgtgggtaacctgccctgcactggggaataacagctggaaacggctgttaatgccgcatatgcgcacggagccgcatggctttgggcggaaagatttatcggtgcaggat

SEQ ID NO: 403 - DNA, 225 bp, unidentified
  misc_feature 1..225: note = Encodes 16S rRNA from Clostridium XlVb
  source 1..225: mol_type = genomic DNA
agagtttgatcatggctcaggatgaacgctggcggcgtgcctaacacatgcaagtcgagcgaagcataggtgcttgcacttatgacttagcggcggacgggtgagtaacgcgtgggtaacctgccctatacagaggaataacagttagaaatgactgctaatgcctcataagccgacgaaatggcatctttttgtcggaaaagatttatcggtataggagggacc

SEQ ID NO: 404 - DNA, 225 bp, unidentified
  misc_feature 1..225: note = Encodes 16S rRNA from Coprococcus
  source 1..225: mol_type = genomic DNA
agagtttgatcatggctcaggatgaacgctggcggcgtgcctaacacatgcaagtcgaacgaagtgtcaattcttcggagctgacacttagtggcggacgggtgagtaacgcgtgggtaacctgcctcatacagggggatagcagttggaaacgactgataataccgcataagcgcacagcatcgcatgatgcagtgtgaaaaactccggtggtatgagatggac

SEQ ID NO: 405 - DNA, 225 bp, unidentified
  misc_feature 1..225: note = Encodes 16S rRNA from Clostridium IV
  source 1..225: mol_type = genomic DNA
agagtttgatcatggctcaggacgaacgctggcggcgtgcctaacacatgcaagtcgaacggagttattcgaaagcttgcttttggataacttagtggcggacgggtgagtaacgcgtgagtaacctgcctttcagagggggataacgttctgaaaagaacgctaataccgcataatgtataattgtcgcatggcagcgataccaaaggagcaatccgctgaaag

SEQ ID NO: 406 - DNA, 225 bp, unidentified
  misc_feature 1..225: note = Encodes 16S rRNA from Clostridium IV
  source 1..225: mol_type = genomic DNA
agagtttgatcctggctcaggatgaacgctggcggcgtgcctaacacatgcaagtcgaacggaacttttaaggaacaagacttcggtcaagtgatatttaagtttagtggcggacgggtgagtaacgcgtgagcaacctgcctctcagagggggataacgtccggaaacggacgctaataccgcataacatggagagatcgcatgatcattccatcaaagatttt

SEQ ID NO: 407 - DNA, 225 bp, unidentified
  misc_feature 1..225: note = Encodes 16S rRNA from Coprococcus
  source 1..225: mol_type = genomic DNA
agagtttgatcatggctcaggatgaacgctggcggcgtgcttaacacatgcaagtcgaacgaagcacttacgattgactggagagcttgctcaaagggattttgtttgtgacttagtggcggacgggtgagtaacgcgtgggtaacctgcctcatacagggggataacagttggaaacgactgttaataccgcataagcgcacagtaccgcatggtacagtgtga

SEQ ID NO: 408 - DNA, 225 bp, unidentified
  misc_feature 1..225: note = Encodes 16S rRNA from Victivallis
  source 1..225: mol_type = genomic DNA
agagtttgatcctggctcagaacgaacgctggcggcatggattaggcatgcaagtcgaacgaagcagcaatgcttagtggcggaagggtgaggaacgcgtgagcaacctgcccccaagttgggaataacagttggaaacgactgctaataccgaatgtggcttttggaccgcatggtttgatggctaaagatttattgcttggggatgggctcgcgtcccattag

SEQ ID NO: 409 - DNA, 225 bp, unidentified
  misc_feature 1..225: note = Encodes 16S rRNA from Clostridium III
  source 1..225: mol_type = genomic DNA
agagtttgatcatggctcaggacgaacgctggcggcgtgcctaacacatgcaagtcgagcggagcttaagaagtcagaagttttcggacggaagacattttaagcttagcggcggacgggtgagtaacgcgtgggcaatctgcccttcacagggggataacacagggaaacttgtgctaataccgcataagatcgtataacggcatcgttaagcgaccaaaggag

SEQ ID NO: 410 - DNA, 225 bp, unidentified
  misc_feature 1..225: note = Encodes 16S rRNA from Anaerovibrio
  source 1..225: mol_type = genomic DNA
agagtttgatcctggctcaggacgaacgctggcggcgtgcttaacacatgcaagtcgaacggggcgaagaggagcttgctcttcctagcctagtggcaaacgggtgagtaacgcgtaggcaacctgcccttcagatggggacaacatttcgaaaggaatgctaataccgaatgacgtgcattggtcgcatgaccgatgtaccaaaggccgggcaaccggtcactg

SEQ ID NO: 411 - DNA, 225 bp, unidentified
  misc_feature 1..225: note = Encodes 16S rRNA from Anaerovorax
  source 1..225: mol_type = genomic DNA
agagtttgatcctggctcaggatgaacgctggcggcgtgcctaacacatgcaagtcgagcgagaaatcatcagaatgaaacttcggtagatttcagatgatggaaagcggcggacgggtgagtaacgcgtaggcaacctgccctttgcagagggatagccatgggaaactgtgattaaaacctcataacaccattctatcacatgttagaacggtcaaagattta

SEQ ID NO: 412 - DNA, 225 bp, unidentified
  misc_feature 1..225: note = Encodes 16S rRNA from Proteiniclasticum
  source 1..225: mol_type = genomic DNA
agagtttgatcatggctcaggacgaacgctggcggcgtgcttaacacatgcaagtcgaacgagggatgaataaagcttgctttgttcatttcgagtggcggacgggtgagtaacgcgtgaggaacctggcttttgcagggggatagcgtcccgaaagagacggtaataccgcataagaccacgctaccgcatggtaaaggggtcaaaggagagatccggcagaag

SEQ ID NO: 413 - DNA, 225 bp, unidentified
  misc_feature 1..225: note = Encodes 16S rRNA from Anaerovorax
  source 1..225: mol_type = genomic DNA
agagtttgatcatggctcaggatgaacgctggcggcgtgcctaacacatgcaagtcgagcgagaaacttttgactgacgcttcggttgatttcaaaagcggaaagcggcggacgggtgagtaacgcgtaggcaacctgccctttgcagagggatagcctcgggaaaccgggattaaaacctcataacaccggagtacctcatggtgcaccggtcaaagatttatc

SEQ ID NO: 414 - DNA, 225 bp, unidentified
  misc_feature 1..225: note = Encodes 16S rRNA from Selenomonas
  source 1..225: mol_type = genomic DNA
agagtttgatcctggctcaggacgaacgctggcggcgtgcttaacacatgcaagtcgaacgaggtgattgaaagcttgcttttgagaaccgagtggcaaacgggtgagtaacgcgtagacaacctgccgcaaagatggggacaacagtccgaaaggactgctaataccgaatgttgtgcaacttccgcatgggagatgcattaaagatggcctctacttgtaagc

SEQ ID NO: 415 - DNA, 225 bp, unidentified
  misc_feature 1..225: note = Encodes 16S rRNA from Hydrogenoanaerobacterium
  source 1..225: mol_type = genomic DNA
agagtttgatcatggctcaggacgaacgctggcggcacgcttaacacatgcaagtcgaacggaacttgggagcttgctttcaagtttagtggcggacgggtgagtaacacgtgagcaacctgcctttcggcggggaataatgattggaaacgatcactaataccccataaaataggtttatcgcatgatagatttatcaaagattcatcaccgaaagatgggctc

SEQ ID NO: 416 - DNA, 225 bp, unidentified
  misc_feature 1..225: note = Encodes 16S rRNA from Acetanaerobacterium
  source 1..225: mol_type = genomic DNA
agagtttgatcatggctcaggacgaacgctggcggcgcgcctaacacatgcaagtcgaacggacgaggatccttcgggatccgagttagtggcgaacgggtgagtaacacgtgaggaacctacctttcagagggggataacacttagaaataggtgctaataccgcataagaccacgaccgggcatccggatgaggtcaaaggagcaatccgctgagagacggcc

SEQ ID NO: 417 - DNA, 225 bp, unidentified
  misc_feature 1..225: note = Encodes 16S rRNA from Clostridium XlVa
  source 1..225: mol_type = genomic DNA
agagtttgatcctggctcaggatgaacgctggcggcgtgcttaacacatgcaagtcgaacgaagcatgagctgaaattttcggatggatgcccatgacttagtggcggacgggtgagtaacgcgtgggtaacctgcctcatgcagggggacaacagctggaaacggctgctaataccgcataagaccccgtgagcgcatgctcaagaggtaaaagatttatcggc

SEQ ID NO: 418 - DNA, 225 bp, unidentified
  misc_feature 1..225: note = Encodes 16S rRNA from Asaccharobacter
  source 1..225: mol_type = genomic DNA
agagtttgatcatggctcaggatgaacgctggcggcgtgcttaacacatgcaagtcgaacgattaaaccggcttcggccggatatagagtggcgaacgggtgagtaacacgtgaccaacctgccccatacttcgggataactcagggaaacttgtgctaataccggatactccgatttgatcgcatggtcttttcgggaaagcctttacggtatgggatggggtc

SEQ ID NO: 419 - DNA, 225 bp, unidentified
  misc_feature 1..225: note = Encodes 16S rRNA from Clostridium XlVa
  source 1..225: mol_type = genomic DNA
agagtttgatcatggctcaggatgaacgctggcggcgtgcttaatacatgcaagtcgaacggagatgtccacctgatgaagcagagtgcttgcacaaagcagaatcaaccggatatcttagtggcggacgggtgagtaacgcgtgggtaacctgcctcatactggggaataacagccagaaatgactgctaataccgcataagcgcacagtaccgcatgatacag

SEQ ID NO: 420 - DNA, 225 bp, unidentified
  misc_feature 1..225: note = Encodes 16S rRNA from Lachnospiracea incertae sedis
  source 1..225: mol_type = genomic DNA
agagtttgatcctggctcaggatgaacgctggcggcgtgcctaacacatgcaagtcgagcggagtaagacaccggatgaagattcgtctgaatccaccgtcttacttagcggcggatgggtgagtaacgcgtggacaacctgcccttcactgggggataacaaccggaaacgggtgctaataccgcatgggcgcgaacgaccgcatgatcgatcgcgtaaagatt

SEQ ID NO: 421 - DNA, 225 bp, unidentified
  misc_feature 1..225: note = Encodes 16S rRNA from Saccharofermentans
  source 1..225: mol_type = genomic DNA
agagtttgatcatggctcaggatgaacgctggcggcgtgcctaacacattcaagtcgaacggagatatacggaagcttgcttttgtatattttagtggcggacgggtgagtaatgcatgagcaacctgccttgaagagggggataacacagagaaatttgtgctaataccgcgtaatctgccgaagcggcatcgcgttggcaggaaaggagcgatccgctttaag

SEQ ID NO: 422 - DNA, 225 bp, unidentified
  misc_feature 1..225: note = Encodes 16S rRNA from Prevotella
  source 1..225: mol_type = genomic DNA
agagtttgatcatggctcaggatgaacgctagctacaggcttaacacatgcaagtcgaggggcagcatggcggtggcttgccaccgccgatggcgaccggcgcacgggtgagtaacgcgtatccaacctgcccgcaaccgcggaatagcccgccgaaaggcggattaatgccgcatgagctcgcgcgaggacatctgatcgcgagcaaaggtttttccggttgcg

SEQ ID NO: 423 - DNA, 225 bp, unidentified
  misc_feature 1..225: note = Encodes 16S rRNA from Anaeroplasma
  source 1..225: mol_type = genomic DNA
agagtttgatcatggctcaggattaacgctggcggcgtgcctaatacatgcaagtcgaatggttagcttgctaaccatggcgaacgggtgagtaacacgtaggcaacctgtctataagacgaggataaccattggaaacgatggataatactggataggatattgaggggcatcccttaatatttaaagatttatcactaatagaggggcctgcggcgcattagc

SEQ ID NO: 424 - DNA, 225 bp, unidentified
  misc_feature 1..225: note = Encodes 16S rRNA from Spirochaeta
  source 1..225: mol_type = genomic DNA
agagtttgatcctggctcagaacgaacgctggcggcgcgtcttaaccatgcaagtcggacggcaaggcgggagcttgctcctgccctagagtggcggactggtgagtaacacgtgggtgacgaaccctgctgactgggatagccgctagaaatagcggataataccggatacggccgtatgtatcagaagcatacggggaaagggagcttaggctccgcaggagg

SEQ ID NO: 425 - DNA, 225 bp, unidentified
  misc_feature 1..225: note = Encodes 16S rRNA from Alkaliphilus
  source 1..225: mol_type = genomic DNA
agagtttgatcatggctcaggatgaacgctggcggcgtgcctaacacatgcaagtcgagcgggaaatctttgaatgaaacttcggtcgaatgatgagatggatagcggcggacgggtgagtaacgcgtaggtaagctgccccatgcacagggatagcctagggaaacttggattaatacctgatgacgctgcgaagtcacatgtctttgcagccaaagatctatc

SEQ ID NO: 426 - DNA, 225 bp, unidentified
  misc_feature 1..225: note = Encodes 16S rRNA from Paraprevotella
  source 1..225: mol_type = genomic DNA
agagtttgatcatggctcaggatgaacgctagctacaggcttaacacatgcaagtcgaggggcagcatgtcgtgtgcttgcacacgatgatggcgaccggcgcacgggtgagtaacgcgtatccaacctgcccatgactccgggatagcccgctgaaaagcggattaacaccggatggggtcgaacgaggacatctgatttcgaccaaagctttttgcggtcatg

SEQ ID NO: 427 - DNA, 225 bp, unidentified
  misc_feature 1..225: note = Encodes 16S rRNA from Hippea
  source 1..225: mol_type = genomic DNA
agagtttgatcatggctcagagttaacgctggcggcgtgcctaacacatgcaagtcgagcgaatttctacagagcatcgtagagattagcggcaaacgggtgagtaacacatgggaaaccttccttagaatggggaatatctccgtgaaaacggagctaataccgcataagaccacagattggcatcaaacaggggtaaaagcagcaatgcgttctaagatggtc

SEQ ID NO: 428 - DNA, 225 bp, unidentified
  misc_feature 1..225: note = Encodes 16S rRNA from Prevotella
  source 1..225: mol_type = genomic DNA
agagtttgatcatggctcaggatgaacgctagctacaggcttaacacatgcaagtcgaggggcagcatgaacttagcttgctaagtttgatggcgaccggcgcacgggtgagtaacgcgtatccgaccttccctttgctcggggatagcccagtgaaaactggattaagacccgatgtagtccagctggcgcatgttatctggactaaagatttatcggcagagg

SEQ ID NO: 429 - DNA, 225 bp, unidentified
  misc_feature 1..225: note = Encodes 16S rRNA from Prevotella
  source 1..225: mol_type = genomic DNA
agagtttgatcatggctcaggatgaacgctagctacaggcttaacacatgcaagtcgaggggcatcatgcaggttgcttgcaacctgtgatggcgaccggcgcacgggtgcgtaacgcgtatccaaccttccccgcagtagggttcagcccgttgaaagacggattaatcccctatgttgtccattgagggcctctgatttggacgaaagatttatcgctgcggg

SEQ ID NO: 430 - DNA, 225 bp, unidentified
  misc_feature 1..225: note = Encodes 16S rRNA from Hydrogenoanaerobacterium
  source 1..225: mol_type = genomic DNA
agagtttgatcatggctcaggacgaacgctggcggcgcgcctaacacatgcaagtcgaacgggactagtgaccggagggtagaaggatctatcttgcgatcactagttcagtggcggacgggtgagtaaagcatgagcaacctggctaatagagggggatagcttttggaaacagaagataataccgcatgaatcagagatttcgcatgaagtttttggaaaagg

SEQ ID NO: 431 - DNA, 225 bp, unidentified
  misc_feature 1..225: note = Encodes 16S rRNA from Clostridium sensu stricto
  source 1..225: mol_type = genomic DNA
agagtttgatcatggctcaggacgaacgctggcggcatgcttaacacatgcaagtcgaacggactgattccttcgggatgaaagttagtggcgaacgggtgagtaatgtatgagcaacctgcctctatcaacgggataacagttggaaacgactgctaatacggtataagaccacggcaccgcatgatgctgcggtaaaagatttttcggatagagatgggctca

SEQ ID NO: 432 - DNA, 225 bp, unidentified
  misc_feature 1..225: note = Encodes 16S rRNA from Paraeggerthella
  source 1..225: mol_type = genomic DNA
agagtttgatcatggctcaggatgaacgctggcggcgtgcctaacacatgcaagtcgaacggagaacccgccctcgggcggttatgaagtggcgaacgggtgagtaacacgtgaccaacctgccccgcgctcagggacagcctcgggaaaccgggattaatacctgatgcgcccccgcccccgcatgggggaggggggaaagcccaggcggcgcgggatggggtc

SEQ ID NO: 433 - DNA, 225 bp, unidentified
  misc_feature 1..225: note = Encodes 16S rRNA from Clostridium XlVa
  source 1..225: mol_type = genomic DNA
agagtttgatcatggctcaggatgaacgctggcggcgtgcttaacacatgcaagtcgaacgaggttgttagaatgaagcagcttgctgtgaatttctagccaccgagtggcggacgggtgagtaacgcgtgggtaacctgccctacagtgggggacaacagttggaaacgactgctaataccgcataagcgcacagtatcgcatgatacagtgtgaaaaactccg

SEQ ID NO: 434 - DNA, 225 bp, unidentified
  misc_feature 1..225: note = Encodes 16S rRNA from Clostridium XlVa
  source 1..225: mol_type = genomic DNA
agagtttgatcatggctcaggatgaacgctggcggcgtgcctaacacatgcaggtcgaacgggacctatgtagatcaagacttcggtcaagtgaaatttaggtttagtggcggacgggtgagtaacgcgtgagcaatctgccgtatgcagggggacaacagagggaaacttctgctaataccgcataagcgcacggtatcgcatggtacagtgtgaaaagctccg

SEQ ID NO: 435 - DNA, 225 bp, unidentified
  misc_feature 1..225: note = Encodes 16S rRNA from Clostridium IV
  source 1..225: mol_type = genomic DNA
agagtttgatcatggctcaggacgaacgctggcggcgtgcctaacacatgcaagtcgaacggaaatttttcggcagagattcgtcgaagcttaagaattttagtggcggacgggtgagtaacgcgtgagtaacctgccgatgagagtggaataacgttctgaaaagaacgctaataccgcataatatattggagccgcatgactctgatatcaaagattttatcg

SEQ ID NO: 436 - DNA, 225 bp, unidentified
  misc_feature 1..225: note = Encodes 16S rRNA from Clostridium XlVa
  source 1..225: mol_type = genomic DNA
agagtttgatcatggctcaggatgaacgctggcggcgtgcctaacacatgcaagtcgaacgaggctctgcgaaatgaagattcgtctgaatttcaaggatgtccgagtggcggatgggtgagtaacgcgtggagaacctgccctatgctgggggataacagctggaaacggttgacaataccgcataagcttctttggtcgcatgaccttggaaggaaagattta

SEQ ID NO: 437 - DNA, 225 bp, unidentified
  misc_feature 1..225: note = Encodes 16S rRNA from Adhaeribacter
  source 1..225: mol_type = genomic DNA
agagtttgatcatggctcaggatgaacgctggcggcaggcttaatacatgcaagtcgaacggtaaggtctgaagtagcaatactaaagatacacgagtggcgcacgggtgcgtaacgcgtatgtaatctacccttaaccggaacaaaacagttggaaacgactgctaatattccatagtcattagttaaggcatcttaaagaatgtaaagatttattggttaagg

SEQ ID NO: 438 - DNA, 225 bp, unidentified
  misc_feature 1..225: note = Encodes 16S rRNA from Syntrophococcus
  source 1..225: mol_type = genomic DNA
agagtttgatcatggctcaggatgaacgctggcggcgtgcctaacacatgcaagtcgaacgaggctcttttctcagatgtttcgactgaagagagaagatcaccgagtggcggatgggtgagtaacgcgtggagaacctgcccttatcagggggataacaactggaaacggttgacaataccgcatatagtgcttgatcgcatgttcttgcacggaaagatttat

SEQ ID NO: 439 - DNA, 225 bp, unidentified
  misc_feature 1..225: note = Encodes 16S rRNA from Clostridium sensu stricto
  source 1..225: mol_type = genomic DNA
agagtttgatcatggctcaggacgaacgctggcggcgtgcttaacacatgcaagtcgaacgaggcaagttccttcggggacttaccgagtggcggacgggtgagtaacgcgtgagcaatctgtcccagacagggggataacaactggaaacagttgctaataccgcataagaccacggagccgcatggctttgaggtaaaaggagcgatccggtttggggtgagt

SEQ ID NO: 440 - DNA, 225 bp, unidentified
  misc_feature 1..225: note = Encodes 16S rRNA from Saccharofermentans
  source 1..225: mol_type = genomic DNA
agagtttgatcatggctcaggatgaacgctggcggcgtgcataacacattcaagtcgaacggactgatttgatagcttgctattgatgaaagttagtggcggacgggtgagtaacgcgtgagcaacctgcccctatgtgcgggataacgtttggaaacggacgctaataccgcataatccaattggatcgcatggtctggttggcaaagatttattgcataggga

SEQ ID NO: 441 - DNA, 225 bp, unidentified
  misc_feature 1..225: note = Encodes 16S rRNA from Clostridium IV
  source 1..225: mol_type = genomic DNA
agagtttgatcatggctcaggacgaacgctggcggcgtgcctaacacatgcaagtcgaacggagttattcgagatgaagttttcggatggaattttggataacttagtggcggacgggtgagtaacgcgtgagtaacctgcccataagagggggataacgttctgaaaagaacgctaataccgcatgacatatttggttcgcatgaatcgaatatcaaaggagca

SEQ ID NO: 442 - DNA, 225 bp, unidentified
  misc_feature 1..225: note = Encodes 16S rRNA from Clostridium IV
  source 1..225: mol_type = genomic DNA
agagtttgatcatggctcaggatgaacgctggcggcgtgcttaacacatgcaagtcgaacgaggttagcggcttcggctgttaaccgagtggcggacgggtgagtaacgcgtgaacaatctgtcctgcaaagggggataccaactggaaacagttgctaataccgcataagaccacggcctcgcatggggctgaggtaaaagcagcgatgcgatgcagggtgagt

SEQ ID NO: 443 - DNA, 225 bp, unidentified
  misc_feature 1..225: note = Encodes 16S rRNA from Clostridium sensu stricto
  source 1..225: mol_type = genomic DNA
agagtttgatcctggctcaggacgaacgctggcggcatgcctaacacatgcaagtcgaacgagatagcaatatctagtggcgaacgggtgagtaacacgtgagcaatctgccccatatacagggataacagttagaaatgactgctaataccggataagaccacagcctggcatcgggcaggggtcaaagcgatttagcgatatgggatgagctcgcgtccaatt

SEQ ID NO: 444 - DNA, 225 bp, unidentified
  misc_feature 1..225: note = Encodes 16S rRNA from Coraliomargarita
  source 1..225: mol_type = genomic DNA
agagtttgatcctggctcagagtgaacgctggcggcgtggctaagacatgcaagtcgagcgagaaggtgccttcgggtgccggaaagcggcaaacgggtgcgtaacacgtaagtaacctgcccttaagacgggaatagttcgatgaaaattgagataatgcccgatatcaacttctttcgcatggaagaggtttgaaaggtttgtgatgacgcttaaggaggggc

SEQ ID NO: 445 - DNA, 185 bp, unidentified
  misc_feature 1..185: note = Encodes 16S rRNA from Sharpea
  source 1..185: mol_type = genomic DNA
agagtttgatcatggctcaggatgaacgctggcggcgtgcttaacacatgcaagttgaacgaggaaggccttcgggtcgtaaagttctgttgcgaaggaagaacgccggagggaggaaatggcctccgggtgacggtacttcgcgagaaagccacggctaactacgtgccagcagccgcggtaat

SEQ ID NO: 446 - DNA, 225 bp, unidentified
  misc_feature 1..225: note = Encodes 16S rRNA from Clostridium IV
  source 1..225: mol_type = genomic DNA
agagtttgatcatggctcaggattaacgctggcggcgtgcataacacattcaagtcgaacggagtattgctttcgggtgatactcagtggcggacgggtgagtaacgcgtgagcaatctgccccttattgcgggataacagagagaaatttctgctaatacggcataacgcatcggtatcgcatggtacgggtgccaaagatttatcgatgagggatgagctcgc

SEQ ID NO: 447 - DNA, 225 bp, unidentified
  misc_feature 1..225: note = Encodes 16S rRNA from Anaerovorax
  source 1..225: mol_type = genomic DNA
agagtttgatcctggctcaggatgaacgctggcggcgtgcctaacacatgcaagtcgagcgagaaacctgtaattgacgcttcggttgattttacaggcggaaagcggcggacgggtgagtaacgcgtaggcaacctgccctttgcacagggatagcctcgggaaaccgggattaaaacctgatgataccgagacaccacatggtgttccggccaaagatttatc

SEQ ID NO: 448 - DNA, 225 bp, unidentified
  misc_feature 1..225: note = Encodes 16S rRNA from Blautia
  source 1..225: mol_type = genomic DNA
agagtttgatcatggctcaggatgaacgctggcggcgtgcctaacacatgcaagtcgaacgggtctaaagttttggaggcttcggccaaagaggctctagattagtggcggacgggtgagtaacgcgtggagaacctgccctgtactgggggataacagtgagaaatcactgctaataccgcataagcgcacgaggccgcatggccctgtgtgaaaaactccggt

SEQ ID NO: 449 - DNA, 225 bp, unidentified
  misc_feature 1..225: note = Encodes 16S rRNA from Clostridium XlVa
  source 1..225: mol_type = genomic DNA
agagtttgatcatggctcaggatgaacgctggcggcgtgcctaacacatgcaagtcgaacgagcgagagatgaaacctagtgaatttcgagcgagtggcggacgggtgagtaacgcgtgggtaacctgccttacagagggggataacagtttgaaaagactgctaataccgcataagcacacagtaccgcatggtacagggtgaaaagatttatcactgtaagat

SEQ ID NO: 450 - DNA, 225 bp, unidentified
  misc_feature 1..225: note = Encodes 16S rRNA from Clostridium IV
  source 1..225: mol_type = genomic DNA
agagtttgatcatggctcaggatgaacgctggcggcgtgcataacacattcaagtcgaacgaagcaccggcgaggaagtcttcggatggaattgcttttgacttagtggcggacgggtgagtaacgcgtgagcaaccttcctgtttgtgagggataacacagggaaacttgtgctaataccgcatgacgcatgggaatcgcatggtttcgatgccaaagatttat

SEQ ID NO: 451 - DNA, 225 bp, unidentified
  misc_feature 1..225: note = Encodes 16S rRNA from Anaerovorax
  source 1..225: mol_type = genomic DNA
agagtttgatcatggctcaggatgaacgctggcggcgtgcctaacacatgcaagtcgagcgggagtatcgcaaacagagattcgtcaaagtgagcgatatgagagcggcggacgggtgagtaacgcgtaggtaacctaccttaagctgagggataacccagggaaacttgggataataccacataacgcggtgaagtcacatggctttaccgccaaagatttatc

SEQ ID NO: 452 - DNA, 225 bp, unidentified
  misc_feature 1..225: note = Encodes 16S rRNA from Coraliomargarita
  source 1..225: mol_type = genomic DNA
agagtttgatcctggctcagagtgaacgctggcggcgtggctaagacatgcaagttgagcgagaatataccttcgggtatagggaagcggcaaacgggtgagtaacacgtaagtaacctacccttgagactgggatagctcagcgaaagttgaggtaataccggatgccaaccattaatgcatgttaatggattgaaagggatgagacgatgctcaaggaggggc

SEQ ID NO: 453 - DNA, 225 bp, unidentified
  misc_feature 1..225: note = Encodes 16S rRNA from Lachnospiracea incertae sedis
  source 1..225: mol_type = genomic DNA
agagtttgatcctggctcaggatgaacgctggcggcgtgcttaacacatgcaagtcgaacggaacatttcgcccgatgattgagaaagcttgcttcctcctgattcaactgaaatgtttagtggcggacgggtgagtaacgcgtgggtaacctaccttacacagggggataacagttagaaatgactgctaataccgcataagcgcacagtaccgcatggtacag

SEQ ID NO: 454 - DNA, 225 bp, unidentified
  misc_feature 1..225: note = Encodes 16S rRNA from Aquiflexum
  source 1..225: mol_type = genomic DNA
agagtttgatcatggctcaggatgaacgctggcggcaggcttaatacatgcaagtcgaacggtaaggcctgaagtggcaacacggagggtacacgagtggcgcacgggtgcgtaacgcgtatgcaacctgcccccaaccgggacaaaacagctggaaacggctgctaatatcccatagtcatgaggaggggcatccctctttatgtaaagattcattggttgggg

SEQ ID NO: 455 - DNA, 225 bp, unidentified
  misc_feature 1..225: note = Encodes 16S rRNA from Pedobacter
  source 1..225: mol_type = genomic DNA
agagtttgatcatggctcaggatgaacgctagcggcaggcctaatacatgcaagtcgaacgggaaggggcccttcggggcctctgagagtggcgcacgggtgcgtaacgcgtatgcaaccaaccccgcactgggggacagccggtggaaacgccgggtaataccccatgccgacgggaggggacatccccatccgttgaaaggcttcggtcggtgcgggacgggc

SEQ ID NO: 456 - DNA, 225 bp, unidentified
  misc_feature 1..225: note = Encodes 16S rRNA from Robinsoniella
  source 1..225: mol_type = genomic DNA
agagtttgatcctggctcaggatgaacgctggcggcgtgcctaacacatgcaagtcgaacggagtaacaattcttcggaaatgttacttagtggcggacgggtgagtaacgcgtgggtaacctgcctcatacagggggatagcagctggaaacggctgataataccgcataagcgcacagagacgcatgtttcagtgtgaaaaactccggtggtatgagatggac

SEQ ID NO: 457 - DNA, 225 bp, unidentified
  misc_feature 1..225: note = Encodes 16S rRNA from Pelomonas
  source 1..225: mol_type = genomic DNA
agagtttgatcatggctcagattgaacgctggcggcatgccttacacatgcaagtcgaacggtaacaggttaagctgacgagtggcgaacgggtgagtaatatatcggaacgtgcccagtcgtgggggataactgctcgaaagagcagctaataccgcatacgacctgagggtgaaagcgggggatcgcaagacctcgcgcgattggagcggccgatatcagatt

SEQ ID NO: 458 - DNA, 225 bp, unidentified
  misc_feature 1..225: note = Encodes 16S rRNA from Saccharofermentans
  source 1..225: mol_type = genomic DNA
agagtttgatcatggctcaggatgaacgctggcggcgtgcttaacacatgcaagtcgaacggagtttagtggaatgcgacttcggtcaaatgaaattaaacttagtggcggacgggtgagtaacgtgtgagcaacctgcctttcagagggggataacgcagagaaatttgcgctaataccgcatgacatgtcggaatcgcatggatctgacatcaaaggagcaat

SEQ ID NO: 459 - DNA, 225 bp, unidentified
  misc_feature 1..225: note = Encodes 16S rRNA from Paracoccus
  source 1..225: mol_type = genomic DNA
agagtttgatcctggctcagaacgaacgctggcggcaggcctaacacatgcaagtcgagcgaggacttcggtcctagcggcggacgggtgagtaacgcgtgggaacgtgccccttgctgcggaatagccccgggaaactgggattaataccgcatgatccccctgatcatggagatctgggggcaaagatttatcggcaagggatcggcccgcgttggattaggt

SEQ ID NO: 460 - DNA, 225 bp, unidentified
  misc_feature 1..225: note = Encodes 16S rRNA from Enterorhabdus
  source 1..225: mol_type = genomic DNA
agagtttgatcatggctcaggatgaacgctggcggcgtgcctaacacatgcaagtcgaacggttaaaccggcttcggccggacatagagtggcgaacgggtgagtaacacgtgaccaacctgccccgcgcaccgggatagccccccgaaagggggattaataccggatgcgccggccgggccgcatggcccggccgggaaagcccaggcggcgcgggatggggtc

SEQ ID NO: 461 - DNA, 225 bp, unidentified
  misc_feature 1..225: note = Encodes 16S rRNA from Beijerinckia
  source 1..225: mol_type = genomic DNA
agagtttgatcatggctcagagcgaacgctagcggaatgctttatacatgcaagtcgaacggaaaattaaatgaagtagcaatatggatttgaagtttttagtggcgaacgggtgagtaatatataggaatttgcccagtagtggggaacaacagatagaaatgtctgctaataccgcatacgtccgagaggagaaagtcacaagacgctattggagaagcctat

SEQ ID NO: 462 - DNA, 225 bp, unidentified
  misc_feature 1..225: note = Encodes 16S rRNA from Sporobacter
  source 1..225: mol_type = genomic DNA
agagtttgatcctggctcaggacgaacgctggcggcgtgcctaacacatgcaagtcgaacgggatcctcatgaaggagttttcggacaacggaatggggcatctagtggcggacgggtgagtaacgcgtgagcaacctgcccttcggagggggacaacagttggaaacgactgctaataccgcataacatataccggtggcatcatgggtatatcaaagatttat

SEQ ID NO: 463 - DNA, 225 bp, unidentified
  misc_feature 1..225: note = Encodes 16S rRNA from Clostridium IV
  source 1..225: mol_type = genomic DNA
agagtttgatcatggctcaggatgaacgctggcggcgtgcataacacattcaagtcgaacggacttagaggggcttgctcctcgaaagttagtggcggacgggtgagtaacgcgtgagcaacctgcctttctccgggggataacattgggaaaccggtgctaataccgcataacgtacagagatcgcatgttttttgtaccaaagattcattggggaaagatggg

SEQ ID NO: 464 - DNA, 225 bp, unidentified
  misc_feature 1..225: note = Encodes 16S rRNA from Bacillus
  source 1..225: mol_type = genomic DNA
agagtttgatcctggctcaggatgaacgctggcggcgtgcctaatacatgcaagtcgaacggagtatcttcggatacttagtggcgaacgggtgagtaatacttgaacaacctgcccctttgactgggataaccgtctgaaaagacagctaataccggataggtaatattgaggcatctcgatattattaaagatgggttacatcacattgggatgggttcaagt

SEQ ID NO: 465 - DNA, 225 bp, unidentified
  misc_feature 1..225: note = Encodes 16S rRNA from Saccharofermentans
  source 1..225: mol_type = genomic DNA
agagtttgatcctggctcaggacgaacgctggcggcgtgcttaacacatgcaagtcgagcgaggggatacggcttcggctgtagactcgagcggcggacgggtgagtaacgcgtgaacgatctgtcccatacagggggataccacttggaaacaggtgctaataccgcataagaccacgaagctgcatggctttgaggtaaaaggagcgatccggtatggggtga

SEQ ID NO: 466 - DNA, 225 bp, unidentified
  misc_feature 1..225: note = Encodes 16S rRNA from Spirochaeta
  source 1..225: mol_type = genomic DNA
agagtttgatcatggctcagaacgaacgctggcggcgcgtcttaagcatgcaagtcgagcgggattgggtagcttgctactcatgagagcggcggactggtgagtaacgcgtgggtgacgtaccctttagacggggatagctcctagaaataggaggtaataccggatacgatagtgagtgtcagaggctcattatgaaaggttcttttgaaccgctgaaggagc

SEQ ID NO: 467 - DNA, 225 bp, unidentified
  misc_feature 1..225: note = Encodes 16S rRNA from Prevotella
  source 1..225: mol_type = genomic DNA
agagtttgatcatggctcaggatgaacgctagctacaggcttaacacatgcaagtcgaggggaaacgatgagagagcttgctctctcaggcgtcgaccggcgcacgggtgagtaacacgtatccaacctgcctttttccagggaataaccttgcgaaagtaagactaatgccctatgtgtcctttgacggcatcagacgaggacgaaagatttatcggaaaggga

SEQ ID NO: 468 - DNA, 225 bp, unidentified
  misc_feature 1..225: note = Encodes 16S rRNA from Eubacterium
  source 1..225: mol_type = genomic DNA
agagtttgatcatggctcaggattaacgctggcggcgtgcctaacacatgcaagtcgagcgagaaatggtgaaatgaaacttcggtagattagatccatggacagcggcggacgggtgagtaacgcgtgggcaacctgcccctttccggaggatagccaagggaaactttgaataatactccataaagcaagagtaccgcatgatacacttgccaaagatttatc

SEQ ID NO: 469 - DNA, 225 bp, unidentified
  misc_feature 1..225: note = Encodes 16S rRNA from Herbiconiux
  source 1..225: mol_type = genomic DNA
agagtttgatcctggctcaggacgaacgctggcggcatgcctaacacatgcaagtcgaacggacgagggtagcaatacccaagttagtggcgaacgggtgagtaacacgtgagcaacctgccctttacactgggatagcagttggaaacgactgataataccggataagaccacgctcccgcatgggagaggggtcaaagtgaattagcggtaaaggatgggctc

SEQ ID NO: 470 - DNA, 225 bp, unidentified
  misc_feature 1..225: note = Encodes 16S rRNA from Brevundimonas
  source 1..225: mol_type = genomic DNA
agagtttgatcctggctcagagcgaacgctggcggcaggcctaacacatgcaagtcgaacggacccttcggggttagtggcggacgggtgagtaacacgtgggaacgtgcctttaggttcggaatagctcctggaaacgggtggtaatgccgaatgtgcccttcgggggaaagatttatcgcctttagagcggcccgcgtctgattagctagttggtgaggtaat

SEQ ID NO: 471 - DNA, 225 bp, unidentified
  misc_feature 1..225: note = Encodes 16S rRNA from Mogibacterium
  source 1..225: mol_type = genomic DNA
agagtttgatcatggctcaggatgaacgctggcggcgtgcctaatacatgcaagtcgagcgagaatctctgacatgacgcttcggttgattggaagagaggacagcggcggacgggtgagtaacgcgtaggcaacctgcccccgacagagggatagccattggaaacgatgattaaaacctcataacgctcgtatgacacatgtcatatgagccaaagatttatc

SEQ ID NO: 472 - DNA, 225 bp, unidentified
  misc_feature 1..225: note = Encodes 16S rRNA from Anaerorhabdus
  source 1..225: mol_type = genomic DNA
agagtttgatcatggctcaggattaacgctggcggcgtgcctaatacatgcaagtcgtacgggtgattctagcttgctagatgatccagtggcgaacgggtgagtaatacataaacaacctacctataaggactgggataacgcttggaaacgagtgctaataccggataggtaacgggagggcatcctcctgttattaaaggattactacacaaatagatgggt

SEQ ID NO: 473 - DNA, 225 bp, unidentified
  misc_feature 1..225: note = Encodes 16S rRNA from Victivallis
  source 1..225: mol_type = genomic DNA
agagtttgatcctggctcagaacgaacgctggcggcatggattaggcatgcaagtcgaacgaagcagcaatgcttagtggcggaagggtgaggaacgcgtgagtaatctgcccccaagttgggaataacagctggaaacggctgctaataccgaatgtggctgtcgggtcgcatgatctgacagttaaagatttattgcttggggatgagctcgcgtcccattag

SEQ ID NO: 474 - DNA, 225 bp, unidentified
  misc_feature 1..225: note = Encodes 16S rRNA from Prevotella
  source 1..225: mol_type = genomic DNA
agagtttgatcatggctcaggatgaacgctagctacaggcctaacacatgcaagtcgaggggcagcatgggagaagcttgcttttcccgatggcgaccggcgaatgggtgagtcacgcgtgtccaacctgcctccggcccggggatagcccttggaaatgaggattaagacccgataggtggagcttccgcatggcggctccatgaaacgagaccggagatgggg

SEQ ID NO: 475 - DNA, 225 bp, unidentified
  misc_feature 1..225: note = Encodes 16S rRNA from Anaerovorax
  source 1..225: mol_type = genomic DNA
agagtttgatcctggctcaggatgaacgctggcggcgtgcctaacacatgcaagtcgagcgggaaatacggaaatgaaggttcgctggaatttctgtatggagagcggcggacgggtgagtaacgcgtaggcaacctgccctttgcagagggatagccactggaaacggtgattaaaacctcataatgccatttgttcacatgttcagatggccaaagatttatc

SEQ ID NO: 476 - DNA, 225 bp, unidentified
  misc_feature 1..225: note = Encodes 16S rRNA from Aquiflexum
  source 1..225: mol_type = genomic DNA
agagtttgatcatggctcaggatgaacgctggcggcaggcttaatacatgcaagtcgaacggtaaggcctgaagtggcaacacggagggtacacgagtggcgcacgggtgcgtaacgcgtatgcaacctgcccctaaccgggacaaaacagctggaaacggctgctaatatcccatggccacacgagggggcatccccatgtgtgtaaagattcattggttaggg

SEQ ID NO: 477 - DNA, 225 bp, unidentified
  misc_feature 1..225: note = Encodes 16S rRNA from Oscillibacter
  source 1..225: mol_type = genomic DNA
agagtttgatcctggctcaggacgaacgctggcggcgtgcctaacacatgcaagtcgaacggagtgatttggattcgtctggatcacttagtggcggacgggtgagtaacgcgtgagcaacctgcccttcagagggggacaacagttggaaacgactgctaataccgcataatatatacttaaggcatcttaggtatatcaaagattttatcgctgaaggatggg

SEQ ID NO: 478 - DNA, 225 bp, unidentified
  misc_feature 1..225: note = Encodes 16S rRNA from Altererythrobacter
  source 1..225: mol_type = genomic DNA
agagtttgatcctggctcagaacgaacgctggcggcacgcttaacacatgcaagtcgaacgagattgcgggttcgctcgtaatttagtggcgcacgggtgaggaacgcgtgactacctgcctgttgatggtggataactccgggaaactggagctaatacagcataagctcgagagaggaaagacaaaagtcgtcgacagagggggttgcgtctgattaggtagt

SEQ ID NO: 479 - DNA, 225 bp, unidentified
  misc_feature 1..225: note = Encodes 16S rRNA from Hydrogenoanaerobacterium
  source 1..225: mol_type = genomic DNA
agagtttgatcctggctcaggacgaacgctggcggcacgcttaacacatgcaagtcgaacgaagcttgggagcttgctttcaagcttagtggcggacgggtgagtaacacgtgagcaacctgccttcaggtgtggaataatggttggaaacggccactaataccgcataatgcagcgggatcgcatgatcctgctgccaaaggtttactgcctgaagatgggctc

SEQ ID NO: 480 - DNA, 225 bp, unidentified
  misc_feature 1..225: note = Encodes 16S rRNA from Clostridium III
  source 1..225: mol_type = genomic DNA
agagtttgatcatggctcaggacgaacgctggcggcgtgcctaacacatgcaagtcgaacgagaagtcttgaaatgatcccttcggggtgaatggatagatggacagtggcggacgggcgagtaacgcgtgagtaacctgcccataagagagggatagccgatggaaacgtcgagtaatacctcatattgtaattaattcgcatggattgattatgaaagattta

SEQ ID NO: 481 - DNA, 225 bp, unidentified
  misc_feature 1..225: note = Encodes 16S rRNA from Clostridium XlVb
  source 1..225: mol_type = genomic DNA
agagtttgatcctggctcaggatgaacgctggcggcgtgcctaacacatgcaagtcgagcgaagcataggtgcttgcacttatgacttagcggcggacgggtgagtaacgcgtgggtaacctgccctgtacaggggaataacagttagaaatgactgctaatgccccataagccgacgtaatggcatctttatgtcggaaaagatttatcggtacaggagggacc

SEQ ID NO: 482 - DNA, 225 bp, unidentified
  misc_feature 1..225: note = Encodes 16S rRNA from Saccharofermentans
  source 1..225: mol_type = genomic DNA
agagtttgatcatggctcaggacgaacgctggcggcgtgcctaacacatgcaagtcgagcggggacagcggattagcttgctaagctgctgttccagcggcggacgggtgagtaacgcgtgaacaatctgtcccagacagggggataacacttggaaacaggtgctaataccgcataagaccacagtgccgcatggcagaggggtaaaaggagcaatccggtctg

SEQ ID NO: 483 - DNA, 225 bp, unidentified
  misc_feature 1..225: note = Encodes 16S rRNA from Roseburia
  source 1..225: mol_type = genomic DNA
agagtttgatcatggctcaggatgaacgctggcggcgtgcttaacacatgcaagtcgaacgaatttctttcggaacgcggcttcggccaagggaagagagaagtgagtggcggacgggtgagtaacgcgtgggtaacctgcctcacatcgggggataccagtcggaaacgactgctaaaaccgcataagaccacggtatcgcatgatactgaggccaaaactccg

SEQ ID NO: 484 - DNA, 225 bp, unidentified
  misc_feature 1..225: note = Encodes 16S rRNA from Anaeroplasma
  source 1..225: mol_type = genomic DNA
agagtttgatcatggctcaggattaacgctggcggcatgcctaatacatgcaagtcgaatgagaagcttgcttctcatggcgaacgggtgagtaacacgtaggtaacctgccttacactcgaggataaccgttggaaacgacggataatactggataggacaaagattcgcatgaatcgttgtttaaaagcaatggtgtatgaggggcctgcggtgcattagcta

SEQ ID NO: 485 - DNA, 225 bp, unidentified
  misc_feature 1..225: note = Encodes 16S rRNA from Planctomyces
  source 1..225: mol_type = genomic DNA
agagtttgatcctggctcagaatgaacgttggcggcatggattaggcatgcaagtcgtacggtgaaggggagcttgctcctctgatcagtggcgaaagggatagtaacgcgtagataccaccctcctggacggggatagctgcgggaaactgcaggtaatacccgataatgacgagagtccaaaggtgtaattccttcaggagacggatctgcgtcctaccagat

SEQ ID NO: 486 - DNA, 225 bp, unidentified
  misc_feature 1..225: note = Encodes 16S rRNA from Ruminococcus
  source 1..225: mol_type = genomic DNA
agagtttgatcctggctcaggacgaacgctggcggcacgcttaacacatgcaagtcgaacggagataatggatttattcgttatcttagtggcggacgggtgagtaacacgtgagcaacctgcctttaagagggggatagcttctggaaacggatggtaataccctataaaatatatttaaggcatcttaggtatatcaaagatttatcacttaaagatgggctc

SEQ ID NO: 487 - DNA, 225 bp, unidentified
  misc_feature 1..225: note = Encodes 16S rRNA from Selenomonas
  source 1..225: mol_type = genomic DNA
agagtttgatcctggctcaggacgaacgctggcggcgtgcttaacacatgcaagtcgaacgagaaaatattggaagcttgcttttgatagattcgagtggcaaacgggtgagtaacgcgtagacaacctgccgcaaagatggggacaacagatcgaaaggtctgctaataccgaatgttgcggagctcccgcatgggagctccgccaaagatggcctctacttgt

SEQ ID NO: 488 - DNA, 225 bp, unidentified
  misc_feature 1..225: note = Encodes 16S rRNA from Anaeroplasma
  source 1..225: mol_type = genomic DNA
agagtttgatcatggctcaggattaacgctggcggcgtgcctaatacatgcaagtcgaatggtagtagcaatacaaaccatggcgaacgggtgagtaacacgtaggtaacctgtctttaagacgaggataaccgttggaaacgacggataatactggataggacattacaaggggcatcccaaaatgtttaaagattattatgtcacttagagaggggcctgcgg

SEQ ID NO: 489 - DNA, 225 bp, unidentified
  misc_feature 1..225: note = Encodes 16S rRNA from Anaerovorax
  source 1..225: mol_type = genomic DNA
agagtttgatcatggctcaggatgaacgctggcggcgtgcctaacacatgcaagtcgagcgggaaatctcggaaataagcttcggcagaaataagagatggatagcggcggacgggtgagtaacgcgtaggtaacctgccctttgcagagggatagcctagggaaacctggattaataccacataatgcagtctggtcacatggcgaggctgccaaagatttatc

SEQ ID NO: 490 - DNA, 225 bp, unidentified
  misc_feature 1..225: note = Encodes 16S rRNA from Rummeliibacillus
  source 1..225: mol_type = genomic DNA
agagtttgatcctggctcaggacgaacgctggcggcgtgcctaatacatgcaagtcgagcgaatgacgagaagcttgcttctctgatttagcggcggacgggtgagtaacacgtgggcaacctgccctgtagactgggataacttcgggaaaccggagctaataccggataattcttttagcctcatggctttaagctaaaaggcgcttcggcgtcactacagga

SEQ ID NO: 491 - DNA, 225 bp, unidentified
  misc_feature 1..225: note = Encodes 16S rRNA from Clostridium XlVa
  source 1..225: mol_type = genomic DNA
agagtttgatcctggctcaggatgaacgctggcggcgtgcctaacacatgcaagtcgaacgaggtgcagtaaacggagattcgtcgaagggaactgtatccgagtggcggatgggtgagtaacgcgtggagaacctgcccttatcagggggataacaactggaaacggttgacaataccgcataagcttcggttatcgcatgatagcagaaggaaagatttatcg

SEQ ID NO: 492 - DNA, 225 bp, unidentified
  misc_feature 1..225: note = Encodes 16S rRNA from Anaeroplasma
  source 1..225: mol_type = genomic DNA
agagtttgatcctggctcaggattaacgctggcggcgtgcctaatacatgcaagtcgaatggttagcttgctaaccatggcgaacgggtgagtaacacgtaggtaacctgtcttttagccgaggataaccattggaaacgatggataatactggataggacatttgaaggcatctttggatgtttaaagatttatcactagaagaggggcctgcggcgcattagc

SEQ ID NO: 493 - DNA, 225 bp, unidentified
  misc_feature 1..225: note = Encodes 16S rRNA from Butyrivibrio
  source 1..225: mol_type = genomic DNA
agagtttgatcctggctcaggatgaacgctggcggcgtgcctaacacatgcaagtcgaacggagtttgtagaacggaagtcttcggatggaagatttataaacttagtggcggacgggtgagtaacgcgtgggtaacctgcctcgtacagggggatagcagctggaaacggctggtaaaaccgcataagcgcacaacttcgcatgaaggagtgtgaaaatattta

SEQ ID NO: 494 - DNA, 225 bp, unidentified
  misc_feature 1..225: note = Encodes 16S rRNA from Lachnospiracea incertae sedis
  source 1..225: mol_type = genomic DNA
agagtttgatcctggctcaggatgaacgctggcggcgtgcctaacacatgcaagtcgaacgggaaccttgtgacggagacttcggttgaagaagcaagaattctagtggcggacgggtgagtaacgcgtgggtaacctgcccttaagaggcgaataacagtgagaaatcactgctaatacgccatatgcttacggaatcgcatgattttgtgaggaaaagaattt

SEQ ID NO: 495 - DNA, 225 bp, unidentified
  misc_feature 1..225: note = Encodes 16S rRNA from Anaerotruncus
  source 1..225: mol_type = genomic DNA
agagtttgatcatggctcaggacgaacgctggcggcgtgcctaacacatgcaagtcgaacgaagttattacgctgaaatgatattagcttgctaaaggaatttcttgtaatgcttagtggcggacgggtgagtaacgcgtgagcaacctgcctttcagagggggacaacagttggaaacgactgctaataccgcataacattgtttaaagacatctttagataat

SEQ ID NO: 496 - DNA, 225 bp, unidentified
  misc_feature 1..225: note = Encodes 16S rRNA from Syntrophococcus
  source 1..225: mol_type = genomic DNA
agagtttgatcctggctcaggatgaacgctggcggcgtgcctaacacatgcaagtcgaacgaggctcttctctctgacgtttcgactgattagagaagatcaccgagtggcggatgggtgagtaacgcgtggagaacctgcccccatcagggggataacaactggaaacggttgataataccgcatatatgacaagaccgcatgatcttgtcaggaaagatttat

SEQ ID NO: 497 - DNA, 225 bp, unidentified
  misc_feature 1..225: note = Encodes 16S rRNA from Paraeggerthella
  source 1..225: mol_type = genomic DNA
agagtttgatcctggctcaggatgaacgctggcggcgtgcctaacacatgcaagtcgaacggttaaaccggcttcggccggacataaagtggcgaacgggtgagtaacacgtgaccaacctgccccgcgcaccgggacagccccccgaaagggggattgataccggatgctccgccccctccgcatggcgggggcgggaaagcccaggcggcgcgggatggggtc

SEQ ID NO: 498 - DNA, 225 bp, unidentified
  misc_feature 1..225: note = Encodes 16S rRNA from Papillibacter
  source 1..225: mol_type = genomic DNA
agagtttgatcatggctcaggataaacgctggcggcgtgcttaacacattcaagtcgaacggacgacagggggcttgctccctgaagttagtggcggacgggtgagtaacgcgtgagcaacctgccttttttcgggggataacacggggaaaccggtgctaataccgcataacgtaccgagatcgcatggtcatggtaccaaaggagcaatccgaggaaagatgg

SEQ ID NO: 499 - DNA, 225 bp, unidentified
  misc_feature 1..225: note = Encodes 16S rRNA from Lachnospiracea incertae sedis
  source 1..225: mol_type = genomic DNA
agagtttgatcctggctcaggatgaacgctggcggcgtgcctaacacatgcaagtcgagcggacttatgacaagattcttcggatgatttttataagttagcggcggatgggtgaggaacgcgtggagaacctgcccttcacagggggataacagttggaaacgactgttaataccgcatatgctcacgtgaccgcatggtcgagtgaggaaagctccggcggtg

SEQ ID NO: 500 - DNA, 225 bp, unidentified
  misc_feature 1..225: note = Encodes 16S rRNA from Prevotella
  source 1..225: mol_type = genomic DNA
agagtttgatcctggctcaggatgaacgctagctacaggcttaacacatgcaagtcgaggggcatcaggtactgtgcttgcacagtatgctggcgaccggcgcacgggtgagtaacgcgtatccaaccttcccatgactccggttcagcccgccgaaaggcggattactcccggatggtttccgaagagggcctctgatttggaataaagatttatcggtcatgg

SEQ ID NO: 501 - DNA, 225 bp, unidentified
  misc_feature 1..225: note = Encodes 16S rRNA from Papillibacter
  source 1..225: mol_type = genomic DNA
agagtttgatcctggctcaggacgaacgctggcggcgtgcctaacacatgcaagtcgaacggagcgagaggagcttgctcttctcgcttagtggcggacgggtgagtaacgcgtgagcaacctggctttcagaggggaataacacagtgaaaactgtactaataccgcataacgtctcttgggcgcatgcccgagggaccaaaggagcaatccgctgaaagatgg

SEQ ID NO: 502 - DNA, 225 bp, unidentified
  misc_feature 1..225: note = Encodes 16S rRNA from Streptococcus
  source 1..225: mol_type = genomic DNA
agagtttgatcctggctcaggatgaacgctggcggcgtgcttaatacatgcaagtcgaacggatgattcttccagcttgctggaagatgattcagtggcgaacgggtgagtaatacgtaggcaacctgccccaaagcgggggatagcagttggaaacgactattaataccgcataggtaatcttaaggcatcttgagattattaaaggtgcgtttgcaccgctgt

SEQ ID NO: 503 - DNA, 225 bp, unidentified
  misc_feature 1..225: note = Encodes 16S rRNA from Methanobrevibacter
  source 1..225: mol_type = genomic DNA
agagtttgatcatggcagatgttactgctattgggattcgattaagccatgcaagtcgaacgaatttagattcgtggcgtacggctcagtaacacgtggataacctacccttaggaccgggataaccttgggaaactgaggataatactggataggcaattattcctgtaatggttttttgtttaaatgttttttcgcctaaggatgggtctgcggccgattagg

SEQ ID NO: 504 - DNA, 225 bp, unidentified
  misc_feature 1..225: note = Encodes 16S rRNA from Prevotella
  source 1..225: mol_type = genomic DNA
agagtttgatcatggctcaggatgaacgctagctacaggcttaacacatgcaagtcgaggggcatcatggcggtggcttgccaccgctgatggcgaccggcgcacgggtgagtaacgcgtatccaacctgcccccaaccgcggcacagcccgccgaaaggcggattaattccgcatgtggtcgtgatgtgacatcttttcacgactaaaggttcactccggttgg

SEQ ID NO: 505 - DNA, 225 bp, unidentified
  misc_feature 1..225: note = Encodes 16S rRNA from Prevotella
  source 1..225: mol_type = genomic DNA
agagtttgatcatggctcaggatgaacgctagctacaggcttaacacatgcaagtcgaggggcagcgagggggcagcaatgcccctgtcggcgaccggcgcacgggtgagtaacgcgtatccaacctgccccatggtagggaatagcccggagaaatccggattaatgccctatgttctccgacgatggcatctgacttggagcaaagatttatcgccatgggat

SEQ ID NO: 506 - DNA, 225 bp, unidentified; identical to SEQ ID NO: 474
  misc_feature 1..225: note = Encodes 16S rRNA from Prevotella
  source 1..225: mol_type = genomic DNA

SEQ ID NO: 507 - DNA, 225 bp, unidentified
  misc_feature 1..225: note = Encodes 16S rRNA from Coraliomargarita
  source 1..225: mol_type = genomic DNA
agagtttgatcatggctcagagtgaacgctggcggcgtggctaagacatgcaagttgagcgagaatatgcctttgggcatagggaagcggcaaacgggtgagtaacacgtaagtaacctacccttaagactgggatagccctgtgaaagtgggggtaataccggatgaggactatgactgcatggttatagatcgaaaggtttgtaaaggcgcttaaggaggggc

SEQ ID NO: 508 - DNA, 225 bp, unidentified
  misc_feature 1..225: note = Encodes 16S rRNA from Prevotella
  source 1..225: mol_type = genomic DNA
agagtttgatcctggctcaggatgaacgctagctacaggcttaacacatgcaagtcgcggggcagcatgttgtgtgcttgcacacaatgatggcgaccggcgcacgggtgcgtaacgcgtatccaacctgccccttactctggaatagcccggcgaaagtcggattaatgccggatgttgtcagatgaggacatctgagtttgaccaaaggccctttgggtcggt

SEQ ID NO: 509 - DNA, 225 bp, unidentified
  misc_feature 1..225: note = Encodes 16S rRNA from Thermotalea
  source 1..225: mol_type = genomic DNA
agagtttgatcctggctcaggattaacgctggcggcgtgcctaacacatgcaagtcgagcgagaaatagtgaagagatacttcggttgaacggatctatggacagcggcggacgggtgagtaacgcgtgggcaacctacccctttcccgaggatagccaagggaaactttgaataatactccataaagcagatgtaccgcatgatacgactgccaaagatttatc

SEQ ID NO: 510 - DNA, 225 bp, unidentified
  misc_feature 1..225: note = Encodes 16S rRNA from Clostridium XlVa
  source 1..225: mol_type = genomic DNA
agagtttgatcatggctcaggatgaacgctggcggcgtgcttaacacatgcaagtcgaacgaagcaggtttgaaggagacttcggtcaatggatgatctgacttagtggcggacgggtgagtaacgcgtgggcaacctgcctcatggagggggacaacagttggaaacgactgctaataccgcataagaccaagcatcgcatgatgcaatggtaaaagatttatc

SEQ ID NO: 511 - DNA, 225 bp, unidentified
  misc_feature 1..225: note = Encodes 16S rRNA from Atopobium
  source 1..225: mol_type = genomic DNA
agagtttgatcatggctcaggatgaacgctggcggcgcgcctaacacatgcaagtcgaacggttaaagccccttcgggggtgtataaagtggcgaacggctgagtaacacgtgggcaacctacctctcactccgggatagcctcgagaaatcgtggataataccggatactccaggataatcgcatggttttcctgggaaagccccgacggtgagagatgggccc

SEQ ID NO: 512 - DNA, 225 bp, unidentified
  misc_feature 1..225: note = Encodes 16S rRNA from Prevotella
  source 1..225: mol_type = genomic DNA
agagtttgatcatggctcaggatgaacgctagctacaggcttaacacatgcaagtcgaggggtaacatgacgaaagcttgcttttgttgatgacgaccggcgcacgggtgagtaacgcgtatccaacctgccctgtactacgggatagcccggcgaaagtcggattaataccgtatgtggtgtgataaagacatctgcattacactaaagatttatcggtacagg

SEQ ID NO: 513 - DNA, 225 bp, unidentified
  misc_feature 1..225: note = Encodes 16S rRNA from Mogibacterium
  source 1..225: mol_type = genomic DNA
agagtttgatcatggctcaggatgaacgctggcggcgtgcctaatacatgcaagtcgagcgagaagctactttgaagcgttttcgaacaattctgtgtagtggaaagcggcggacgggtgagtaacgcgtaggcaacctgcccttagcagagggatagccattggaaacgatgattaaaacctcataatgccaacttaacacatgttgagctggccaaagattta

SEQ ID NO: 514 - DNA, 225 bp, unidentified
  misc_feature 1..225: note = Encodes 16S rRNA from Clostridium XlVa
  source 1..225: mol_type = genomic DNA
agagtttgatcatggctcaggatgaacgctggcggcgtgcttaacacatgcaagtcgaacgaggaattgcgaaagaagttttcggatggattttgcttttccgagtggcggacgggtgagtaacgcgtgggtaacctgccttacactgggggacaacagagagaaatttctgctaataccgcataacccgctatgagcgcatgctcaagacggaaaagatttatc

SEQ ID NO: 515 - DNA, 225 bp, unidentified
  misc_feature 1..225: note = Encodes 16S rRNA from Clostridium XlVa
  source 1..225: mol_type = genomic DNA
agagtttgatcctggctcaggatgaacgctggcggcgtgcctaacacatgcaagtcgaacgaagaccccgaggcagagatttcggtcgaagccaagggaggactgagtggcggacgggtgagtaacgcgtggataacctgccccatacagggggatagcagttggaaacgactgataataccgcataagcgcacggggagacatctctttgtgtgaaaagattta

SEQ ID NO: 516 - DNA, 225 bp, unidentified
  misc_feature 1..225: note = Encodes 16S rRNA from Eggerthella
  source 1..225: mol_type = genomic DNA
agagtttgatcctggctcaggatgaacgctggcggcgtgcctaacacatgcaagtcgaacggtgaaaccgccctcgggcggacatgaagtggcgaacgggtgagtaacacgtgaccaacctgccccgcgcaccgggacagccccccgaaagggggattaataccggatactccggccgggccgcatggcccggccgggaaagctccggcggcgcgggatggggtc

SEQ ID NO: 517 - DNA, 225 bp, unidentified
  misc_feature 1..225: note = Encodes 16S rRNA from Blautia
  source 1..225: mol_type = genomic DNA
agagtttgatcatggctcaggatgaacgctggcggcgtgcctaacacatgcaagtcgaacggagatcatttggaaataagcttcggcagaaagaaggatgatcttagtggcggacgggtgagtaacgcgtggagaacctgccctgtacagggggataacatccagaaatggatgctaaaaccgcataagcgcacatgaccgcatggtcaagtgtgaaaaactccg

SEQ ID NO: 518 - DNA, 225 bp, unidentified
  misc_feature 1..225: note = Encodes 16S rRNA from Vampirovibrio
  source 1..225: mol_type = genomic DNA
agagtttgatcatggctcaggacgaacgctggcggtgtgcctcatacatgcaagtcgaacgataaggttccttcgggaatacataagtggcggacgggtgagtacaacataggaaatctgccctaaactgggggacaacagagggaaactcctgctaataccccatacgagcttagttgaaatactaatcttgaaagctccggcggtttaggatgagcctgtgcc

SEQ ID NO: 519 - DNA, 225 bp, unidentified
  misc_feature 1..225: note = Encodes 16S rRNA from Papillibacter
  source 1..225: mol_type = genomic DNA
agagtttgatcatggctcaggataaacgctggcggcgtgcttaacacattcaagtcgaacggacgacagggggcttgctccctgaagttagtggcggacgggtgagtaacgcgtgagcaacctgcctttttccgggggataacacggggaaaccggtgctaataccgcataacgtgccgagatcgcatggtcatggtaccaaaggagcaatccggggaaagatgg

SEQ ID NO: 520 - DNA, 225 bp, unidentified
  misc_feature 1..225: note = Encodes 16S rRNA from Beijerinckia
  source 1..225: mol_type = genomic DNA
agagtttgatcatggctcagaacgaacgctggcggcaggcttaacacatgcaagtcgaacgccccgcaaggggagtggcagacgggtgagtaacgcgtgggaacataccctttcctgcggaatagctccgggaaactggaattaataccgcatacgccctacgggggaaagatttatcggggaaggattggcccgcgttggattagctagttggtggggtaaagg

SEQ ID NO: 521 - DNA, 225 bp, unidentified
  misc_feature 1..225: note = Encodes 16S rRNA from Bacteroides
  source 1..225: mol_type = genomic DNA
agagtttgatcatggctcaggatgaacgctagctacaggcttaacacatgcaagtcgaggggcagcattagattagcttgctaatctagatggcgaccggcgcacgggtgagtaacgcgtatccaacctgccccctacccggggatagccttgcgaaagtaagattaatacccggtgctgttatgattccgcatggggatataacgaaagattcatcggtagggg

SEQ ID NO: 522 - DNA, 225 bp, unidentified
  misc_feature 1..225: note = Encodes 16S rRNA from Desulfotomaculum
  source 1..225: mol_type = genomic DNA
agagtttgatcatggctcaggacgaacgctggcggcgtgcttaacacatgcaagtcgaacggagcttaaggaagagcttgctctgagataagcttagtggcggacgggtgagtaacgcgtgaggaacctggtttacacagggggataacggcccgaaagggttgctaataccgcataagaccacaacaccgcatgatgaaggggtcaaaggagaaatccggtgta

SEQ ID NO: 523 - DNA, 225 bp, unidentified
  misc_feature 1..225: note = Encodes 16S rRNA from unidentified taxa
  source 1..225: mol_type = genomic DNA
agagtttgatcatggctcaggataaacgctggcggcgtgcattatgcatgcaagtcgaacgagatacgcaagtatcgagtggcaaacgggtgagtaacacatagataacctaccctcgagtggggaataattctccgaaaggaggactaataccgcatacgatggcttttcacaagaagagttattaaagcagcaatgcgcttgaggaggggtctgtgtccgatt

SEQ ID NO: 524 - DNA, 225 bp, unidentified
  misc_feature 1..225: note = Encodes 16S rRNA from Clostridium XlVa
  source 1..225: mol_type = genomic DNA
agagtttgatcatggctcaggatgaacgctggcggcgtgcttaacacatgcaagtcgaacgaatttctgttagaatgcggcttcggccaagtgaagacagaagtgagtggcggacgggtgagtaacgcgtgggtaacctaccttacacagggggataacgattggaaacgatcgctaataccgcataagaccacagtgccgcatggtacaggggtaaaagattta

SEQ ID NO: 525 - DNA, 225 bp, unidentified
  misc_feature 1..225: note = Encodes 16S rRNA from Clostridium XlVa
  source 1..225: mol_type = genomic DNA
agagtttgatcatggctcaggatgaacgctggcggcgtgcctaacacatgcaagtcgaacgggcactggcggaagaagccttcgggtggaagctgccagagctagtggcggacgggtgagtaacgcgtggataacctgccctgttccgggggataacagctggaaacggctgctaataccgcataagcgcacgaggcggcatcgcctagtgtgaaaaactccggt

SEQ ID NO: 526 - DNA, 225 bp, unidentified
  misc_feature 1..225: note = Encodes 16S rRNA from Clostridium XlVa
  source 1..225: mol_type = genomic DNA
agagtttgatcatggctcaggatgaacgctggcggcgtgcctaacacatgcaagtcgaacggaaatgatttgatgaaggtttcggttggattcttatcattttagtggcggacgggtgagtaacacgtgggtaacctgccctgtaccgggggataacacttagaaataggtgataataccgcataagcgcacactgacgcatgtcagagtgtgaaaaactccggt

SEQ ID NO: 527 - DNA, 225 bp, unidentified
  misc_feature 1..225: note = Encodes 16S rRNA from Cryptanaerobacter
  source 1..225: mol_type = genomic DNA
agagtttgatcatggctcaggacgaacgctggcggcatgcctaacacatgcaagtcgaacggaataagtttggttgtagcgatactttcgaacttatttagtggcgaacgggtgagtaacacgtgagcaacctgccttttacacagggataacagccggaaacggctgctaataccggataagaccacaccgaggcatctcggaggggtcaaagcgcttagcggt

SEQ ID NO: 528 - DNA, 225 bp, unidentified
  misc_feature 1..225: note = Encodes 16S rRNA from Prevotella
  source 1..225: mol_type = genomic DNA
agagtttgatcatggctcaggatgaacgctagctacaggcctaacacatgcaagtcgaggggcagcatgtcggtagcttgctaccgatgatggcgaccggcggatgggtgagcaacgcgtatccaacctgccccatgcgcggggatagcccttggaaatgaggattaagccccgatatgcgcattcgccgcatggcgtgtgcgtgaagttgtgcatgggatgggg

SEQ ID NO: 529 - DNA, 225 bp, unidentified
  misc_feature 1..225: note = Encodes 16S rRNA from Syntrophomonas
  source 1..225: mol_type = genomic DNA
agagtttgatcatggctcaggacgaacgctggcggcgtgcctaacacatgcaagtcgaacggaaactattcgagaatttcggttcatgaatagttttagtggcggacgggtgagtaacgcgtgagaatctgcctttgagtggggaataacagttggaaacgactgctaataccgcataacatggaaacatcaaagagggtgcaagccctcgctcagagatgagct

SEQ ID NO: 530 - DNA, 225 bp, unidentified
  misc_feature 1..225: note = Encodes 16S rRNA from Erysipelothrix
  source 1..225: mol_type = genomic DNA
agagtttgatcatggctcaggatgaacgctggcggcgtgcttaatacatgcaagtcgaacgcacgagattacttcggtgatcgagtgagtggcgaacgggtgagtaatacataaggaacctgcccatcagactgggataacagttggaaacgactgctaataccggataggtagttgagtggcatcacatagctattaaagttgagatacactgatggatggcct

SEQ ID NO: 531 - DNA, 225 bp, unidentified
  misc_feature 1..225: note = Encodes 16S rRNA from Selenomonas
  source 1..225: mol_type = genomic DNA
agagtttgatcctggctcaggacgaacgctggcggcgtgcttaacacatgcaagtcgaacgagacgattgaaagcttgcttttgaaagtcgagtggcaaacgggtgagtaacgcgtaggcaacctgcctctaggatggggacaacagtccgaaaggactgctaataccgaatgttgtaggtattccgcatggaatacctattaaagatggcctctacttgtaagc

SEQ ID NO: 532 - DNA, 225 bp, unidentified
  misc_feature 1..225: note = Encodes 16S rRNA from Clostridium III
  source 1..225: mol_type = genomic DNA
agagtttgatcatggctcaggacgaacgctggcggcgtgcctaacacatgcaagtcgagcgagaatctttcatttgatcccttcggggtgacgacggaagaggaaagcggcggacgggtgagtaacgcgtgagtaatctgccccatggtggggaataacacagtgaaaactgtgctaatgccccataatgtatacttgttgcatagcagggataccaaagattta

SEQ ID NO: 533 - DNA, 225 bp, unidentified
  misc_feature 1..225: note = Encodes 16S rRNA from Flavobacterium
  source 1..225: mol_type = genomic DNA
agagtttgatcctggctcaggatgaacgctagcggcaggcctaacacatgcaagtcgaggggtagagatagcttgctatcttgagaccggcgcacgggtgcgtaacgcgtatgcaatctaccttatactaagggatagcccggagaaatccggattaataccttatggtttttatgaatagcattatttatagaataaagatttatcggtataagatgagcatgc

SEQ ID NO: 534 - DNA, 225 bp, unidentified
  misc_feature 1..225: note = Encodes 16S rRNA from Thermotalea
  source 1..225: mol_type = genomic DNA
agagtttgatcctggctcaggatgaacgctggcggcgtgcttaacacatgcaagtcgagcgagaaatgacagacggattcttcggatgacagaagtcatggacagcggcggacgggtgagtaacgcgtgggcaacctgcccctgactgagggatagccgagggaaacttcgagtaatacctcataacgcataactgtcgcatggcagatatgccaaagatttatc

SEQ ID NO: 535 - DNA, 225 bp, unidentified
  misc_feature 1..225: note = Encodes 16S rRNA from Lachnospiracea incertae sedis
  source 1..225: mol_type = genomic DNA
agagtttgatcatggctcaggatgaacgctggcggcgcgcttaacacatgcaagtcgaacggaatttgtaacttcggttgtggattcagtggcggacgggtgagtaacacgtggataacttgccttttagtgggggatagctgagagaaatctcaattaataccgcataatgtaatttgttcgcatgaatagattaataaagatgaaaatcgctaagagataggt

SEQ ID NO: 536 - DNA, 225 bp, unidentified
  misc_feature 1..225: note = Encodes 16S rRNA from Mucilaginibacter
  source 1..225: mol_type = genomic DNA
agagtttgatcatggctcaggatgaacgctagcggcaggcctaatacatgcaagtcggacgggaactccccttcgggggagtgagagtggcgcacgggtgcgtaacgcgtatgcaaccaaccctcatccgggggacagccggtggaaacgccgggtaataccccatgtccactttgggaggcatcttctgaggtggaaagactttggtcggaggaggacgggcat

SEQ ID NO: 537 - DNA, 225 bp, unidentified
  misc_feature 1..225: note = Encodes 16S rRNA from Bacteroides
  source 1..225: mol_type = genomic DNA
agagtttgatcctggctcaggatgaacgctagctacaggcttaacacatgcaagtcgaggggcagcattagattagcttgctaatctagatggcgaccggcgcacgggtgagtaacgcgtatccaacctgccccctacccggggatagccttgcgaaagtaagattaatacccggtgctgttgcgattccgcatggggatgcaacgaaagattcatcggtagggg

SEQ ID NO: 538 - DNA, 225 bp, unidentified
  misc_feature 1..225: note = Encodes 16S rRNA from Ruminococcus
  source 1..225: mol_type = genomic DNA
agagtttgatcctggctcaggacgaacgctggcggcacgcttaacacatgcaagtcgaacggagttaaataagcttgcttatttaacttagtggcggacgggtgagtaacacgtgagcaacctgccttacagagaggaataatgattggaaacggtcactaatacctcataaaatatctatactgcatggtattggatatcaaagatttatcgctgtaagatggg

SEQ ID NO: 539 - DNA, 191 bp, unidentified
  misc_feature 1..191: note = Encodes 16S rRNA from Clostridium XlVa
  source 1..191: mol_type = genomic DNA
agagtttgatcatggctcaggatgaacgctagctacaggcttaacacatgcaagtcgaggggaaaccctgatgcagcgacgccgcgtgagtgaagaagtatttcggtatgtaaagctctatcagcagggaagaaaatgacggtacctgactaagaagccccggctaactacgtgccagcagccgcggtaat

SEQ ID NO: 540 - DNA, 225 bp, unidentified
  misc_feature 1..225: note = Encodes 16S rRNA from Asaccharobacter
  source 1..225: mol_type = genomic DNA
agagtttgatcctggctcaggatgaacgctggcggcgtgcttaacacatgcaagtcgaacgattaagacccttcggggtgaataaagtggcgaacgggtgagtaacacgtgaccaacctgcctcgcactccggaataccttgtggaaacgcaaactaataccggatactccgagctgagcgcatgctctactcgggaaagcctttacggtgcgagatggggtcgc

SEQ ID NO: 541 - DNA, 225 bp, unidentified
  misc_feature 1..225: note = Encodes 16S rRNA from Blautia
  source 1..225: mol_type = genomic DNA
agagtttgatcatggctcaggatgaacgctggcggcgtgcctaacacatgcaagtcgaacggggatatgtcggaatgagacttcggttgaaggaagacatatcttagtggcggacgggtgagtaacgcgtggagaacctgcctcatactgggggataccagtgagaaatcactgctaaaaccgcataagcgcacggtaccgcatggtacagtgtgaaaaactccg

SEQ ID NO: 542 - DNA, 225 bp, unidentified
  misc_feature 1..225: note = Encodes 16S rRNA from Mucilaginibacter
  source 1..225: mol_type = genomic DNA
agagtttgatcatggctcaggatgaacgctagcggcaggcctaatacatgcaagtcggacgggatctccccttcgggggagtgagagtggcgcacgggtgcgtaacgcgtatgcaaccaaccctcatccgggggacagccggtggaaacgccgggtaataccccatatccacttcgggaggcatcttctgaggtggaaaggctttggtcggaggaggacgggcat

SEQ ID NO: 543 - DNA, 225 bp, unidentified
  misc_feature 1..225: note = Encodes 16S rRNA from Coprococcus
  source 1..225: mol_type = genomic DNA
agagtttgatcatggctcaggatgaacgctggcggcgtgcttaacacatgcaagtcgaacggacttaaggcgctgacgagacttcggtcaaatcttgtcttaagttagtggcggacgggtgagtaacgcgtgggtaacctgccgtatgccgggggacaacagttggaaacgactgctaataccgcataagcgcacggggaggcatctttccgtgtgaaaaactcc

SEQ ID NO: 544 - DNA, 225 bp, unidentified
  misc_feature 1..225: note = Encodes 16S rRNA from Lachnospiracea incertae sedis
  source 1..225: mol_type = genomic DNA
agagtttgatcctggctcaggatgaacgctggcggcgtgcttaacacatgcaagtcgaacggaacattccacccgaagaatgaagaagcttgcttcggaatgattcaaccggaatgtttagtggcggacgggtgagtaacgcgtgggtaacctaccttacacagggggataacagttagaaatgactgctaataccgcataagcgcacagtaccgcatggtacgg

SEQ ID NO: 545 - DNA, 225 bp, unidentified
  misc_feature 1..225: note = Encodes 16S rRNA from Butyricimonas
  source 1..225: mol_type = genomic DNA
agagtttgatcatggctcaggatgaacgctagcggcaggcttaacacatgcaagtcgaggggcagcgggtctagcaatagatgccggcgaccggcgaaagggtgagtaacgcgtgagcaacatacccttgacagggggataggcactggaaacggtgtgtaataccccgtaatacattccatcgcatggtggggtgttgaaagattcattggtcaaggattggct

SEQ ID NO: 546 - DNA, 225 bp, unidentified
  misc_feature 1..225: note = Encodes 16S rRNA from Lachnospiracea incertae sedis
  source 1..225: mol_type = genomic DNA
agagtttgatcatggctcaggatgaacgctggcggcgtgcttaacacatgcaagtcgaacgaagctcctgcgcagatcccttcggggtgaagcaagggaagacttagtggcggacgggtgagtaacgcgtgggtaacctgccatatacagggggataacagttagaaatgactgctaataccccataagcgcacagtaaggcatcttacagtgtgaaaagccttt

SEQ ID NO: 547 - DNA, 225 bp, unidentified
  misc_feature 1..225: note = Encodes 16S rRNA from Treponema
  source 1..225: mol_type = genomic DNA
agagtttgatcatggctcagaacgaacgctggcggcgcgtcttaagcatgcaagtcggacgggatatggtagcttgctaccattgagagtggcggactggtgagtaacgcgtgggtgacgtaccctggtgaccgggacagctcctagaaataggaggtaataccggatacgctggatgctgtcagagggcattcaggaaagcagcttttgctgcgcacgaggagc

SEQ ID NO: 548 - DNA, 225 bp, unidentified
  misc_feature 1..225: note = Encodes 16S rRNA from Clostridium sensu stricto
  source 1..225: mol_type = genomic DNA
agagtttgatcctggctcaggacgaacgctggcggcgcgcctaacacatgcaagtcgaacgggactagtgactagagtcaagaagttttcttggttctattcactagttcagtggcggacgggtgagtaaagcatgagtaacttgcccattagtggggaatagcttttggaaacagaagataataccgcatacatcggtttggacacatgttcggaccggaaaag

SEQ ID NO: 549 - DNA, 225 bp, unidentified
  misc_feature 1..225: note = Encodes 16S rRNA from Clostridium XlVa
  source 1..225: mol_type = genomic DNA
agagtttgatcctggctcaggatgaacgctggcggcgtgcctaacacatgcaagtcgagcggagatagaacaccggatgaagattcgtcggaatccaccgttttatcttagcggcggatgggtgagtaacgcgtggataacctgcccttcacagggggataacaaccggaaacgggtgctaataccgcatgggcgcagggggccgcatggttcccggcgtaaaga

SEQ ID NO: 550 - DNA, 225 bp, unidentified
  misc_feature 1..225: note = Encodes 16S rRNA from Anaerovorax
  source 1..225: mol_type = genomic DNA
agagtttgatcatggctcaggatgaacgctggcggcgtgcctaacacatgcaagtcgagcgagaaaggacgaagcagcttgctgcagagtcccggacagcggcggacgggtgagtaacgcgtaggtaagctgccccttgcaggaggatagcctcgggaaaccgggattaatacttcataacgcgtttttatcgcatggtgaaaacgccaaagatttatcggcaag

SEQ ID NO: 551 - DNA, 225 bp, unidentified
  misc_feature 1..225: note = Encodes 16S rRNA from Saccharofermentans
  source 1..225: mol_type = genomic DNA
agagtttgatcctggctcaggacgaacgctggcggcgtgcctaacacatgcaagtcgagcggggacactggaggagcttgcttcactggtgttctagcggcggacgggtgagtaacgcgtgaacaatctgtcccggacagggggataacacttggaaacaggtgctaataccgcataagcccacggtaccgcatggtacagggggaaaaggagcgatccggttcg

SEQ ID NO: 552 - DNA, 225 bp, unidentified
  misc_feature 1..225: note = Encodes 16S rRNA from Clostridium XlVa
  source 1..225: mol_type = genomic DNA
agagtttgatcatggctcaggatgaacgctggcggcgtgcctaacacatgcaagtcgaacgaagttgtttccacccgacagattatcttcggatatgaagtcaccggaaacgcttagtggcggacgggtgagtaacgcgtgggcaacctgccctacacagggggatagcggttggaaacgaccggtaataccgcatacctttattgaaccgcatgatttaataaa

SEQ ID NO: 553 - DNA, 225 bp, unidentified
  misc_feature 1..225: note = Encodes 16S rRNA from Clostridium III
  source 1..225: mol_type = genomic DNA
agagtttgatcatggctcaggataaacgctggcggcgcacataagacatgcaagtcgaacggacgattattaattcttcacgatttaataaaagttagtggcggactggtgagtaacgcgtgagcaacctacctattagaggggaataacgaagagaaattttcgctaataccgcataagctgaaggaatcgcatgattcagtcagaaaaggagcaatccgctaa

SEQ ID NO: 554 - DNA, 225 bp, unidentified
  misc_feature 1..225: note = Encodes 16S rRNA from Clostridium IV
  source 1..225: mol_type = genomic DNA
agagtttgatcatggctcaggatgaacgctggcggcgtgcataacacattcaagtcgaacgggcgagagggcttcggtcctcaagtcagtggcggacgggtgagtaacgcgtgagcaacctgcccctatgtgcgggataaccttcggaaacggatgctaataccgcatgaaccaacgggatcgcatggtccagttggcaaagatttattgcatagggatgggctc

SEQ ID NO: 555 - DNA, 225 bp, unidentified
  misc_feature 1..225: note = Encodes 16S rRNA from Ruminococcus
  source 1..225: mol_type = genomic DNA
agagtttgatcatggctcaggacgaacgctggcggtatgcttaatacatgcaagtcgaacggagctcagcggaagcttgcttctgcgaaagcttagtggcggacgggtgagtaacgcgtgagtaacctgccttaaagagggggataacacagagaaatctgtgctaataccgcataatgcagcacagccgcatgactatgctgccaaaggtcagccgctttaaga

SEQ ID NO: 556 - DNA, 225 bp, unidentified
  misc_feature 1..225: note = Encodes 16S rRNA from Clostridium XlVa
  source 1..225: mol_type = genomic DNA
agagtttgatcctggctcaggatgaacgctggcggcgtgcctaacacatgcaagtcgaacggaaaggattcttcggaattctttcagtggcggacgggtgagtaacgcgtgggtaacctgccccatacaggggaacaacagctggaaacggctgctaataccgcataagcgcacagtactgcatggtacagtgtgaaaagattttatcggtatgggatggacccg

SEQ ID NO: 557 - DNA, 225 bp, unidentified
  misc_feature 1..225: note = Encodes 16S rRNA from Clostridium XI
  source 1..225: mol_type = genomic DNA
agagtttgatcatggctcaggacgaacgctggcggcgtgcttaacacatgcaagtcgaacgaggtttactgaagagcttgctctgaggtagaccgagtggcggacgggtgagtaacgcgtgaggaacctgtcttacacagggggataacgcaccgaaaggtgtgctaataccgcataagaccacactttcgcatggaagaggggtcaaaggagcgatccggtgta

SEQ ID NO: 558 - DNA, 225 bp, unidentified
  misc_feature 1..225: note = Encodes 16S rRNA from Clostridium XlVa
  source 1..225: mol_type = genomic DNA
agagtttgatcatggctcaggatgaacgctggcggcgtgcctaacacatgcaagtcgagcggagttacataagcttgcttttgtaacttagcggcggatgggtgaggaacgcgtggataacctgcctcgcactgggggataacagctggaaacggctgttaataccgcatatgctcacggtaccgcatggtacagggaggaaagatttatcggtgcgagatggat

SEQ ID NO: 559 - DNA, 225 bp, unidentified
  misc_feature 1..225: note = Encodes 16S rRNA from Eubacterium
  source 1..225: mol_type = genomic DNA
agagtttgatcatggctcaggattaacgctggcggcgtgcctaacacatgcaagtcgagcgagaaatggtgaagagaaacttcggttgaacagatccatggacagcggcggacgggtgagtaacgcgtgggcaacctgcccctttccggaggatagccaagggaaactttgaataatactccataaagcaagagtaccgcatgatacacttgccaaagatttatc

SEQ ID NO: 560 - DNA, 225 bp, unidentified
  misc_feature 1..225: note = Encodes 16S rRNA from Lachnospiracea incertae sedis
  source 1..225: mol_type = genomic DNA
agagtttgatcatggctcaggatgaacgctggcggcgcgcttaacacatgcaagtcgaacggaatttatagcttcggttgtgaattcagtggcggacgggtgagtaacacgtggataacttgccttttagtgggggatagctgagagaaatctcaattaataccgcataaagtaatttattcgcatgaatagattaataaagatgaaaatcgctaaaagataggt

SEQ ID NO: 561 - DNA, 225 bp, unidentified
  misc_feature 1..225: note = Encodes 16S rRNA from Clostridium IV
  source 1..225: mol_type = genomic DNA
agagtttgatcatggctcaggatgaacgctggcggcgtgcataacacattcaagtcgaacgaagcattaagacggaagccttcgggtggaagatttaatgacttagtggcggacgggtgagtaacgcgtgagcaaccttcctgcctgtgagggataacacagggaaacttgtgctaataccgcataaagcatttgagtcgcatggtttaggtgccaaagatttat

SEQ ID NO: 562 - DNA, 225 bp, unidentified
  misc_feature 1..225: note = Encodes 16S rRNA from Ruminococcus
  source 1..225: mol_type = genomic DNA
agagtttgatcatggctcaggacgaacgctggcggcacgcttaacacatgcaagtcgaacggtgacggcaacaagcttgcttgttgcaagatcagtggcggacgggtgagtaacacgtgagcaatctgccttcgggtgggggataccagttggaaacgactgttaataccgcataacatgatagaaccgcatgattttatcatcaaagatttattgcctgaagat

SEQ ID NO: 563 - DNA, 225 bp, unidentified
  misc_feature 1..225: note = Encodes 16S rRNA from Clostridium IV
  source 1..225: mol_type = genomic DNA
agagtttgatcctggctcaggacgaacgctggcggcgtgcctaacacatgcaagtcgaacggagttattcgagatgaagttttcggatggaattttggataacttagtggcggacgggtgagtaacgcgtgagtaacctgcccataagagggggataacgttctgaaaagaacgctaataccgcataatatatttggttcgcatgaaccgaatatcaaaggagca

SEQ ID NO: 564 - DNA, 225 bp, unidentified
  misc_feature 1..225: note = Encodes 16S rRNA from Faecalibacterium
  source 1..225: mol_type = genomic DNA
agagtttgatcatggctcaggataaacgctggcggcgcacataagacatgcaagtcgaacggacccaaatcattcattacgattgatggaaggttagtggcggactggtgagtaacgcgtgagcaacctacctataagaggggaataacagagagaaatttctgctaataccgcataagctgaaagaatcgcatgatttagtcagaaaaggagcaatccgcttat

SEQ ID NO: 565 - DNA, 225 bp, unidentified
  misc_feature 1..225: note = Encodes 16S rRNA from Anaerovibrio
  source 1..225: mol_type = genomic DNA
agagtttgatcatggctcaggacgaacgctggcggcgtgcttaacacatgcaagtcgaacggagtgaaggggagcttgctccttggaacttagtggcaaacgggtgagtaacgcgtaggcaacctgcccttcagatggggacaacatttcgaaaggaatgctaataccgaatgacgtgcattggtcgcatgaccgatgtaccaaaggccgggcaaccggtcactg

SEQ ID NO: 566 - DNA, 225 bp, unidentified
  misc_feature 1..225: note = Encodes 16S rRNA from Asaccharobacter
  source 1..225: mol_type = genomic DNA
agagtttgatcctggctcaggatgaacgctggcggcgtgcctaacacatgcaagtcgaacggttaagccggcttcggccgggtatagagtggcgaacgggtgagtaacacgtgaccaacctgccccgcgccccgggatagcctcgtgaaaacgggattaacaccggatgcgccgcgggccccgcatggggcccgcgggaaagcttggcggcgcgggatggggtcg

SEQ ID NO: 567 - DNA, 225 bp, unidentified
  misc_feature 1..225: note = Encodes 16S rRNA from Pelotomaculum
  source 1..225: mol_type = genomic DNA
agagtttgatcctggctcaggacaaacgctggcggcgtgcttaacacatgcaagtcgtacggagctgcaggacggaatccttcgggaggaagaacggcagcttagtggcggacgggtgagtaacgcgtgagcaacctgcccataagagggggataacagttggaaacgactgctaataccgcataagaccacaacaccgcatggtggaggggtcaaagagcaatc

SEQ ID NO: 568 - DNA, 225 bp, unidentified
  misc_feature 1..225: note = Encodes 16S rRNA from Spirochaeta
  source 1..225: mol_type = genomic DNA
agagtttgatcatggctcagaacgaacgctggcggcgcgtcttaagcatgcaagtcgagcgggaaggtgtagcttgctacgccggagagcggcggactggtgagtaacacgtgggtaacgcacccttctgacggggacagcctgtggaaacacagggtaataccggatgagatgtgcttctggaagggggcacatgaaaggagctacggctccgcagggggaacg

SEQ ID NO: 569 - DNA, 225 bp, unidentified
  misc_feature 1..225: note = Encodes 16S rRNA from Prevotella
  source 1..225: mol_type = genomic DNA
agagtttgatcatggctcaggatgaacgctagctacaggcttaacacatgcaagtcgaggggcagcatgtcgtgtgcttgcacacgatgatggcgaccggcgcacgggtgagtaacgcgtatccaacctgcccatgactccgggatagcccgctgaaaagcggattaacaccggatgtggtcgaaagaggacatctgatttcgaccaaagcttcggcggtcatgg

SEQ ID NO: 570 - DNA, 225 bp, unidentified
  misc_feature 1..225: note = Encodes 16S rRNA from Lachnospiracea incertae sedis
  source 1..225: mol_type = genomic DNA
agagtttgatcatggctcaggatgaacgctggcggcgtgcttaacacatgcaagtcgaacgaagcacctctcccgaagattgaagtagcttgctacggattgattcatttgaggtgacttagtggcggacgggtgagtaacgcgtgggtaacctgcctcatagagggggacaacagttggaaacgactgctaataccgcataacatgtgactgtcacatgacaga

SEQ ID NO: 571 - DNA, 225 bp, unidentified
  misc_feature 1..225: note = Encodes 16S rRNA from Anaerovorax
  source 1..225: mol_type = genomic DNA
agagtttgatcatggctcaggatgaacgctggcggcgtgcttaacacatgcaagtcgagcgagaaacctacagatgacgcttcggttgattcagtaggcggaaagcggcggacgggtgagtaacgcgtaggcaacctgcccctggcagagggatagcatcgggaaactgatattaagacctcataacgcatcgatatcacatgataatgatgccaaagatttatc

SEQ ID NO: 572 - DNA, 225 bp, unidentified
  misc_feature 1..225: note = Encodes 16S rRNA from Clostridium IV
  source 1..225: mol_type = genomic DNA
agagtttgatcatggctcaggattaacgctggcggcgtgcataacacattcaagtcgaacggacgaagcccttcggggcctagttagtggcggacgggtgagtaacgcgtgagcaacctgcccttatgtgggggataacgaccggaaacggtcgctaataccgcatgacccgatagtatcgcatgatacagtcggcaaagatttattgcataaggatgggctcgc

SEQ ID NO: 573 - DNA, 225 bp, unidentified
  misc_feature 1..225: note = Encodes 16S rRNA from Victivallis
  source 1..225: mol_type = genomic DNA
agagtttgatcctggctcagaacgaacgctggcggcatggattaggcatgcaagtcgaacgaggtagcaataccgagtggcggaagggtgaggaacgcgtgagtaatctgccccctagttgggaataacagttggaaacgactgctaataccgaatgtggctttcaggtcgcatgacttgaaggctaaagatttatcgctaggggatgagctcgcgtcccattag

SEQ ID NO: 574 - DNA, 184 bp, unidentified
  misc_feature 1..184: note = Encodes 16S rRNA from Syntrophococcus
  source 1..184: mol_type = genomic DNA
agagtttgatcatggctcaggatgaacgctggcggcgtgctttgcacaatgggggaaaccctgatgcagcgacgccgcgtgagtgatgaagtatttcggtatgtaaagctctatcagcagggaagaagatgacggtacctgagtaagaagccccggctaactacgtgccagcagccgcggtaat

SEQ ID NO: 575 - DNA, 225 bp, unidentified
  misc_feature 1..225: note = Encodes 16S rRNA from Syntrophococcus
  source 1..225: mol_type = genomic DNA
agagtttgatcctggctcaggatgaacgctagctacaggcttaacacatgcaagtcgagcgaagcgcagaaacggatttcttcggattgaaggttctgtgactgagcggcggacgggtgagtaacgcgtggggaacctgccctgtaccgggggataacagacagaaatgtctgctaataccgcataagcgcacgagaaggcatcttcttgtgtgaaaaactccgg

SEQ ID NO: 576 - DNA, 225 bp, unidentified
  misc_feature 1..225: note = Encodes 16S rRNA from Desulfovibrio
  source 1..225: mol_type = genomic DNA
agagtttgatcatggctcagattgaacgctggcggcgtgcttaacacatgcaagtcgaacgcgaaaggggcttcggtcccgagtagagtggcgcacgggtgagtaacgcgtggatgatctgcccctgcagctggaatagcgactggaaacggtcgataataccggatacgcccttgttgaacgatgaggggaaaggagacctctgcttgcaagtttccgtgcagg

SEQ ID NO: 577 - DNA, 225 bp, unidentified
  misc_feature 1..225: note = Encodes 16S rRNA from Lachnospiracea incertae sedis
  source 1..225: mol_type = genomic DNA
agagtttgatcatggctcaggatgaacgctggcggcgtgcttaacacatgcaagtcgaacgaagctcttacgacggatctcttcggagtgaagatgtttgagacttagtggcggacgggtgagtaacgcgtgggtaacctgccccatagagggggacaacagttggaaacgactgctaataccgcatagtaagagaaattcgcatgtttttctcttgaaagcttt

SEQ ID NO: 578 - DNA, 225 bp, unidentified
  misc_feature 1..225: note = Encodes 16S rRNA from Lachnospiracea incertae sedis
  source 1..225: mol_type = genomic DNA
agagtttgatcctggctcaggatgaacgctggcggcgtgcttaacacatgcaagtcgaacggagtgtcatttcttcggataggacacttagtggcggacgggtgagtaacgcgtgggtaacctgcctcacacagggggatagcagttggaaacgactgataataccgcataagcgcacagtatcgcatggtacagtgtgaaaaactccggtggtgtgagatggac

SEQ ID NO: 579 - DNA, 225 bp, unidentified
  misc_feature 1..225: note = Encodes 16S rRNA from Clostridium IV
  source 1..225: mol_type = genomic DNA
agagtttgatcatggctcaggacgaacgctggcggcgcgcctaacacatgcaagtcgaacggagagtggtttttgattccttcgggatgattattccatttcttagtggcggacgggtgagtaacacgtgagcaacctgccttgcagtgggggataacggttggaaacgatcgctaatacctcataatatatgattgtcgcatggctttcatatcaaagtttttt

SEQ ID NO: 580 - DNA, 204 bp, unidentified
  misc_feature 1..204: note = Encodes 16S rRNA from Prevotella
  source 1..204: mol_type = genomic DNA
agagtttgatcctggctcaggatgaacgctagctacaggctttggtcaatgggcgagagcctgaaccagccaagtagcgtgcaggatgacggccctatgggttgtaaactgcttttatacggggataaagtgagggacgtgtccctttttgtaggtaccgtatgaataaggaccggctaattccgtgccagcagccgcggtaat

SEQ ID NO: 581 - DNA, 225 bp, unidentified
  misc_feature 1..225: note = Encodes 16S rRNA from Victivallis
  source 1..225: mol_type = genomic DNA
agagtttgatcctggctcagaatgaacgctggcggcatggattaggcatgcaagtcgaacgagaaagcggcttcggccgcgagtaaagtggcgaaagggtgagtaacacgtgaggaacctgccccctggcccggaacaagcctgtgaaaacgggtctgaaaccggatgaggccccctcccgcatgggggggaagccaaatattcatagccaagggatggcctcgc

SEQ ID NO: 582 - DNA, 225 bp, unidentified
  misc_feature 1..225: note = Encodes 16S rRNA from Clostridium XlVa
  source 1..225: mol_type = genomic DNA
agagtttgatcctggctcaggatgaacgctggcggcgtgcttaacacatgcaagtcgaacgaagcatagcttgtgaatttcttcggattgaagcagttatgactgagtggcggacgggtgagtaacgcgtgggtaacctgccttacacagggggacaacagagggaaacctctgctaataccgcataacccgctagggccgcatggcccggacggaaaagattta

SEQ ID NO: 583 - DNA, 225 bp, unidentified
  misc_feature 1..225: note = Encodes 16S rRNA from Selenomonas
  source 1..225: mol_type = genomic DNA
agagtttgatcatggctcaggacgaacgctggcggcgtgcttaacacatgcaagtcgaacggggcgattgaaagcttgcttttgagagcctagtggcaaacgggtgagtaacgcgtaggcaacctgcctttgggatggggacaacaggacgaaagccctgctaataccgaatgaagtattcttcctgcatgggaaggatatgaaagatggcctctgaaaatgcta

SEQ ID NO: 584 - DNA, 225 bp, unidentified
  misc_feature 1..225: note = Encodes 16S rRNA from Bacteroides
  source 1..225: mol_type = genomic DNA
agagtttgatcatggctcaggatgaacgctagcgacaggcctaacacatgcaagtcgaggggcagcgagttggtagcaataccgatgtcggcgaccggcgcacgggtgcgtaacaggtgtgcaatctgtccatagtcggaggatagcccggtgaaaaccgaattaatactccatgtgtcattaaatcgcatgttttgatgatgaaacgtaaggactatggttgag

SEQ ID NO: 585 - DNA, 225 bp, unidentified
  misc_feature 1..225: note = Encodes 16S rRNA from Clostridium XlVa
  source 1..225: mol_type = genomic DNA
agagtttgatcatggctcaggatgaacgctggcggcgtgcctaacacatgcaagtcgaacgggacttttaccgacggagattcgtcaaagttggtttaagtctagtggcggacgggtgagtaacgcgtggagaacctgccctttaccgggggataacagagggaagcttctgctaataccgcataagcgcacagtaccgcatggtacagtgtgaaaaactccggt

SEQ ID NO: 586 - DNA, 225 bp, unidentified
  misc_feature 1..225: note = Encodes 16S rRNA from Eggerthella
  source 1..225: mol_type = genomic DNA
agagtttgatcctggctcaggatgaacgctggcggcgtgcttaacacatgcaagtcgaacgattaacccatcttcggatggttataaagtggcgaacgggtgagtaacacgtgaccaacctacctttcacattgggataactaagggaaactgtagctaataccaaatactccgggtatccggcatcggaaacccgggaaagctccggcggtgaaagatggggtc

SEQ ID NO: 587 - DNA, 150 bp, unidentified
  misc_feature 1..150: note = Encodes 16S rRNA from Selenomonas
  source 1..150: mol_type = genomic DNA
agagtttgatcatggctcaggatgaacgctagctacaggcttaacacatgcaagtcgaggggacgaatgtacgggatgaaaatattgttctgtaatgacggtacctgacgaggaagccacggctaactacgtgccagcagccgcggtaat

SEQ ID NO: 588 - DNA, 225 bp, unidentified
  misc_feature 1..225: note = Encodes 16S rRNA from Mogibacterium
  source 1..225: mol_type = genomic DNA
agagtttgatcctggctcaggatgaacgctggcggcgtgcctaatacatgcaagtcgagcgagaagcttctttgaagattcttcggatgattctgtgaagtggaaagcggcggacgggtgagtaacgcgtaggcaacctgcccctgacagagggatagccattggaaacgatgattaaaacctcataatgccgaaagagcacatgcacttacggccaaagattta

SEQ ID NO: 589 - DNA, 225 bp, unidentified
  misc_feature 1..225: note = Encodes 16S rRNA from unidentified taxa
  source 1..225: mol_type = genomic DNA
agagtttgatcctggctcaggacgaacgcttgcgacgtgcctaagaaatgcaagtcgagcgatgacgggggcttcggctccttgattagcggcgaacggtcgcgtaacacgtaagcaatctgccccaaagtttgggatagccatccgaaaggatgattaataccggatgtggaacataaatcgcatgttttatgttctaaagcagcgatgcgctttgggatgagc

SEQ ID NO: 590 - DNA, 225 bp, unidentified
  misc_feature 1..225: note = Encodes 16S rRNA from Clostridium XlVa
  source 1..225: mol_type = genomic DNA
agagtttgatcatggctcaggatgaacgctggcggcgtgcctaacacatgcaagtcgaacggaccttttacagactgcgattcgtcaaaggacgtttaaggttagtggcggacgggtgagtaacgcgtgggtaacctgcctcatagagggggataacagtttgaaaagactgctaataccgcataagcccacaggaccgcatggtccagggggaaaagattcatc

SEQ ID NO: 591 - DNA, 225 bp, unidentified
  misc_feature 1..225: note = Encodes 16S rRNA from Victivallis
  source 1..225: mol_type = genomic DNA
agagtttgatcctggctcagaacgaacgctggcggcatggattaggcatgcaagtcgaacgaagtagcaatacttagtggcgcaagggtgaggaacgcgtgagtgacctacccgcaagtttggaacagctcctggaaacgggaattaataccggatgtgatcaatgagctgcatggtttattgattaaagcagtaatgcgcttgcggatgggctcgcgtcccatt

SEQ ID NO: 592 - DNA, 225 bp, unidentified
  misc_feature 1..225: note = Encodes 16S rRNA from Paraprevotella
  source 1..225: mol_type = genomic DNA
agagtttgatcatggctcaggatgaacgctagctacaggcttaacacatgcaagtcgaggggcatcacgtggcagcaatgtcatggtggcgaccggcgcacgggtgagtaacgcgtatccgacctggccttcactccgggacagccctccgaaagggggattaatccgggatgtgtggagaagtcgcatggaatctccatgaaagattcatcggtgaaggatggg

SEQ ID NO: 593 - DNA, 225 bp, unidentified
  misc_feature 1..225: note = Encodes 16S rRNA from Brevundimonas
  source 1..225: mol_type = genomic DNA
agagtttgatcatggctcaggacgaacgctggcggtgtgcctcatacatgcaagtcgaacgataaggcttcttcggaagtacataagtggcggacgggtgagtacaacataggaaatctgccttaagctgggggacaacagagggaaactcctgctaataccccatatgagctaacttgaaatagttatcttgaaagctccggcggcttaagatgagcctgtgcc

SEQ ID NO: 594 - DNA, 225 bp, unidentified
  misc_feature 1..225: note = Encodes 16S rRNA from Prevotella
  source 1..225: mol_type = genomic DNA
agagtttgatcatggctcaggatgaacgctagctacaggcttaacacatgcaagtcgaggggcagcgctggggttgcttgcaacccctggcggcgaccggcgcacgggtgagtaacgcgtatccaacctgcccccaaccgccgcacagcccgccgaaaggcggattaattcggcatgaggtccggcgacggcatcatatccggacgaaaggtattttaccggttg

SEQ ID NO: 595 - DNA, 225 bp, unidentified
  misc_feature 1..225: note = Encodes 16S rRNA from Prevotella
  source 1..225: mol_type = genomic DNA
agagtttgatcatggctcaggatgaacgctagctacaggcttaacacatgcaagtcgaggggtaacgtgagagaagcttgcttctcttgacgacgaccggcgaatgggtgagtaacgcgtatccaacctgccgcacgcccgggaacagcccttggaaacgaggattaaatcccgataccttattattccgcatggagaaataagaaaacaggcatgcgatgggga

SEQ ID NO: 596 - DNA, 210 bp, unidentified
  misc_feature 1..210: note = Encodes 16S rRNA from Robinsoniella
  source 1..210: mol_type = genomic DNA
agagtttgatcatggctcaggacgaacgctggcggcgtgcttaacacatgcaagtcgaacggggatattgcacaatgggcggaagcctgatgcagcgacgccgcgtgaaggaagaagtatttcggtatgtaaacttctatcagcggggaagaagatgacggtacccgactaagaagccccggctaactacgtgccagcagccgcggtaat

SEQ ID NO: 597 - DNA, 225 bp, unidentified
  misc_feature 1..225: note = Encodes 16S rRNA from Clostridium III
  source 1..225: mol_type = genomic DNA
agagtttgatcatggctcaggacgaacgctggcggcgtgcctaacacatgcaagtcgaacgggattccatcgaatgaggcttcggcggattttggtggacatctagtggcggacgggtgagtaacgcgtgagcaacctgcctttaagagggggataacataccgaaaggtatgctaataccgcataagatattagtaccgcatgatacagatatcaaagatttca

SEQ ID NO: 598 - DNA, 225 bp, unidentified
  misc_feature 1..225: note = Encodes 16S rRNA from Butyricimonas
  source 1..225: mol_type = genomic DNA
agagtttgatcatggctcaggatgaacgctagcggcaggcttaacacatgcaagtcgaggggcagcgggtctagcaatagatgccggcgaccggcgaaagggtgagtaacgcgtgagcaacatacccttgacagggggataggcactggaaacggtgtgtaataccccgtaacacattccgccgcatgacgggatgttgaaagattgattggtcaaggattggct

SEQ ID NO: 599 - DNA, 225 bp, unidentified
  misc_feature 1..225: note = Encodes 16S rRNA from Spirochaeta
  source 1..225: mol_type = genomic DNA
agagtttgatcctggctcagaacgaacgctggcggcgcgtcttaagcatgcaagtcgagcggtaaggaggtagcttgctacttccctagagcggcggactggtgagtaacgcgtgggtgacgtaccctttggttggggatagccggtagaaataccgggtaataccgaataagacctctagtagaaagattagagaggaaagcggctccggccgcgccgaaggaa

SEQ ID NO: 600 - DNA, 225 bp, unidentified
  misc_feature 1..225: note = Encodes 16S rRNA from Hydrogenoanaerobacterium
  source 1..225: mol_type = genomic DNA
agagtttgatcatggctcaggatgaacgctggcggcgtgcctaacacatgcaagtcgaacggaactttttacgagcaaggcttcggccaagcaagtttcaagtttagtggcggacgggtgagtaacgcgtgagcaacctgcctttcagagggggataacgtttggaaacgaacgctaataccgcataacgtatggaaatcgcatggtaaccataccaaagatttt

SEQ ID NO: 601 - DNA, 225 bp, unidentified
  misc_feature 1..225: note = Encodes 16S rRNA from Proteiniclasticum
  source 1..225: mol_type = genomic DNA
agagtttgatcatggctcaggacgaacgctggcggcgtgcctaacacatgcaagtcgagcggggacaaaactggaagggtttcggcctggaaggaaatgttccagcggcggacgggtgagtaacgcgtgaacaatctgtcccagacagggggataacagatggaaacatctgctaataccgcataagaccacgaggcgacatcgccttgaggtaaaaggaggaat

SEQ ID NO: 602 - DNA, 225 bp, unidentified
  misc_feature 1..225: note = Encodes 16S rRNA from Roseburia
  source 1..225: mol_type = genomic DNA
agagtttgatcatggctcaggatgaacgctggcggcgtgcttaacacatgcaagtcgaacgaattttttacagaaggaagcttcggccgacggacgtaagaagtgagtggcggacgggtgagtaacgcgtgggtaacctgcctcacatcgggggataccagtcggaaacgactgctaaaaccgcataagaccacggtatcgcatgatactgaggccaaaactccg

SEQ ID NO: 603 - DNA, 225 bp, unidentified
  misc_feature 1..225: note = Encodes 16S rRNA from Clostridium XlVa
  source 1..225: mol_type = genomic DNA
agagtttgatcctggctcaggatgaacgctggcggcgtgcctaacacatgcaagtcgaacgaagaccccgaagcggagatttcggttgaagctaagggaggactgagtggcggacgggtgagtaacgcgtggataacctgccccatacagggggatagcagttggaaacgactgataataccgcataagcgcacggagagacatctctttgtgtgaaaagattta

SEQ ID NO: 604 - DNA, 225 bp, unidentified
  misc_feature 1..225: note = Encodes 16S rRNA from Anaerofustis
  source 1..225: mol_type = genomic DNA
agagtttgatcatggctcaggacgaacgctggcggcgtgcttaacacatgcaagtcgaacgggaagctttgacaagttttactttgatgagtggacagtggcgaacgggtgagtaacgcgtaggtaaccaaccttatgctgggggatagcctttggaaacgaagagtaataccgcataagaccacactgccgcatggcagaggggtaaaagatttattggcatga

SEQ ID NO: 605 - DNA, 225 bp, unidentified
  misc_feature 1..225: note = Encodes 16S rRNA from Succiniclasticum
  source 1..225: mol_type = genomic DNA
agagtttgatcatggctcaggacgaacgctggcggcgtgcctaacacatgcaagtcgaacggggattttgtttcggcagaatcctagtggcgatcggtagccggtctgagaggatgaacggccacattgggactgagacacggcccagactcctacgggaggcagcagtggggaatcttccgcaatgggcgcaagcctgacggagcaacgccgcgtgagtgagga

SEQ ID NO: 606 - DNA, 225 bp, unidentified
  misc_feature 1..225: note = Encodes 16S rRNA from Anaeroplasma
  source 1..225: mol_type = genomic DNA
agagtttgatcctggctcaggattaacgctggcggcgtgcctaatacatgcaagtcgaatggtggtagcaatacaaaccatggcgaacgggtgagtaacacgtaggtaacctatcttactgacgaggataaccgttggaaacgacggataatactggataggacatcacaaagggcatccttagatgtttaaaggagcaatccacggtaagaggggcctgcggcg

SEQ ID NO: 607 - DNA, 225 bp, unidentified
  misc_feature 1..225: note = Encodes 16S rRNA from Oscillibacter
  source 1..225: mol_type = genomic DNA
agagtttgatcatggctcaggacgaacgctggcggcgtgcctaacgatcagtagccggactgagaggttgaacggccacattgggactgagatacggcccagactcctacgggaggcagcagtggggaatattgggcaatgggggcaaccctgacccagcaacgccgcgtgaaggaagaaggctttcgggttgtaaacttcttttaccgaggacgaagaacgtga

SEQ ID NO: 608 - DNA, 225 bp, unidentified
  misc_feature 1..225: note = Encodes 16S rRNA from Escherichia/Shigella
  source 1..225: mol_type = genomic DNA
agagtttgatcatggctcagattgaacgctggcggcaggcctaacacatgcaagtcgaacggtaacaggaagaagcttgcttctttgctgacgagtggcggacgggtgagtaatgtctgggaaactgcctgatggagggggataactactggaaacggtagctaataccgcataacgtcgcaagaccaaagagggggaccttcgggcctcttgccatcggatgtg

SEQ ID NO: 609 - DNA, 225 bp, unidentified
  misc_feature 1..225: note = Encodes 16S rRNA from Bacteroides
  source 1..225: mol_type = genomic DNA
agagtttgatcctggctcaggatgaacgctagcgacaggcctaacacatgcaagtcgaggggcagcgagtttgtagcaatacagatgtcggcgaccggcgcacgggtgcgtaacaggtgtgcaacctggcctataccaagggatagcccgctgaaaggcggattaatactttataagttgtgatgaggcatctcattataatgaaacgttagggtataggatggg

SEQ ID NO: 610 - DNA, 225 bp, unidentified
  misc_feature 1..225: note = Encodes 16S rRNA from Clostridium XlVa
  source 1..225: mol_type = genomic DNA
agagtttgatcctggctcaggatgaacgctggcggcgtgcctaacacatgcaagtcgagcggggacgcgccaaagaggatgattcgtctgattcttagcgcgtcttagcggcggatgggtgagtaacgcgtggacaacctgcccgcaacagggggataacagctggaaacggctgataataccgcatatgcacacggttccgcatgggactgggtggaaagattt

SEQ ID NO: 611 - DNA, 225 bp, unidentified
  misc_feature 1..225: note = Encodes 16S rRNA from Clostridium XlVa
  source 1..225: mol_type = genomic DNA
agagtttgatcatggctcaggatgaacgctggcggcgtgcctaacacatgcaagtcgaacggtgaaagaagacggaagccttcgggcggaagttttttggatcagtggcggacgggtgagtaacgcgtggataacctgcctcatacagggggataacagggagaaatcactgctaataccgcataagcgcacaggaccgcatggtctggtgtgaaaaactccggt

SEQ ID NO: 612 - DNA, 225 bp, unidentified
  misc_feature 1..225: note = Encodes 16S rRNA from Clostridium IV
  source 1..225: mol_type = genomic DNA
agagtttgatcatggctcaggatgaacgctggcggcgtgcataacacattcaagtcgaacgaagcactggcgaggaagtcttcggatggaattgcttttgacttagtggcggacgggtgagtaacgcgtgagcaaccttcctggcagtgagggataacacagggaaacttgtgctaataccgcatgacgcacgattgtcgcatggcagacgtgccaaagattaat

SEQ ID NO: 613 - DNA, 225 bp, unidentified
  misc_feature 1..225: note = Encodes 16S rRNA from Clostridium III
  source 1..225: mol_type = genomic DNA
agagtttgatcatggctcaggacgaacgctggcggcgcgcttaacacatgcaagtcgaacggtgaaggtgcttcggcaccggatcagtggcggacgggtgagtaacacgtgagcaacctgcccttcagagggggataacattgagaaatcagtgctaataccgcataagaccacagtaaggcatcttacaggggtcaaaggagcaatccgctgaaggatgggctc

SEQ ID NO: 614 - DNA, 225 bp, unidentified
  misc_feature 1..225: note = Encodes 16S rRNA from Prevotella
  source 1..225: mol_type = genomic DNA
agagtttgatcctggctcaggatgaacgctagctacaggcttaacacatgcaagtcgaggggcagcatgtcgtgtgcttgcacacgatgatggcgaccggcgcacgggtgagtaacgcgtatccaacctgcccatgaccccgggatagcccgctgaaaagcggattaacaccggatgcggtcgaaagaggacatctgatttcgaccaaagcttcggcggtcatgg

SEQ ID NO: 615 - DNA, 225 bp, unidentified
  misc_feature 1..225: note = Encodes 16S rRNA from Coprococcus
  source 1..225: mol_type = genomic DNA
agagtttgatcatggctcaggatgaacgctggcggcgtgcttaacacatgcaagtcgaacgaagcacttaggacagatttcttcggattgacgacctaattgacttagtggcgaacgggtgagtaacgcgtgggtaacctgcctcatgcagggggataacaattagaaatgattgctaataccgcataagaccgcggtaccgcatggtacagcggccaaagattt

SEQ ID NO: 616 - DNA, 225 bp, unidentified
  misc_feature 1..225: note = Encodes 16S rRNA from Oscillibacter
  source 1..225: mol_type = genomic DNA
agagtttgatcatggctcaggacgaacgctggcggcgtgcctaacacatgcaagtcgaacggaactctttggaacaaggcttcggccaagggaatttgagtttagtggcggacgggtgagtaacgcgtgagcaacctgcccttcggagggggacaacagttggaaacgactgctaataccgcatgacatacagagatcgcatggtcattgtatcaaagatttatc

SEQ ID NO: 617 - DNA, 225 bp, unidentified
  misc_feature 1..225: note = Encodes 16S rRNA from Parabacteroides
  source 1..225: mol_type = genomic DNA
agagtttgatcctggctcaggatgaacgctagcgacaggcttaacacatgcaagtcgaggggcagcgtggcggcagcaatgccgccgacggcgaccggcgcactggtgagtaacacgtatgcaacctgccccccacagggggacaatccagagaaatttggtctaataccgcataagagcgtccccggcatcggggttgcttgaaagcaatttgcggtgggggat

SEQ ID NO: 618 - DNA, 225 bp, unidentified
  misc_feature 1..225: note = Encodes 16S rRNA from Bacteroides
  source 1..225: mol_type = genomic DNA
agagtttgatcctggctcaggatgaacgctagctacaggcttaacacatgcaagtcgaggggcagcatgggggaggtttcggccacccccgatggcgaccggcggatgggtgagtaacgcgtatccaacctgcccctgtcccggggacagcccttagaaatgaggattaacccccgatggcgcggaggggccgcatggcttttccgccaaatgcgaaggacaggg

SEQ ID NO: 619 - DNA, 225 bp, unidentified
  misc_feature 1..225: note = Encodes 16S rRNA from Mogibacterium
  source 1..225: mol_type = genomic DNA
agagtttgatcctggctcaggatgaacgctggcggcgtgcctaatacatgcaagtcgagcgagaaatctttcagacgattcttcggatgagtcaggaagatggaaagcggcggacgggtgagtaacgcgtaggcaacctgccctcagcagagggatagccattggaaacgatgattaaaacctcataatgctgcagtaacacatgttacagcagccaaagattta

SEQ ID NO: 620 - DNA, 225 bp, unidentified
  misc_feature 1..225: note = Encodes 16S rRNA from Solobacterium
  source 1..225: mol_type = genomic DNA
agagtttgatcatggctcaggatgaacgctggcggcgtgcctaatacatgcaagtcgatcgcgtcatgtagcttcggttatatgatgagaggcgaacgggtgagtaatacataagcaacctgcccacggagaccgggataacccctggaaacggggactaagaccggataggcaaaatgaaggcatcttcattatgttaaaggagaaagacactggtggatgggc

SEQ ID NO: 621 - DNA, 225 bp, unidentified
  misc_feature 1..225: note = Encodes 16S rRNA from Bacteroides
  source 1..225: mol_type = genomic DNA
agagtttgatcatggctcaggatgaacgctagctacaggcctaacacatgcaagtcgcggggcagcattgaggtagcaatacttcagatggcgaccggcgcacgggtgcgtaacgcgtatccaacctggcccttactcgggtatagccctgcgaaagtaggattaatccccgatgttgtcaagatggagccttttttcttgaccaaaggtttatgtcggtaaggg

SEQ ID NO: 622 - DNA, 225 bp, unidentified
  misc_feature 1..225: note = Encodes 16S rRNA from Clostridium III
  source 1..225: mol_type = genomic DNA
agagtttgatcctggctcaggacgaacgctggcggcgtgcttaatccatgcaagtcgaacggggcgattccggaaagtcttcggaccggaagggagagcttagtggcgaacgggtgagtaacgcgtgaccaaccaaccttaagcagggggacaacagctggaaacggctgctaataccgcataagaccacagtggggcatcctacaggggtcaaaggagcaatcc

SEQ ID NO: 623 - DNA, 225 bp, unidentified
  misc_feature 1..225: note = Encodes 16S rRNA from Victivallis
  source 1..225: mol_type = genomic DNA
agagtttgatcctggctcagaacgaacgctggcggcatggattaggcatgcaagtcgaacggtgcagcaatgcacagtggcgcaagggtgaggaacgcgtgagtaatctgccctcaagttgggaacagcttctggaaacggaaattaataccgaatgtgatctttgggaggcatctttcaaagattaaaggccgcaaggtcgcttgaggaggggctcgcgtccca

SEQ ID NO: 624 - DNA, 225 bp, unidentified
  misc_feature 1..225: note = Encodes 16S rRNA from Saccharofermentans
  source 1..225: mol_type = genomic DNA
agagtttgatcatggctcaggacgaacgctggcggcgtgcctaacacatgcaagtcgagcggaggatgtgaagaagcttgcttcattgcattctcagcggcggacgggtgagtaacgcgtgagcaacctggccttcacagggggataagacggcgaaagcggttctaataccccatatgaccacactgtcacatggcagaggggtgaaaggagcaatccggtgaa

SEQ ID NO: 625 - DNA, 225 bp, unidentified
  misc_feature 1..225: note = Encodes 16S rRNA from Saccharofermentans
  source 1..225: mol_type = genomic DNA
agagtttgatcatggctcaggacgaacgctggcggcgtgcctaacacatgcaagtcgagcggacggaggggcttcggccccgaagtcagcggcggacgggtgagtaacgcgtgagcaatctgtcccggacagggggataacacttggaaacaggtgctaataccgcataagaccacgagggggcatccttttgaggtaaaaggaggaatccggtccggggtgagt

SEQ ID NO: 626 - DNA, 225 bp, unidentified
  misc_feature 1..225: note = Encodes 16S rRNA from Olivibacter
  source 1..225: mol_type = genomic DNA
agagtttgatcatggctcaggatgaacgctagcggcaggcctaatacatgcaagtcgtacggtaaacggtccttcgggaccgtgagagtggcggacgggtgcgtaacgcgtatgcaaccaacccccctcgccgggatagccggtggaaacgccggataataccggatgcgccgcgtgggaggcatctcccgagcggcaaggcggagacgcggagggggacgggca

SEQ ID NO: 627 - DNA, 225 bp, unidentified
  misc_feature 1..225: note = Encodes 16S rRNA from Thermotalea
  source 1..225: mol_type = genomic DNA
agagtttgatcatggctcaggatgaacgctggcggcgtgcctaacacatgcaagtcgagcgggaatctcctgattgaaacttcggtagattgacggggaggatagcggcggacgggtgagtaacgcgtaggtaagctgccctatgcacagggatagcctagggaaacctggattaatacctgatgacgctgcgaggtcacatggccatgcagccaaagttttttc

SEQ ID NO: 628 - DNA, 225 bp, unidentified
  misc_feature 1..225: note = Encodes 16S rRNA from Proteiniclasticum
  source 1..225: mol_type = genomic DNA
agagtttgatcatggctcaggacgaacgctggcggtatgcctaacacatgcaagtcgaacgaaaaaagagagcttgctttcttttttagtggcgcacgggtgagtaacgcgtgagtaatctgccttaaagtgggggacaacatttggaaacgaatgctaataccgcgtaatatgcagttttcgcatgaattttgtattatagatttatcgctttaagatgagctc

SEQ ID NO: 629 - DNA, 225 bp, unidentified
  misc_feature 1..225: note = Encodes 16S rRNA from Clostridium III
  source 1..225: mol_type = genomic DNA
agagtttgatcatggctcaggacgaacgctggcggcgtgcctaacacatgcaagtcgaacgagaaatgatgattagattccttcgggatgaaaagattcatggacagtggcggacgggcgagtaacgcgtgagtaacctgcccataagagagggatagccgatggaaacgtcgagtaatacctcatattgtaattaattcgcatggattgattatgaaagattta

SEQ ID NO: 630 - DNA, 225 bp, unidentified
  misc_feature 1..225: note = Encodes 16S rRNA from Anaeroplasma
  source 1..225: mol_type = genomic DNA
agagtttgatcctggctcaggattaacgctggcggcatgcctaatacatgcaagtcgaatgagaagcttgcttctcatggcgaacgggtgagtaacacgtaggtaacctgccttacactcgaggataaccgttggaaacgacggataatactggataggacagagattcgcatgagactctgtttaaaagcgatggtgtatgaggggcctgcggtgcattagcta

SEQ ID NO: 631 - DNA, 225 bp, unidentified
  misc_feature 1..225: note = Encodes 16S rRNA from Treponema
  source 1..225: mol_type = genomic DNA
agagtttgatcatggctcagaacgaacgctggcggcgcgtcttaagcatgcaagtcgagcggcaaggaaggagcttgcttcttccctagagcggcggactggtgagtaacgcgtgggtgacgtaccctccggacggggacagcctgtggaaacacaggataataccggatacggtgcatgttgtcagaggacatgcaggaaaggttcttttgaaccgccggagga

SEQ ID NO: 632 - DNA, 225 bp, unidentified
  misc_feature 1..225: note = Encodes 16S rRNA from Clostridium XlVa
  source 1..225: mol_type = genomic DNA
agagtttgatcatggctcaggatgaacgctggcggcgtgcttaatacatgcaagtcgaacggggatgtccacccgatgaggccggagtgcttgcacaaaggccgattcaaccggatatcctagtggcggacgggtgagtaacgcgtgggtaacctgccttatacaggggaataacagtcagaaatggctgctaataccgcataagcgcacgaggccgcatggcca

SEQ ID NO: 633 - DNA, 225 bp, unidentified
  misc_feature 1..225: note = Encodes 16S rRNA from Clostridium III
  source 1..225: mol_type = genomic DNA
agagtttgatcatggctcaggacgaacgctggcggcgcgcctaacacatgcaagtcgaacgggactagtgaccggagtgcagagaggatctgtattgcgatcactagttcagtggcggacgggtgagtaaagcatgagcaacctggctactagagggggatagcttttggaaacagaagataataccgcatacatcaaagatttcgcatgagatttttggaaaag

SEQ ID NO: 634 - DNA, 225 bp, unidentified
  misc_feature 1..225: note = Encodes 16S rRNA from Desulfotomaculum
  source 1..225: mol_type = genomic DNA
agagtttgatcatggctcaggacgaacgctggcggcgtgcttaatacatgcaagtcgaacggagattatgatttcggttgtaatcttagtggcgaacgggtgagtaacgcgtgaacaacctgactcagagtgggggataacaacgggaaactgttgctaataccgcataagaccacatttccgcatgggagaggggtcaaagatttatcgctttgagaggggttc

SEQ ID NO: 635 - DNA, 225 bp, unidentified
  misc_feature 1..225: note = Encodes 16S rRNA from Bacillus
  source 1..225: mol_type = genomic DNA
agagtttgatcctggctcaggatgaacgctggcggcgtgcctaatacatgcaagtcgatcgggagtagcaatacttcagaggcgtacgggtgagtaacacatagggaacctgcccttaagactgggatacccagacgaaagtttggctaataccggataacaacagaggtcgcatgacctttgcttgaaaggcgctctcaagcgccacttttggatggccctgtg

SEQ ID NO: 636 - DNA, 225 bp, unidentified
  misc_feature 1..225: note = Encodes 16S rRNA from Anaerovorax
  source 1..225: mol_type = genomic DNA
agagtttgatcatggctcaggatgaacgctggcggcgtgcctaacacatgcaagtcgagcgggaaatcgctgattgagatttcggttgattgaagcgatggatagcggcggacgggtgagtaacgcgtaggtaatctgccttcagcacagggatagcctagggaaacctggattaatacctgataatgcagtttggtcacatggccagattgccaaagatttatc

SEQ ID NO: 637 - DNA, 191 bp, unidentified
  misc_feature 1..191: note = Encodes 16S rRNA from Ruminococcus
  source 1..191: mol_type = genomic DNA
agagtttgatcatggctcaggatgaacgctagctacaggcttaacacatgcaagtcgaggggaaaccctgatgcagcgatgccgcgtggaggaagaaggttttcggattgtaaactcctgtcttaaaggacgataatgacggtactttaggaggaagctccggctaactacgtgccagcagccgcggtaat

SEQ ID NO: 638 - DNA, 225 bp, unidentified
  misc_feature 1..225: note = Encodes 16S rRNA from Agarivorans
  source 1..225: mol_type = genomic DNA
agagtttgatcatggctcagattgaacgctggcggcaggcttaacacatgcaagtcgtacggtaacagagggggaatattgcacaatgggggaaaccctgatgcagccatgccgcgtgtgtgaagaaggccttcgggttgtaaagcacttttgcattcgaggaagacagcacgtaaataaacgtgttatttgacgttagagtgtgaataagcaccggcaaactcc

SEQ ID NO: 639 - DNA, 225 bp, unidentified
  misc_feature 1..225: note = Encodes 16S rRNA from Anaerotruncus
  source 1..225: mol_type = genomic DNA
agagtttgatcatggctcaggacgaacgctggcggcgcgcttaacacatgcaagtcgaacggagcttgcttttgaaggtccttcgggaacggatgttgcaagcttagtggcggacgggtgagtaacgcgtgagcaacctgcctttcagagggggataacacaacgaaagctgtgctaataccgcatgacattgcgacaccgcatggtgatgcaatcaaaggagca

SEQ ID NO: 640 - DNA, 225 bp, unidentified
  misc_feature 1..225: note = Encodes 16S rRNA from Papillibacter
  source 1..225: mol_type = genomic DNA
agagtttgatcatggctcaggatgaacgctggcggcgtgcataacacattcaagtcgaacggacgacagggggcttgctccctgaagtcagtggcggacgggtgagtaacgcgtgagcaacctgccttggtctgcgggataacattgggaaaccggtgctaataccgcataacgcatcgagatcacatggtcatgatgccaaagaagcaatttggaacaagatgg

SEQ ID NO: 641 - DNA, 185 bp, unidentified
  misc_feature 1..185: note = Encodes 16S rRNA from Clostridium XlVa
  source 1..185: mol_type = genomic DNA
agagtttgatcctggctcaggatgaacgctggcggcgtgcttatgcacaatgggggaaaccctgatgcagcgacgccgcgtgagcgatgaagtatttcggtatgtaaagctctatcagcagggaagaaaatgacggtacctgactaagaagcaccggctaaatacgtgccagcagccgcggtaat

SEQ ID NO: 642 - DNA, 225 bp, unidentified
  misc_feature 1..225: note = Encodes 16S rRNA from Clostridium III
  source 1..225: mol_type = genomic DNA
agagtttgatcatggctcaggacgaacgctggcggcgtgcctaacacatgcaagtcgagcgatgatcagaagatgaggccctcgggcggattcttctgagattagcggcggatgggtgagtaacgcgtgggcaatctgccctccacagggggataacacagggaaacttgtgctaataccgcataacatctttttaaggcatcttaggaagatcaaaggagcgat

SEQ ID NO: 643 - DNA, 225 bp, unidentified
  misc_feature 1..225: note = Encodes 16S rRNA from Bacteroides
  source 1..225: mol_type = genomic DNA
agagtttgatcatggctcaggatgaacgctagcggcaggcttaacacatgcaagtcgaggggcagcggagaagtagcaatacttctgccggcgaccggcgcacgggtgagtaacgcgtatgcaacctttcccagacagggggatagcccagggaaacttggattaataccccgtaagccagaagagggcatcctcgtctggttaaagttccggcggtctggggtg

SEQ ID NO: 644 - DNA, 225 bp, unidentified
  misc_feature 1..225: note = Encodes 16S rRNA from Clostridium XlVa
  source 1..225: mol_type = genomic DNA
agagtttgatcctggctcaggatgaacgctggcggcgtgcctaacacatgcaagtcgaacgagcacttcggtgcgagtggcggacgggtgagtaacgcgtgggtaacctgccttacacagggggacaacagttggaaacgactgctaataccgcataagcccacggtaccgcatggtactgtgagaaaagatttatcggtgtaagatggacccgcgtctgattag

SEQ ID NO: 645 - DNA, 225 bp, unidentified
  misc_feature 1..225: note = Encodes 16S rRNA from Ruminococcus
  source 1..225: mol_type = genomic DNA
agagtttgatcatggctcaggacgaacgctggcggcacgcttaacacatgcaagtcgaacggagttgatgacttcggttattaacttagtggcggacgggtgagtaacacgtgagcaacctgccttacagagaggaataatgactggaaacggtcactaatacctcataaaatatttagatcgcatggtttggatatcaaagatttatcgctgtaagatgggctc

SEQ ID NO: 646 - DNA, 225 bp, unidentified
  misc_feature 1..225: note = Encodes 16S rRNA from Clostridium XlVa
  source 1..225: mol_type = genomic DNA
agagtttgatcatggctcaggatgaacgctggcggcgtgcctaacacatgcaagtcgaacgaagccctacaagtggagatttcggttgaagcgaggaggtgactgagtggcggacgggtgagtaacgcgtggagaacctggcccatacagggggatagcggctggaaacggccggtaaaaccgcataagcgcacaagcagggcatcctgtggtgtgaaaatcgaa

SEQ ID NO: 647 - DNA, 225 bp, unidentified
  misc_feature 1..225: note = Encodes 16S rRNA from Oscillibacter
  source 1..225: mol_type = genomic DNA
agagtttgatcatggctcaggacgaacgctggcggcgtgcctaacacatgcaagtcgaacgaagctccaacacttgagttttcggacaagagtggcggaagacttagtggcggactggtgagtaacgcgtgagcaacctgccttccggtgggggacaacagttggaaacgactgctaataccgcataacatatgtctaaggcatcttagatatatcaaagcttta

SEQ ID NO: 648 - DNA, 225 bp, unidentified
  misc_feature 1..225: note = Encodes 16S rRNA from Nitrobacter
  source 1..225: mol_type = genomic DNA
agagtttgatcatggctcagagcgaacgctagcggaatgctttatacatgcaagtcgaacgaacgagtttatattgagtagcaatacgatttatgaatgagttagtggcaaacgggtgagtaatagttaggaacttgccgaatagtgggggacaacagatagaaatgtctgctaataccgcatattcccgagaggggaaagatttattgctatttgagaggccta

SEQ ID NO: 649 - DNA, 225 bp, unidentified
  misc_feature 1..225: note = Encodes 16S rRNA from Clostridium XlVa
  source 1..225: mol_type = genomic DNA
agagtttgatcatggctcaggatgaacgctggcggcgtgcctaacacatgcaagtcgaacggggtacagacgctgtgagagaaagcagcttgctgtggacttaaacttgtttgtacttagtggcggacgggtgagtaacgcgtggaaaacctgcctcatacagggggataacaggaagaaattcctgctaataccgcataagcgcacggtatcgcatggtacagt

SEQ ID NO: 650 - DNA, 225 bp, unidentified
  misc_feature 1..225: note = Encodes 16S rRNA from Lachnospiracea incertae sedis
  source 1..225: mol_type = genomic DNA
agagtttgatcctggctcaggatgaacgctggcggcgtgcttaacacatgcaagtcgaacgggacttttggagcttgctccggaagttcagtggcggacgggtgagtaacgcgtgggtaacctgccgcatgcagggggacaacagttggaaacgactgctaataccgcataagcgcacgggaccgcatggtccggtgtgaaaagatttatcggcatgcgatggac

SEQ ID NO: 651 - DNA, 225 bp, unidentified
  misc_feature 1..225: note = Encodes 16S rRNA from Limibacter
  source 1..225: mol_type = genomic DNA
agagtttgatcatggctcaggatgaacgctagcggcaggcctaatacatgcaagtcgtacggtaagcgccccttcgggggtgtgagagtggcggacgggtgcgtaacgcgtatgcaaccaacccccctcgccgggatagccggtggaaacgccggataataccggatgcgccgcgtgggaggcatctcccgagcggcaaggcggagacgcggagggggacgggca

SEQ ID NO: 652 - DNA, 225 bp, unidentified
  misc_feature 1..225: note = Encodes 16S rRNA from Desulfovibrio
  source 1..225: mol_type = genomic DNA
agagtttgatcctggctcagattgaacgctggcggcgtgcctaacacatgcaagtcgaacgcgaaaggggcttcggccccgagtagagtggcgcacgggtgagtaacgcgtggataatctgcccctgcggctggaatagcgactggaaacggtcgataatgccggatacgcccttgtttaacgatgaggggaaaggagacctctgcttgcaagtttccgtgcagg

SEQ ID NO: 653 - DNA, 225 bp, unidentified
  misc_feature 1..225: note = Encodes 16S rRNA from Coprococcus
  source 1..225: mol_type = genomic DNA
agagtttgatcatggctcaggatgaacgctggcggcgtgcttaacacatgcaagtcgaacgaagcacttttctttgattcttcggatgaaaaagagatttgactgagtggcggacgggtgagtaacgcgtgggtaacctgccctgtacagggggataacagttagaaatgactgctaataccgcataagaccacagcatcgcatggtgcagtggtaaaaactccg

SEQ ID NO: 654 - DNA, 225 bp, unidentified
  misc_feature 1..225: note = Encodes 16S rRNA from Anaerovorax
  source 1..225: mol_type = genomic DNA
agagtttgatcatggctcaggattaacgctggcggcgtgcctaacacatgcaagtcgagcgggaaatttgagagtgaggcttcggcggatctcttaaatggagagcggcggacgggtgagtaacgcgtaggtaacctgccctgcacagagggatagccactggaaacggtgattaatacctcataaaactgttttgccgcatgacagaacagccaaagatttatc

SEQ ID NO: 655 - DNA, 225 bp, unidentified
  misc_feature 1..225: note = Encodes 16S rRNA from Spirochaeta
  source 1..225: mol_type = genomic DNA
agagtttgatcctggctcagaacgaacgctggcggcgcgtcttaagcatgcaagtcgaacggcaagctaccttcgggtagcctagagtggcggactggtgagtaacacgtgggtgacatgccttcaggactggaatagcctgcagaaatgcagggtaatgccggatacggtgcaggacgttaggggtcctgcaagaaaggagcatttgctccgccgggagattgg

SEQ ID NO: 656 - DNA, 225 bp, unidentified
  misc_feature 1..225: note = Encodes 16S rRNA from unidentified taxa
  source 1..225: mol_type = genomic DNA
agagtttgatcatggctcaggacgaacgctggcggcgtgcttcatacatgcaagtcgaacgagaagcaagagcttgctcttgtggaaagtggcggacgggtgagtaacacgtagggaatctgccttcaggcgggggacaacagttggaaacgactgctaataccccatatgagctaagttgaaatacttatcttgaaaactccggtgcctgtagatgagcctgcg

SEQ ID NO: 657 - DNA, 225 bp, unidentified
  misc_feature 1..225: note = Encodes 16S rRNA from Saccharofermentans
  source 1..225: mol_type = genomic DNA
agagtttgatcatggctcaggacgaacgctggcggcgtgcctaacacatgcaagtcgagcggagatgaggagaagcttgcttcgagacatctcagcggcggacgggtgagtaacgcgtgagcaacctgtcctctgcagggggataagacagcgaaagttgttctaataccgcataagaccacaacgtcacatggcgaaggggtcaaaggaggaatccggcagagg

SEQ ID NO: 658 - DNA, 225 bp, unidentified
  misc_feature 1..225: note = Encodes 16S rRNA from Anaeroplasma
  source 1..225: mol_type = genomic DNA
agagtttgatcatggctcaggattaacgctggcggcgtgcctaatacatgcaagtcggatggttagcttgctaaccatggcgaacgggtgagtaacacgtaggcaacctgtctaaaagacgaggataaccattggaaacgatggataatactggataggattatttagggcatcctagataatttaaagatttatcacttttagaggggcctgcggcgcattagc

SEQ ID NO: 659 - DNA, 225 bp, unidentified
  misc_feature 1..225: note = Encodes 16S rRNA from Clostridium III
  source 1..225: mol_type = genomic DNA
agagtttgatcatggctcaggacgaacgctggcggcgtgcttaatccatgcaagtcgaacggggcgattccggaaagtcttcggactggaaggaagagcttagtggcgaacgggtgagtaacgcgtgaccaaccaaccttaagcagggggacaacagctggaaacggctgctaataccgcataagaccacggtggggcatctcacaggggtcaaaggagcaatcc

SEQ ID NO: 660 - DNA, 225 bp, unidentified
  misc_feature 1..225: note = Encodes 16S rRNA from Victivallis
  source 1..225: mol_type = genomic DNA
agagtttgatcctggctcagaacgaacgctggcggcatggattaggcatgcaagtcgaacgaagcagcaatgcttagtggcgcaagggtgaggaacacgtgagtgacctacccgcaagtttggaacagctcctggaaacgggaattaataccggatgtgatcaacgggctgcatggtctgttgattaaagcagcaatgcgcttgcggatgggctcgcgtcccatt

SEQ ID NO: 661 - DNA, 225 bp, unidentified
  misc_feature 1..225: note = Encodes 16S rRNA from Enterorhabdus
  source 1..225: mol_type = genomic DNA
agagtttgatcatggctcaggatgaacgctggcggcgtgcctaacacatgcaagtcgaacggttaaggcggcttcggccgcgaatagagtggcgaacgggtgagtaacacgtgaccaacctgccccgcgcaccgggacagcctcgtgaaaacgggattaataccggatactccggcggcgcgggatggggtcgcggcccattaggtagtaggcggggtgacggcc

SEQ ID NO: 662 - DNA, 225 bp, unidentified
  misc_feature 1..225: note = Encodes 16S rRNA from Clostridium IV
  source 1..225: mol_type = genomic DNA
agagtttgatcatggctcaggatgaacgctggcggcgtgcttaacacattcaagtcgaacggattccaggggagcttgctccccgaagaattagtggcggacgggtgagtaacgcgtgagcaacctgccttttttcgggggataacacggggaaaccggtgctaataccgcataacgtgccgaagtcgcatggctttggtaccaaaggagtaatccgaggaaaga

SEQ ID NO: 663 - DNA, 225 bp, unidentified
  misc_feature 1..225: note = Encodes 16S rRNA from Erysipelothrix
  source 1..225: mol_type = genomic DNA
agagtttgatcctggctcaggatgaacgctggcggcgtgcctaatacatgcaagtcgaacgaagtacttcggtacttagtggcgaacgggtgagtaacacataaacaatctaccctgaagactgggataacggttggaaacgaccgctaataccggataggtgatcttaaggcatcttgagatcattaaagttgggctacaacactgcaggatgagtttatgtcg

SEQ ID NO: 664 - DNA, 225 bp, unidentified
  misc_feature 1..225: note = Encodes 16S rRNA from Clostridium III
  source 1..225: mol_type = genomic DNA
agagtttgatcatggctcaggacgaacgctggcggcgtgcctaacacatgcaagtcgaacggagtgtatctgtgaatgagagaagcttgcttcaggaattctttgatatcacttagtggcgcacgggtgagtaacgcgtgggcaatctgcctttcacagggggacaacagagggaaacttctgctaataccgcataacatcaatttaaggcatcttagaatgatc

SEQ ID NO: 665 - DNA, 225 bp, unidentified
  misc_feature 1..225: note = Encodes 16S rRNA from Clostridium sensu stricto
  source 1..225: mol_type = genomic DNA
agagtttgatcatggctcaggacgaacgctggcggcatgcctaacacatgcaagtcgaacggaataggtttggttgtagcgatactttcggacctatttagtggcgaacgggtgagtaacacgtgagcaacctgccttctacacagggataacagccggaaacggctgctaataccggataagaccacaccgaggcatctcggaggggtcaaagcgatttagcgg

SEQ ID NO: 666 - DNA, 225 bp, unidentified
  misc_feature 1..225: note = Encodes 16S rRNA from Gelidibacter
  source 1..225: mol_type = genomic DNA
agagtttgatcctggctcaggataaacgctagcggcaggcctaacacatgcaagtcgagcggcagcggggtgtagcaatacattgccggcgagcggcggacgggtgagtaacgcgtatgcaacctgcccaccacacggagatagccgaccgaaaggacgattaaactccgatggcacctcatcaaggcatcttcttgaggttaaatattcataggtggtggatgg

SEQ ID NO: 667 - DNA, 225 bp, unidentified
  misc_feature 1..225: note = Encodes 16S rRNA from Roseburia
  source 1..225: mol_type = genomic DNA
agagtttgatcctggctcaggatgaacgctggcggcgtgcttaacacatgcaagtcgaacgaagctcttttgcggatttcttcggattgaagtagaagatgacttagtggcggacgggtgagtaacgcgtgggtaacctgcctctgacagggggacaacagttagaaatgactgctaacaccgcataagcgcacagtaaggcatcttacagtgtgaaaatattca

SEQ ID NO: 668 - DNA, 225 bp, unidentified
  misc_feature 1..225: note = Encodes 16S rRNA from Neisseria
  source 1..225: mol_type = genomic DNA
agagtttgatcctggctcagattgaacgctggcggcatgctttacacatgcaagtcgaacggcagcgtggtagtgcttgcactactgacggcgagtggcgaacgggtgagtaatgcatcggaatgtaccgagtaatgggggataactaatcgaaagattagctaataccgcatacgacctgagggtgaaagcaggggatcttaggaccttgcgttattcgagcag

SEQ ID NO: 669 - DNA, 225 bp, unidentified
  misc_feature 1..225: note = Encodes 16S rRNA from Prevotella
  source 1..225: mol_type = genomic DNA
agagtttgatcctggctcaggatgaacgctagctacaggcttaacacatgcaagtcgaggggcatcaggattctagcttgctaggattgctggcgaccggcgcacgggtgagtaacgcgtatccaacctgccgcatagtcgggcacagccctctgaaaggaggattaatgccggatgtggtcattgtgggacatcccattatgactgaagatttattgctatgcg

SEQ ID NO: 670 - DNA, 225 bp, unidentified
  misc_feature 1..225: note = Encodes 16S rRNA from unidentified taxa
  source 1..225: mol_type = genomic DNA
agagtttgatcatggctcaggacgaacgctggcggcgtgcttcatacatgcaagtcgaacgagaatctggtgcttgcaccagaggaaagtggcggacgggtgagtaaaatgtagagaatctgccctagagagggggatagcagttggaaacgactattaataccccatatgcgcgtagttgagatactattcgtgaaaactccggtgctctgggatgagtctgca

SEQ ID NO: 671 - DNA, 225 bp, unidentified
  misc_feature 1..225: note = Encodes 16S rRNA from Oscillibacter
  source 1..225: mol_type = genomic DNA
agagtttgatcatggctcaggacgaacgctggcggcatgcctaacacatgcaagtcgaacgggactcttaacgaccgaggcttcggccaagtgaattttgagtttagtggcggacgggtgagtaacgcgtgagcaacctgcctttcagagggggacaacagttggaaacgactgctaataccgcatgacatacggagggggcatcccttttgtatcaaagattta

SEQ ID NO: 672 - DNA, 225 bp, unidentified
  misc_feature 1..225: note = Encodes 16S rRNA from unidentified taxa
  source 1..225: mol_type = genomic DNA
agagtttgatcatggctcagggttaacgctagcggtgcgcctaacacatgcaagtcgagcgggaatgtgagaaagcttgctttcaaacaagatagcggcgaacgggtgagtaatatgttggtatctgtccttaagtcaggaatagctcagggaaacttgaattaatgccggatgtgctctttggagtaaagatttatcgcttaagggggagccttcattctatca

SEQ ID NO: 673 - DNA, 225 bp, unidentified
  misc_feature 1..225: note = Encodes 16S rRNA from Prevotella
  source 1..225: mol_type = genomic DNA
agagtttgatcatggctcaggatgaacgctagctacaggcttaacacatgcaagtcgcggggcagcatgggagttgcttgcaacttccgatggcgaccggcgcacgggtgcgtaacgcgtatccaacctacccgcaagtcagggccagcccggcgaaagtcggattaatccctgatgtggtgcgaagaggacatctgattcacattaaaggagcgatttgcttgc

SEQ ID NO: 674 - DNA, 225 bp, unidentified
  misc_feature 1..225: note = Encodes 16S rRNA from Saccharofermentans
  source 1..225: mol_type = genomic DNA
agagtttgatcatggctcaggacgaacgctggcggcgtgcctaacacatgcaagtcgagcggggataattgacggaaggtttcggccggaaggcgattattctagcggcggacgggtgagtaacgcgtgagcaacctttccttcacagggggataaaacaccgaaaggtgtcctaataccgcatgagaccacgggagcacatgcttttgaggtcaaaggagcaat

SEQ ID NO: 675 - DNA, 225 bp, unidentified
  misc_feature 1..225: note = Encodes 16S rRNA from Erysipelotrichaceae incertae sedis
  source 1..225: mol_type = genomic DNA
agagtttgatcctggctcaggattaacgctggcggcatgcctaatacatgcaagtcgaacgagagtagcaatactctagtggcgaacgggtgagtaacacgtaggcaatctacccattagacgaggataactattggaaacgatagctaaaactggataggatatagcgaggcatcttgtaatatttaaaggtcctgaaagggaacactaatggatgagcctgcg

SEQ ID NO: 676 - DNA, 225 bp, unidentified; identical to SEQ ID NO: 466
  misc_feature 1..225: note = Encodes 16S rRNA from Spirochaeta
  source 1..225: mol_type = genomic DNA

SEQ ID NO: 677 - DNA, 225 bp, unidentified
  misc_feature 1..225: note = Encodes 16S rRNA from Clostridium XlVa
  source 1..225: mol_type = genomic DNA
agagtttgatcatggctcaggatgaacgctggcggcgtgcctaacacatgcaagtcgaacgagcgagagatgaaacctggtgattctcaagcgagtggcggacgggtgagtaacgcgtgggtaacctgccttacagagggggataacagtctgaaaagactgctaataccgcataagcacacagtaccgcatggtacagggtgaaaagatttatcactgtaagat

SEQ ID NO: 678 - DNA, 225 bp, unidentified
  misc_feature 1..225: note = Encodes 16S rRNA from Clostridium XlVb
  source 1..225: mol_type = genomic DNA
agagtttgatcatggctcaggacgaacgctggcggcgtgcttaacacatgcaagtcgtacggggtatagcaatatacctagtggcgaacgggtgagtaacacgtgagtaacctgccctatacagggggacaacagctggaaacggctgctaataccgcataagaccacggaaccgcatggttcaggggtaaaaggctacggccggtataggatgggctcgcgcac

SEQ ID NO: 679 - DNA, 225 bp, unidentified
  misc_feature 1..225: note = Encodes 16S rRNA from Clostridium XlVa
  source 1..225: mol_type = genomic DNA
agagtttgatcatggctcaggatgaacgctggcggcgtgcctaacacatgcaagtcgagcggagataagttgaagcctagcgattcttatcttagcggcggatgggtgagtaacacgtgggtaacctgccctgtactggggaataacagctggaaacggctgttaatgccgcatatgcgcacggagccgcatgactccgggcggaaagatttatcggtacaggat

SEQ ID NO: 680 - DNA, 225 bp, unidentified
  misc_feature 1..225: note = Encodes 16S rRNA from Adlercreutzia
  source 1..225: mol_type = genomic DNA
agagtttgatcctggctcaggatgaacgctggcggcgtgcctaacacatgcaagtcgaacggttaaaccggcttcggccggaaatacagtggcgaacgggtgagtaacacgtgaccaacctgccccgcgcaccgggatagccccccgaaagggggattaataccggatgcgccgggccggccgcatggccggcccgggaaagcccaggcggcgcgggatggggtc

SEQ ID NO: 681 - DNA, 225 bp, unidentified
  misc_feature 1..225: note = Encodes 16S rRNA from Clostridium XlVa
  source 1..225: mol_type = genomic DNA
agagtttgatcctggctcaggatgaacgctggcggcgtgcctaacacatgcaagtcgaacggaaatggttgatgaagttttcggatggatttttccattttagtggcggacgggtgagtaacgcgtgggtaacctgccctgtaccgggggataacattcagaaatgagtgataataccgcataagcgcacagcttcgcatgaagcagtgtgaaaaactccggtgg

SEQ ID NO: 682 - DNA, 225 bp, unidentified
  misc_feature 1..225: note = Encodes 16S rRNA from Lachnospiracea incertae sedis
  source 1..225: mol_type = genomic DNA
agagtttgatcctggctcaggatgaacgctggcggcgtgcctaacacatgcaagtcgaacgaagctcctttgcggaactcttcggagggaaggaaaggatgactgagtggcggacgggtgagtaacgcgtgggtaacctgccctgtacagggggacaacagttagaaatgactgctaataccgcataagcgtacagcatcgcatgatgcagtacgaaaaactgag

SEQ ID NO: 683 - DNA, 225 bp, unidentified
  misc_feature 1..225: note = Encodes 16S rRNA from Clostridium IV
  source 1..225: mol_type = genomic DNA
agagtttgatcatggctcaggatgaacgctggcggcgtgcttaacacatgcaagtcgaacgaggttagagtcttcggattttaaccgagtggcggacgggtgagtaacgcgtgaacaatctgtcctgcaaagggggataacaactggaaacagttgctaataccgcataagaccacagtatcgcatggtacagaggtaaaagcagcaatgcgatgcagggtgagt

SEQ ID NO: 684 - DNA, 225 bp, unidentified
  misc_feature 1..225: note = Encodes 16S rRNA from Adlercreutzia
  source 1..225: mol_type = genomic DNA
agagtttgatcctggctcaggatgaacgctggcggcgtgcttaacacatgcaagtcgaacggtcaaaccgccctcgggcggacataaagtggcgaacgggtgagtaacacgtgaccaacctgccccgcgcaccgggacagccccccgaaagggggattaataccggatactccggggagggcgcatgccctccccgggaaagctccggcggcgcgggatggggtc

SEQ ID NO: 685 - DNA, 225 bp, unidentified
  misc_feature 1..225: note = Encodes 16S rRNA from Prevotella
  source 1..225: mol_type = genomic DNA
agagtttgatcatggctcaggatgaacgctagcgacaggcctaacacatgcaagtcgaggggcagcatggagtagcaatactctgatggcgaccggcgcacgggtgcgtaacaggtgtgcaatctgtcctataccggggaatagcccagcgaaagttgaattaaagctccatgtgagtgagagccgcatgactcccacttgaaacgtaagggtataggatgagca

SEQ ID NO: 686 - DNA, 225 bp, unidentified
  misc_feature 1..225: note = Encodes 16S rRNA from Syntrophococcus
  source 1..225: mol_type = genomic DNA
agagtttgatcatggctcaggatgaacgctggcggcgtgcttaacacatgcaagtcgaacgggaacctcacgacggagacttcggttgaagatgtgagaattctagtggcggacgggtgagtaacgcgtgggtaacctgcccatgagaggaggataacagggagaaattcttgctaatactccatatgcttacggtatcgcatgatacagtgaggaaagaatttc

SEQ ID NO: 687 - DNA, 225 bp, unidentified
  misc_feature 1..225: note = Encodes 16S rRNA from Treponema
  source 1..225: mol_type = genomic DNA
agagtttgatcatggctcagaataaacgctggcggcgtgtcttaagcatgcaagtcgaacggcaaggtaccttcgggtaccctagagtggcggactggtgagtaacacgtaggtgacgtaccttttggacggggatagcccgtagaaatacgggataataccggataaggttgcacgggttggagccgtgcaaggaaaggcgctacggcgtcgccgaaagaacgg

SEQ ID NO: 688 - DNA, 225 bp, unidentified
  misc_feature 1..225: note = Encodes 16S rRNA from Prevotella
  source 1..225: mol_type = genomic DNA
agagtttgatcatggctcaggatgaacgctagctacaggcttaacacatgcaagtcgtggggcagcacgggaagcagcaatgcttttgggtggcgaccggcgaatgggtgagtaacgagtatccaacctgccccgtgctccgggacagccccgcgaaagcgggattaataccggatggtgcgtgtttcccgcatgggatatacgtcaaagattcatcggcacggg

SEQ ID NO: 689 - DNA, 225 bp, unidentified
  misc_feature 1..225: note = Encodes 16S rRNA from Clostridium III
  source 1..225: mol_type = genomic DNA
agagtttgatcctggctcaggacgaacgctggcggcgtgcctaacacatgcaagtcgaacgagaaatatgacaatgatcctttcggggtgatttggattatggacagtggcggacgggcgagtaacgcgtgagtaacctgcccataagagagggatagccgatggaaacgtcgagtaatacctcatattgtaattaattcgcatggattgattatgaaagattta

SEQ ID NO: 690 - DNA, 225 bp, unidentified
  misc_feature 1..225: note = Encodes 16S rRNA from Pseudoflavonifractor
  source 1..225: mol_type = genomic DNA
agagtttgatcatggctcaggatgaacgctggcggcgtgcttaacacatgcaagtcgaacggagcatacttgatggtaactgatggtattgcttagtggcggacgggtgagtaacgcgtgaggaacctgccttggagtggggaataacagtcagaaatgattgctaataccgcataatgtatacgggtcgcatggtctgtataccaaagatttatcgctctgaga

SEQ ID NO: 691 - DNA, 225 bp, unidentified
  misc_feature 1..225: note = Encodes 16S rRNA from Clostridium IV
  source 1..225: mol_type = genomic DNA
agagtttgatcatggctcaggatgaacgctggcggcgtgcataacacattcaagtcgaacgaagcactttgacggaagccttcgggcggaagttgatttgacttagtggcggacgggtgagtaacgcgtgagcaacctgcctgtatgtgagggataacacagggaaacttgtgctaataccgcatgaagcatgggaatcgcatggttttgatgccaaagacttgt

SEQ ID NO: 692 - DNA, 225 bp, unidentified
  misc_feature 1..225: note = Encodes 16S rRNA from Sharpea
  source 1..225: mol_type = genomic DNA
agagtttgatcatggctcaggattaacgctggcggcgtgcctaatacatgcaagtcggccggggaggggaaagcttgctttcacctcccaggggcgaacgggtgagtaatacgtaagcaacctgcccgcgggtccgggataagccctggaaacggggtctaagaccggataggcggcgggggcgcatgccccctccgttaaaggcgagaaacgcctgcggatggg

SEQ ID NO: 693 - DNA, 225 bp, unidentified
  misc_feature 1..225: note = Encodes 16S rRNA from Dongia
  source 1..225: mol_type = genomic DNA
agagtttgatcatggctcagaacgaacgctggcggcacgcttaacacatgcaagtcgaacggtgcaatggggcttgctctattgcatagtggcggacgggtgagtaacacgtaggaacctacctggtaatggtggatagcttcgggaaactggaggtaatacagcatgagctcgagagaggaaaggccataaggtcgttaccagaggggcctgcggatgattagg

SEQ ID NO: 694 - DNA, 225 bp, unidentified
  misc_feature 1..225: note = Encodes 16S rRNA from Eubacterium
  source 1..225: mol_type = genomic DNA
agagtttgatcatggctcaggacgaacgctggcggcgtgcctaacacatgcaagtcgaacgaagcttgaattcagaattcttcggaaggacgaatgaaatgactgagtggcggacgggtgagtaacgcgtgagcaacctgccctttggatggggatagcgtttggaaacgaacggtaatacccaataaagtatatttgtggcatcgcagatataccaaagctccg

SEQ ID NO: 695 - DNA, 225 bp, unidentified
  misc_feature 1..225: note = Encodes 16S rRNA from Prevotella
  source 1..225: mol_type = genomic DNA
agagtttgatcatggctcaggatgaacgctagctacaggcttaacacatgcaagtcgaggggcagcatgtcgtgtgcttgcacacgatgatggcgaccggcgcacgggtgagtaacgcgtatccaacctgcccatgaccccgggatagcccgctgaaaagcggattaacaccggatgtggtcgaacgaggacatctgatttcgaccaaagcttttttgcggtcat

SEQ ID NO: 696 - DNA, 225 bp, unidentified
  misc_feature 1..225: note = Encodes 16S rRNA from Clostridium IV
  source 1..225: mol_type = genomic DNA
agagtttgatcatggctcaggacgaacgctggcggcgtgcttaacacatgcaagtcgaacgagaacctgtggaaggagttttcggacaacggaaacaggggaaagtggcggacgggtgagtaacgcgtgaggaacctgccttggagagggggacaacagctggaaacggctgctaataccgcatgatgcacgatggggacatccccgacgtgccaaagatttatc

SEQ ID NO: 697 - DNA, 204 bp, unidentified
  misc_feature 1..204: note = Encodes 16S rRNA from Parabacteroides
  source 1..204: mol_type = genomic DNA
agagtttgatcatggctcaggatgaacgctagcgacaggctttggtcaatggacgctagtctgaaccagccaagtcgcgtgcgggatgaaggccctccgggtcgtaaaccgctttagccggggagtaacgtgggggacgcgtccctcagtgagagtacccggagaataagcatcggctaactccgtgccagcagccgcggtaat

SEQ ID NO: 698 - DNA, 225 bp, unidentified; identical to SEQ ID NO: 518
  misc_feature 1..225: note = Encodes 16S rRNA from Brevundimonas
  source 1..225: mol_type = genomic DNA

SEQ ID NO: 699 - DNA, 225 bp, unidentified
  misc_feature 1..225: note = Encodes 16S rRNA from Clostridium XlVa
  source 1..225: mol_type = genomic DNA
agagtttgatcctggctcaggatgaacgctggcggcgtgcttaacacatgcaagtcgaacggactttactgaaaagagggcttgcccgatggaaggtaaagttagtggcggacgggtgagtaacgcgtgggtaacctgccttacacagggggacaacagttggaaacgactgctaataccgcataagccggtagtgccgcatggcacatccggaaaagatttatc

SEQ ID NO: 700 - DNA, 225 bp, unidentified
  misc_feature 1..225: note = Encodes 16S rRNA from Ruminococcus
  source 1..225: mol_type = genomic DNA
agagtttgatcctggctcaggacgaacgctggcggcacgcttaacacatgcaagtcgaacggaacttgggagcttgctttcaagtttagtggcggacgggtgagtaacacgtgagcaacctgcctttcggcggggaataatgattggaaacgatcactaataccccataaaataaatttaccgcatgataaatttatcaaagattcatcaccgaaagatgggctc

SEQ ID NO: 701 - DNA, 225 bp, unidentified
  misc_feature 1..225: note = Encodes 16S rRNA from Thermotalea
  source 1..225: mol_type = genomic DNA
agagtttgatcctggctcaggattaacgctggcggcgtgcctaacacatgcaagtcgagcgagaattgacagaatgaaacttcggtggaattcagtcaaggacagcggcggacgggtgagtaacgcgtgggcaacctgcccctttccggaggatagccaagggaaactttgaataatactccataaagcatcattaccgcatgatagagatgccaaagatttatc

SEQ ID NO: 702 - DNA, 225 bp, unidentified
  misc_feature 1..225: note = Encodes 16S rRNA from Victivallis
  source 1..225: mol_type = genomic DNA
agagtttgatcctggctcagaacgaacgctggcggcatggattaggcatgcaagtcgaacggtgcagcaatgcatagtggcgcaagggtgaggaacgcgtgagtaatctgccctcaagttgggaacagcttctggaaacggaaattaataccgaatgtgatctcagggaggcatctttctgggattaaaggccgcaaggtcgcttgaggaggggctcgcgtccca

SEQ ID NO: 703 - DNA, 225 bp, unidentified
  misc_feature 1..225: note = Encodes 16S rRNA from Anaeroplasma
  source 1..225: mol_type = genomic DNA
agagtttgatcatggctcaggattaacgctggcggcgtgcctaatacatgcaagtcgaatggttagcttgctaaccatggcgaacgggtgagtaacacgtaggcaacctgtctatcagccgaggataaccattggaaacgatggataatactggataggatatagataggcatctaattatatttaaagatttatcactgatagaggggcctgcggcgcattagc

SEQ ID NO: 704 - DNA, 225 bp, unidentified
  misc_feature 1..225: note = Encodes 16S rRNA from Oscillibacter
  source 1..225: mol_type = genomic DNA
agagtttgatcctggctcaggacgaacgctggcggcgtgcctaacacatgcaagtcgaacgaagctccgagaaacaagacttcggtcaagcggaacggatgactgagtggcgaacgggtgagtaacgcgtgaggaacctgcctttcagtgggggataacagttggaaacgactgctaataccgcatgaagtattctgggggcatccccggggtaccaaagattta

SEQ ID NO: 705 - DNA, 225 bp, unidentified
  misc_feature 1..225: note = Encodes 16S rRNA from Ruminococcus
  source 1..225: mol_type = genomic DNA
agagtttgatcctggctcaggacgaacgctggcggcacgcctaacacatgcaagtcgagcggtgaattttggatttattcgagattcatagcggcggacgggtgagtaacacgtgagcaacctacctctaagtgagggatagcttctggaaacggatggtaataccttataatatatatttatcacatgatagatatatcaaagatttattgcttagagatgggc

SEQ ID NO: 706 - DNA, 225 bp, unidentified
  misc_feature 1..225: note = Encodes 16S rRNA from Clostridium XlVa
  source 1..225: mol_type = genomic DNA
agagtttgatcctggctcaggatgaacgctggcggcgtgcctaacacatgcaagtcgaacgaggctctgcgaaatgaagattcgtctgaatttcaaggatgtccgagtggcggatgggtgagtaacgcgtggagaacctgccctatgctgggggataacaactggaaacggttgacaataccgcataagcttccttagtcgcatgaccttggaaggaaagattta

SEQ ID NO: 707 - DNA, 225 bp, unidentified
  misc_feature 1..225: note = Encodes 16S rRNA from Clostridium XlVa
  source 1..225: mol_type = genomic DNA
agagtttgatcctggctcaggatgaacgctggcggcgtgcttaacacatgcaagtcgaacgaatttccttcgaacagaggcttcggccaacgggagattgaagtgagtggcggacgggtgagtaacgcgtgggtaacctgccttacaccgggggataacagagggaaacttctgctaataccgcataagaccacggtaccgcatggtacagaggtaaaagttccg

SEQ ID NO: 708 - DNA, 225 bp, unidentified
  misc_feature 1..225: note = Encodes 16S rRNA from Clostridium IV
  source 1..225: mol_type = genomic DNA
agagtttgatcatggctcaggatgaacgctggcggcgtgcttaacacattcaagtcgaacgaagcatattggaacgagacttcggtcaagggaaggtatgacttagtggcggacgggtgagtaacgcgtgagcaacctgcctcggggtgcgggataacgattggaaacgaccgctaataccgcatgacgcatatttttcgcatgtgagatatgccaaagattcat

SEQ ID NO: 709 - DNA, 225 bp, unidentified
  misc_feature 1..225: note = Encodes 16S rRNA from Roseburia
  source 1..225: mol_type = genomic DNA
agagtttgatcatggctcaggatgaacgctggcggcgtgcttaacacatgcaagtcgaacggagatgtttcgctggggcggcttcggccaaaccttgaggcatcttagtggcggacgggtgagtaacgcgtgggtaacctgcctatcacagggggacaacagttggaaacgactgctaataccgcataagcgcacggcaccgcatggtgcagtgtgaaaagattc

SEQ ID NO: 710 - DNA, 225 bp, unidentified
  misc_feature 1..225: note = Encodes 16S rRNA from Eggerthella
  source 1..225: mol_type = genomic DNA
agagtttgatcctggctcaggatgaacgctggcggcgtgcctaacacatgcaagtcgaacggagaaaccgccctcgggcggagatgaagtggcgaacgggtgagtaacacgtgaccaacctgccccgcgcaccgggacagccccccgaaagggggattaataccggatgcgccggccgggccgcatggcccggccgggaaagcccaggcggcgcgggatggggtc

SEQ ID NO: 711 - DNA, 225 bp, unidentified
  misc_feature 1..225: note = Encodes 16S rRNA from Clostridium III
  source 1..225: mol_type = genomic DNA
agagtttgatcatggctcaggacgaacgctggcggcgtgcctaacacatgcaagtcgaacggacatactagcaatagtatgttagtggcggacgggtgagtaatacatgagtaacctgccttatacagggggataacacttagaaataggtgctaataccgcataataacccttggtggcatcaccaggggaggaaaggagaaatccagtaaaagatgggctcat

SEQ ID NO: 712 - DNA, 225 bp, unidentified
  misc_feature 1..225: note = Encodes 16S rRNA from Clostridium XlVa
  source 1..225: mol_type = genomic DNA
agagtttgatcctggctcaggatgaacgctggcggcgtgcctaacacatgcaagtcgaacggggtacagacgctgtgagaagaagtgcttgcacggaatcgaacttgtttgtacttagtggcggacgggtgagtaacgcgtggaaaacctgcctcatacagggggataacaggaagaaattcctgctaataccgcataagcgcacagtatcgcatgatagagtgt

SEQ ID NO: 713 - DNA, 225 bp, unidentified
  misc_feature 1..225: note = Encodes 16S rRNA from Lactobacillus
  source 1..225: mol_type = genomic DNA
agagtttgatcatggctcaggacgaacgctggcggcgtgcctaatacatgcaagtcgaacgcatcccgttgaattgaagtgcttgcactgatttttaacatcggatgagtggcgaactggtgagtaacacgtgggtaacctgcccagaagcgggggataacacttggaaacaggtgctaataccgcataacaacagaaaccgcatggtttctgtttgaaagatgg

SEQ ID NO: 714 - DNA, 225 bp, unidentified
  misc_feature 1..225: note = Encodes 16S rRNA from Bacteroides
  source 1..225: mol_type = genomic DNA
agagtttgatcctggctcaggatgaacgctagctacaggcttaacacatgcaagtcgaggggcagcatgacgatagcttgctattgttgatggcgaccggcgcacgggtgcgtaacacgtatccaatctacccggtactcggggatagcctttcgaaagaaagattaatacccgatactgttggatctccgcatggcggtccaaccaaagatttcatcggtgccg

SEQ ID NO: 715 - DNA, 225 bp, unidentified
  misc_feature 1..225: note = Encodes 16S rRNA from Cellulosilyticum
  source 1..225: mol_type = genomic DNA
agagtttgatcatggctcaggatgaacgctggcggcgtgcctaacacatgcaagtcgagcggagataatgcaccggatgaagattcgtcggattccaccgcgttatcttagcggcggatgggtgagtaacacgtggacaacctgcccataactgggggatagcagttggaaacgactgataataccgcatatgctcacagcaccgcatggtgcagggaggaaaga

SEQ ID NO: 716 - DNA, 225 bp, unidentified
  misc_feature 1..225: note = Encodes 16S rRNA from Brevundimonas
  source 1..225: mol_type = genomic DNA
agagtttgatcatggctcaggacgaacgctggcggtgtgcctcatacatgcaagtcgaacgataaggtctcttcggagatacataagtggcggacgggtgagtacaacataggaaatctgccttagggtgggggacaacagagggaaactcctgctaataccccatatgagctaacttgaaatagttatcttgaaaactccggtgccctaagatgagcctgtgcc

SEQ ID NO: 717 - DNA, 225 bp, unidentified
  misc_feature 1..225: note = Encodes 16S rRNA from Clostridium IV
  source 1..225: mol_type = genomic DNA
agagtttgatcatggctcaggatgaacgctggcggcgtgcataacacattcaagtcgaacgaagcactgacgatgaagtcttcggacggaattgtctttgacttagtggcggacgggtgagtaacgcgtgagcaaccttcctgtttgtgagggataacacagggaaacttgtgctaataccgcatgacgcatgggaatcgcatggtttcgatgccaaagatttat

SEQ ID NO: 718 - DNA, 225 bp, unidentified
  misc_feature 1..225: note = Encodes 16S rRNA from Prevotella
  source 1..225: mol_type = genomic DNA
agagtttgatcctggctcaggatgaacgctagctacaggcttaacacatgcaagtcgaggggcagcatgacgagtgcttgcacttgttgatggcgaccggcgcacgggtgcgtaacgcgtatcgaaccttccccttactcgggaatagcccggtgaaaaccgaattaatgcccgatatatatttagatggcatcagaagagtatgaaagatttatcggtaaggga

SEQ ID NO: 719 - DNA, 225 bp, unidentified
  misc_feature 1..225: note = Encodes 16S rRNA from Helicobacter
  source 1..225: mol_type = genomic DNA
agagtttgatcatggctcagagttaacgctggcggcgtgcctaacacatgcaagtcgagcgagtgcttgtaaagactagcggcaaacgggtgagtaacacatgggaaaccttccttagaatgggggatatctccgtgaaaacggagctaataccgcataagaccacagtttggcatcgaacaggggtaaaagcagcaatgtgttctaagatggtcctgtgtccta

SEQ ID NO: 720 - DNA, 225 bp, unidentified
  misc_feature 1..225: note = Encodes 16S rRNA from Clostridium IV
  source 1..225: mol_type = genomic DNA
agagtttgatcctggctcaggacgaacgctggcggcacgcttaacacatgcaagtcgaacggagttgtattagcttgctaatataacttagtggcggacgggtgagtaacacgtgagcaacctgccttcgagagtggaataatgtttggaaacggacactaataccgcatgacatacggaattcgcatgtttttcgtatcaaagatttatcgctcgaagatgggc

SEQ ID NO: 721 - DNA, 225 bp, unidentified
  misc_feature 1..225: note = Encodes 16S rRNA from Proteiniclasticum
  source 1..225: mol_type = genomic DNA
agagtttgatcatggctcaggacgaacgctggcggtatgcctaacacatgcaagtcgaacgaaaacggggcttgctctcgtttttagtggcgcacgggtgagtaacgcgtgagtaatctgccttaaagtggggaacaacatttggaaacgaatgctaataccgcgtaatatacagttttcgcatgaattttgtattatagatttatcgctttaagatgagctcgc

SEQ ID NO: 722 - DNA, 225 bp, unidentified
  misc_feature 1..225: note = Encodes 16S rRNA from Brevundimonas
  source 1..225: mol_type = genomic DNA
agagtttgatcatggctcagagcgaacgctggcggcaggcctaacacatgcaagtcgaacgaactcttcggagttagtggcggacgggtgagtaacacgtgggaacgtgcctttaggttcggaataactcagggaaacttgtgctaataccgaatgtgcccttcgggggaaagatttatcgcctttagagcggcccgcgtctgattagctagttggtgaggtaaa

SEQ ID NO: 723 - DNA, 225 bp, unidentified
  misc_feature 1..225: note = Encodes 16S rRNA from Clostridium XlVa
  source 1..225: mol_type = genomic DNA
agagtttgatcatggctcaggatgaacgctggcggcgcgcataacacatgcaagtcgaacggagtcacattgaaacctagtgatttgtgacttagtggcggacgggtgagtaacgcgtgggtaacctgcctggtattgggggacaacagttagaaatgactgctaataccgcatacgacatccggagggcatcctctggatgggaaaggatttatccgatatcag

SEQ ID NO: 724 - DNA, 204 bp, unidentified
  misc_feature 1..204: note = Encodes 16S rRNA from Prevotella
  source 1..204: mol_type = genomic DNA
agagtttgatcctggctcaggatgaacgctagctacaggctttggtcaatgggcggaagcctgaaccagccaagtagcgtgcaggatgacggccctatgggttgtaaactgcttttatgcgggaataaagaggctcacgtgtgggctgttgcatgtaccgcatgaataaggaccggctaattccgtgccagcagccgcggtaat

SEQ ID NO: 725 - DNA, 225 bp, unidentified
  misc_feature 1..225: note = Encodes 16S rRNA from Desulfovibrio
  source 1..225: mol_type = genomic DNA
agagtttgatcatggctcagattgaacgctggcggcgtgcttaacacatgcaagtcgaacgcgaaaggggcttcggccccgagtagagtggcgcacgggtgagtaacgcgtggataatctgcccctgcaactggaatagcgactggaaacggtcgataataccggatacgcccttgttgaactatgaggggaaaggagacctctgcttgcaagtttccgtgcagg

SEQ ID NO: 726 - DNA, 225 bp, unidentified
  misc_feature 1..225: note = Encodes 16S rRNA from Coraliomargarita
  source 1..225: mol_type = genomic DNA
agagtttgatcatggctcagagtgaacgctggcggcgtggctaagacatgcaagtcgggcggttgtgcgccttcgggtgtacaatagcggcaaacgggtgagtaacacgtaagtaacctgcccttaagactgggatagcccagcgaaagttggggtaataccggatgaggacctttagcgcatgttaagggatcgaaaggtatgagaagacgcttaaggaggggc

SEQ ID NO: 727 - DNA, 225 bp, unidentified
  misc_feature 1..225: note = Encodes 16S rRNA from Eubacterium
  source 1..225: mol_type = genomic DNA
agagtttgatcatggctcaggatgaacgctggcggcgtgcttaacacatgcaagtcgagcgagaaatgactgacggattcttcggatgacggaggtcatggacagcggcggacgggtgagtaacgcgtgggcaacctgcccttaactgagggatagccgagggaaacttcgtgtaatacctcataacgcattttgaccgcatgatcgaaatgccaaagatttatc

SEQ ID NO: 728 - DNA, 225 bp, unidentified
  misc_feature 1..225: note = Encodes 16S rRNA from Sphingomonas
  source 1..225: mol_type = genomic DNA
agagtttgatcatggctcagagcgaacgctagcggcatgcttaacacatgcaagtcgaacgagggaagttgattgagtagcaatacgatttcaatggaacgagtggcaaacgggtgagtaatatattggaacttgcccagtagtgggggacaacagttggaaacgactgctaataccgcataacgcagagatgcgaaagccgaaaggcgctattggagaggccaa

SEQ ID NO: 729 - DNA, 225 bp, unidentified
  misc_feature 1..225: note = Encodes 16S rRNA from Prevotella
  source 1..225: mol_type = genomic DNA
agagtttgatcctggctcaggatgaacgctagctacaggcttaacacatgcaagtcgaggggtaacatgaagaaagcttgctttctttgatgacgaccggcgcacgggtgagtatcgcgtatccaacctgcccataagtagggaatagccttgcgaaagtaagattaatgccctatggtttccgtcgtagacatcttagatggaataaagatttatcgcttatgg

SEQ ID NO: 730 - DNA, 225 bp, unidentified
  misc_feature 1..225: note = Encodes 16S rRNA from Clostridium IV
  source 1..225: mol_type = genomic DNA
agagtttgatcctggctcaggacgaacgctggcggtatgcctaacacatgcaagtcgaacgggtgttgaagagcttgctcttcttctactagtggcggacgggtgagtaacgcgtgagtaatctgcctcaaagtgggggataacacttagaaatgagtgctaataccgcgtaatgtgctaacttcgcatgaagtctgcaccatggtttttcgctttgagatgagc

SEQ ID NO: 731 - DNA, 225 bp, unidentified
  misc_feature 1..225: note = Encodes 16S rRNA from Paraprevotella
  source 1..225: mol_type = genomic DNA
agagtttgatcatggctcaggatgaacgctagcggcaggcttaacacatgcaagtcgaggggcagcgagtcggtagcaatactgatgtcggcgaccggcgcacgggtgagtaacgcgtatgcaacctttcccagacagggggatagcccagggaaacttggattaataccccgtaggccgagggatggcatcgtccttcggttaaagttccggcggtctggggtg

SEQ ID NO: 732 - DNA, 225 bp, unidentified
  misc_feature 1..225: note = Encodes 16S rRNA from Ruminococcus
  source 1..225: mol_type = genomic DNA
agagtttgatcctggctcaggacgaacgctggcggcacgcttaacacatgcaagtcgaacggagttaaaggagcttgctcctttaacttagtggcggacgggtgagtaacacgtgagcaacctgccttacagagaggaataatgattggaaacggtcactaatacctcataaaatatctatactgcatggtataggatatcaaagatttatcgctgtaagatggg

SEQ ID NO: 733 - DNA, 225 bp, unidentified
  misc_feature 1..225: note = Encodes 16S rRNA from Saccharofermentans
  source 1..225: mol_type = genomic DNA
agagtttgatcatggctcaggatgaacgctggcggcgcatttaagacatgcaagtcgaacgaagaatttgcaccgaatgaaagatgaagattcatcagattctggatttcaccgtaaattcttagtggcggacgggtgagtaatacgtagataatctgccttctagagggaaataacagagagaaatttctgctaatgtcccataagaccacactatggcatctt

SEQ ID NO: 734 - DNA, 225 bp, unidentified
  misc_feature 1..225: note = Encodes 16S rRNA from Clostridium III
  source 1..225: mol_type = genomic DNA
agagtttgatcctggctcaggacgaacgctggcggcgtgcctaacacatgcaagtcgagcggagccatccgaaagatcccttcggggtgattttggtgaagcttagcggcggacgggtgagtaacgcgtgagtaacctgcccattagtggggaataacacagagaaatttgtgctaataccgcataccgatgcgggagggcatcctcctgtattgaaagatttat

SEQ ID NO: 735 - DNA, 225 bp, unidentified
  misc_feature 1..225: note = Encodes 16S rRNA from Clostridium III
  source 1..225: mol_type = genomic DNA
agagtttgatcatggctcaggacgaacgctggcggcgtgcctaacacatgcaagtcgaacgaacgaggtagcaatactgagttagtggcggacgggtgagtaatgcatgagcaacctacctcatacagggggatagcacttagaaatgagtggtaataccgcataataaccatacatggcatcatgtaaggaggaaaggaggaatccggtaagagatgggctcat

SEQ ID NO: 736 - DNA, 225 bp, unidentified
  misc_feature 1..225: note = Encodes 16S rRNA from Turicibacter
  source 1..225: mol_type = genomic DNA
agagtttgatcatggctcaggatgaacgctggcggcgtgcctaatacatgcaagtcgaacgagagtacttgtactcgagtggcgaacgggtgagtaacacgtaggtaacctgcctttcagtttgggatacccagaggaaactttggctaataccggataactggtctggaggcatctccggatcctaaaaggggctccaaagcctcgctgattgatggacctgcg

SEQ ID NO: 737 - DNA, 225 bp, unidentified
  misc_feature 1..225: note = Encodes 16S rRNA from Prevotella
  source 1..225: mol_type = genomic DNA
agagtttgatcatggctcaggatgaacgctagctacaggcttaacacatgcaagtcgaggggcagcatgtatctggcttgccagatatgatggcgaccggcgcacgggtgcgtaacgcgtatccaacctgccgtttacccggggacagcctcgcgaaagcgagattaatacccgatgttgtgcgtattccgcatggtgtgcgcaccaaaggtttttccggtaagc

SEQ ID NO: 738 - DNA, 225 bp, unidentified
  misc_feature 1..225: note = Encodes 16S rRNA from Clostridium XlVa
  source 1..225: mol_type = genomic DNA
agagtttgatcctggctcaggatgaacgctggcggcgtgcctaacacatgcaagtcgagcggggatgcgccaaagatgatgactcgtctgattcttagcgcatcttagcggcggatgggtgagtaacgcgtggacaacctgcccgcaacagggggataacagctggaaacggctgataataccgcatatgcacacgtggccgcatggccatgggtggaaagattt

SEQ ID NO: 739 - DNA, 225 bp, unidentified
  misc_feature 1..225: note = Encodes 16S rRNA from Fusibacter
  source 1..225: mol_type = genomic DNA
agagtttgatcctggctcaggatgaacgctggcggcgtgcctaacacatgcaagtcgagcgagaaatcgctcaatgatctttcgggtgatttgagcgatggaaagcggcggacgggtgagtaacgcgtaggtaacctgccccatacagagggatagccactggaaacggtgattaatacctcataacaccggaatatcgcatggtataccggtcaaagtttttcg

SEQ ID NO: 740 - DNA, 225 bp, unidentified
  misc_feature 1..225: note = Encodes 16S rRNA from Clostridium XlVa
  source 1..225: mol_type = genomic DNA
agagtttgatcctggctcaggatgaacgctggcggcgtgcctaacacatgcaagtcgaacgaagctctcttttggaacccttcggggtgaagaaggagatgactgagtggcggacgggtgagtaacgcgtgggtaacctgccctgtacagggggacaacagttagaaatgactgctaataccgcataagcgcacagcaccgcatggtgccgtgtgaaaagccttt

SEQ ID NO: 741 - DNA, 225 bp, unidentified
  misc_feature 1..225: note = Encodes 16S rRNA from Clostridium IV
  source 1..225: mol_type = genomic DNA
agagtttgatcatggctcaggacgaacgctggcggcacgcttaacacatgcaagtcgaacggagttaatgaagcttgctttattaacttagtggcggacgggtgagtaacacgtgagcaacctgccttacagagaggaataatgattggaaacgatcactaatacctcataacatatttgaatcgcatggtttggatatcaaagatttatcgctgtaagatgggc

SEQ ID NO: 742 - DNA, 225 bp, unidentified
  misc_feature 1..225: note = Encodes 16S rRNA from Rummeliibacillus
  source 1..225: mol_type = genomic DNA
agagtttgatcatggctcaggacgaacgctggcggcgtgcctaatacatgcaagtcgagcgaatgacgaggagcttgctcctctgatttagcggcggacgggtgagtaacacgtgggtaacctgccctgtagactgggataacttcgggaaaccggagctaataccggataattcttttaacctcatggttttaagctgaaaggcgcttcggcgtcactacagga

SEQ ID NO: 743 - DNA, 225 bp, unidentified
  misc_feature 1..225: note = Encodes 16S rRNA from Mogibacterium
  source 1..225: mol_type = genomic DNA
agagtttgatcctggctcaggatgaacgctggcggcgtgcctaatacatgcaagtcgagcgagaatcaatagatcagcgatttatcaaagagacattgaggaaagcggcggacgggtgagtaacgcgtaggcaacctgcccctggcagagggatagccattggaaacgatgattaaaacctcataacgccggaagcacacatgtgctatcggccaaagatttatc

SEQ ID NO: 744 - DNA, 225 bp, unidentified
  misc_feature 1..225: note = Encodes 16S rRNA from Bacteroides
  source 1..225: mol_type = genomic DNA
agagtttgatcatggctcaggatgaacgctagcgacaggcctaacacatgcaagtcgagggagaagttggaggtagcttgctactgaagatggaaaccggcgcacgggtgcgtaacaggtatgcaatctgtcctataccggaggatagcccactgaaaggtggattaatactccatgtgccactgcggggcatcctatggtggtgaaacttgagggtatagggtg

SEQ ID NO: 745 - DNA, 225 bp, unidentified
  misc_feature 1..225: note = Encodes 16S rRNA from Pelospora
  source 1..225: mol_type = genomic DNA
agagtttgatcatggctcaggatgaacgctggcggcgcgcttaacacatgcaagtcgaacggaatgattgacttcggtcatgaattcagtggcggacgggtgagtaacacgtggataacttgccttttagtgggggatagctgagagaaatctcaattaataccgcataacgtgatttattcgcatggatagattaataaaggtgaaaatcgctaaaagataggt

SEQ ID NO: 746 - DNA, 225 bp, unidentified
  misc_feature 1..225: note = Encodes 16S rRNA from Eggerthella
  source 1..225: mol_type = genomic DNA
agagtttgatcatggctcaggatgaacgctggcggcgtgcttaacacatgcaagtcgaacgattaaaccacttcggtggatatagagtggcgaacgggtgagtaacacgtgggcaacctgcccctcacaccgggacaactattggaaacgatagctaataccggatactccgatcgcgtggcatcacgctttcgggaaagcccagacggtgagggatgggcccgc

SEQ ID NO: 747 - DNA, 225 bp, unidentified
  misc_feature 1..225: note = Encodes 16S rRNA from Eubacterium
  source 1..225: mol_type = genomic DNA
agagtttgatcctggctcaggatgaacgctggcggcgtgcttaacacatgcaagtcgaacggaacttatcttctgaagttttcggatggacgaaggtaagtttagtggcggacgggtgagtaacgcgtgggtaacctgccctgtacagggggataacagttagaaatgactgttaataccgcataagaccacagcaccgcatggtgcaggggtaaaagctgcgac

SEQ ID NO: 748 - DNA, 225 bp, unidentified
  misc_feature 1..225: note = Encodes 16S rRNA from Blautia
  source 1..225: mol_type = genomic DNA
agagtttgatcatggctcaggatgaacgctggcggcgtgcctaacacatgcaagtcgaacggagcttacttttttaatacttcggtaagcgagaagtaagcttagtggcggacgggtgagtaacgcgtggagaacctgccctgtactgggggataacagtgagaaatcactgctaataccgcataagcgcacggagccgcatggcccagtgtgaaaaactccggt

SEQ ID NO: 749 - DNA, 225 bp, unidentified
  misc_feature 1..225: note = Encodes 16S rRNA from Clostridium XlVb
  source 1..225: mol_type = genomic DNA
agagtttgatcatggctcaggatgaacgctggcggcgtgcctaacacatgcaagtcgagcgaagttttaggaaagcttgctttccgaagaacttagcggcggacgggtgagtaacgtgtgggtaacttgccctatgcagagggataacagtgagaaatcactgctaatacctcataagctcacactttcacatgggagagtgagaaaagatttatcggcatagga

SEQ ID NO: 750 - DNA, 225 bp, unidentified
  misc_feature 1..225: note = Encodes 16S rRNA from Ehrlichia
  source 1..225: mol_type = genomic DNA
agagtttgatcatggctcagaacgaacgctggcggtatgctttaaccatgcaagtcgaacgagaaagggtagcaatacctgagtaaagtggcaaacgggtgagtaacacacaggaatctacccagtagaggggaataagcactggaaacggtgtctaatactccatacgccggtatagcaatatatcgggaaagggctagtagcaatattagttcactattggat

SEQ ID NO: 751 - DNA, 225 bp, unidentified
  misc_feature 1..225: note = Encodes 16S rRNA from Eubacterium
  source 1..225: mol_type = genomic DNA
agagtttgatcctggctcaggatgaacgctggcggcgtgcttaacacatgcaagtcgagcgagaatcgaggaaacgatacttcggtaaagcggaatcgaggacagcggcggacgggtgagtaacgcgtgggcaacctgccccttactggtggatagccgcgggaaactgcgagtaatacaccataatgcatcgatgagacatctcaatgatgccaaagatttatc

SEQ ID NO: 752 - DNA, 154 bp, unidentified
  misc_feature 1..154: note = Encodes 16S rRNA from Prevotella
  source 1..154: mol_type = genomic DNA
agagtttgatcatggctcagattgaacgctggcggcaggcttaacacatgcaagtcgtacggtaacagaggggaataaagtgaggtacgtgtacctttttgtatgtaccctatgaataaggaccggctaattccgtgccagcagccgcggtaat

SEQ ID NO: 753 - DNA, 225 bp, unidentified
  misc_feature 1..225: note = Encodes 16S rRNA from Clostridium XlVa
  source 1..225: mol_type = genomic DNA
agagtttgatcatggctcaggatgaacgctggcggcgtgcctaacacatgcaagtcgagcggagtttaggggaaggcggattcgtccaacggaacctaaacttagcggcggatgggtgaggaacgcgtggataacctaccgtgcacagggggataacagttggaaacgactgttaataccgcatatgctcacagtaccgcatggtacagggaggaaagatttatc

SEQ ID NO: 754 - DNA, 225 bp, unidentified
  misc_feature 1..225: note = Encodes 16S rRNA from Treponema
  source 1..225: mol_type = genomic DNA
agagtttgatcatggctcagaacgaacgctggcggcgcgtcttaagcatgcaagtcgaacggcaagatggtagcttgctactatcctagagtggcggactggtgagtaacacgtgggtgacgtacccttcagacggggatagctggtagaaatatcagataataccggatacgattctgtaagttagaggtacagaaggaaaggagctatggcttcgctgaagga

SEQ ID NO: 755 - DNA, 225 bp, unidentified
  misc_feature 1..225: note = Encodes 16S rRNA from Hydrogenoanaerobacterium
  source 1..225: mol_type = genomic DNA
agagtttgatcatggctcaggataaacgctggcggcgcacataagacatgcaagtcgaacgggaactttattgaagttatctgatataaagttctagtggcggactggtgagtaatgtataagcaacctgcctataagaggggaataacagtgagaaatcattgctaataccgcataagctgtgagaatggcatcattcaaacagaaaaggaagcaattccgctt

SEQ ID NO: 756 - DNA, 225 bp, unidentified
  misc_feature 1..225: note = Encodes 16S rRNA from Selenomonas
  source 1..225: mol_type = genomic DNA
agagtttgatcatggctcaggacgaacgctggcggcgtgcttaacacatgcaagtcgaacggggcgattgaaagcttgcttttatgagcctagtggcaaacgggtgagtaacgcgtgggcaacctgccggaaagatggggacaacatcccgaaaggggtgctaataccgaatgttgtatataaggcgcatgccttgtatattaaaggatctaatccgctttccga

SEQ ID NO: 757 - DNA, 225 bp, unidentified
  misc_feature 1..225: note = Encodes 16S rRNA from Saccharofermentans
  source 1..225: mol_type = genomic DNA
agagtttgatcatggctcaggatgaacgctggcggcgtgcataacacattcaagtcgaacggactcaggggcttcggccccgaaagtcagtggcggacgggtgagtaacgcgtgagcaacctgcctccggaagagggataacagttggaaacgactgctaataccgcataacactgcgagtacgcatgtacatgcagtcaaaggagcaatccgaccggagatggg

SEQ ID NO: 758 - DNA, 225 bp, unidentified
  misc_feature 1..225: note = Encodes 16S rRNA from Clostridium IV
  source 1..225: mol_type = genomic DNA
agagtttgatcctggctcaggattaacgctggcggcgtgcataacacattcaagtcgaacggacggaagagcttcggttcttacgtcagtggcggacgggtgagtaacgcgtgagcaatctgccctttacagcgggataacacagagaaatttgtgctaatacggcataacatatcggagtcgcatggcattggtatcaaagatttatcggtaaaggatgagctc

SEQ ID NO: 759 - DNA, 225 bp, unidentified
  misc_feature 1..225: note = Encodes 16S rRNA from Clostridium sensu stricto
  source 1..225: mol_type = genomic DNA
agagtttgatcatggctcaggacgaacgctggcggcgtgcctaacacatgcaagtcgagcggggactgcgcgacggacctgaagatttcggttggatgggaagatgcacagttctagcggcggacgggtgagtaacgcgtgagcaacctgtcccttacagggggataacacagcgaaagttgtactaataccgcataagaccacggcatcacatggtggtggggt

SEQ ID NO: 760 - DNA, 225 bp, unidentified
  misc_feature 1..225: note = Encodes 16S rRNA from Anaerovorax
  source 1..225: mol_type = genomic DNA
agagtttgatcatggctcaggatgaacgctggcggcgtgcctaacacatgcaagtcgagcgggagtataccaaacagagattcgtcgaagtaaggtatatgagagcggcggacgggtgagtaacgcgtaggtaacctaccttaagctgagggataacccagggaaacttgggataataccacataacgcggtgaagtcacatggctttaccgccaaagatttatc

SEQ ID NO: 761 - DNA, 225 bp, unidentified
  misc_feature 1..225: note = Encodes 16S rRNA from Spirochaeta
  source 1..225: mol_type = genomic DNA
agagtttgatcatggctcagaacgaacgctggcggcgcgttttaagcatgcaagtcgagcggtaagccggagcaatccggcctagagcggcggacgggtgagtaacacgtggataatctggcctacagtttgggatagcctggtgaaagccaggataataccggatacgacagttttaacagaagttaagattgggaaaggggctaaggcctcgctgaaggatga

SEQ ID NO: 762 - DNA, 225 bp, unidentified
  misc_feature 1..225: note = Encodes 16S rRNA from Brevundimonas
  source 1..225: mol_type = genomic DNA
agagtttgatcatggctcaggacgaacgctggcggcgtgcttcatacatgcaagtcgaacgagaatctctagcttgctagagaggaaagtggcggacgggtgagtaatatgtagagaatctgccctagagagggggacaacagagggaaactcctgctaataccccatatgagcgtacctgtgatggtattcttgaaaactccggtgctctaggatgagtctgca

SEQ ID NO: 763 - DNA, 225 bp, unidentified
  misc_feature 1..225: note = Encodes 16S rRNA from Eubacterium
  source 1..225: mol_type = genomic DNA
agagtttgatcctggctcaggatgaacgctggcggcgtgcctaacacatgcaagtcgagcgagaaacttttgtgatgaagcttcggtagattctttaaagtggaaagcggcggacgggtgagtaacgcgtaggcaacctgcccttagcagggggatagccattggaaacgatgattaaaaccccataatgcagagagttcacatgtattttctgccaaagattta

SEQ ID NO: 764 - DNA, 225 bp, unidentified
  misc_feature 1..225: note = Encodes 16S rRNA from Clostridium XlVa
  source 1..225: mol_type = genomic DNA
agagtttgatcatggctcaggatgaacgctggcggcgtgcctaacacatgcaagtcgaacggagttgtttctatccgacagatcatcttcggatgtgaagtcaccagaaacgcttagtggcggacgggtgagtaacgcgtgggcaacctgccctgcacagggggatagcggttggaaacgaccggtaataccgcataccttgtatttaacgcatgttagatataa

SEQ ID NO: 765 - DNA, 225 bp, unidentified
  misc_feature 1..225: note = Encodes 16S rRNA from Anaerovorax
  source 1..225: mol_type = genomic DNA
agagtttgatcctggctcaggatgaacgctggcggcgtgcctaacacatgcaagtcgagcgagaatcttagaagtgaagtttcgatggatcttttaagaggagagcggcggacgggtgagtaacgcgtaggcaacctgcctcacactgagggatacttccgggaaactggaactaatacctcataacgcgagagtttcacatgttactctcgccaaagatttatc

SEQ ID NO: 766 - DNA, 225 bp, unidentified
  misc_feature 1..225: note = Encodes 16S rRNA from Ruminococcus
  source 1..225: mol_type = genomic DNA
agagtttgatcctggctcaggacgaacgctggcggcacgcttaacacatgcaagtcgaacggagtattttggagcttgctctgagatgcttagtggcggacgggtgagtaacacgtgagcaacctgccttcaagtgcggaatagcttctggaaacggatggtaataccgcataatgttatctggccgcatgaccggataaccaaagaaattcgcttgaagatggg

SEQ ID NO: 767 - DNA, 225 bp, unidentified
  misc_feature 1..225: note = Encodes 16S rRNA from Papillibacter
  source 1..225: mol_type = genomic DNA
agagtttgatcatggctcaggacgaacgctggcggcgtgcttaacacatgcaagtcgaacggagttatttccgacacggagccacttgagagagtggttgcgtgttggggataacttagtggcgaacgggtgagtaacgcgtaagcaatctgccttacagagggggataacgtttggaaacgaacgctaataccgcataacgtcatgaagaggcatctttttatg

SEQ ID NO: 768 - DNA, 225 bp, unidentified
  misc_feature 1..225: note = Encodes 16S rRNA from Clostridium IV
  source 1..225: mol_type = genomic DNA
agagtttgatcatggctcaggatgaacgctggcggcgcgcctaacacatgcaagtcgaacggagttatcttattagatcccttcggggtgacgattttttaacttagtggcgaacgggtgagtaacgcgtgagtaacctgccttcaagagggggacaacagttggaaacgactgctaataccgcataacataacgaagccgcatgactttgttatcaaaggagca

SEQ ID NO: 769 - DNA, 225 bp, unidentified
  misc_feature 1..225: note = Encodes 16S rRNA from Hydrogenoanaerobacterium
  source 1..225: mol_type = genomic DNA
agagtttgatcatggctcaggatgaacgctggcggcgtgcctaacacatgcaagtcgaacggaactttttacggacaagacttcggtcaagtctgtttcaagtttagtggcggacgggtgagtaacgcgtgagcaacctgcctttcagagggggataacgttcggaaacgatcgctaataccgcataacatagggatatcgcatggtaaccctatcaaagatttt

SEQ ID NO: 770 - DNA, 225 bp, unidentified
  misc_feature 1..225: note = Encodes 16S rRNA from Asaccharobacter
  source 1..225: mol_type = genomic DNA
agagtttgatcatggctcaggatgaacgctggcggcgtgcttaacacatgcaagtcgaacgagaaagcaccttcgggtgtgagtagagtggcgaacgggtgagtaacacgtgagcaacctgcctttcacatcgggataacctatggaaacgtaagctaataccgaatactccatttccttcgcatgttggatctgggaaagctttagcggtgaaagatgggctcg

SEQ ID NO: 771 - DNA, 225 bp, unidentified
  misc_feature 1..225: note = Encodes 16S rRNA from Clostridium XlVa
  source 1..225: mol_type = genomic DNA
agagtttgatcctggctcaggatgaacgctggcggcgtgcttaacacatgcaagtcgaacgaagcagctttgaaggagatttcggtcaatggataagctgacttagtggcggacgggtgagtaacgcgtgggcaacctgcctcatggagggggacaacagttggaaacgactgctaataccgcataagaccaagcatcgcatgatgcaatggtaaaagatttatc

SEQ ID NO: 772 - DNA, 225 bp, unidentified
  misc_feature 1..225: note = Encodes 16S rRNA from Rhodocista
  source 1..225: mol_type = genomic DNA
agagtttgatcctggctcagaacgaacgctggcggcaggcttaacacatgcaagttgaacggtattgtgaagtgcttgcactgcacaagagagtagcgcactggtgagtaacacgtgggaacatgccctaaagtacgggatagcgtctggaaacggacgataatacggtatacgccctgagggggaaagatttatcgctttaggattggcccgcggaagattagg

SEQ ID NO: 773 - DNA, 225 bp, unidentified
  misc_feature 1..225: note = Encodes 16S rRNA from Clostridium XlVa
  source 1..225: mol_type = genomic DNA
agagtttgatcatggctcaggatgaacgctggcggcgtgcctaacacatgcaagtcgaacgagcgccttcgggtgcgagtggcggacgggtgagtaacgcgtgggtaacctgccttacacagggggacaacagttggaaacgactgctaataccgcataagcccacggaaccgcatggttctgtgagaaaagatttatcggtgtaagatggacccgcgtctgatt

SEQ ID NO: 774 - DNA, 225 bp, unidentified
  misc_feature 1..225: note = Encodes 16S rRNA from Beijerinckia
  source 1..225: mol_type = genomic DNA
agagtttgatcatggctcagaacgaacgctggcggcaggcttaacacatgcaagtcgaacggaacatagggtgcttgcactttatgtcagtggcgcacgggtgagtaacgcgtaggaacctgtcttttagcctgggatagcctctggaaacggagggtaaaaccggatgagccctgagggggaaatgagcaatcagctgaaagaggggcctgcgttagattaggc

SEQ ID NO: 775 - DNA, 225 bp, unidentified
  misc_feature 1..225: note = Encodes 16S rRNA from Lactobacillus
  source 1..225: mol_type = genomic DNA
agagtttgatcctggctcaggacgaacgctggcggcgtgcctaatacatgcaagtcgaacgaagctttctttcaccgaatgcttgcattcaccgaaagaagcttagtggcgaacgggtgagtaacacgtaggcaacctgcccaaaagagggggataacacttggaaacaggtgctaataccgcataaccatgaacaccgcatgatgttcatgtaaaagacggctt

SEQ ID NO: 776 - DNA, 225 bp, unidentified
  misc_feature 1..225: note = Encodes 16S rRNA from Cryptanaerobacter
  source 1..225: mol_type = genomic DNA
agagtttgatcatggctcaggacgaacgctggcggcatgcctaacacatgcaagtcgaacggaataggattggttgtagcgatactttcgatcctatttagtggcgaacgggtgagtaacacgtgagcaacctgccttttacacagggataacagccggaaacggctgctaataccggataagaccacaccgaggcatctcggaggggtcaaagcgatttagcgg

SEQ ID NO: 777 - DNA, 225 bp, unidentified
  misc_feature 1..225: note = Encodes 16S rRNA from Prevotella
  source 1..225: mol_type = genomic DNA
agagtttgatcctggctcaggatgaacgctagctacaggcttaacacatgcaagtcgaggggcatcactgggttggcttgccatccctggtggcgaccggcgcacgggtgagtaacgcgtatccaacctgccccgaaccgcggtatagcccgccgaaaggcggattaatcccgcatgtggtcgtgagatgacatctgaccacgactaaaggtattttccggttcg

SEQ ID NO: 778 - DNA, 225 bp, unidentified
  misc_feature 1..225: note = Encodes 16S rRNA from Anaerovibrio
  source 1..225: mol_type = genomic DNA
agagtttgatcctggctcaggacgaacgctggcggcgtgcttaacacatgcaagtcgaacggagcgaagaagagcttgctctttggagcttagtggcaaacgggtgagtaacgcgtaggcaacctgcccttcagatggggacaacacctcgaaaggggtgctaataccgaatgacgtgcattggtcgcatgaccgatgcaccaaaggccgggcaaccggtcactg

SEQ ID NO: 779 - DNA, 225 bp, unidentified
  misc_feature 1..225: note = Encodes 16S rRNA from Anaerovorax
  source 1..225: mol_type = genomic DNA
agagtttgatcatggctcaggatgaacgctggcggcgtgcctaacacatgcaagtcgagcgggaatctctaaagcagcttgctgcggaagagaggatagcggcggacgggtgagtaacgcgtaggtaagctgccccttgcagaaggatagcctcgggaaactgggattaatacttcataacacggctggtccgcatgaaccggccgtcaaagatttatcggcaag

SEQ ID NO: 780 - DNA, 225 bp, unidentified
  misc_feature 1..225: note = Encodes 16S rRNA from Lachnospiracea incertae sedis
  source 1..225: mol_type = genomic DNA
agagtttgatcctggctcaggatgaacgctggcggcgtgcttaacacatgcaagttgaacgaagaagtcagagtgcttgcactcaggcttactgagtggcggacgggtgagtaacgcgtgggtaacctgcctcacacagggggataacagtcggaaacgactgctaataccgcataagcgcacagtgccgcatgacacagtgtgaaaaactccggtggtgtgaga

SEQ ID NO: 781 - DNA, 225 bp, unidentified
  misc_feature 1..225: note = Encodes 16S rRNA from Enterorhabdus
  source 1..225: mol_type = genomic DNA
agagtttgatcctggctcaggatgaacgctggcggcgtgcctaacacatgcaagtcgaacggttaaaccgccctcgggcggacataaagtggcgaacgggtgagtaacacgtgaccaacctgccccgcgcaccgggacagccccccgaaagggggattgataccggatactccgccgggcccgcatgggcccggcgggaaagctccggcggcgcgggatggggtc

SEQ ID NO: 782 - DNA, 225 bp, unidentified
  misc_feature 1..225: note = Encodes 16S rRNA from Clostridium XlVb
  source 1..225: mol_type = genomic DNA
agagtttgatcctggctcaggatgaacgctggcggcgtgcataacacattcaagtcgaacgggacgttccgagtagcaatatgagggatgtttagtggcggacgggtgagtaacgcgtgagtaacctgcctgtgtgagggggacaacagatcgaaaggcctgctaataccgcatgacgtatggagatcgcatggttttcataccaaagatttatcgcacacagat

SEQ ID NO: 783 - DNA, 225 bp, unidentified
  misc_feature 1..225: note = Encodes 16S rRNA from Selenomonas
  source 1..225: mol_type = genomic DNA
agagtttgatcatggctcaggacgaacgctggcggcgtgcttaacacatgcaagtcgaacgaggtgattgaaagcttgcttttgagaaccgagtggcaaacgggtgagtaacgcgtagacaacctgccgcaaagatggggacaacagtccgaaaggactgctaataccgaatgttgtcagattcccgcatgggagactgattaaagatggcctctacttgtaagc

SEQ ID NO: 784 - DNA, 225 bp, unidentified
  misc_feature 1..225: note = Encodes 16S rRNA from Eubacterium
  source 1..225: mol_type = genomic DNA
agagtttgatcatggctcaggacgaacgctggcggcgtgcttaacacatgcaagtcgaacgaagcttgatttcagatttcttcggaatgacgaatgatatgactgagtggcggacgggtgagtaacgcgtgagcaacctaccctttggattgggatagcgtttggaaacgaacggtaataccgaataaagtatacggatggcatcatctgtataccaaagctccg

SEQ ID NO: 785 - DNA, 225 bp, unidentified
  misc_feature 1..225: note = Encodes 16S rRNA from Thermotalea
  source 1..225: mol_type = genomic DNA
agagtttgatcatggctcaggatgaacgctggcggcgtgcctaacacatgcaagtcgagcgagaagttcgcaacggaagcttcggccgaagatgcggatggacagcggcggacgggtgagtaacgcgtaggtaagctgccctatgcacagggatagcctcgggaaactgggattaatacctgatgaagcggtaggtacacatgtactaatcgccaaagatttatc

SEQ ID NO: 786 - DNA, 225 bp, unidentified
  misc_feature 1..225: note = Encodes 16S rRNA from Enterorhabdus
  source 1..225: mol_type = genomic DNA
agagtttgatcctggctcaggatgaacgctggcggcgtgcctaacacatgcaagtcgaacggttaagccggcttcggccgggaatacagtggcgaacgggtgagtaacacgtgaccaacctgccccccgcaccgggacagccccgcgaaagcgcggttaataccggataggcccccgcgcccgcatgggagcggggggaaagcccaggcggcgggggatggggtc

SEQ ID NO: 787 - DNA, 225 bp, unidentified
  misc_feature 1..225: note = Encodes 16S rRNA from Clostridium III
  source 1..225: mol_type = genomic DNA
agagtttgatcatggctcaggacgaacgctggcggcgtgcctaacacatgcaagtcgagcgatgatcggaggatgagaccttcgggtggattcttccgagattagcggcggatgggtgagtaacgcgtgggcaatctgccctccacagggggataacacagggaaacttgtgctaataccgcataacatcttcgggaggcatcttctgaagatcaaaggagcgat

SEQ ID NO: 788 - DNA, 225 bp, unidentified
  misc_feature 1..225: note = Encodes 16S rRNA from Acetanaerobacterium
  source 1..225: mol_type = genomic DNA
agagtttgatcctggctcaggacgaacgctggcggcgcgcctaacacatgcaagtcgaacggagatgaaaaaagcttgctttaatcatcttagtggcggacgggtgagtaacacgtgagcaacctgcctttcagagggggataacgtttggaaacgaacgctaataccgcataatgtatacggatggcatcgtctgtataccaaaggagcaatccgctgaaagat

SEQ ID NO: 789 - DNA, 225 bp, unidentified
  misc_feature 1..225: note = Encodes 16S rRNA from Treponema
  source 1..225: mol_type = genomic DNA
agagtttgatcctggctcagaacgaacgctggcggcgcgtcttaagcatgcaagtcgggcgggattcatgtgcttgcacatgatgagagcggcggactggcgaggagcgcgtgggtgacgcaccccccggacggggacagccggcagaaatgccgggtgataccggatgaggtcccccttgttggaggagggggaggaaaggggcttcggccccgccgggggagc

SEQ ID NO: 790 - DNA, 225 bp, unidentified
  misc_feature 1..225: note = Encodes 16S rRNA from Clostridium XlVa
  source 1..225: mol_type = genomic DNA
agagtttgatcatggctcaggatgaacgctggcggcgtgcctaacacatgcaagtcgaacggtgaaaggggacggaaccctccggggggaagtaacctggaacagtggcggacgggtgagtaacgcgtggataacctgcctcatacagggggataacagagagaaatcactgctaataccgcataagcgcacgagggccgcatggcccggtgtgaaaaactccgg

SEQ ID NO: 791 - DNA, 164 bp, unidentified
  misc_feature 1..164: note = Encodes 16S rRNA from Enterorhabdus
  source 1..164: mol_type = genomic DNA
agagtttgatcatggctcaggatgaacgctggcggcgtgcctaacacatgcaagtcgaacgaagcacttttgcattcgaggaagacagcgtataaataaatgcgctatttgacgttagagtgtgaataagcaccggcaaactccgtgccagcagccgcggtaat

SEQ ID NO: 792 - DNA, 225 bp, unidentified
  misc_feature 1..225: note = Encodes 16S rRNA from Prevotella
  source 1..225: mol_type = genomic DNA
agagtttgatcatggctcaggatgaacgctagctacaggcttaacacatgcaagtcgaggggcagcatgaacttagcttgctaagtttgatggcgaccggcgcacgggtgagtaacgcgtatccaacctgccccgaggtcagggacagcccggcgaaagtcggattaatacctgatggtctctttagatggcatctgacgaggagtaaagattcatcgccttggg

SEQ ID NO: 793 - DNA, 225 bp, unidentified
  misc_feature 1..225: note = Encodes 16S rRNA from Desulfovibrio
  source 1..225: mol_type = genomic DNA
agagtttgatcctggctcaggacaaacgctggcggcgtgcctaacacatgcaagtcgaacgagcccttcggggctagtggcagacgggtgagtaacgcgtaggtaatgtacctcttcgctggggataccgttccgaaaggaacgttaataccgaatgaattcatcgggcggcatcgcttgatgaataaaccgcaagggcgaggagatcagcttgcgtactatcag

SEQ ID NO: 794 - DNA, 225 bp, unidentified
  misc_feature 1..225: note = Encodes 16S rRNA from Aminobacter
  source 1..225: mol_type = genomic DNA
agagtttgatcatggctcagaacgaacgctggcggcaggcttaacacatgcaagtcgagcgccccgcaaggggagcggcagacgggtgagtaacgcgtgggaatctacccatctctacggaataactcagggaaacttgtgctaataccgtatacgcccttcgggggaaagatttatcggagatggatgagcccgcgttggattagctagttggtggggtaatgg

SEQ ID NO: 795 - DNA, 225 bp, unidentified
  misc_feature 1..225: note = Encodes 16S rRNA from Clostridium IV
  source 1..225: mol_type = genomic DNA
agagtttgatcctggctcaggacgaacgctggcggcgtgcctaacacatgcaagtcgaacggagatattcgaatgagattcgttgattttgaatatcttagtggcggacgggtgagtaacgcgtgagtaacctgccgatgagtgtggaataacgttctgaaaagaacgctaataccgcataacatatttttgccgcatgacagaagtatcaaagatttatcgctc

SEQ ID NO: 796 - DNA, 225 bp, unidentified
  misc_feature 1..225: note = Encodes 16S rRNA from Rikenella
  source 1..225: mol_type = genomic DNA
agagtttgatcatggctcaggatgaacgctagcggcaggcttaacacatgcaagtcgaggggcagcgcgaggtagcaatactttggcggcgaccggcgcaagggtgcgtaacgcgtgagcaacttgcccgtaacaggaggataaccggaggaaactccgactaatactgcgtagaaataattggtggcatcaccgagtgtttaaaggcgaaagccggttacggat

SEQ ID NO: 797 - DNA, 225 bp, unidentified
  misc_feature 1..225: note = Encodes 16S rRNA from Gordonibacter
  source 1..225: mol_type = genomic DNA
agagtttgatcatggctcaggatgaacgctggcggcgtgcctaacacatgcaagtcgaacgattaaaccgccttcgggcggatataaagtggcgaacgggtgagtaacacgtaaccaacctaccccgcacactgggacagcctcgcgaaagcgggattaataccagatactccttatgttacgcatgttttataagggaaagcttttgcggtgcgggatggggtt

SEQ ID NO: 798 - DNA, 225 bp, unidentified
  misc_feature 1..225: note = Encodes 16S rRNA from Papillibacter
  source 1..225: mol_type = genomic DNA
agagtttgatcctggctcaggatgaacgctggcggcgtgcataacacattcaagtcgaacgaagcatatggttggaagttttcggacggaagagcatatgacttagtggcggacgggtgagtaacgcgtgagcaaccttcctgcatgtgagggataacacagggaaacttgtgctaataccgcataacgcatgactgtcgcatggcagacatgccaaagaataat

SEQ ID NO: 799 - DNA, 225 bp, unidentified
  misc_feature 1..225: note = Encodes 16S rRNA from Syntrophococcus
  source 1..225: mol_type = genomic DNA
agagtttgatcatggctcaggatgaacgctggcggcgtgcctaacacatgcaagtcgaacgaggctcttccctttgaagtttcgacagattagggaagatcaccgagtggcggatgggtgagtaacgcgtggagaacctgcccccatcagggggataacaactggaaacggttgataataccgcatatatgataggaccgcatgattctatcaggaaagatttat

SEQ ID NO: 800 - DNA, 225 bp, unidentified
  misc_feature 1..225: note = Encodes 16S rRNA from Clostridium sensu stricto
  source 1..225: mol_type = genomic DNA
agagtttgatcatggctcaggatgaacgctggcggcgtgtttaatacatgcaagtcgaacgaggtatagcaatataccgagtggcgaacgggtgagtaacacgtgagcaacctgccctatacagggggacaacagctggaaacggctgctaataccgcataagaccacagcatcgcatgatgcaggggtaaaaggctacggtcagtataggatgggctcgcgcac

SEQ ID NO: 801 - DNA, 154 bp, unidentified
  misc_feature 1..154: note = Encodes 16S rRNA from Hahella
  source 1..154: mol_type = genomic DNA
agagtttgatcatggctcagattgaacgctggcggcaggcttaacacatgcaagtcgtacggtaacagaggaagacagcacgtaaataaacgtgttatttgacgttagagtgtgaataagcaccggcaaactccgtgccagcagccgcggtaat

SEQ ID NO: 802 - DNA, 225 bp, unidentified
  misc_feature 1..225: note = Encodes 16S rRNA from Vampirovibrio
  source 1..225: mol_type = genomic DNA
agagtttgatcatggctcaggacgaacgctggcggtgtgcctcatacatgcaagtcgaacgataaggtttcttcggaaatacataagtggcggacgggtgagtacaacataggaaatctgccctaaactgggggacaacagagggaaacttctgctaataccccatacgagctagcttgaaatagctatcttgaaagctccggcggtttaggatgagcctgtgcc

SEQ ID NO: 803 - DNA, 225 bp, unidentified
  misc_feature 1..225: note = Encodes 16S rRNA from Coprococcus
  source 1..225: mol_type = genomic DNA
agagtttgatcatggctcaggatgaacgctggcggcgtgcctaacacatgcaagtcgaacggggtgtcaatcttcggaaagacacttagtggcggacgggtgagtaacgcgtgggtaacctgcctcatacagggggatagcagttggaaacgactgataataccgcataagcgcacagtaccgcatggtacagtgtgaaaaactccggtggtatgagatggaccc

SEQ ID NO: 804 - DNA, 225 bp, unidentified
  misc_feature 1..225: note = Encodes 16S rRNA from Coraliomargarita
  source 1..225: mol_type = genomic DNA
agagtttgatcatggctcagagtgaacgctggcgacgtggctaagacatgcaagtcgagcgagaaggtgccttcgggtgccggaaagcggcaaacgggtgcgtaacacgtaagtaacctgcccttaagacgggaatagcttgatgaaaattgagataatgcccgatattaaattcttccgcatggaagaggtttgaaaggtttgtgatggcgcttaaggaggggc

SEQ ID NO: 805 - DNA, 225 bp, unidentified
  misc_feature 1..225: note = Encodes 16S rRNA from Clostridium III
  source 1..225: mol_type = genomic DNA
agagtttgatcctggctcaggacgaacgctggcggcgtgcctaacacatgcaagtcgagcggagccatcttgaagatcccttcggggtgatttaggggaagcttagcggcggacgggtgagtaacacgtgagtaacctgcccttatgaggaggataacacaccgaaaggtgtgctaatactgcataatatatatttttcgcatggagaatatatcaaagatttat

SEQ ID NO: 806 - DNA, 225 bp, unidentified
  misc_feature 1..225: note = Encodes 16S rRNA from Clostridium XlVa
  source 1..225: mol_type = genomic DNA
agagtttgatcatggctcaggatgaacgctggcggcgtgcctaacacatgcaagtcgaacgaagctttgcttatgattttttcggaatgattaagtgaatgactgagtggcggacgggtgagtaacgcgtggataacctgccctttgcagggggataacagccggaaacgactgctaataccgcataagcgcacagcaccgcatggtgcagtgtgaaaaactccg

SEQ ID NO: 807 - DNA, 225 bp, unidentified
  misc_feature 1..225: note = Encodes 16S rRNA from Desulfotomaculum
  source 1..225: mol_type = genomic DNA
agagtttgatcctggctcaggacgaacgctggcggcgtgcttaacacatgcaagtcgaacggagcggagcccttcggggccgagcttagtggcggacgggtgagtaacacgtgagcaacctgcccattacagggggatagcagctggaaacggctggtaataccgcataagaccgcggaaccgcatggttcagaggtaaaaggagagatccggtaatggatgggc

SEQ ID NO: 808 - DNA, 225 bp, unidentified
  misc_feature 1..225: note = Encodes 16S rRNA from Helicobacter
  source 1..225: mol_type = genomic DNA
agagtttgatcatggctcagagttaacgctggcggcgtgcctaacacatgcaagtcgagcgagtgcttgtaaagactagcggcaaacgggtgagtaacacatgggaaaccttccttagaatgggggacatctccgtgaaaacggagctaataccgcataagaccacagtttggcatcagacaggggtaaaagcagtgatgtgttctaagatggtcctgtgtccta

SEQ ID NO: 809 - DNA, 225 bp, unidentified
  misc_feature 1..225: note = Encodes 16S rRNA from Syntrophococcus
  source 1..225: mol_type = genomic DNA
agagtttgatcatggctcaggatgaacgctggcggcgtgcctaacacatgcaagtcgaacgggaacctcatagtggagacttcggtcaaagcagtgagaattctagtggcggatgggtgagtaacgcgtgggtaacctgcctacaagaattggataacagcgagaaattgttgctaatacaatataagcttacagtatcgcatgatacagtgagaaaagatttat

SEQ ID NO: 810 - DNA, 208 bp, unidentified
  misc_feature 1..208: note = Encodes 16S rRNA from Lachnospiracea incertae sedis
  source 1..208: mol_type = genomic DNA
agagtttgatcctggctcaggatgaacgctagctacaggcttaacacatgcagcagtggggaatattgcacaatggaggaaactctgatgcagcgacgccgcgtgagcgatgaagtatttcggtatgtaaagctctatcagcagggaagataatgacggtacctgactaagaagctccggctaaatacgtgccagcagccgcggtaat

SEQ ID NO: 811 - DNA, 225 bp, unidentified
  misc_feature 1..225: note = Encodes 16S rRNA from Clostridium IV
  source 1..225: mol_type = genomic DNA
agagtttgatcatggctcaggatgaacgctggcggcgtgcttaacacatgcaagtcgaacggagctatattggaaggaccttcggggacggaagatatagcttagtggcggacgggtgagtaacgcgtgagtaacctggcctcaagagggggacaacagctggaaacggctgctaataccgcataacataatggagtcgcatggctctgttatcaaaggagcaat

SEQ ID NO: 812 - DNA, 225 bp, unidentified
  misc_feature 1..225: note = Encodes 16S rRNA from Paludibacter
  source 1..225: mol_type = genomic DNA
agagtttgatcatggctcaggatgaacgctagcgacaggcctaacacatgcaagtcgaggggcagcacgagtgaagcttgctttacttggtggcgaccggcgcacgggtgcgtaacgcgtatgcaacctgtccataaccgagggatagcctcccgaaagggagattaaaacttcatgtgccacatgagggcatccgagagtggtaaaacgtttgggttatggttg

SEQ ID NO: 813 - DNA, 225 bp, unidentified
  misc_feature 1..225: note = Encodes 16S rRNA from Lachnospiracea incertae sedis
  source 1..225: mol_type = genomic DNA
agagtttgatcatggctcaggatgaacgctggcggcgtgcctaacacatgcaagtcgaacgggactcatagtgacggagatttcggtcaaagaagctttgagtccagtggcggacgggtgagtaacgcgtggggaacctgccctgtaccgggggataacagtgagaaatcactgctaataccgcataagcgcacatggtcgcatgaccgggtgtgaaaagctccg

SEQ ID NO: 814 - DNA, 225 bp, unidentified
  misc_feature 1..225: note = Encodes 16S rRNA from Lachnospiracea incertae sedis
  source 1..225: mol_type = genomic DNA
agagtttgatcctggctcaggatgaacgctggcggcgcgcttaacacatgcaagtcgaacgagatgagtggcttcggtcatgaatctagtggcggacgggtgagtaacgcgtggacaacttgccttatagtgggggatagccgaaagaaatttcgattaataccgcataatacaatttggttgcatgatcagattgggaaaggcttcggtcgctaaaagaaaggt

SEQ ID NO: 815 - DNA, 225 bp, unidentified
  misc_feature 1..225: note = Encodes 16S rRNA from Adhaeribacter
  source 1..225: mol_type = genomic DNA
agagtttgatcctggctcaggatgaacgctggcggcaggcttaatacatgcaagtcgaacggtaaggtccgaggtagcaataccgaggatacacgagtggcgcacgggtgcgtaacgcgtatgcaacctacctttgactggaacataacgttgagaaatcggcgctaatattccatgtggttatgacccggcatcgggatgtaactaaagatttattggtcaagg

SEQ ID NO: 816 - DNA, 225 bp, unidentified
  misc_feature 1..225: note = Encodes 16S rRNA from Clostridium IV
  source 1..225: mol_type = genomic DNA
agagtttgatcatggctcaggatgaacgctggcggcgtgcataacacattcaagtcgaacggacatattgacttcggttggtatgttagtggcggacgggtgagtaacgcgtgagcaacctgcccctatgtgcgggataacggctggaaacggacgctaataccgcataacccaacggaaccgcatgattttgttggcaaagatttattgcatagggatgggctc

SEQ ID NO: 817 - DNA, 225 bp, unidentified
  misc_feature 1..225: note = Encodes 16S rRNA from Cryptanaerobacter
  source 1..225: mol_type = genomic DNA
agagtttgatcatggctcaggacgaacgctggcggcgtgcttaatacatgcaagtcgaacggatatgtagcaatacatattagtggcggacgggtgagtaacgcgtaaccaacctgccttttacaggggaataacacttggaaacaggtgctaataccgcatatgaccacaacgcggcatcgcgaaggggtaaaagttttatcggtaaaagagggggttgcgtat

SEQ ID NO: 818 - DNA, 225 bp, unidentified
  misc_feature 1..225: note = Encodes 16S rRNA from Idiomarina
  source 1..225: mol_type = genomic DNA
agagtttgatcggccacattgggactgagacacggcccagactcctacgggaggcagcagtggggaatattgcacaatgggggaaaccctgatgcagccatgccgcgtgtgtgaagaaggccttcgggttgtaaagcacttttgcattcgaggaagacagcgtataaataaatgcgctatttgacgttagagtgtgaataagcaccggcaaactccgtgccagca

SEQ ID NO: 819 - DNA, 225 bp, unidentified
  misc_feature 1..225: note = Encodes 16S rRNA from Clostridium IV
  source 1..225: mol_type = genomic DNA
agagtttgatcatggctcaggacgaacgctggcggcgtgcttaacacatgcaagtcgaacgaggaatgtttgaaagcttgcttttgaacatttcgagtggcggacgggtgagtaacgcgtgaggaacctgtctttcacagggggataacgttccgaaagggacgctaataccgcatgagaccacggtgccgcatggcacaggggtcaaaggagagatccggtgaa

SEQ ID NO: 820 - DNA, 225 bp, unidentified
  misc_feature 1..225: note = Encodes 16S rRNA from Selenomonas
  source 1..225: mol_type = genomic DNA
agagtttgatcctggctcaggacgaacgctggcggcgtgcttaacacatgcaagtcgaacgaggtgattgaaagcttgcttttgagaaccgagtggcaaacgggtgagtaacgcgtagacaacctgccgcaaagatggggacaacagtccgaaaggactgctaataccgaatgttgtcagtttctcgcatgagagactgattaaagatggcctctacttgtaagc

SEQ ID NO: 821 - DNA, 225 bp, unidentified
  misc_feature 1..225: note = Encodes 16S rRNA from Acetanaerobacterium
  source 1..225: mol_type = genomic DNA
agagtttgatcctggctcaggataaacgctggcggcgtgcataacacattcaagtcgaacgaagcacttcggaacgagacttcggtcaagggaagatttgacttagtggcggacgggtgagtaacgcgtgagcaatctgcctcggggtgcgggataacgtttggaaacgaacgctaataccgcatgacgcatacctttcgcatgtgaggtatgccaaaggtttac

SEQ ID NO: 822 - DNA, 225 bp, unidentified
  misc_feature 1..225: note = Encodes 16S rRNA from Bifidobacterium
  source 1..225: mol_type = genomic DNA
agagtttgatcatggctcaggatgaacgctggcggcgtgcttaacacatgcaagtcgaacgggatcggctggagcttgctccggccgtgagagtggcgaacgggtgagtaatgcgtgaccgacctgccccgtacaccggaatagctcctggaaacgggtggtaatgccggatgctccaatgcgatgcatgtcgcgttgggaaagatttcatcggtatgggatggg

SEQ ID NO: 823 - DNA, 225 bp, unidentified
  misc_feature 1..225: note = Encodes 16S rRNA from Clostridium XlVb
  source 1..225: mol_type = genomic DNA
agagtttgatcatggctcaggatgaacgctggcggcgtgcctaacacatgcaagtcgagcgaagaatgagaagcttgcttttcattacttagcggcggacgggtgagtaacgcgtgggtaacctgccctgtacaggggaataacagttagaaatgactgctaatgccccataagccgacgtaatggcatctttatgtcggaaaagatttatcggtacaggaggga

SEQ ID NO: 824 - DNA, 225 bp, unidentified
  misc_feature 1..225: note = Encodes 16S rRNA from Asaccharobacter
  source 1..225: mol_type = genomic DNA
agagtttgatcatggctcaggatgaacgctggcggcgtgcttaacacatgcaagtcgaacgattaaaccggcttcggccggatatagagtggcgaacgggtgagtaacacgtgaccaacctaccccatactccgggataactcagggaaacttgtgctaataccggatactccgagaggatcgcatgttcttttcgggaaagcctttacggtatgggatggggtc

SEQ ID NO: 825 - DNA, 225 bp, unidentified
  misc_feature 1..225: note = Encodes 16S rRNA from Eubacterium
  source 1..225: mol_type = genomic DNA
agagtttgatcctggctcaggatgaacgctggcggcgtgcttaacacatgcaagtcgaacggaactcactttctgaagttttcggatggatgaaggtaagtttagtggcggacgggtgagtaacgcgtgggtaacctgccctgtacagggggataacagttagaaatgactgttaataccgcataagaccacagcaccgcatggtgcaggggtaaaagctccgac

SEQ ID NO: 826 - DNA, 225 bp, unidentified
  misc_feature 1..225: note = Encodes 16S rRNA from Anaeroplasma
  source 1..225: mol_type = genomic DNA
agagtttgatcctggctcaggattaacgctggcggcgtgcctaatacatgcaagtcgaatggtagtagcaatacaaaccatggcgaacgggtgagtaacacgtaggtaacctgtctttaagacgaggataaccattggaaacgatggataatactggataggacatcataaagggcatccttagatgtttaaagattattatgtcacttagagaggggcctgcgg

SEQ ID NO: 827 - DNA, 225 bp, unidentified
  misc_feature 1..225: note = Encodes 16S rRNA from Saccharofermentans
  source 1..225: mol_type = genomic DNA
agagtttgatcatggctcaggacgaacgctggcggcgtgcctaacacatgcaagtcgagcggagtaagtggagagcttgcttgaaacttacttagcggcggacgggtgagtaacgcgtgagcaacctgtcctctgcagggggataagacagcgaaagttgttctaataccgcataagaccacaacgtcacatggcgaaggggtcaaaggaggaatccggcagagg

SEQ ID NO: 828 - DNA, 225 bp, unidentified
  misc_feature 1..225: note = Encodes 16S rRNA from Ruminococcus
  source 1..225: mol_type = genomic DNA
agagtttgatcatggctcaggacgaacgctggcggcacgcctaacacatgcaagtcgaacggtgtcggaggtgcttgcaccaatgacatagtggcggacgggtgagtaacacgtgagcaacctgccttcaagaaagggatagcttctggaaacggatggtaataccttataatatatactggccgcatgaccggtgtatcaaacgaattttgcttgaagatgggc

SEQ ID NO: 829 - DNA, 225 bp, unidentified
  misc_feature 1..225: note = Encodes 16S rRNA from Clostridium III
  source 1..225: mol_type = genomic DNA
agagtttgatcctggctcaggacgaacgctggcggcgtgcctaacacatgcaagtcgagcggaggaaaccgaaagaagccttcgggtggattttggtggacttagcggcggacgggtgagtaacgcgtgagtaacctgcccataagagggggataatccttggaaacggggactaataccgcatatagagtatttgttgcatgattgatacttgaaagatttatc

SEQ ID NO: 830 - DNA, 225 bp, unidentified
  misc_feature 1..225: note = Encodes 16S rRNA from Acholeplasma
  source 1..225: mol_type = genomic DNA
agagtttgatcatggctcaggattaacgctggcggcatgcctaatacatgcaagtcgaacggtctagcttgctagacagtggcgaacgggtgagtaacacgtaggtaatccacccttaggacgaggatagcttctggaaacggaaggtaaaactggatagtatatagggaggcatcttcttatatttaaaagagcaatctacctaaggaagagcctgcggcgcat

SEQ ID NO: 831 - DNA, 225 bp, unidentified
  misc_feature 1..225: note = Encodes 16S rRNA from Pedobacter
  source 1..225: mol_type = genomic DNA
agagtttgatcctggctcaggatgaacgctagcggcaggcttaacacatgcaagtcgaggggcagcgggccgtagcaatacggtgccggcgaccggcggacgggtgcgtaacgcgtatgcaaccttccctgcacaggggtatagcccggcgaaagccggaataatcccccatagtttcaattttccgcatggagagttggataaacgggcgaccgggtgcaggat

SEQ ID NO: 832 - DNA, 225 bp, unidentified
  misc_feature 1..225: note = Encodes 16S rRNA from Sphingomonas
  source 1..225: mol_type = genomic DNA
agagtttgatcatggctcagagcgaacgctagcggcatgctttatacatgcaagtcgaacgaacgagtttatattgagtagcaatacgatttatgaatgagttagtggcgaacgggtgagtaatatataggaatttgcccagtagtgggggacaacagttagaaatgactgctaataccgcatacgcccgagaggggaaagatttatcgctattggagaagccta

SEQ ID NO: 833 - DNA, 225 bp, unidentified
  misc_feature 1..225: note = Encodes 16S rRNA from unidentified taxa
  source 1..225: mol_type = genomic DNA
agagtttgatcctggctcagaacgaacgctggtagcgtggattaggcatgcaagtcgaacgggatccgggaggtagcaatacttcctggtgagagtggcggattggggaggaacacgtgagcaacctgccttggagtcggggaaaaccgttggaaacgacggctaataccggatgtggcgcccggtgacatcatcggagcgctaaagggggccgcaaggctctcg

SEQ ID NO: 834 - DNA, 225 bp, unidentified
  misc_feature 1..225: note = Encodes 16S rRNA from Anaerovorax
  source 1..225: mol_type = genomic DNA
agagtttgatcatggctcaggatgaacgctggcggcgtgcctaacacatgcaagtcgagcgggaaatcctcaaaggaagcttcggcagactgagaggatggatagcggcggacgggtgagtaacgcgtaggtaagctgccccatgcacagggatagcctcgggaaactgggattaatacctgatgacaccgcgcattcacatggatatgcggtcaaagatttatc

SEQ ID NO: 835 - DNA, 225 bp, unidentified
  misc_feature 1..225: note = Encodes 16S rRNA from Spirochaeta
  source 1..225: mol_type = genomic DNA
agagtttgatcatggctcagaacgaacgctggcggtgcgtcttaagcatgcaagtcggacggcaagatagtagcttgctactatcctagagtggcggactggtgagtaacacgtgggtgacataccctttggctggggatagccggtagaaataccgggtaataccgaataagattctgcaggttagagtggcagaaagaaaggagcttcggcttcaccgaagga

SEQ ID NO: 836 - DNA, 225 bp, unidentified
  misc_feature 1..225: note = Encodes 16S rRNA from Paraeggerthella
  source 1..225: mol_type = genomic DNA
agagtttgatcctggctcaggatgaacgctggcggcgtgcctaacacatgcaagtcgaacggttaaggcgccttcgggcgcgaatagagtggcgaacgggtgagtaacacgtgaccaacctgccccgcgctccgggacagcctcgggaaaccgggattaataccggatgcgccggggggcgcgcatgcgccccccgggaaagcccaggcggcgcgggatggggtc

SEQ ID NO: 837 - DNA, 225 bp, unidentified
  misc_feature 1..225: note = Encodes 16S rRNA from Lachnospiracea incertae sedis
  source 1..225: mol_type = genomic DNA
agagtttgatcctggctcaggatgaacgctggcggcgcgcctaacacatgcaagtcgaacgaaatgagtagcttcggttacaagtttagtggcggacgggtgagtaacgcgtggataatttgcctttcagtgggggatagctgagagaaatctcaattaataccgcataacataatttattcgcatgagtgagttattaaagatgcaagtcgctggaagagaagt

SEQ ID NO: 838 - DNA, 225 bp, unidentified
  misc_feature 1..225: note = Encodes 16S rRNA from Bacteroides
  source 1..225: mol_type = genomic DNA
agagtttgatcctggctcaggatgaacgctagctacaggcttaacacatgcaagtcgaggggcagcattgaggttgcttgcaacttcagatggcgaccggcgaatgggtgagtaacgcgtatccaacctgccgtgtgctctgggatagcccttagaaatgaggattaatacgagatagtctcctttgatcgcctgagattaggagtaaagattcatcggcacacg

SEQ ID NO: 839 - DNA, 225 bp, unidentified
  misc_feature 1..225: note = Encodes 16S rRNA from Paenibacillus
  source 1..225: mol_type = genomic DNA
agagtttgatcatggctcaggatgaacgctggcggcgtgcctaatacatgcaagtcgaacggactgtagcaatacagttagtggcgaacgggtgagtaacacgtaggtaacctgccctcaagactgggatacccagacgaaagtttggctaataccggataacaactctggaggcatctctggagtttgaaaggcgcctttaaagcgccacttaaggatggacct

SEQ ID NO: 840 - DNA, 225 bp, unidentified
  misc_feature 1..225: note = Encodes 16S rRNA from Prevotella
  source 1..225: mol_type = genomic DNA
agagtttgatcctggctcaggatgaacgctagctacaggcttaacacatgcaagtcgaggggcagcatgaagattgcttgcaatctttgatggcgaccggcgcacgggtgcgtaacgcgtatcgaacctgccctgtacacggggatagccttgcgaaagcaagattaatacccgatgttttggcgatgccgcatgacattaccaacaaagatttatcggtacagg

SEQ ID NO: 841 - DNA, 225 bp, unidentified
  misc_feature 1..225: note = Encodes 16S rRNA from Bacteroides
  source 1..225: mol_type = genomic DNA
agagtttgatcatggctcaggatgaacgctagctacaggcttaacacatgcaagtcgaggggcagcatgaacttagcttgctaagtttgatggcgaccggcgcacgggtgagtaacgcgtatccaaccttccgtttactcggggatagcctttcgaaagaaagattaatacccgatggtatggtaatattgcatgataataccattaaagattaattggtaaacg

SEQ ID NO: 842 - DNA, 225 bp, unidentified
  misc_feature 1..225: note = Encodes 16S rRNA from Clostridium XlVa
  source 1..225: mol_type = genomic DNA
agagtttgatcctggctcaggatgaacgctggcggcgtgcttaacacatgcaagtcgaacgaagcatcccttgaaattttcggatggatggggatgacttagtggcggacgggtgagtaacgcgtgggtaacctgcctcatgcagggggacaacagctggaaacggctgctaataccgcataagaccccgtgagcgcatgctcaagaggtaaaagatttatcggc

SEQ ID NO: 843 - DNA, 225 bp, unidentified
  misc_feature 1..225: note = Encodes 16S rRNA from Clostridium XlVa
  source 1..225: mol_type = genomic DNA
agagtttgatcatggctcaggatgaacgctggcggcgtgcttaatacatgcaagtcgaacgggatagattgggagcttgctcttgatttatctagtggcggacgggtgagtaacgcgtgggtaacctgcctcatacagggggataacagttagaaatgactgctaaaaccgcataacattatggtaccgcatgatatcatgatcaaatatttataggtatgagat

SEQ ID NO: 844 - DNA, 225 bp, unidentified
  misc_feature 1..225: note = Encodes 16S rRNA from Roseburia
  source 1..225: mol_type = genomic DNA
agagtttgatcctggctcaggatgaacgctggcggcgtgcttaacacatgcaagtcgaacgaggtttaagcggaagcccttcgggacggaagcttttaccgagtggcggacgggtgagtaacgcgtgggtaacctgccctgtactgggggacaacagttggaaacgactgctaataccgcataagcgcacgagatcgcatggttttgtgtgaaaaactccggtgg

SEQ ID NO: 845 - DNA, 225 bp, unidentified
  misc_feature 1..225: note = Encodes 16S rRNA from Clostridium XlVa
  source 1..225: mol_type = genomic DNA
agagtttgatcatggctcaggatgaacgctggcggcgtgcctaacacatgcaagtcgaacggggtacagacgctgtgagaagaagtgcttgcacggaatcaaacttgtttgtacttagtggcggacgggtgagtaacgcgtggaaaacctgcctcatacagggggataacaggaagaaattcctgctaataccgcataagcgcacaaggtcgcatgatcaggtgt

SEQ ID NO: 846 - DNA, 225 bp, unidentified
  misc_feature 1..225: note = Encodes 16S rRNA from Clostridium III
  source 1..225: mol_type = genomic DNA
agagtttgatcatggctcaggacgaacgctggcggcgtgcctaacacatgcaagtcgaacggggaagagaagcttgcttttctttctagtggcggacgggtgagtaacgcgtgagcaacctacctatcagtgggggataacgtctggaaacagacgctaataccgcatatcgtacataattcgcatgaataagtgtatgaaaggagtaatttgctggtagatggg

SEQ ID NO: 847 - DNA, 225 bp, unidentified
  misc_feature 1..225: note = Encodes 16S rRNA from Pedobacter
  source 1..225: mol_type = genomic DNA
agagtttgatcctggctcaggatgaacgctagcggcaggcctaatacatgcaagtcgaacggtaaacgccccttcgggggtgtgagagtggcgcacgggtgcgtaacgcgtatgcaacccacccgctgccgggggatagcccggagaaatccgaattaataccccatgaggaggaggtgaggcatctcatctttttcaaaacttcggtggcggcggacgggcatg

SEQ ID NO: 848 - DNA, 225 bp, unidentified
  misc_feature 1..225: note = Encodes 16S rRNA from Robinsoniella
  source 1..225: mol_type = genomic DNA
agagtttgatcatggctcaggatgaacgctggcggcacgcttaacacatgcaagtcgagcggagaacagacttcggtttgttcttagcggcggacgggtgaggaacgcgtgggtaatctgccctatacaggggaataacactgagaaattagtgataaagccgcataagcccacgggatcgcatgatcctgcgggaaaaactccggtggtataggatgagcccgc

SEQ ID NO: 849 - DNA, 225 bp, unidentified
  misc_feature 1..225: note = Encodes 16S rRNA from Anaeroplasma
  source 1..225: mol_type = genomic DNA
agagtttgatcctggctcaggattaacgctggcggcatgcctaatacatgcaagtcgaacggaactagcttgctagttcagtggcgaacgggtgagtaacacgtaggtaatctacctttaggacgaggatagcttctggaaacggaaggtaaaactggatagtatattagagggcatcctttaatatttaaaagagcaatctacctagagaggagcctgcggccc

SEQ ID NO: 850 - DNA, 225 bp, unidentified
  misc_feature 1..225: note = Encodes 16S rRNA from Clostridium XlVa
  source 1..225: mol_type = genomic DNA
agagtttgatcctggctcaggatgaacgctggcggcgtgcctaacacatgcaagtcgaacggagtgcattaagcagattcttcggatgaagctttttacacttagtggcggacgggtgagtaacgcgtggagaacctgcctcacacagggggacagcagctggaaacggctgataataccgcatatgcccacgataccgcatggtattgcggggaaacatttatg

SEQ ID NO: 851 - DNA, 225 bp, unidentified
  misc_feature 1..225: note = Encodes 16S rRNA from Hydrogenoanaerobacterium
  source 1..225: mol_type = genomic DNA
agagtttgatcatggctcaggacgaacgctggcggcgcgcttaacacatgcaagtcgtacgaaatcagcaatggtttagtggcggacgggtgagtataacatgaataacttgcctcagagtgggggatagcttctggaaacagaagataataccgcatatttcgaatttttctcatgaatttttcggtaaagaagctttttcgctctgagatgggttcatgcccg

SEQ ID NO: 852 - DNA, 225 bp, unidentified
  misc_feature 1..225: note = Encodes 16S rRNA from Turicibacter
  source 1..225: mol_type = genomic DNA
agagtttgatcatggctcaggatgaacgctggcggcgtgcctaatacatgcaagtcgaacgaggttggtagcaatatcaaccgagtggcgaacgggtgagtaacacgtagggaacctgccctttagtttgggatacccagaggaaactttggctaataccggataattgttctggaggcatctccggaatctgaaaggggcctttaaagcctcgcttaaggatgg

SEQ ID NO: 853 - DNA, 225 bp, unidentified
  misc_feature 1..225: note = Encodes 16S rRNA from Papillibacter
  source 1..225: mol_type = genomic DNA
agagtttgatcatggctcaggataaacgctggcggcgtgcttaacacattcaagtcgaacggacggaggggagcttgctcccccgagttagtggcggacgggtgagtaacgcgtgagcaacctgccttttttcgggggataacacggggaaaccggtgctaataccgcataaagtaccgacatcgcatggtgatggtaccaaaggagcaatccgaggaaagatgg

SEQ ID NO: 854 - DNA, 225 bp, unidentified
  misc_feature 1..225: note = Encodes 16S rRNA from Clostridium XlVa
  source 1..225: mol_type = genomic DNA
agagtttgatcctggctcaggatgaacgctggcggcgtgcctaacacatgcaagtcgagcggacttatgataagattcttcggatgatttttataagttagcggcggatgggtgaggaacgcgtggagaacctgcccttcacagggggataacagctggaaacggctgttaataccgcatatgctcacggtggcgcatgtcacagggaggaaagctccggcggtg

SEQ ID NO: 855 - DNA, 225 bp, unidentified
  misc_feature 1..225: note = Encodes 16S rRNA from Saccharofermentans
  source 1..225: mol_type = genomic DNA
agagtttgatcatggctcaggacgaacgctggcggcgtgcctaacacatgcaagtcgagcgaggacaagggcttcggttcttgttcgagcggcggacgggtgagtaacgcgtgaacaatctgtccctgacaggggaataacacttggaaacaggtgctaataccgcataagaccacgggttcgcatgaaccaggggtaaaaggagagatccggtgaggggtgagt

SEQ ID NO: 856 - DNA, 225 bp, unidentified
  misc_feature 1..225: note = Encodes 16S rRNA from Clostridium XlVb
  source 1..225: mol_type = genomic DNA
agagtttgatcatggctcaggatgaacgctggcggcgtgcctaacacatgcaagtcgagcgaagttttagggaagcttgctttccgaagaacttagcggcggacgggtgagtaacgtgtgggtaacttgccctatgcagagggataacagtgagaaatcactgctaatacctcataagctcacaccttcacatggaggagtgagaaaagatttatcggcatagga

SEQ ID NO: 857 - DNA, 225 bp, unidentified
  misc_feature 1..225: note = Encodes 16S rRNA from Sporobacter
  source 1..225: mol_type = genomic DNA
agagtttgatcctggctcaggatgaacgctggcggcgtgcctaacacattcaagtcgaacggagaagggagcttcggctcccggatcagtggcggacgggtgagtaacgcgtgagcaacctgccttcgtgtggggaataacacagggaaacttgtgctaataccgcataatgcaaagacatagcattgtgactttgccaaagatttattgcatgaagatgggctc

SEQ ID NO: 858 - DNA, 225 bp, unidentified
  misc_feature 1..225: note = Encodes 16S rRNA from Asaccharobacter
  source 1..225: mol_type = genomic DNA
agagtttgatcatggctcaggatgaacgctggcggcgtgcttaacacatgcaagtcgaacgagaaagcaccttcgggtgtaagtagagtggcgaacgggtgagtaacacgtgagcaacctgcctctcactttggaataactcagagaaatttgagctaataccgaatacttcgtatctttcgcatgatcgatacgagaaagccttgtgcggtgagagatgggctc

SEQ ID NO: 859 - DNA, 225 bp, unidentified
  misc_feature 1..225: note = Encodes 16S rRNA from Bacteroides
  source 1..225: mol_type = genomic DNA
agagtttgatcatggctcaggatgaacgctagctacaggcttaacacatgcaagtcgaggggcagcattaggtcagcttgctgatttagatggcgaccggcgcacgggtgagtaacgcgtatccaacctgccccctacccggggatagccttgcgaaagtaagattaatacccggtgctgttgcgatcccgcatggggatgcaacgaaagattcatcggtagggg

SEQ ID NO: 860 - DNA, 225 bp, unidentified
  misc_feature 1..225: note = Encodes 16S rRNA from Anaeroplasma
  source 1..225: mol_type = genomic DNA
agagtttgatcatggctcaggattaacgctggcggcatgcctaatacatgcaagtcgaatgggaagcttgctttccatggcgaacgggtgagtaacacgtaggtaagccatacatcagacgaggataacctttggaaacgaaggataatactggataggatatttgatcgcatgattaaatatttaaagatttatcactgatggaagcacctgcggcgcattagc

SEQ ID NO: 861 - DNA, 225 bp, unidentified
  misc_feature 1..225: note = Encodes 16S rRNA from Sporobacter
  source 1..225: mol_type = genomic DNA
agagtttgatcctggctcaggacgaacgctggcggcgtgcctaacacatgcaagtcgaacgagaattcccggaaggagacttcggtcaacggaagggaaggacagtggcggacgggtgagtaacgcgtgagcaacctgcccttcggagggggacaacagctggaaacggctgctaataccgcataacgtatcacacaggcatctgagagataccaaagatttatc

SEQ ID NO: 862 - DNA, 225 bp, unidentified
  misc_feature 1..225: note = Encodes 16S rRNA from Streptomyces
  source 1..225: mol_type = genomic DNA
agagtttgatcctggctcaggacgaacgctggcggcgtgcttaacacatgcaagtcgaacgatgaagccgcttcggtggtggattagtggcgaacgggtgagtaacacgtgggcaatctgccctgcactctgggataagccctggaaacggggtctaataccggatgggactgctgggggcatcctctggtggtggaaagcttcggtggtgcaggatgagcccgc

SEQ ID NO: 863 - DNA, 225 bp, unidentified
  misc_feature 1..225: note = Encodes 16S rRNA from Arcobacter
  source 1..225: mol_type = genomic DNA
agagtttgatcctggctcagagtgaacgctggcggcgtgcttaacacatgcaagtcgaacgagaacggattatagcttgctataattgtcagctaagtggcgcacgggtgagtaatgtataggtaatatgcctcttactaagggataacaattggaaacgattgctaataccttatattcctttttatcaaaagataaaaagggaaagatttattggtaagagat

SEQ ID NO: 864 - DNA, 225 bp, unidentified
  misc_feature 1..225: note = Encodes 16S rRNA from Clostridium XlVa
  source 1..225: mol_type = genomic DNA
agagtttgatcctggctcaggatgaacgctggcggcgtgcctaacacatgcaagtcgaacggacccatggaaatgattagcttgctatgaaattccggaaggttagtggcggacgggtgagtaacgcgtgggcaacctgccctgtactgggggatagcagctggaaacggctggtaataccgcataagcgcacagtaccgcatggtacagtgtgaaaagctccga

SEQ ID NO: 865 - DNA, 225 bp, unidentified
  misc_feature 1..225: note = Encodes 16S rRNA from Barnesiella
  source 1..225: mol_type = genomic DNA
agagtttgatcatggctcaggatgaacgctagcgacaggcctaacacatgcaagtcgaggggcagcgggagcaaagcttgctttgcttgccggcgaccggcgcacgggtgagtaacgcgtatgcaacctgcctgtaacagggggataacccggagaaatccggcctaacaccgcataacacatgtaagccgcatggttttcatgtcaaatattcgtaggttacag

SEQ ID NO: 866 - DNA, 225 bp, unidentified
  misc_feature 1..225: note = Encodes 16S rRNA from Lactobacillus
  source 1..225: mol_type = genomic DNA
agagtttgatcatggctcaggacgaacgctggcggcgtgcctaatacatgcaagtcgagcgagcggaaccaacagatttacttcggtaatgacgttgggaaagcgagcggcggatgggtgagtaacacgtggggaacctgcccctaagtctgggataccatttggaaacaggtgctaataccggataagaaagcagatcgcatgatcagcttttaaaaggcggcg

SEQ ID NO: 867 - DNA, 225 bp, unidentified
  misc_feature 1..225: note = Encodes 16S rRNA from Flavobacterium
  source 1..225: mol_type = genomic DNA
agagtttgatcatggctcaggatgaacgctagcggcaggcttaacacatgcaagtcgaggggtaacaggcggtagcaatactgtgctgacgaccggcgcacgggtgcgtaacgcgtatgcaacctgcccgcgacagggggataacggagggaaacttccactaatatcccatggtgccgaggtctcgcatggggtttcggctaaaggggcgacccggttgcggat

SEQ ID NO: 868 - DNA, 225 bp, unidentified
  misc_feature 1..225: note = Encodes 16S rRNA from Victivallis
  source 1..225: mol_type = genomic DNA
agagtttgatcatggctcagaatgaacgctggcggcatggattaggcatgcaagtcgaacgccccgggcttgcccggggagtggcgaaagggtgcgcaacacgtgaggaacccgcccccgggtccgggacaagcgctggaaacggcgtctaataccggatgccgaccggaatcgcatgattccgcgtcgaaagtcttctcgcccggggaaggcctcgcgtcccat

SEQ ID NO: 869 - DNA, 225 bp, unidentified
  misc_feature 1..225: note = Encodes 16S rRNA from Clostridium XlVa
  source 1..225: mol_type = genomic DNA
agagtttgatcctggctcaggatgaacgctggcggcgtgcctaacacatgcaagtcgaacgatgaaatacggagacgagttttcggacgagaggaagtatggaatagtggcggacgggtgagtaacgcgtggataatctgccccatacagggggatagcagttggaaacgactgataacaccgcataagcgcacggagaggcatctctttgtgtgaaaatctacg

SEQ ID NO: 870 - DNA, 225 bp, unidentified
  misc_feature 1..225: note = Encodes 16S rRNA from Ureaplasma
  source 1..225: mol_type = genomic DNA
agagtttgatcctggctcaggattaacgctggcaccatgcctaatacatgcatgtcgagcggagtttagagagcttgctttctaaacttagcggcaaatgggtgagtaacacgtaaggaacctgcctaagcgacgaggacaacggttggaaacgactgctaatactggatagtataagaaaccgcatgatttcttatttaaaggtccgtttggaccacgcttaga

SEQ ID NO: 871 - DNA, 225 bp, unidentified
  misc_feature 1..225: note = Encodes 16S rRNA from Acetanaerobacterium
  source 1..225: mol_type = genomic DNA
agagtttgatcatggctcaggatgaacgctggcggcgcgcctaacacatgcaagtcgaacggacgaagctcttcggagccaagttagtggcgaacgggtgagtaacacgtgaggaacctgcctttcagagggggataacacttagaaataggtgctaataccgcataagaccacagagcggcatcgctcaggggtcaaaggagcaatccgctgaaagatggcctc

SEQ ID NO: 872 - DNA, 225 bp, unidentified
  misc_feature 1..225: note = Encodes 16S rRNA from Slackia
  source 1..225: mol_type = genomic DNA
agagtttgatcatggctcaggatgaacgctggcggcgtgcctaacacatgcaagtcgaacgattaaagcccctccgggggtgcatagagtggcgaacgggtgagtaacacgtgaccaacccgccccggacaccgggacaacgggcggaaacgcctgctaataccggatactccgcgacggacgcatgtccgacgcgggaaagcccaggcggtccgggatggggtc

SEQ ID NO: 873 - DNA, 225 bp, unidentified
  misc_feature 1..225: note = Encodes 16S rRNA from Lachnospiracea incertae sedis
  source 1..225: mol_type = genomic DNA
agagtttgatcctggctcaggatgaacgctggcggcgtgcctaacacatgcaagtcgagcggagataagcaccggatgaagatttatcggattccaccgcttatcttagcggcggatgggtgagtaacgcgtggataacctgccccttgcagggggataacaaccggaaacgggtgctaataccgcataggcgcgtaggaccgcatggtcctaagcgtaaagatt

SEQ ID NO: 874 - DNA, 225 bp, unidentified
  misc_feature 1..225: note = Encodes 16S rRNA from Oscillibacter
  source 1..225: mol_type = genomic DNA
agagtttgatcctggctcaggacaaacgctggcggcgtgcctaacacatgcaagtcgaacggagcttatcaccttcgggaggtaagcttagtggcggactggtgagtaacgcgtgagcaacctgcccttcagtgggggacaacagctggaaacggctgctaataccgcatgacgttagatgaaggcatcttcgtttaactaaagatttattgctgaaggatgggc

SEQ ID NO: 875 - DNA, 225 bp, unidentified
  misc_feature 1..225: note = Encodes 16S rRNA from Prevotella
  source 1..225: mol_type = genomic DNA
agagtttgatcatggctcaggatgaacgctagcgacaggcctaacacatgcaagtcgaggggcagcatggtcttagcttgctaagactgatggcgaccggcgcacgggtgagtaacgcgtatgcaacctttccgcgtccccgggacagtcggccgaaaggccgcgtaacaccgggcgttccgtttgaggggcatcccttgggcggaatacgcgagggtcgcgggt

SEQ ID NO: 876 - DNA, 225 bp, unidentified
  misc_feature 1..225: note = Encodes 16S rRNA from Proteiniphilum
  source 1..225: mol_type = genomic DNA
agagtttgatcatggctcaggatgaacgctagcggcaggcctaacacatgcaagtcgaggggcagcgggaggtagcaataccttgccggcgaccggcgcacgggtgcgtaacgcgtatgcaacctaccttcaacagggggataacccagagaaatccggactaataccccgtatagtagcgagaccgcatgatcttgctacgaaagcttcggtggttggagatgg

SEQ ID NO: 877 - DNA, 225 bp, unidentified
  misc_feature 1..225: note = Encodes 16S rRNA from Spirochaeta
  source 1..225: mol_type = genomic DNA
agagtttgatcatggctcagaacgaacgctggcggcgcgtcttaagcatgcaagtcgagcgggaaacagtagcttgctactgttgagagcggcggactggtgagtaacgcgtgggtgacgtaccctctggatggggatagctcctagaaataggaggtaataccgaatacgatgcacgggaacagaggccgtgcatgaaagtatcttttgatacgccggaggagc

SEQ ID NO: 878 - DNA, 225 bp, unidentified
  misc_feature 1..225: note = Encodes 16S rRNA from Ruminococcus
  source 1..225: mol_type = genomic DNA
agagtttgatcatggctcaggacgaacgctggcggcacgcctaacacatgcaagtcgaacggtgaatgaatagcttgctagacattcatagtggcggacgggtgagtaacacgtgagcaacctgcctctgagagagggatagcttctggaaacggatggtaatacctcatgatatagcgttctcgcatgggaatgctatcaaacgaaattcgctcagagatgggc

SEQ ID NO: 879 - DNA, 225 bp, unidentified
  misc_feature 1..225: note = Encodes 16S rRNA from Prevotella
  source 1..225: mol_type = genomic DNA
agagtttgatcctggctcaggatgaacgctagctacaggcttaacacatgcaagtcgaggggcatcgggagggaagcttgctttccttgccggcgaccggcgcacgggtgagtaacgcgtatccaacctgccgcacagtaggggatagcccggagaaatccggattaataccctatgttctccgagtcagtcatctgaattggagcaaaggttcgccgctgtgcg

SEQ ID NO: 880 - DNA, 225 bp, unidentified
  misc_feature 1..225: note = Encodes 16S rRNA from Butyricicoccus
  source 1..225: mol_type = genomic DNA
agagtttgatcctggctcaggataaacgctggcggcgcacataagacatgcaagtcgaacgggaactttattgaagtttactgatataaagttctagtggcggactggtgagtaatgtataagcaacctgcctataagaggggaataacagtgagaaatcattgctaataccgcataagctgtgagaatggcatcattcaaacagaaaaggaagcaattccgctt

SEQ ID NO: 881 - DNA, 225 bp, unidentified
  misc_feature 1..225: note = Encodes 16S rRNA from Devosia
  source 1..225: mol_type = genomic DNA
agagtttgatcatggctcagaacgaacgctggcggcaggcttaacacatgcaagtcaagggggtgtagcaatacacaaccggcgcacgggtgagtaacgcgtgggaatatgtccatttgtggggaatagcttctggaaacggaaggtaataccgcatacgccctacgggggaaagatttatcgcagatggagtggcccgcgttggattagctagttggttgggta

SEQ ID NO: 882 - DNA, 225 bp, unidentified
  misc_feature 1..225: note = Encodes 16S rRNA from Anaeroplasma
  source 1..225: mol_type = genomic DNA
agagtttgatcatggctcaggattaacgctggcggcgtgcctaatacatgcaagtcggatggttagcttgctaaccatggcgaacgggtgagtaacacgtaggtaacctgtcttaaagacgaggataaccattggaaacgatggataatactggataggatatataagggcatcctgatatatttaaagatttatcactttatgaggggcctgcggcgcattagt

SEQ ID NO: 883 - DNA, 225 bp, unidentified
  misc_feature 1..225: note = Encodes 16S rRNA from Oscillibacter
  source 1..225: mol_type = genomic DNA
agagtttgatcatggctcaggacgaacgctggcggcgtgcctaacacatgcaagtcgaacgaagctccgaaagcaacggtttcggccggagtggacggatgacttagtggcggacgggtgagtaacgcgtgagcaacctgcccttcagagggggacaacagttggaaacgactgctaataccgcataacgtaaggaaatggcatcatattcttaccaaagattta

SEQ ID NO: 884 - DNA, 225 bp, unidentified
  misc_feature 1..225: note = Encodes 16S rRNA from Barnesiella
  source 1..225: mol_type = genomic DNA
agagtttgatcatggctcaggatgaacgctagcgacaggcctaacacatgcaagtcgagggtgaagtttgaagtagcttgctacggataatggaaaccggcgcacgggtgcgtaacaggtatgcaatctatcctaagccgggggatagcccactgaaaagtggattaatactccatgtgccacgagggggcatccttttgtggtgaaacgtgagggcataggttg

SEQ ID NO: 885 - DNA, 225 bp, unidentified
  misc_feature 1..225: note = Encodes 16S rRNA from Atopobium
  source 1..225: mol_type = genomic DNA
agagtttgatcatggctcaggatgaacgctggcggcgcgcttaacacatgcaagtcgaacggttaaagcccttcggggtgaataaagtggcgaacggctgagtaacacgtgggcaacctacccctcacattgggatagcctcgggaaaccgggagtaataccgaatactccggacatctcgcatgggatgaccgggaaagctccggcggtgagggatgggcccgc

SEQ ID NO: 886 - DNA, 225 bp, unidentified
  misc_feature 1..225: note = Encodes 16S rRNA from Clostridium XlVa
  source 1..225: mol_type = genomic DNA
agagtttgatcatggctcaggatgaacgctggcggcgcgcataacacatgcaagtcgaacggagtcacattgaaacctagtgatttgtgacttagtggcggacgggtgagtaacgcgtgggtaacctgcctggtattgggggacaacagttagaaatgactgctaataccgcatacgacgtcggggaggcatctccctgacgggaaaggaattatccgatatcag

SEQ ID NO: 887 - DNA, 225 bp, unidentified
  misc_feature 1..225: note = Encodes 16S rRNA from Methanobrevibacter
  source 1..225: mol_type = genomic DNA
agagtttgatcctggcagatgctactgctattgggattcgattaagccatgcaagtcgaacgagtttaggctcgtggcgtacggctcagtaacacgtggataacctacccttaggactgggataaccctgggaaactggggataataccggataggcaatttttcctgtaatggttttttgtttaaatgttttttcgcctaaggatgggtctgcggccgattagg

SEQ ID NO: 888 - DNA, 225 bp, unidentified
  misc_feature 1..225: note = Encodes 16S rRNA from Butyricimonas
  source 1..225: mol_type = genomic DNA
agagtttgatcatggctcaggatgaacgctagcggcaggcttaacacatgcaagtcgaggggcagcgcgtcgtagcaatacgatggcggcgaccggcggaagggtgcgtaacgcgtgagcaacttgcccgtcactgtgggataggcactggaaacggtgtgtaataccacgtaacactacgagctgcatggtttgtagttgaaagattcattggtgacggatagg

SEQ ID NO: 889 - DNA, 225 bp, unidentified
  misc_feature 1..225: note = Encodes 16S rRNA from Butyricimonas
  source 1..225: mol_type = genomic DNA
agagtttgatcctggctcaggatgaacgctagcggcaggcttaacacatgcaagtcgaggggcagcgcgttgtagcaatacgatggcggcgaccggcgcaagggtgcgtaacgcgtgagcaacatgcccgcaacagggggataaccggaggaaactccgactaataccccataaggacgtaggacggcatcgtccagcatctaaacttacgagggttgcggattg

SEQ ID NO: 890 - DNA, 225 bp, unidentified
  misc_feature 1..225: note = Encodes 16S rRNA from Asaccharobacter
  source 1..225: mol_type = genomic DNA
agagtttgatcatggctcaggatgaacgctggcggcgtgcctaacacatgcaagtcgaacggttaaaccggcttcggccggatatagagtggcgaacgggtgagtaacacgtgaccaacctgccccccgctccgggataacccagggaaacctgcgctaataccggatactccgcccgggccgcatggcccgggcgggaaagcccagacggcgggggatggggtc

SEQ ID NO: 891 - DNA, 225 bp, unidentified
  misc_feature 1..225: note = Encodes 16S rRNA from Enhydrobacter
  source 1..225: mol_type = genomic DNA
agagtttgatcatggctcagattgaacgctggcggcaggcttaacacatgcaagtcgaacgatgaaactctagcttgctagagatgattagtggcggacgggtgagtaacatttaggaatctgcctagtagtgggggatagctcggggaaactcgaattaataccgcatacgacctacgggtgaaagggggcgcaagctcttgctattagatgagcctaaatcag

SEQ ID NO: 892 - DNA, 225 bp, unidentified
  misc_feature 1..225: note = Encodes 16S rRNA from Treponema
  source 1..225: mol_type = genomic DNA
agagtttgatcatggctcagaatgaacgctggcggcgggtcttaagcatgcaagtcggacggcaagaaagtgcttgcactttcctagagtggcggactggtgaggaacacgttggtgacgtaccctttggatggggatagccggtagaaataccgggtaataccgaataaggtcggtggtcttggaagccaccgaggaaagcggctttggccgcgccgaaggaac

SEQ ID NO: 893 - DNA, 225 bp, unidentified
  misc_feature 1..225: note = Encodes 16S rRNA from Clostridium XlVa
  source 1..225: mol_type = genomic DNA
agagtttgatcatggctcaggatgaacgctggcggcgtgcttaacacatgcaagtcgaacgaagcatgagtgatgagtaatctgatctcatgacttagtggcggacgggtgagtaacgcgtgggtaacctacctcacacagggggataacagttggaaacgactgctaaaaccgcataacatggcgataccgcatgacattgccatcaaatatttataggtgtga

SEQ ID NO: 894 - DNA, 225 bp, unidentified
  misc_feature 1..225: note = Encodes 16S rRNA from Adlercreutzia
  source 1..225: mol_type = genomic DNA
agagtttgatcctggctcaggatgaacgctggcggcgtgcttaacacatgcaagtcgaacgattaacccatcttcggatggttataaagtggcgaacgggtgagtaacacgtgaccaacctgcctttcacattgggataactaagggaaactgtagctaataccaaatactccggcacctccgcatggtagtgccgggaaagctccggcggtgaaagatggggtc

SEQ ID NO: 895 - DNA, 225 bp, unidentified
  misc_feature 1..225: note = Encodes 16S rRNA from Prevotella
  source 1..225: mol_type = genomic DNA
agagtttgatcctggctcaggatgaacgctagctacaggcttaacacatgcaagtcgcggggcagcgggagagaagcttgcttttcttgccggcgaccggcgcacgggtgcgtaacgcgtatcgaacctgccccagtcagggggacagccctctgaaaggaggattaataccccatggttccctgtgtccgcatggacgttgggataaaggagagattcggactg

SEQ ID NO: 896 - DNA, 225 bp, unidentified
  misc_feature 1..225: note = Encodes 16S rRNA from Pseudoflavonifractor
  source 1..225: mol_type = genomic DNA
agagtttgatcatggctcaggatgaacgctggcggcgcgcctaacacatgcaagtcgaacggtgaagtcccttcgggggctgatcagtggcggacgggtgagtaacgcgtgaggaacctgcccttatgagcggaataacgtcgggaaactgacgctaataccgcataatgcatcaccggggcatcgcggtgatgccaaagcttcggcgcataaggatggactcgc

SEQ ID NO: 897 - DNA, 225 bp, unidentified
  misc_feature 1..225: note = Encodes 16S rRNA from Syntrophococcus
  source 1..225: mol_type = genomic DNA
agagtttgatcatggctcaggatgaacgctggcggcgtgcttaacacatgcaagtcgaacgagaaccttacgacggagacttcggttgaagatgtaagaattctagtggcggacgggtgagtaacgcgtgggtaacctgcccatgagaggaggataacagggagaaattcttgctaatactctatatgcttacggtatcgcatgatactgtgaggaaatgaattt

SEQ ID NO: 898 - DNA, 225 bp, unidentified
  misc_feature 1..225: note = Encodes 16S rRNA from Clostridium IV
  source 1..225: mol_type = genomic DNA
agagtttgatcatggctcaggatgaacgctggcggcgtgcctaacacatgcaagtcgaacgaagctcctgatttgatcccctcggggtaatttgacggatgacttagtggcggacgggtgagtaacgcgtgagcaacctgcctttcagagggggataacggttggaaacgaccgctaataccgcataacacagaggaaccgcatgattcttttgtcaaagctgag

SEQ ID NO: 899 - DNA, 225 bp, unidentified
  misc_feature 1..225: note = Encodes 16S rRNA from Demequina
  source 1..225: mol_type = genomic DNA
agagtttgatcatggctcaggacgaacgctggcggcgtgcttaacacatgcaagtcgaacggtgaacctggagcttgctccgggggatcagtggcgaacgggtgagtaacacgtgagtaacctgccccagacactgggataacctcgggaaaccggggctaataccggatacgagacgctcgggcatccgaagcgtctggaaagatttatcggtctgggatggac

SEQ ID NO: 900 - DNA, 225 bp, unidentified
  misc_feature 1..225: note = Encodes 16S rRNA from Lachnospiracea incertae sedis
  source 1..225: mol_type = genomic DNA
agagtttgatcctggctcaggatgaacgctggcggcgtgcttaacacatgcaagtcgaacggaacatttcgcccgatgattgaagtagcttgctacggattgaatcaactgaaatgtttagtggcggacgggtgagtaacgcgtgggtaacctaccttacacagggggataacagttagaaatgactgctaataccgcataagcgcacagtaccgcatggtacgg

SEQ ID NO: 901 - DNA, 225 bp, unidentified
  misc_feature 1..225: note = Encodes 16S rRNA from Saccharofermentans
  source 1..225: mol_type = genomic DNA
agagtttgatcatggctcaggatgaacgctggcggtatgcttaacacatgcaagtcgaacggtagcagcaatgctatagtggcggacgggtgagtaacgcgtgaacaatctgcctgtatcaggggaataacagttcgaaaggactgctaataccgcatatgatcatagaggggcatccctcagtgatgaaagatttatcggatacagatgagttcgcgtcctatt

SEQ ID NO: 902 - DNA, 225 bp, unidentified
  misc_feature 1..225: note = Encodes 16S rRNA from Sphaerisporangium
  source 1..225: mol_type = genomic DNA
agagtttgatcatggctcaggacgaacgctggcggcgtgcttaacacatgcaagtcgagcggaaaggcccttcggggtactcgagcggcgaacgggtgagtaacacgtgagcaacctgtccttgactctgggataagcctgggaaaccgggtctaataccggataggacctgtctccgcatgggggtgggtggaaagttttttcggtcaggggtgggctcgcggc

SEQ ID NO: 903 - DNA, 225 bp, unidentified
  misc_feature 1..225: note = Encodes 16S rRNA from Anaeroplasma
  source 1..225: mol_type = genomic DNA
agagtttgatcatggctcaggattaacgctggcggcgtgcctaatacatgcaagtcgaatggttagcttgctaaccatggcgaacgggtgagtaacacgtaggcaacctgtctaagagacgaggataaccattggaaacgatggataatactggataagatattgggaggcatcttctgatatttaaagatttatcgctaatagaggggcctgcggcgcattagc

SEQ ID NO: 904 - DNA, 225 bp, unidentified
  misc_feature 1..225: note = Encodes 16S rRNA from Geobacillus
  source 1..225: mol_type = genomic DNA
agagtttgatcctggctcagaatgaacgctggcggcatggattaggcatgcaagtcggacggggtgcagcgatgcacccagtggcgaaagggtgcgcaacgcgtggggaacctgcccccggatccgggacaagcgctggaaacggcgtctgatacgggatgcggaggggggccgcatggcccccgctccaaagattcatcgtccggggagggccccgcgtcccat

SEQ ID NO: 905 - DNA, 225 bp, unidentified
  misc_feature 1..225: note = Encodes 16S rRNA from Prevotella
  source 1..225: mol_type = genomic DNA
agagtttgatcatggctcaggatgaacgctagctacaggcctaacacatgcaagtcgaggggcagcatgggagaagcttgcttttcccgatggcgaccggcgaatgggtgagtcacgcgtgtccaacctgccttcagcccggggatagcccttggaaatgaggattaagacccgatagatggaagttccgcatggcgcttccatgaaactggactgaagatgggg

SEQ ID NO: 906 - DNA, 225 bp, unidentified
  misc_feature 1..225: note = Encodes 16S rRNA from Clostridium XlVa
  source 1..225: mol_type = genomic DNA
agagtttgatcctggctcaggatgaacgctggcggcgtgcctaacacatgcaagtcgaacgatgaagcggggaggaagttttcggatggaattcctgtggaagagtggcggacgggtgagtaacgcgtggataacctgccccgtacagggggatagcagcgggaaactgctggtaataccgtatatgcgcacaactgccgcatggcagggtgtggaaagttacgg

SEQ ID NO: 907 - DNA, 225 bp, unidentified
  misc_feature 1..225: note = Encodes 16S rRNA from Victivallis
  source 1..225: mol_type = genomic DNA
agagtttgatcatggctcagaacgaacgctggcggcatggattaggcatgcaagtcgaacgaagcagcaatgcttagtggcgcaagggtgaggaacacgtgagtgacctacccgcaagtttggaacagctcctggaaacgggaattaataccggatgtgatcgataggccgcatggtttattgattaaagcagcaatgcgcttgcggatgggctcgcgtcccatt

SEQ ID NO: 908 - DNA, 225 bp, unidentified
  misc_feature 1..225: note = Encodes 16S rRNA from Bacteroides
  source 1..225: mol_type = genomic DNA
agagtttgatcatggctcaggatgaacgctagctacaggcttaacacatgcaagtcgaggggcatcaggtatctagcttgctaggtatgctggcgaccggcgcacgggtgcgtaacacgtatccaacctgcccgcagctcagggacagcctttcgaaagaaagattaatacctgacggtctctaccggggacatccccggcagagtaaagattcatcggcggcgg

SEQ ID NO: 909 - DNA, 225 bp, unidentified
  misc_feature 1..225: note = Encodes 16S rRNA from Demequina
  source 1..225: mol_type = genomic DNA
agagtttgatcctggctcaggacgaacgctggcggcgtgcttaacacatgcaagtcgaacggtgaactcggagcttgctccgggggatcagtggcgaacgggtgagtaacacgtgagtaacctgccccagactctgggataacctcgggaaaccggggctaataccggatacgagacgttcgggcatccgaagcgtctggaaagatttatcggtctgggatggac

SEQ ID NO: 910 - DNA, 225 bp, unidentified
  misc_feature 1..225: note = Encodes 16S rRNA from Paraeggerthella
  source 1..225: mol_type = genomic DNA
agagtttgatcatggctcaggatgaacgctggcggcgtgcctaacacatgcaagtcgaacggttaagccggcttcggccgggaatacagtggcgaacgggtgagtaacacgtgaccaacctgccccccgccccgggatagccccccgaaagggggattaataccgggtactccgcaagggccgcatggcccctgcgggaaagctccggcggcgggggatggggtc

SEQ ID NO: 911 - DNA, 225 bp, unidentified
  misc_feature 1..225: note = Encodes 16S rRNA from Paraprevotella
  source 1..225: mol_type = genomic DNA
agagtttgatcatggctcaggatgaacgctagcggcaggcttaacacatgcaagtcgaggggcagcgagagagtagcaatacttttgtcggcgaccggcgcacgggtgagtaacgcgtatgcaacctttcccagacagggggatagcccagggaaacttggattaataccccgtaggccgagggatggcatcgtccttcggttaaagttccggcggtctggggtg

SEQ ID NO: 912 - DNA, 225 bp, unidentified
  misc_feature 1..225: note = Encodes 16S rRNA from Pseudoflavonifractor
  source 1..225: mol_type = genomic DNA
agagtttgatcatggctcaggacgaacgctggcggcgtgcttaacacatgcaagtcgaacgagggtattagtcagcttgctgattgatactcgagtggcggacgggtgagtaacgcgtgaggaacctgtcttcatcagggggataacgtcccgaaagggatgctaataccgcatgagaccacgataccgcatggtattgaggtcaaaggagcgatccggatgaag

SEQ ID NO: 913 - DNA, 225 bp, unidentified
  misc_feature 1..225: note = Encodes 16S rRNA from Roseburia
  source 1..225: mol_type = genomic DNA
agagtttgatcctggctcaggatgaacgctggcggcgtgcttaacacatgcaagtcgaacggacttctccggaaataagcttcggcagaaagaaggaggagttagtggcggacgggtgagtaacgcgtgggcaacctgccttacattgggggataacagttagaaatgactgctaataccgcataagaccacgaggccgcatggccacggggtaaaagttccggc

SEQ ID NO: 914 - DNA, 225 bp, unidentified
  misc_feature 1..225: note = Encodes 16S rRNA from Gelidibacter
  source 1..225: mol_type = genomic DNA
agagtttgatcatggctcaggataaacgctagcggcaggcctaacacatgcaagtcgagcggcagcgggagtggcaacacttgccggcgagcggcggacgggtgagtaacgcgtatgcaacctgcccaccacacggagatagccgaccgaaaggacgattaaactccgatggcacctcatcaaggcatcttcttgaggttaaatattcataggtggtggatgggc

SEQ ID NO: 915 - DNA, 225 bp, unidentified
  misc_feature 1..225: note = Encodes 16S rRNA from Clostridium IV
  source 1..225: mol_type = genomic DNA
agagtttgatcctggctcaggacgaacgctggcggcgtgcctaacacatgcaagtcgaacggaactttaccggatgaagttttcggatggaatcagataaagtttagtggcggacgggtgagtaacgcgtgagtaacctgcccttcagagggggacaacgtcttgaaaaggacgctaataccgcataacatatattcatcgcatggtggatatatcaaaggagca

SEQ ID NO: 916 - DNA, 225 bp, unidentified
  misc_feature 1..225: note = Encodes 16S rRNA from Rhizobium
  source 1..225: mol_type = genomic DNA
agagtttgatcatggctcagaacgaacgctggcggtatgcttaacacatgcaagtcgcacgagaaagttcttcggaatgagtaaagtggcgtacgggtgagtaatgtataggaatctacccagtaatgaggaataagcactggaaacggtgtctaataccacatactaccgatttatcgggaaaggtttaatcttcgggttaaactgttattggatgagcctata

SEQ ID NO: 917 - DNA, 225 bp, unidentified
  misc_feature 1..225: note = Encodes 16S rRNA from Acholeplasma
  source 1..225: mol_type = genomic DNA
agagtttgatcatggctcaggatgaacgctggcggcgtgcctaatacatgcaagtcgaacggataccttcgggtattagtggcgaacgggtgagtaacacgtaggtaatctaccttaaagacggggataacagatggaaacgactgttaataccggatagtatatgaagtcgcatgattttatatttaaagttcccacgggaacactttaagatgagcctgcggc

SEQ ID NO: 918 - DNA, 225 bp, unidentified
  misc_feature 1..225: note = Encodes 16S rRNA from Clostridium XlVa
  source 1..225: mol_type = genomic DNA
agagtttgatcctggctcaggatgaacgctggcggcgtgcctaacacatgcaagtcgaacggagatgcatcagcgagaggattcgtccgatcaagatgtatcttagtggcggacgggtgagtaacgcgtggataacctgcctccatccgggggatagcagttggaaacgactggtaataccgcatgagcgcacggtaaggcatcttacagtgtgaaaagattaat

SEQ ID NO: 919 - DNA, 225 bp, unidentified
  misc_feature 1..225: note = Encodes 16S rRNA from Bacteroides
  source 1..225: mol_type = genomic DNA
agagtttgatcatggctcaggatgaacgctagcggcaggcttaacacatgcaagtcgaggggcagcgagagagtagcaatacttttgtcggcgaccggcgcacgggtgagtaacgcgtatgcaacctttcccagacagggggatagcccagggaaacttggattaataccccgtaggccgagtggcggcatcgccgttcggttaaagttccggcggtctggggtg

SEQ ID NO: 920 - DNA, 225 bp, unidentified
  misc_feature 1..225: note = Encodes 16S rRNA from Bacteroides
  source 1..225: mol_type = genomic DNA
agagtttgatcctggctcaggatgaacgctagcggcaggcttaacacatgcaagtcgaggggcagcgtgggggtagcaatacttccgacggcgaccggcgcacgggtgagtaacgcgtatgcaacctttcccagacagggggatagcccagggaaacttggattaataccccgtaggccacaggcgggcatccgccagtggttaaagttccggcggtctggggtg

SEQ ID NO: 921 - DNA, 225 bp, unidentified
  misc_feature 1..225: note = Encodes 16S rRNA from Papillibacter
  source 1..225: mol_type = genomic DNA
agagtttgatcatggctcaggatgaacgctggcggcgtgcataacacattcaagtcgaacgaagcactttggacggatcccttcggggtgaagactgatttgacttagtggcggacgggtgagtaacgcgtgagcaacctgccttgaagagggggataacacagggaaacttgtgctaataccgcataacgtacgtggatcgcatggtccgtgtaccaaagcctt

SEQ ID NO: 922 - DNA, 225 bp, unidentified
  misc_feature 1..225: note = Encodes 16S rRNA from Fusibacter
  source 1..225: mol_type = genomic DNA
agagtttgatcctggctcaggattaacgctggcggcgtgcctaacacatgcaagtcgagcgggaaatttgagagcgaagcttcggcagagctcttaaatggagagcggcggacgggtgagtaacgcgtaggtaacctgccctgcacagagggatagccactggaaacggtgattaatacctcataaaactgttttgccgcatgacagaacagccaaagatttatc

SEQ ID NO: 923 - DNA, 225 bp, unidentified
  misc_feature 1..225: note = Encodes 16S rRNA from Coraliomargarita
  source 1..225: mol_type = genomic DNA
agagtttgatcctggctcagagtgaacgctggcggcgtggctaagacatgcaagtcgagcgagaaggtgccttcgggtaccggaaagcggcaaacgggtgcgtaacacgtaagtaacctgcccttaagacgggaacagcttgatgaaaattaagataatgcccgatatccgcttctttcgcatgagagaagtcggaaaggtttgtgatgacgcttaaggaggggc

SEQ ID NO: 924 - DNA, 225 bp, unidentified
  misc_feature 1..225: note = Encodes 16S rRNA from Papillibacter
  source 1..225: mol_type = genomic DNA
agagtttgatcatggctcaggattaacgctggcggcgtgcataacacattcaagtcgaacggagtgtagaaatacacttagtggcggacgggtgagtaacgcgtgagcaatctaccttccagtgcgggataacaaccggaaacagttgctaataccgcatgaaccggcagcatcgcatggtgcaaccggcaaaggcttgctgctggaagatgagcttgcgtccga

SEQ ID NO: 925 - DNA, 225 bp, unidentified
  misc_feature 1..225: note = Encodes 16S rRNA from Clostridium XlVa
  source 1..225: mol_type = genomic DNA
agagtttgatcatggctcaggatgaacgctggcggcgtgcctaacacatgcaagtcgaacggagctgcgacgctgatgattggagtacttgtacgaagagaatcttgtcgtagcttagtggcggacgggtgagtaacgtgtggataacctggtccaatctgggggatagcagctggaaacggctggtaataccgcataagcgcacggtgtggcatcacacagtgt

SEQ ID NO: 926 - DNA, 225 bp, unidentified
  misc_feature 1..225: note = Encodes 16S rRNA from Acholeplasma
  source 1..225: mol_type = genomic DNA
agagtttgatcatggctcaggatgaacgctggcggcgtgcctaatacatgcaagtcgaacgagctgcttcggcagcgagtggcgaacgggtgagtaacatatgaataatctacctctttaactgggataccagtctgaaaagactgctaataccggataggtaatactgaggcatctcggtattattaaagatgcgtttgcatcgaattgagatgagttcatatc

SEQ ID NO: 927 - DNA, 225 bp, unidentified
  misc_feature 1..225: note = Encodes 16S rRNA from Catenibacterium
  source 1..225: mol_type = genomic DNA
agagtttgatcggccacattggaactgagacacggtccaaactcctacgggaggcagcagtaaggagttttcggcaatgggggaaaccctgaccgagcaacgccgcgtgagcgatgacggtcctttggattgtaaagctctgttgtaagccatgaaagatagctttaggaaatgaaagttatttgacgacagcttaccagaaagccacggctaactacgtgccag

SEQ ID NO: 928 - DNA, 225 bp, unidentified
  misc_feature 1..225: note = Encodes 16S rRNA from Clostridium IV
  source 1..225: mol_type = genomic DNA
agagtttgatcatggctcaggatgaacgctggcggcgtgcttaacacatgcaagtcgaacgaggttagcggcttcggccgataaccgagtggcggacgggtgagtaacgcgtgaacaatctgtcctgcaaagggggataacaactggaaacagttgctaataccgcataagaccacgaagtcgcatggctttgaggtaaaagcagcgatgcgatgcagggtgagt

SEQ ID NO: 929 - DNA, 225 bp, unidentified
  misc_feature 1..225: note = Encodes 16S rRNA from Clostridium IV
  source 1..225: mol_type = genomic DNA
agagtttgatcatggctcaggatgaacgctggcggcgtgcttaacacattcaagtcgaacggacgaggggagcttgctccccaagttagtggcggacgggtgagtaacgcgtgagcaacctgcctttctaagcgggataacagagggaaaccgctgctaataccgcataacgtatgatgaacgcatgttcgacataccaaaggagcgatccgaagaaagatgggc

SEQ ID NO: 930 - DNA, 225 bp, unidentified
  misc_feature 1..225: note = Encodes 16S rRNA from Clostridium IV
  source 1..225: mol_type = genomic DNA
agagtttgatcatggctcaggacgaacgctggcggtatgcctaacacatgcaagtcgaacgggtgtgtagagagcttgctctttatttcactagtggcggacgggtgagtaacgcgtgagtaatctgccttgaagtgggggataacatttggaaacaagtgctaataccgcgtaatatacgttcttcgcatgaagtttgtatcatagtttttcgcttcaagatga

SEQ ID NO: 931 - DNA, 225 bp, unidentified
  misc_feature 1..225: note = Encodes 16S rRNA from Nitrobacter
  source 1..225: mol_type = genomic DNA
agagtttgatcatggctcagagcgaacgctagcggaatgctttatacatgcaagtcgaacgaaaaaccatacggagtagcaatacaaagtggaagtttttagtggcgaacgggtgagtaatagataggaacttgccgagtagtgggggacaacagatagaaatgtctgctaataccgcatacgcccgagaggggaaagatttatcgctatttgagaggcctattc

SEQ ID NO: 932 - DNA, 225 bp, unidentified
  misc_feature 1..225: note = Encodes 16S rRNA from Victivallis
  source 1..225: mol_type = genomic DNA
agagtttgatcatggctcagaacgaacgctggcggcatggattaggcatgcaagtcgaacgaagcagcaatgcttagtggcgcaagggtgaggaacacgtgagtgacctgcccgcaagtttggaacagctcctggaaacgggaattaataccggatgtgatcatagagctgcatggttttatgattaaagcagcaatgcgcttgcggatgggctcgcgtcccatt

SEQ ID NO: 933 - DNA, 225 bp, unidentified
  misc_feature 1..225: note = Encodes 16S rRNA from Selenomonas
  source 1..225: mol_type = genomic DNA
agagtttgatcctggctcaggacgaacgctggcggcgtgcttaacacatgcaagtcgaacgagacgattgaaagcttgcttttgaaagtcgagtggcaaacgggtgagtaacgcgtagacaacctgcctttgagatggggacaacagtccgaaaggactgctaataccgaatgttgtggattttccgcatgggagatccaccaaagatgacctcttcctgaaagt

SEQ ID NO: 934 - DNA, 225 bp, unidentified
  misc_feature 1..225: note = Encodes 16S rRNA from Enterorhabdus
  source 1..225: mol_type = genomic DNA
agagtttgatcatggctcaggatgaacgctggcggcgtgcctaacacatgcaagtcgaacggttaaagcgccttcgggcgtgcatagagtggcgaacgggtgagtagcacgtgaccaacctgccccgcgcaccgggacagcctcgcgaaagcgggattaataccggatactccggccgcaccgcatggtgcggccgggaaagctccggcggcgcgggatggggtc

SEQ ID NO: 935 - DNA, 225 bp, unidentified
  misc_feature 1..225: note = Encodes 16S rRNA from Eubacterium
  source 1..225: mol_type = genomic DNA
agagtttgatcatggctcaggacgaacgctggcggtatgcttaacacatgcaagtcgaacgagaagcgggtattggaggtttcggccgaagagacctgcagaaagtggcgaacgggtgagtaacgcgtgggcaacctgcctcatggaaagggatagcctcgggaaactgggagtaaaaccttataacatatgcttatcgcatggtaggcatatcaaaactccggt

SEQ ID NO: 936 - DNA, 225 bp, unidentified
  misc_feature 1..225: note = Encodes 16S rRNA from Roseburia
  source 1..225: mol_type = genomic DNA
agagtttgatcctggctcaggatgaacgctggcggcgtgcttaacacatgcaagtcgaacgaagcattttgatctgatcatttcggtgtgaagaacttaatgacttagtggcggacgggtgagtaacgcgtgggtaacctacctcatacagggggatagcagttggaaacgactgataataccgcataagcgcacaggaccgcatggtccagtgtgaaaagcctt

SEQ ID NO: 937 - DNA, 225 bp, unidentified
  misc_feature 1..225: note = Encodes 16S rRNA from Prevotella
  source 1..225: mol_type = genomic DNA
agagtttgatcatggctcaggatgaacgctagctacaggcttaacacatgcaagtcgaggggcagcatggggactgcttgcagttcccgatggcgaccggcgcacgggtgagtaacgcgtatccaacctgcccgcaaccgcggaatagcccgccgaaaggcggattaatgccgcatgagctcgcgagagggcatctggccgcgagcaaaggtatttccggttgcg

SEQ ID NO: 938 - DNA, 225 bp, unidentified
  misc_feature 1..225: note = Encodes 16S rRNA from Asaccharobacter
  source 1..225: mol_type = genomic DNA
agagtttgatcctggctcaggatgaacgctggcggcgtgcttaacacatgcaagtcgaacgagaaagcaccctcgggtgcgagtagagtggcgaacgggtgagtaacacgtgagcaacctgccccccgcaccgggataaccgggcgaaagcccggctaataccggatgcgccccggcgcgcgcatgcgcggcgggggaaagccctggcggcgggggatgggctcg

SEQ ID NO: 939 - DNA, 225 bp, unidentified
  misc_feature 1..225: note = Encodes 16S rRNA from Bacteroides
  source 1..225: mol_type = genomic DNA
agagtttgatcatggctcaggatgaacgctagctacaggcttaacacatgcaagtcgaggggcagcatggtgtgtgcttgcacacactgatggcgaccggcgcacgggtgagtaacgcgtatccaacctgcccggtactcgggaacagccctctgaaaggaggattaatgcccgatgttccgtgcatcccgcctgggatgcccggcaaagattcatcggtaccgg

SEQ ID NO: 940 - DNA, 225 bp, unidentified
  misc_feature 1..225: note = Encodes 16S rRNA from Clostridium XlVa
  source 1..225: mol_type = genomic DNA
agagtttgatcctggctcaggatgaacgctggcggcgtgcctaacacatgcaagtcgaacgaggtattgcaatcgagatggaggagcttgctccgaagtctcactcgtgataccgagtggcggacgggtgagtaacgcgtggagaacctgccccgtacagggggataccaattagaaatgattgttaataccgcataagcgcacatgaccgcatggtcgagtgtg

SEQ ID NO: 941 - DNA, 225 bp, unidentified
  misc_feature 1..225: note = Encodes 16S rRNA from Gelidibacter
  source 1..225: mol_type = genomic DNA
agagtttgatcctggctcaggataaacgctagcggcaggcctaacacatgcaagtcgagcggcagcgggagtagcaatacttgccggcgagcggcggacgggtgagtaacgcgtatgcaacctgcccaccacacggagatagccgaccgaaaggacgattaaactccgatggcacctcatcaaggcatctttttgaggttaaatatttataggtggtggatgggc

SEQ ID NO: 942 - DNA, 225 bp, unidentified
  misc_feature 1..225: note = Encodes 16S rRNA from Brevundimonas
  source 1..225: mol_type = genomic DNA
agagtttgatcatggctcaggacgaacgctggcggtgtgcctcatacatgcaagtcgaacgataaggttccttcgggaatacataagtggcggacgggtgagtacaacataggaaatctgccctaaactgggggacaacagagggaaactcctgctaataccccatatgagcttagttgaaatactaatcttgaaagctccggcggtttaggatgagcctgtgcc

SEQ ID NO: 943 - DNA, 225 bp, unidentified
  misc_feature 1..225: note = Encodes 16S rRNA from Clostridium XlVa
  source 1..225: mol_type = genomic DNA
agagtttgatcctggctcaggatgaacgctggcggcgtgcctaacacatgcaagtcgaacgaagcgcccggaacagaggattcgtccgaagggaagggatgactgagtggcggacgggtgagtaacgcgtggaaaacctgccccatgcagggggacaacagggagaaatccctgctaataccgcataagcgcacggcacggcatcgtgcagtgtgaaaagattta

SEQ ID NO: 944 - DNA, 225 bp, unidentified
  misc_feature 1..225: note = Encodes 16S rRNA from Prevotella
  source 1..225: mol_type = genomic DNA
agagtttgatcctggctcaggatgaacgctagctacaggcttaacacatgcaagtcggggggcagcacgggaagcagcaatgcttttgggtggcgaccggcgaatgggtgagtaacgagtatccaacctgccccgcgctccgggacagccccgcgaaagcgggattaataccggatgcggcatggttcccgcatgggctccatgtcaaagattcatcggcgcggg

SEQ ID NO: 945 - DNA, 225 bp, unidentified
  misc_feature 1..225: note = Encodes 16S rRNA from Oscillibacter
  source 1..225: mol_type = genomic DNA
agagtttgatcatggctcaggatgaacgctggcggcgtgcctaacacatgcaagtcgaacgagaatcgatggaaagaggcttcggccaatggaagtcgaggacagtggcggacgggtgagtaacacgtgagcaacctgcccttcagagggggacaacagttggaaacgactgctaataccgcataacgtatcgaggaggcatctccatgataccaaagatttatc

SEQ ID NO: 946 - DNA, 225 bp, unidentified
  misc_feature 1..225: note = Encodes 16S rRNA from Asteroleplasma
  source 1..225: mol_type = genomic DNA
agagtttgatcctggctcaggataaacgctggcggcgtgcctaatacatgcaagtcgaacgaggtgtagcaatacacctagtggcgtacgggtgagtaacacgttgggaacctgccctttagaccggaataccaagcggaaacgtttgctaatgccggataacagcacgtaagcgcaggcttatgtgctcaaaggcgactattgtcgcgcttaaggatggccctg

SEQ ID NO: 947 - DNA, 225 bp, unidentified
  misc_feature 1..225: note = Encodes 16S rRNA from Anaeroplasma
  source 1..225: mol_type = genomic DNA
agagtttgatcctggctcaggataaacgctggcggcgtgcctaatacatgcaagttgaacggagagcttcggctcttagtagcgaacgggtgagtaacacgtaggcaacctgccctgttgactgggataacaagacgaaagacttgctaataccggatgataacgtatatcgcatgatatatggatgaaagttgggacacaacacaacaggatgggcctgcggcg

SEQ ID NO: 948 - DNA, 225 bp, unidentified
  misc_feature 1..225: note = Encodes 16S rRNA from Oscillibacter
  source 1..225: mol_type = genomic DNA
agagtttgatcatggctcaggacgaacgctggcggcgtgcttaacacatgcaagtcgaacgaagctctcacgcttgagttttcggacaagagggtgagaagacttagtggcggactggtgagtaacgcgtgagcaacctgccctccggtgggggacaacagttggaaacgactgctaataccgcatgacgtatacggaccgcatgatctgtataccaaagcttaa

SEQ ID NO: 949 - DNA, 225 bp, unidentified
  misc_feature 1..225: note = Encodes 16S rRNA from Bilophila
  source 1..225: mol_type = genomic DNA
agagtttgatcatggctcagattgaacgctggcggcgtgcttaacacatgcaagtcgaacgtgaaagtccttcgggacgagtaaagtggcgcacgggtgagtaacgcgtggataatctaccttcaagatggggataacggctggaaacggtcgctaataccgaatacgcttttttatttatctttaaaaggaaagatggcctctgcttgcaagctatcgcttgaa

SEQ ID NO: 950 - DNA, 225 bp, unidentified
  misc_feature 1..225: note = Encodes 16S rRNA from Oscillibacter
  source 1..225: mol_type = genomic DNA
agagtttgatcatggctcaggacgaacgctggcggcgtgcctaacacatgcaagtcgaacgaagctccgagaaacaagacttcggtcaagcggaacggatgactgagtggcgaacgggtgagtaacgcgtgaggaacctgcctttcagtgggggacaacagttggaaacgactgctaataccgcatgatgtaccatgggggcatccccggggtaccaaagattta

SEQ ID NO: 951 - DNA, 225 bp, unidentified
  misc_feature 1..225: note = Encodes 16S rRNA from Clostridium IV
  source 1..225: mol_type = genomic DNA
agagtttgatcctggctcaggacgaacgctggcggcgtgcttaacacatgcaagtcgaacgaagttccgcggaatgagatttcggtcaaaagaagcggacacttagtggcggacgggtgagtaacgcgtgagtaacctgcctttcagaggggaataacatttggaaacgaatggtaataccgcataacatcaagttatcgcatgatagattgatcaaaggagcaa

SEQ ID NO: 952 - DNA, 225 bp, unidentified
  misc_feature 1..225: note = Encodes 16S rRNA from Prevotella
  source 1..225: mol_type = genomic DNA
agagtttgatcctggctcaggatgaacgctagctacaggcttaacacatgcaagtcgaggggcagcgagggggcagcaatgcccctgtcggcgaccggcgcacgggtgagtaacgcgtatccaacctgccccatggtagggaatagcccggagaaatccggattaatgccctatgttctccgacgatggcatctgacttggagcaaagatttatcgccatgggat

SEQ ID NO: 953 - DNA, 225 bp, unidentified
  misc_feature 1..225: note = Encodes 16S rRNA from Geosporobacter
  source 1..225: mol_type = genomic DNA
agagtttgatcatggctcaggatgaacgctggcggcgtgcctaacacatgcaagtcgagcgggaaatctccaattgaaggttcgctggaaagcggagatggatagcggcggacgggtgagtaacgcgtaggtaagctgccctatgcacagggatagcctagggaaacctggattaatacctgatgacgctgcgaggtcacatggccatgcagccaaagttttttc

SEQ ID NO: 954 - DNA, 225 bp, unidentified
  misc_feature 1..225: note = Encodes 16S rRNA from Butyricimonas
  source 1..225: mol_type = genomic DNA
agagtttgatcatggctcaggatgaacgctagcggcaggcttaacacatgcaagtcgaggggcagcgcgtcgtagcaatacgatggcggcgaccggcgcaagggtgcgtaacgcgtgagcaacatgcccgcaacagggggataaccggaggaaactccgactaataccccataaggatgtagagtggcatcattcagcatctaaacttacgagggttgcggattg

SEQ ID NO: 955 - DNA, 225 bp, unidentified
  misc_feature 1..225: note = Encodes 16S rRNA from Pseudoflavonifractor
  source 1..225: mol_type = genomic DNA
agagtttgatcatggctcaggacgaacgctggcggcgtgcttaacacatgcaagtcgaacgagggtgaatgggagcttgcttctgttcacccgagtggcggacgggtgagtaacgcgtgaggaacctgtcttcatcagggggataacttcccgaaagggatgctaataccgcataagaccacggtaccgcatggtattgaggtcaaaggagcgatccggatgaag

SEQ ID NO: 956 - DNA, 225 bp, unidentified
  misc_feature 1..225: note = Encodes 16S rRNA from Barnesiella
  source 1..225: mol_type = genomic DNA
agagtttgatcatggctcaggatgaacgctagcgacaggcctaacacatgcaagtcgaggggcagcgagtttgtagcaatacagatgtcggcgaccggcgcacgggtgcgtaacaggtgtgcaacctggcctataccaagggatagcccgctgaaaggcggattaagactttatatgttatggtgagacatctcattataatgaaacgtgagggtataggatggg

SEQ ID NO: 957 - DNA, 225 bp, unidentified
  misc_feature 1..225: note = Encodes 16S rRNA from Selenomonas
  source 1..225: mol_type = genomic DNA
agagtttgatcctggctcaggacgaacgctggcggcgtgcttaacacatgcaagtcgaacgagacgattgaaagcttgcttttgaaagtcgagtggcaaacgggtgagtaacgcgtaggcaacctaccttcgagatggggacaacagtccgaaaggactgctaataccgaatgttgtatcaattccgcatggagttggtattaaagatggcctctatttataagc

SEQ ID NO: 958 - DNA, 225 bp, unidentified
  misc_feature 1..225: note = Encodes 16S rRNA from Prevotella
  source 1..225: mol_type = genomic DNA
agagtttgatcctggctcaggatgaacgctagcggcaggcttaacacatgcaagtcgaggggcagcgagaggtagcaatactttgtcggcgaccggcgaaagggtgagtaacgcgtgagcgacgtgcccgtcacagggggacaagggctggaaacggcttctgataccccataggaatgtatgcttcatggtgtatgtttgaaagatttatcggtgacggatcgg

SEQ ID NO: 959 - DNA, 225 bp, unidentified
  misc_feature 1..225: note = Encodes 16S rRNA from Enterorhabdus
  source 1..225: mol_type = genomic DNA
agagtttgatcatggctcaggatgaacgctggcggcgtgcctaacacatgcaagtcgaacggttaagccggcttcggccgggtatagagtggcgaacgggtgagtaacacgtgaccaacctgccccgcgctccgggatagccccgcgaaagcgagattaataccggatgacgcgggaggggcgcatgcccctcccgccaaagcctcaacggcgcgggatggggtc

SEQ ID NO: 960 - DNA, 225 bp, unidentified
  misc_feature 1..225: note = Encodes 16S rRNA from Oscillibacter
  source 1..225: mol_type = genomic DNA
agagtttgatcatggctcaggacgaacgctggcggcgtgcctaacacatgcaagtcgaacgagaatcatatgacggaggcttcggccaactgagtatgaggaaagtggcgaacgggtgagtaacgcgtgaggaacctgcctcggagtgggggacaacagttggaaacgactgctaataccgcataatgtgcctggaaggcatcttccgggtaccaaagctttatg

SEQ ID NO: 961 - DNA, 225 bp, unidentified
  misc_feature 1..225: note = Encodes 16S rRNA from Pelotomaculum
  source 1..225: mol_type = genomic DNA
agagtttgatcatggctcaggacaaacgctggcggcgtgcttaacacatgcaagtcgtacggagctgtcaggcggaatccttcgggaggaagcctgagagcttagtggcggacgggtgagtaacgcgtgagcaacctgcccataagagggggataacagttggaaacgactgctaataccgcatgagaccacaacaccgcatggtggaggggtcaaagagcaatc

SEQ ID NO: 962 - DNA, 225 bp, unidentified
  misc_feature 1..225: note = Encodes 16S rRNA from Cellulosilyticum
  source 1..225: mol_type = genomic DNA
agagtttgatcatggctcaggataaacgctggcggcgcacataagacatgcaagtcgaacgagtttaatacctagcttgctaggtaagcgactagtggcggactggtgagtaacacgtaaggaacctgcctattagagaggaatacctttgagaaatcagagctaatacctcatatgccttaactactgcatggtagaagagggaaaggagcaatccgctaatag

SEQ ID NO: 963 - DNA, 225 bp, unidentified
  misc_feature 1..225: note = Encodes 16S rRNA from Clostridium IV
  source 1..225: mol_type = genomic DNA
agagtttgatcatggctcaggacgaacgctggcggcgtgcttaacacatgcaagtcgaacgagaatccgtggaaagagttttcggacaatggaagcggagggaagtggcggacgggtgagtaacgcgtgaggaacctgccttagagagggggacaacagctggaaacggctgctaataccgcatgacacacagtggaggcatctttactgtgtcaaagatttatc

SEQ ID NO: 964 - DNA, 225 bp, unidentified
  misc_feature 1..225: note = Encodes 16S rRNA from Parabacteroides
  source 1..225: mol_type = genomic DNA
agagtttgatcatggctcaggatgaacgctagcgacaggcttaacacatgcaagtcgaggggcagcgggggcgatggcaacattgcctgccggcgaccggcgcactggtgagtaacacgtatgcaacctgccccgcacagggggataacccagagaaatttggcctaataccccgtaacaccgttgggggcatccccggtggttgaaagaggcgactcggtgcgg

SEQ ID NO: 965 - DNA, 225 bp, unidentified
  misc_feature 1..225: note = Encodes 16S rRNA from Papillibacter
  source 1..225: mol_type = genomic DNA
agagtttgatcctggctcaggataaacgctggcggcgcacataagacatgcaagtcgaacgaacttaattacttgcttgcaagtaaagcggttagtggcggactggtgagtaacacgtaagaaatctgcctattagtggggaataacagtgagaaatcattgctaataccgcatatgccataagaatcgcatgattctagtgggaaaggagcaattcgctaatag

SEQ ID NO: 966 - DNA, 225 bp, unidentified
  misc_feature 1..225: note = Encodes 16S rRNA from Bacteroides
  source 1..225: mol_type = genomic DNA
agagtttgatcctggctcaggatgaacgctagctacaggcttaacacatgcaagtcgcggggcatcgcggtaagtagcaatactttctggcggcgaccggcggatgggtgagtaacgcgtatccaacctggccctatctcggggacagcccctcgaaagagggattaatacccgatgttccctggaattcgcatgttttccagtgcaaaggcatatgtcggatag

SEQ ID NO: 967 - DNA, 225 bp, unidentified
  misc_feature 1..225: note = Encodes 16S rRNA from Prevotella
  source 1..225: mol_type = genomic DNA
agagtttgatcatggctcaggatgaacgctagctacaggcttaacacatgcaagtcgaggggcatcatgcaggttgcttgcaacctgtgatggcgaccggcgcacgggtgcgtaacgcgtatccaaccttccccgcagtagggtccagcccgttgaaagacggattaatcccctatgttgtccattgacggcatccgatttggacgaaagatttgatcgctgcgg

SEQ ID NO: 968 - DNA, 225 bp, unidentified
  misc_feature 1..225: note = Encodes 16S rRNA from Hydrogenoanaerobacterium
  source 1..225: mol_type = genomic DNA
agagtttgatcatggctcaggagaaacgctggcggcgcacataagacatgcaagtcgaacggaatttagtcgaatgtttacatgagacgaaaatttagtggcggacgggtgagtaacacgtgagcaacctgcctttaggagggggataacattgagaaatcagtgctaataccgcataacgcataatgttcgcatgaacgatatgccaaaggagaaatccaccta

SEQ ID NO: 969 - DNA, 225 bp, unidentified
  misc_feature 1..225: note = Encodes 16S rRNA from Clostridium XlVa
  source 1..225: mol_type = genomic DNA
agagtttgatcctggctcaggatgaacgctggcggcgtgcctaacacatgcaagtcgaacggaggtgtccgtacgggtgcttcggcatccagggcaccttagtggcggacgggtgagtaacgcgtggagaacctggcccatgcagggggataacagcgggaaaccgctgctaataccgcataaacgcgaaagggggcatcccttttggcggaaagtgtaagcggc

SEQ ID NO: 970 - DNA, 204 bp, unidentified
  misc_feature 1..204: note = Encodes 16S rRNA from Prevotella
  source 1..204: mol_type = genomic DNA
agagtttgatcatggctcaggatgaacgctagctacaggctttggtcaatgggcgaaagcctgaaccagccaagtagcgtgcaggatgacggccctatgggttgtaaactgtttttatacggggataaaacgagggacgtgtccctccttgcaggtaccgtatgaataaggaccggctaattccgtgccagcagccgcggtaat

SEQ ID NO: 971 - DNA, 225 bp, unidentified
  misc_feature 1..225: note = Encodes 16S rRNA from Clostridium IV
  source 1..225: mol_type = genomic DNA
agagtttgatcctggctcaggacgaacgctggcggcgcgcctaacacatgcaagtcgaacggagagtgggttttgattctttcgggatgaaaagctcatttcttagtggcggacgggtgagtaacacgtgagcaacctgccttgcagagcgggataacggttggaaacgatcgctaataccgcataatatatgattgtcgcatggctttcatatcaaagatttat

SEQ ID NO: 972 - DNA, 225 bp, unidentified
  misc_feature 1..225: note = Encodes 16S rRNA from Howardella
  source 1..225: mol_type = genomic DNA
agagtttgatcctggctcaggataaacgctggcggcgcacataagacatgcaagtcgaacggaagtcgtaattaaaaaggaacaaagatttatcggagtgagattttaattacaatggctttagtggcggactggtgagtaatgtataagtaacctgcctattagaggggaacaacagttggaaacagctgctaataccgcatatgccataagaatcgcatggtt

SEQ ID NO: 973 - DNA, 225 bp, unidentified
  misc_feature 1..225: note = Encodes 16S rRNA from Slackia
  source 1..225: mol_type = genomic DNA
agagtttgatcatggctcaggatgaacgctggcggcgtgcctaacacatgcaagtcgaacggttaaggcatcttcggatgcgaataaagtggcgaacgggtgagtaacacgtgaccaacctgccccccgcaccgggacaacgggcggaaacgcctgctaataccggatactccgcgacggacgcctgtccggcgcgggaaagcccaggcggcgggggatggggtc

SEQ ID NO: 974 - DNA, 225 bp, unidentified
  misc_feature 1..225: note = Encodes 16S rRNA from Methylobacter
  source 1..225: mol_type = genomic DNA
agagtttgatcatggctcagaatgaacgctggcggtatgcttaatacatgcaagtcgaacgagaaagtccagcaatggatgagtaaagtggcgtacgggtgagtaatatataggaatctacccagtaatgaggaataagcactggaaacggtgtctaataccacatactaccatttatttgggaaagggttagtagcaatactaacttgttattggatgagccta

SEQ ID NO: 975 - DNA, 225 bp, unidentified
  misc_feature 1..225: note = Encodes 16S rRNA from Treponema
  source 1..225: mol_type = genomic DNA
agagtttgatcctggctcagaacgaacgctggcggcgcgtcttaagcatgcaagtcgggcgggatcgtggtgcttgcaccacgtgagagcggcggactggcgaggagcgcgtgggtgacgcaccccccggacggggacagccggcagaaatgccgggtgataccggatgaggtcccccttgttggaggagggggaggaaaggggcttcggccccgccgggggagc

SEQ ID NO: 976 - DNA, 187 bp, unidentified
  misc_feature 1..187: note = Encodes 16S rRNA from Clostridium XlVa
  source 1..187: mol_type = genomic DNA
agagtttgatcctggctcaggataaacgctggcggcgtgcttaattggacaatgggggcaaccctgatccagcgacgccgcgtgagcgatgaagtatctcggtatgtaaagctctatcagcagggaagataatgacggtacctgactaagaagcaccggctaaatacgtgccagcagccgcggtaat

SEQ ID NO: 977 - DNA, 225 bp, unidentified
  misc_feature 1..225: note = Encodes 16S rRNA from Devosia
  source 1..225: mol_type = genomic DNA
agagtttgatcatggctcagaacgaacgctgtcgacatgcttaacacatgcaagtcgtacgggtataacttgttataccagtggcaaacgggtgagtaatacgtagatatgtacccagtagtctcgaataacagttggaaacgattgataatacgagatactatggtaacatcaaaggtttagcaataaactgctattggagcagtctacggtggattagatagt

SEQ ID NO: 978 - DNA, 225 bp, unidentified
  misc_feature 1..225: note = Encodes 16S rRNA from Ruminococcus
  source 1..225: mol_type = genomic DNA
agagtttgatcatggctcaggacgaacgctggcggcacgcttaacacatgcaagtcgaacggagatattcccttcgggggataacttagtggcggacgggtgagtaacacgtgagcaacctgccttacagagaggaataatgactggaaacggtcactaatacctcataaaatatttgaatcgcatggttcggatatcaaagatttatcgctgtaagatgggctc

SEQ ID NO: 979 - DNA, 225 bp, unidentified
  misc_feature 1..225: note = Encodes 16S rRNA from Lachnospiracea incertae sedis
  source 1..225: mol_type = genomic DNA
agagtttgatcctggctcaggatgaacgctggcggcgtgcctaacacatgcaagtcgaacgaagcacccctcccgaagattgacgtagcttgctacagattgattcaattggggtgacttagtggcggacgggtgagtaacgcgtgggtaacctgccctatagagggggacaacagttggaaacgactgctaataccgcataacacatttgcaccgcatgatgcg

SEQ ID NO: 980 - DNA, 225 bp, unidentified
  misc_feature 1..225: note = Encodes 16S rRNA from Clostridium III
  source 1..225: mol_type = genomic DNA
agagtttgatcatggctcaggacgaacgctggcggcgtgcctaacacatgcaagtcgaacggagttgttttggatgatgccttcgggtggattccgattcaacttagtggcggacgggcgagtaacgcgtgaataacctgcccataagaggggaataatccatggaaacgtggactaataccgcatattgtaacgaagtcgcatggctttgttatgaaagattta

SEQ ID NO: 981 - DNA, 225 bp, unidentified
  misc_feature 1..225: note = Encodes 16S rRNA from Methanobrevibacter
  source 1..225: mol_type = genomic DNA
agagtttgatcatggcagatgctactgctattgggattcgattaagccatgcaagtcgaacgagtttaggctcgtggcgtacggctcagtaacacgtggataacctacccttaggactgggataaccctgggaaactggggataatactagataggcaatttttcctggaatggttttttgtttaaatgttttttcgcctaaggatgggtctgcggccgattagg

SEQ ID NO: 982 - DNA, 225 bp, unidentified
  misc_feature 1..225: note = Encodes 16S rRNA from Paraprevotella
  source 1..225: mol_type = genomic DNA
agagtttgatcatggctcaggatgaacgctagcggcaggcttaacacatgcaagtcgaggggcagcgagtcggtagcaatactgatgtcggcgaccggcgcacgggtgagtaacgcgtatgcaacctttcccagacagggggatagcccagggaaacttggattaataccccgtaggccatggatgggcatccatctatggttaaagttccggcggtctggggtg

SEQ ID NO: 983 - DNA, 225 bp, unidentified
  misc_feature 1..225: note = Encodes 16S rRNA from Desulfobulbus
  source 1..225: mol_type = genomic DNA
agagtttgatcctggctcagaacgaacgctggcggcgtgcttaacacatgcaagtcgaacgcgaaagcggcttcggtcgtgagtagagtggcgcacgggtgagtaacgcgtagataacctgtcttcatattcgggataacacgccgaaaggggtactaataccggatatactcgcatttcaataggtgaggcgaggaaaggtggcctctgattcaagctactgta

SEQ ID NO: 984 - DNA, 225 bp, unidentified
  misc_feature 1..225: note = Encodes 16S rRNA from Butyricicoccus
  source 1..225: mol_type = genomic DNA
agagtttgatcctggctcaggacgaacgctggcggcgtgcctaacacatgcaagtcgaacggaactattttgaaggatctcttcggagtgacggatttttagtttagtggcgatcggtagccggactgagaggttgatcggccacattgggactgagacacggcccagactcctacgggaggcagcagtgggggatattgcgcaatgggggcaaccctgacgcag

SEQ ID NO: 985 - DNA, 225 bp, unidentified
  misc_feature 1..225: note = Encodes 16S rRNA from Clostridium XlVa
  source 1..225: mol_type = genomic DNA
agagtttgatcctggctcaggatgaacgctggcggcgtgcctaacacatgcaagtcgagcggagatgcacattggatgaagattcgtccgaatcctggtgcatcttagcggcggatgggtgagtaacgcgtggacaacctgcccgcaacagggggataacagctggaaacggctgataataccgcatatgcacacggaaccgcatggttttgggtggaaagatta

SEQ ID NO: 986 - DNA, 225 bp, unidentified
  misc_feature 1..225: note = Encodes 16S rRNA from Dialister
  source 1..225: mol_type = genomic DNA
agagtttgatcctggctcaggacgaacgctggcggcgtgcttaacacatgcaagtcgaacgggaggaaaagagaagcttgcttctttttgaatctagtggcaaacgggtgagtaacacgtaaacaacctgccttcaggatggggacaacagacggaaacgactgctaataccgaatgtgttccggagaccgcatgatttccggaagaaaggatggcctctattta

SEQ ID NO: 987 - DNA, 225 bp, unidentified
  misc_feature 1..225: note = Encodes 16S rRNA from Selenomonas
  source 1..225: mol_type = genomic DNA
agagtttgatcatggctcaggacgaacgctggcggcgtgcttaacacatgcaagtcgaacgagacgattttaagcttgcttagatgagtcgagtggcaaacgggtgagtaacgcgtagacaacctgccgcaaagatggggacaacagtccgaaaggactgctaataccgaatgttgtatcgtttccgcatggagatgatattaaagatggcctctacttgtaagc

SEQ ID NO: 988 - DNA, 225 bp, unidentified
  misc_feature 1..225: note = Encodes 16S rRNA from Spirochaeta
  source 1..225: mol_type = genomic DNA
agagtttgatcctggctcagaacgaacgctggcggcgcgtcttaagcatgcaagtcgagcggtaaggaggtagcttgctacttccctagagcggcggactggtgagtaacgcgtgggtgacgtaccctttggttggggatagccggtagaaataccgggtaataccgaataagacctctggtagaaagattagagaggaaagcggctccggccgcgccgaaggaa

SEQ ID NO: 989 - DNA, 225 bp, unidentified
  misc_feature 1..225: note = Encodes 16S rRNA from Clostridium IV
  source 1..225: mol_type = genomic DNA
agagtttgatcatggctcaggacaaacgctggcggcatgcctaacacatgcaagtcgaacggagttcagttttagatcccttcggggtgacgaagcgaagacttagtggcggacgggtgagtaacgcgtgaggaacctgcctttcagagggggataacgtttggaaacgaacgctaataccgcataacacaaccgagtggcatcgcttggttgtcaaaggagcaa

SEQ ID NO: 990 - DNA, 225 bp, unidentified
  misc_feature 1..225: note = Encodes 16S rRNA from Cellulosilyticum
  source 1..225: mol_type = genomic DNA
agagtttgatcatggctcaggatgaacgctggcggcgtgcataacacattcaagtcgaacggagttatttccttcgggggataacttagtggcggacgggtgagtaacgcgtgagtaacctgccatacacagggggataacgaccggaaacagtcgctaataccgcataacgcatgaaggtcacatggtctttatgccaaagatttatcggtgtatgatggactc

SEQ ID NO: 991 - DNA, 225 bp, unidentified
  misc_feature 1..225: note = Encodes 16S rRNA from Prevotella
  source 1..225: mol_type = genomic DNA
agagtttgatcctggctcaggatgaacgctagctacaggcttaacacatgcaagtcgcggggcagcatggaggttgcttgcaacctctgatggcgaccggcgcacgggtgcgtaacgcgtatccaacctgccccttactctggaatagcccggcgaaagtcggattaatgccggatgttgtcagacgaggacatctgaatctgaccaaaggccctagggtcggta

SEQ ID NO: 992 - DNA, 225 bp, unidentified
  misc_feature 1..225: note = Encodes 16S rRNA from Pseudoflavonifractor
  source 1..225: mol_type = genomic DNA
agagtttgatcatggctcaggacgaacgctggcggcgtgcttaacacatgcaagtcgaacgagaatcatatgacggagttttcggacaactgattatgaggaaagtggcggacgggtgagtaacgcgtgaggaacctgcctcggagtgggggataacacatcgaaaggtgtgctaataccgcataatgtatatcattcgcatgggagatataccaaagatttatt

SEQ ID NO: 993 - DNA, 225 bp, unidentified
  misc_feature 1..225: note = Encodes 16S rRNA from Clostridium III
  source 1..225: mol_type = genomic DNA
agagtttgatcatggctcaggacgaacgctggcggcatgcctaacacatgcaagtcgaacggagatagtagagcttgctttacgatcttagtggcggacgggtgagtaacgcgtgagcaacctgcccttcagtggggaataatgttgagaaatcgacactaataccgcataaagtatcatgatcgcatggtcgagataccaaaggagcaattcgctgaaggatgg

SEQ ID NO: 994 - DNA, 225 bp, unidentified
  misc_feature 1..225: note = Encodes 16S rRNA from Oscillibacter
  source 1..225: mol_type = genomic DNA
agagtttgatcctggctcaggacgaacgctggcggcgtgcttaacacatgcaagtcgaacgaagctctcacgcttgagttttcggacaagagggtgagaagacttagtggcggactggtgagtaacgcgtgagcaacctgccctccggtgggggacaacagttggaaacgactgctaataccgcataatgtacagagaccgcatgatctttgtaccaaagcttta

SEQ ID NO: 995 - DNA, 225 bp, unidentified
  misc_feature 1..225: note = Encodes 16S rRNA from Faecalibacterium
  source 1..225: mol_type = genomic DNA
agagtttgatcatggctcaggatgaacgctggcggcgtgcataacacattcaagtcgaacggagttgcgatagaaagaggcttcggccaatggaaattgtaacttagtggcggacgggtgagtaacgcgtgagcaacctacctatgcgcgggggacaacagttggaaacgactgctaataccgcataaatcatgataaaggcatctttaacatggcaaagattaa

SEQ ID NO: 996 - DNA, 225 bp, unidentified
  misc_feature 1..225: note = Encodes 16S rRNA from Clostridium XlVb
  source 1..225: mol_type = genomic DNA
agagtttgatcatggctcaggatgaacgctggcggcgtgcttaacacatgcaagtcgagcgaaggacaaagagcttgctttttgttacttagcggcggacgggtgagtaacgtgtgggcaatctgccctatgcagaggaataacatagagaaatttatgctaatgcctcataaactcttagaatcgcatggtttatagagaaaagatttatcggcataggaggag

SEQ ID NO: 997 - DNA, 225 bp, unidentified
  misc_feature 1..225: note = Encodes 16S rRNA from Eubacterium
  source 1..225: mol_type = genomic DNA
agagtttgatcctggctcaggatgaacgctggcggcgtgcctaacacatgcaagtcgagcgagaaatcaggtgttgaaacttcggtagatacatctggtggacagcggcggacgggtgagtaacgcgtgggaaacctgcccttatctgagggatagccgagagaaatttcgagtaatacctcataatgcatcgagaccgcatggccatgatgccaaagatttatc

SEQ ID NO: 998 - DNA, 225 bp, unidentified
  misc_feature 1..225: note = Encodes 16S rRNA from Clostridium III
  source 1..225: mol_type = genomic DNA
agagtttgatcatggctcaggacgaacgctggcggcgtgcctaacacatgcaagtcgaacggagccttttgccggaagggagcttgctccaggaaagtaaaagacttagtggcggacgggtgagtaacgcgtggataacctgccttagacagggggataacacagggaaacttgtgctaataccgcataagaccacactatggcatcatagaggggtcaaaggag

SEQ ID NO: 999 - DNA, 225 bp, unidentified
  misc_feature 1..225: note = Encodes 16S rRNA from Prevotella
  source 1..225: mol_type = genomic DNA
agagtttgatcatggctcaggatgaacgctagctacaggcttaacacatgcaagtcgaggggcagcacggttgttgcttgcaacaactggtggcgaccggcgcacgggtgagtaacgcgtatccaacctgcccgcaaccgcggaatagcccgccgaaaggcggattaatgccgcatgagctcgcgcgagggcatcatttcgcgagcaaaggttcgttccggttgc

SEQ ID NO: 1000 - DNA, 225 bp, unidentified
  misc_feature 1..225: note = Encodes 16S rRNA from Paenibacillus
  source 1..225: mol_type = genomic DNA
agagtttgatcctggctcaggatgaacgctggcggcgtgcctaatacatgcaagtcgaacggatgaggtagcaataccgattcagtggcgaacgggtgagtaacacgtaggtaacctgcccttaagactgggatacccaggcgaaagcttggctaataccggatatgagtagaagaggcatctcctttacttgaaagttgcgtttgcaacacttttggatggacc

SEQ ID NO: 1001 - DNA, 225 bp, unidentified
  misc_feature 1..225: note = Encodes 16S rRNA from Pedobacter
  source 1..225: mol_type = genomic DNA
agagtttgatcatggctcaggatgaacgctagcggcaggcctaatacatgcaagtcgaacggtaaacgccccttcgggggtgtgagagtggcgcacgggtgcgtaacgcgtatgcaacccacccgctgccgggggatagcccggagaaatccgaattaataccccatgaggaggagatgaggcatctcatctttttcaaaacttcggtggcggcggacgggcatg

SEQ ID NO: 1002 - DNA, 225 bp, unidentified
  misc_feature 1..225: note = Encodes 16S rRNA from Butyricicoccus
  source 1..225: mol_type = genomic DNA
agagtttgatcctggctcaggataaacgctggcggcgcacataagacatgcaagtcgaacgggaactttattgaagttatctgatataaagttctagtggcggactggtgagtaatgtataagcaacctgcctacaagaggggaataacagtgagaaatcattgctaataccgcataagctgtgagtatcgcatggtacaaacagaaaaggaagcaattctgctt

SEQ ID NO: 1003 - DNA, 225 bp, unidentified
  misc_feature 1..225: note = Encodes 16S rRNA from Clostridium XlVa
  source 1..225: mol_type = genomic DNA
agagtttgatcatggctcaggatgaacgctggcggcgtgcctaacacatgcaagtcgaacggagtgttttaagccgattcttcggatgaagctttttacacttagtggcggacgggtgagtaacgcgtggagaacctgcctcacacagggggacagcagctggaaacggctgataataccgcatatgcccacgataccgcatggtattgcggggaaacatttatg

SEQ ID NO: 1004 - DNA, 225 bp, unidentified
  misc_feature 1..225: note = Encodes 16S rRNA from Roseburia
  source 1..225: mol_type = genomic DNA
agagtttgatcatggctcaggatgaacgctggcggcgtgcctaacacatgcaagtcgaacggacccatggagatgattagcttgctatgaatttccggaaggttagtggcggacgggtgagtaacgcgtgggtaacctgcctcatacagggggatagcagttggaaacgactggtaataccgcataagcgcacagtaccgcatggtacagtgtgaaaagctccga

SEQ ID NO: 1005 - DNA, 225 bp, unidentified
  misc_feature 1..225: note = Encodes 16S rRNA from Hydrogenoanaerobacterium
  source 1..225: mol_type = genomic DNA
agagtttgatcatggctcaggacgaacgctggcggcgtgcctaacacatgcaagtcgaacggactgataggagcttgctccttgaaagttagtggcggacgggtgagtaacgcgtgaggaacctgcctttcagagggggataacgtcttgaaaaggacgctaataccgcatgacaccggattgtcgcatggcagaccggtcaaaggagcaatccgctgaaagatg

SEQ ID NO: 1006 - DNA, 225 bp, unidentified
  misc_feature 1..225: note = Encodes 16S rRNA from Adhaeribacter
  source 1..225: mol_type = genomic DNA
agagtttgatcctggctcaggatgaacgctggcggcaggcttaatacatgcaagtcgaacggtaaggccgagcgtagcaatacgcgaggtacacgagtggcgcacgggtgcgtaacgcgtatgcaacctgcccccttccgggacaaaacgtcgagaaattggcgctaatatcccatggcgacctcgggaggcatctctgggggtccaaagattcattggaagggg

SEQ ID NO: 1007 - DNA, 225 bp, unidentified
  misc_feature 1..225: note = Encodes 16S rRNA from Eubacterium
  source 1..225: mol_type = genomic DNA
agagtttgatcatggctcaggattaacgctggcggcgtgcctaacacatgcaagtcgagcgagaattaggaaaatgatgcttcggttgattttttctaaggacagcggcggacgggtgagtaacgcgtgggcaacctgcccctttccggaggatagccaagggaaactttgaataatactccataaagcaagagtaccgcatgatacacttgccaaagatttatc

SEQ ID NO: 1008 - DNA, 225 bp, unidentified
  misc_feature 1..225: note = Encodes 16S rRNA from Bacteroides
  source 1..225: mol_type = genomic DNA
agagtttgatcctggctcaggatgaacgctagctacaggcttaacacatgcaagtcgaggggcagcattaggtcagcttgctgacctagatggcgaccggcgcacgggtgagtaacgcgtatccaacctgccccctacccggggatagccttgcgaaagtaagattaatacccggtgctgttatgtttccgcatgggaatataacgaaagattcatcggtagggg

SEQ ID NO: 1009 - DNA, 225 bp, unidentified
  misc_feature 1..225: note = Encodes 16S rRNA from Victivallis
  source 1..225: mol_type = genomic DNA
agagtttgatcctggctcagaacgaacgctggcggcatggattaggcatgcaagtcgaacgaagcagcaatgcttagtggcggaagggtgaggaacgcgtgagtaatctgcccccaagttgggaataacagctggaaacggttgctaataccgaatgtggctgcctggtcgcatgatcgggcagttaaagatttattgcttggggatgagctcgcgtcccattag

SEQ ID NO: 1010 - DNA, 225 bp, unidentified
  misc_feature 1..225: note = Encodes 16S rRNA from Roseburia
  source 1..225: mol_type = genomic DNA
agagtttgatcatggctcaggatgaacgctggcggcgtgcttaacacatgcaagtcgaacgaagttagattggaatgcggcttcggccaaaggaagatttaattgagtggcggacgggtgagtaacgcgtgggtaacctaccttacacagggggataacgattggaaacgatcgctaataccgcataagaccacagtaccgcatggtacaggggtaaaagaatta

SEQ ID NO: 1011 - DNA, 225 bp, unidentified
  misc_feature 1..225: note = Encodes 16S rRNA from Treponema
  source 1..225: mol_type = genomic DNA
agagtttgatcctggctcagaacgaacgctggcggcgcgtcttaagcatgcaagtcgagcgggaatacctagcttgctaggtatgagagcggcggactggtgagtaacacgtagataacgcaccctctagacggggatagctgccagaaatggcagataataccggatgtgaacgtatgccgtgaaggtgtacgtggaaaggagcttcggctccgctagaggaac

SEQ ID NO: 1012 - DNA, 225 bp, unidentified
  misc_feature 1..225: note = Encodes 16S rRNA from Prevotella
  source 1..225: mol_type = genomic DNA
agagtttgatcatggctcaggatgaacgctagctacaggcttaacacatgcaagtcgaggggcatcacggggttggcttgccatccctggtggcgaccggcgcacgggtgagtaacgcgtatccaacctgccccgaaccgcggtatagcccgccgaaaggcggattaatcccgcatgtggtcgtgagatgacatctgaccacgactaaaggtattttccggttcg

SEQ ID NO: 1013 - DNA, 225 bp, unidentified
  misc_feature 1..225: note = Encodes 16S rRNA from Prevotella
  source 1..225: mol_type = genomic DNA
agagtttgatcatggctcaggatgaacgctagctacaggcttaacacatgcaagtcgaggggcagcactgggtgcgcttgcgcaccctggtggcgaccggcgcacgggtgagtaacgcgtatccaacctgcccgcaaccgcggaatagcccgccgaaaggcggattaatgccgcatgagctcgcgcgatggcatcttatcgcgagcaaaggtgttttccggttgt

SEQ ID NO: 1014 - DNA, 225 bp, unidentified
  misc_feature 1..225: note = Encodes 16S rRNA from Hydrogenoanaerobacterium
  source 1..225: mol_type = genomic DNA
agagtttgatcatggctcaggacgaacgctggcggcgcgcctaacacatgcaagtcgaacgggactagtgaccggagattagagcttgttgttctagtttgcgatcactagttcagtggcggacgggtgagtaaagcatgagcaacctgcctagtagagggggatagcttttggaaacagaagataataccgcatgaatcagagatttcgcatgagatttttgga

SEQ ID NO: 1015 - DNA, 225 bp, unidentified
  misc_feature 1..225: note = Encodes 16S rRNA from Clostridium XlVa
  source 1..225: mol_type = genomic DNA
agagtttgatcatggctcaggatgaacgctggcggcgtgcctaacacatgcaagtcgaacgagggtcctaaacctgagattcgtcgaaggggaaggaattccgagtggcggatgggtgagtaacgcgtggagaacctgccctttgctgggggataacaactggaaacggttgacaataccgcataagctcgatggaccgcatgatctatcgaggaaagatttatc

SEQ ID NO: 1016 - DNA, 225 bp, unidentified
  misc_feature 1..225: note = Encodes 16S rRNA from Bacteroides
  source 1..225: mol_type = genomic DNA
agatttgatcctggctcaggatgaacgctagctacaggcttaacacatgcaagtcgaggggcagcatggtcttagcttgctaaggccgatggcgaccggcgcacgggtgagtaacgcgtatccaacctgccgtccagtaggggacagcccgtagaaatgcggattaataccctatgttctccgaggatgacatcagattcggagtaaagattcatcgctggacga

SEQ ID NO: 1017 - DNA, 155 bp, unidentified
  misc_feature 1..155: note = Encodes 16S rRNA from Bacteroides
  source 1..155: mol_type = genomic DNA
agagtttgatcctggctcaggatgaacgctagctacaggcttaacacatgcaagtcgaggggtaacgcgaggaagacagcacgtaaataaacgtgttatttgacgttagagtgtgaataagcaccggcaaactccgtgccagcagccgcggtaat

SEQ ID NO: 1018 - DNA, 225 bp, unidentified
  misc_feature 1..225: note = Encodes 16S rRNA from Lactobacillus
  source 1..225: mol_type = genomic DNA
agagtttgatcctggctcaggatgaacgctggcggcgtgcctaatacatgcaagtcgaacgagattttattaattgattacttcggtatgatttttctaaaatcgagtggcggacgggtgagtaacacgtgggtaacctgcccttaagtaggggataacatttggaaacagatgctaataccgtataaatctcagaaacacatgtttctgagctgaaaggcggct

SEQ ID NO: 1019 - DNA, 225 bp, unidentified
  misc_feature 1..225: note = Encodes 16S rRNA from Adlercreutzia
  source 1..225: mol_type = genomic DNA
agagtttgatcctggctcaggatgaacgctggcggcgtgcctaacacatgcaagtcgaacggttaagccggcttcggccgggtatacagtggcgaacgggtgagtaacacgtgaccaacctgccccgcgctccgggacaaccgctggaaacggcggctaataccggatactcccgcctccccgcatggggcggcggggaaagccccgacggcgcgggatggggtc

SEQ ID NO: 1020 - DNA, 225 bp, unidentified
  misc_feature 1..225: note = Encodes 16S rRNA from Dethiosulfovibrio
  source 1..225: mol_type = genomic DNA
agagtttgatcatggctcaggatgaacgctggcggcgtgcttaacacattcaagtcgaacggagtgtttttgaaagcttgcttttgagaatacttagtggcggacgggtgagtaatgcatgagcaacctgcctttaagagggggataacacagagaaatctgtgctaataccgcatagaacactgagatggcatcatcatagtgggaaaggagcaatccgcttaa

SEQ ID NO: 1021 - DNA, 225 bp, unidentified
  misc_feature 1..225: note = Encodes 16S rRNA from Lutispora
  source 1..225: mol_type = genomic DNA
agagtttgatcatggctcaggacgaacgctggcggcgtgcttaaaacatgcaagtcgaacggagattttagggagcttgcttcttgaaatcttagtggcggacgggtgagtaacacgtgagcaacctgcctatcacagggggataacacttagaaataggtgctaataccgcatatgaccacagaccggcatcggtcagaggtgaaaggagttaaatctggtgat

SEQ ID NO: 1022 - DNA, 225 bp, unidentified
  misc_feature 1..225: note = Encodes 16S rRNA from Turicibacter
  source 1..225: mol_type = genomic DNA
agagtttgatcctggctcaggatgaacgctggcggcgtgcctaatacatgcaagtcgaacggagcacttcggtgcttagtggcgaacgggtgagtaacacataaacaatctacccttaagtctgggataacggttggaaacgaccgctaataccggataggtaaaaccgaggcatcttggttttattaaagctgggctacagcgctaaaggatgagtttatgtcg

SEQ ID NO: 1023 - DNA, 225 bp, unidentified
  misc_feature 1..225: note = Encodes 16S rRNA from unidentified taxa
  source 1..225: mol_type = genomic DNA
agagtttgatcctggctcaggacgaacgctggcggtgtgcctcatacatgcaagtcgaacgataaggttccttcgggaatacataagtggcggacgggtgagtacaacataggaaatctgccctaaactgggggacaacagagggaaactcctgctaataccccatacgagcttggttgaaataccaatcttgaaagctccggcggtttgggatgagcctgtgcc

SEQ ID NO: 1024 - DNA, 225 bp, unidentified
  misc_feature 1..225: note = Encodes 16S rRNA from Clostridium sensu stricto
  source 1..225: mol_type = genomic DNA
agagtttgatcatggctcaggacgaacgctggcggcatgcctaacacatgcaagtcgaacggaggtggaaacaccttagtggcgaacgggtgagtaacgcgtgagtaacctgccttatacacagggataccagttagaaatgactgctaataccggataagaccacagtccggcatcggacaggggtcaaagtgaattagcggtataagatgggctcgcgtccaa

SEQ ID NO: 1025 - DNA, 225 bp, unidentified
  misc_feature 1..225: note = Encodes 16S rRNA from unidentified taxa
  source 1..225: mol_type = genomic DNA
agagtttgatcatggctcaggatgaacgctggcggcgtgcttcatacatgcaagtcgaacgtgaagctgacttcggtcagtggaaagtggcggacgggtgagtaatacataggaaatctgcccttaggaaggggataacagtcggaaacgattgctaataccctatatgagcttggttgcaataccaatcttgaaaactccggtgcctaaggatgagcctgtgcc

SEQ ID NO: 1026 - DNA, 225 bp, unidentified
  misc_feature 1..225: note = Encodes 16S rRNA from Bulleidia
  source 1..225: mol_type = genomic DNA
agagtttgatcatggctcaggatgaacgctggcggcgtgcctaatacatgcaagtcgaacgagagcgaccagcttgctggtcaatcgagtggcgaacgggtgagtaacacataaacaatctgccctggagactgggataacgtagggaaacccacgctaataccggataggcagtaaggggacatccccatactgttaaagctgggctacagcactgcaggatga

SEQ ID NO: 1027 - DNA, 225 bp, unidentified
  misc_feature 1..225: note = Encodes 16S rRNA from Aquiflexum
  source 1..225: mol_type = genomic DNA
agagtttgatcatggctcaggatgaacgctggcggcaggcttaatacatgcaagtcgaacggtaaggccgagcgtagcaatacgcgaggtacacgagtggcgcacgggtgcgtaacgcgtatgcaacctgcccccttccgggacaaaacgtcgagaaattggcgctaatatcccatggcgacccttgggggcatccccgggggtccaaagattcattggaagggg

SEQ ID NO: 1028 - DNA, 225 bp, unidentified
  misc_feature 1..225: note = Encodes 16S rRNA from Lachnospiracea incertae sedis
  source 1..225: mol_type = genomic DNA
agagtttgatcctggctcaggatgaacgctggcggcgtgcttaacacatgcaagtcgaacgaagcacttattgagaaccttcgggtgatcggcaagtgactgagtggcggacgggtgagtaacgcgtgggtaacctgccctgtacagggggataacagccagaaatggctgctaataccgcataagcccgggggggagcattttctcccggggaaaactccggtg

SEQ ID NO: 1029 - DNA, 225 bp, unidentified
  misc_feature 1..225: note = Encodes 16S rRNA from Lachnospiracea incertae sedis
  source 1..225: mol_type = genomic DNA
agagtttgatcctggctcaggatgaacgctggcggcgtgcttaacacatgcaggtcgaacgaagccccggaagcggatcttcggaaaagcggacgggagacttagtggcggacgggtgagtaacgcgtgggcaacctgcccttgggagggggacaacagccggaaacggctgctaataccgcatgatccggcggctccgcatgggggtgccgggaaaggagcgat

SEQ ID NO: 1030 - DNA, 225 bp, unidentified
  misc_feature 1..225: note = Encodes 16S rRNA from Clostridium III
  source 1..225: mol_type = genomic DNA
agagtttgatcctggctcaggataaacgctggcggcgcacataagacatgcaagtcgaacgaacgagtacagattctttacgtttttgtatgagttagtggcggactggtgagtaacgcgtgagcaacctgcctataagaggggaataacggagagaaattttcgctaataccgcataagctgatagagtcgcatgacttagtcagaaaaggagcaatccgctta

SEQ ID NO: 1031 - DNA, 225 bp, unidentified
  misc_feature 1..225: note = Encodes 16S rRNA from Roseburia
  source 1..225: mol_type = genomic DNA
agagtttgatcatggctcaggatgaacgctggcggcgtgcttaacacatgcaagtcgaacggacttaccctggatgaggccctcgggcggattcctaagtaagttagtggcggacgggtgagtaacgcgtgggtaacctgcctcacattgggggataacgattggaaacgatcgctaataccgcataagaccacggcaccgcatggtgctgaggtaaaaactccg

SEQ ID NO: 1032 - DNA, 225 bp, unidentified
  misc_feature 1..225: note = Encodes 16S rRNA from Glaciecola
  source 1..225: mol_type = genomic DNA
agagtttgatcatggctcaggatgaacgctggcggcgtgcctaacacatgcaagtcgaacgggactatttggggaatattgcacaatgggggaaaccctgatgcagccatgccgcgtgtgtgaagaaggccttcgggttgtaaagcacttttgcattcgaggaagacagcgtataaacaaatgcgctatttgacgttagagtgtgaataagcaccggcaaactcc

SEQ ID NO: 1033 - DNA, 225 bp, unidentified
  misc_feature 1..225: note = Encodes 16S rRNA from Clostridium XlVa
  source 1..225: mol_type = genomic DNA
agagtttgatcatggctcaggatgaacgctggcggcgtgcttaacacatgcaagtcgaacgaggaattaacattgaaattttcggatggatttgttttttccgagtggcggacgggtgagtaacgcgtgggtaacctgccttacacagggggacaacagccggaaacggctgctaataccgcataacctgctagagtcgcatgactcagacagaaaagatttatc

SEQ ID NO: 1034 - DNA, 225 bp, unidentified
  misc_feature 1..225: note = Encodes 16S rRNA from Hydrogenoanaerobacterium
  source 1..225: mol_type = genomic DNA
agagtttgatcatggctcaggagaaacgctggcggcgcacataagacatgcaagtcgaacggaaccaagtcgaatgtttacatgagacggaagtttagtggcggacgggtgagtaacacgtgagcaacctgcctttaagagggggataacattgagaaatcagtgctaataccgcataaagcatctttaccgcatgatagagatagccaaaggagaaatccgctt

SEQ ID NO: 1035 - DNA, 225 bp, unidentified
  misc_feature 1..225: note = Encodes 16S rRNA from Clostridium IV
  source 1..225: mol_type = genomic DNA
agagtttgatcctggctcaggatgaacgctggcggcgtgcataacacattcaagtcgaacgaagcaccggcgaggaagtcttcggacggaattgcccttgacttagtggcggacgggtgagtaacgcgtgagcaaccttcctggcagtgagggataacacagggaaacttgtgctaataccgcatgacgcacgattgtcgcatggcagacgtgccaaagattaat

SEQ ID NO: 1036 - DNA, 225 bp, unidentified
  misc_feature 1..225: note = Encodes 16S rRNA from Sphaerobacter
  source 1..225: mol_type = genomic DNA
agagtttgatcatggctcaggataaacgctggcggcgtgcctaatgcatgcaagtcggacgggagccccttcgggggtcgaccgtggcggacgggtgaggaacacgtggctaacctgcccatcagtgggggataactccgggaaaccggagctaagaccgcatacgttcagtttcggggacggaattgaggaaagctttcgagcgctgatggagggggctgcggc

SEQ ID NO: 1037 - DNA, 225 bp, unidentified
  misc_feature 1..225: note = Encodes 16S rRNA from unidentified taxa
  source 1..225: mol_type = genomic DNA
agagtttgatcctggctcaggacgaacgctggcggcgtgcttcatacatgcaagtcgaacgataaggtctcttcggagacacataagtggcggacgggtgagtaatgtgtagagaatctgccctttagtgggggacaacagttggaaacgactgctaataccgcatatgcgcgtacctgtaatggtattcgtgaaaactccggtgctaaaggatgagtctgcatc

SEQ ID NO: 1038 - DNA, 225 bp, unidentified
  misc_feature 1..225: note = Encodes 16S rRNA from Prevotella
  source 1..225: mol_type = genomic DNA
agagtttgatcctggctcaggatgaacgctagctacaggcttaacacatgcaagtcgaggggcagcatgtcggtggcttgccaccggcgatggcgaccggcgcacgggtgagtaacgcgtatccaacctgccctcaaccgcggaatagcccgccgaaaggcggattaatgccgcatgagctcgcgcgggggcatctgcccgcgagcaaaggtttgttccggttgg

SEQ ID NO: 1039 - DNA, 225 bp, unidentified
  misc_feature 1..225: note = Encodes 16S rRNA from Turicibacter
  source 1..225: mol_type = genomic DNA
agagtttgatcctggctcaggatgaacgctggcggcgtgcctaatacatgcaagtcgaacgagatagcaatatcgagtggcgaacgggtgagtaacacgtaggtaacctgccttacagtttgggataccctggcgaaagctaggctaataccgaataattggattggaggcatctccgatctctaaaaggggcccttaaagcctcgctgaatgatggacctgcgg

SEQ ID NO: 1040 - DNA, 225 bp, unidentified
  misc_feature 1..225: note = Encodes 16S rRNA from Ruminococcus
  source 1..225: mol_type = genomic DNA
agagtttgatcatggctcaggacgaacgctggcggcacgcttaacacatgcaagtcgaacggagatcattctttcggggatgatcttagtggcggacgggtgagtaacacgtgagcaacctgccttacggagaggaataatgattggaaacgatcactaataccacataacatataggtgatgcatatcagctatatcaaagatttatcgccgtaagatgggctc

SEQ ID NO: 1041 - DNA, 225 bp, unidentified
  misc_feature 1..225: note = Encodes 16S rRNA from Clostridium IV
  source 1..225: mol_type = genomic DNA
agagtttgatcatggctcaggattaacgctggcggcgtgcataacacattcaagtcgaacggagaaggggcttcggccccggatcagtggcggacgggtgagtaacgcgtgagtaacctgcctgtgtgaggggaataacagatcgaaaggcctgctaataccgcatgacgtacgactgtcgcatggcagaggtaccaaagatttatcgcacacagatggactcgc

SEQ ID NO: 1042 - DNA, 225 bp, unidentified
  misc_feature 1..225: note = Encodes 16S rRNA from Clostridium XlVa
  source 1..225: mol_type = genomic DNA
agagtttgatcatggctcaggatgaacgctggcggcgcgcataacacatgcaagtcgaacggagtgtaattgaaacctagtgattttacacttagtggcggacgggtgagtaacgcgtgggtaacctgcctggtattgggggacaacagttagaaatgactgctaataccgcatacgacgtcggggaggcatctccctgacgggaaaggaattatccgatatcag

SEQ ID NO: 1043 - DNA, 225 bp, unidentified
  misc_feature 1..225: note = Encodes 16S rRNA from Saccharofermentans
  source 1..225: mol_type = genomic DNA
agagtttgatcatggctcaggacgaacgctggcggcgtgcctaacacatgcaagtcgagcggaactgattctggaaagcttcggccggaagggatgagtttagcggcggacgggtgagtaacgcgtgagcaacctgtccttcacagggggataagacagcgaaagttgttctaataccgcataggaccacgggtgggcatccatctggggtgaaaggagcaatcc

SEQ ID NO: 1044 - DNA, 225 bp, unidentified
  misc_feature 1..225: note = Encodes 16S rRNA from Clostridium XlVb
  source 1..225: mol_type = genomic DNA
agagtttgatcctggctcaggatgaacgctggcggcgtgcttaacacatgcaagtcgaacgaagatatttaagatgaaggcttcggtctgatttttttatattcttagtggcggacgggtgagtaacgcgtgggcaacctgccctttactggggaataatcattggaaacgatgactaataccgcatgtcaccgaggactggcatctttcctcggaaaaaggagc

SEQ ID NO: 1045 - DNA, 225 bp, unidentified
  misc_feature 1..225: note = Encodes 16S rRNA from Ruminococcus
  source 1..225: mol_type = genomic DNA
agagtttgatcatggctcaggacgaacgctggcggcacgcttaacacatgcaagtcgaacgaaaaagtttcaccgcagcttgctgcaccgaaactttttagtggcggacgggtgagtaacacgtgagcaatctgccttttagagggggataccagttggaaacgactgttaataccgcataacatatcgaaaccgcatgattttgatatcaaagatttatcgctg

SEQ ID NO: 1046 - DNA, 178 bp, unidentified
  misc_feature 1..178: note = Encodes 16S rRNA from Fibrobacter
  source 1..178: mol_type = genomic DNA
agagtttgatcctggctcaggatgaacgctggcggcgcgcctaacacatgcaagtcgaacggaagaagcatttcggtgtgtaaaccactgtcgtgagggaataaggcgtcttctcggagacgttgaatgtacctcgaaaggaagcaccggcaaacttcgtgccagcagccgcggtaat

SEQ ID NO: 1047 - DNA, 225 bp, unidentified
  misc_feature 1..225: note = Encodes 16S rRNA from Proteiniclasticum
  source 1..225: mol_type = genomic DNA
agagtttgatcatggctcaggacgaacgctggcggcgtgcttaacacatgcaagtcgtacggggtatagcaatatacctagtggcgaacgggtgagtaacacgtgagtaacctgccctatacagggggacaacagctggaaacggctgctaataccgcataagaccacagcaccgcatggtgcagaggtaaaaggctacggccggtataggatgggcttgcgtac

SEQ ID NO: 1048 - DNA, 225 bp, unidentified
  misc_feature 1..225: note = Encodes 16S rRNA from Anaeroplasma
  source 1..225: mol_type = genomic DNA
agagtttgatcctggctcaggattaacgctggcggcgtgcctaatacatgcaagtcgaatggttagcttgctaaccatggcgaacgggtgagtaacacgtaggcaacctgtctataagacgaggataaccattggaaacgatggataatactggataggatattggaaggcatcttctaatatttaaagatttatcactaatagaggggcctgcggcgcattagc

SEQ ID NO: 1049 - DNA, 225 bp, unidentified
  misc_feature 1..225: note = Encodes 16S rRNA from unidentified taxa
  source 1..225: mol_type = genomic DNA
agagtttgatcctggctcaggacgaacgctggcggtgtgcctcatacatgcaagtcgaacgataaggttccttcgggaatacataagtggcggacgggtgagtacaacataggaaatctgccctaaagcgggggacaacagagggaaacttctgctaataccccatatgagcttggttgaaataccaatcttgaaagatttatcactttaggatgagcctgtgcc

SEQ ID NO: 1050 - DNA, 225 bp, unidentified
  misc_feature 1..225: note = Encodes 16S rRNA from Algoriphagus
  source 1..225: mol_type = genomic DNA
agagtttgatcctggctcaggatgaacgctggcggcaggcctaatacatgcaagtcgcgcgggaattgccctttcgggggtgatgagagcggcggacgggtgcgtaacgcgtatgcaaccaacccccgacaggcggatagccggtggaaacgccggataatacgccatgaaccctttttggggcatcccagggaggggaaagcggagacgcggtcggggacgggc

SEQ ID NO: 1051 - DNA, 225 bp, unidentified
  misc_feature 1..225: note = Encodes 16S rRNA from Clostridium XlVa
  source 1..225: mol_type = genomic DNA
agagtttgatcatggctcaggatgaacgctggcggcgtgcttaacacatgcaagtcgaacgaagcgtctcgcccgaagaagcgaagtgcttgcacggagtggattcaattgagacgacttagtggcggacgggtgagtaacgcgtgggtaacctgccgtatgcagggggacaacagttggaaacgactgctaataccgcataagcgcacggctcggcatcgagca

SEQ ID NO: 1052 - DNA, 225 bp, unidentified
  misc_feature 1..225: note = Encodes 16S rRNA from Howardella
  source 1..225: mol_type = genomic DNA
agagtttgatcatggctcaggataaacgctggcggcgcacataagacatgcaagtcgaacggacttaacttctagcttgctagaagagcggttagtggcggactggtgagtaacacgtaagaaatctgcctatcagaggggaataacagtgagaaatcattgctaataccgcatatgccataatcatcgcatgatgatagtgggaaagaagcaattcgctgatag

SEQ ID NO: 1053 - DNA, 225 bp, unidentified
  misc_feature 1..225: note = Encodes 16S rRNA from Clostridium XlVa
  source 1..225: mol_type = genomic DNA
agagtttgatcatggctcaggatgaacgctggcggcgtgcctaacacatgcaagtcgaacgggggcgttccgccggggaggcttcggccgaaccatggggcgcccgagtggcggacgggtgagtaacgcgtggacaacctgccccccaccggggaataacacctggaaacaggtgctaataccgcatgagccccagagcccgcatgggcactgggggaaagctcc

SEQ ID NO: 1054 - DNA, 225 bp, unidentified
  misc_feature 1..225: note = Encodes 16S rRNA from Barnesiella
  source 1..225: mol_type = genomic DNA
agagtttgatcatggctcaggatgaacgctagcgacaggcctaacacatgcaagtcgaggggcagcgagaggaaagcttgctttctttgtcggcgaccggcgcacgggtgcgtaacgggtgtgcaatctgcccataatcggggcatagcctaacgaaagttggattaattccccatgtgctatggagaggcatctcttcgtagtgaaacgtaaggattatggttg

SEQ ID NO: 1055 - DNA, 225 bp, unidentified
  misc_feature 1..225: note = Encodes 16S rRNA from Clostridium IV
  source 1..225: mol_type = genomic DNA
agagtttgatcctggctcaggacgaacgctggcggcgtgcctaacacatgcaagtcgagcggggactttacgacagatttgaagacttcggttgaatatgaagatgtaaagttctagcggcggacgggtgagtaacgcgtgagcaacctgtcccttacagggggataacacagcgaaagttgtactaataccgcatgagaccacagtatcacatggtacaggggt

SEQ ID NO: 1056 - DNA, 225 bp, unidentified
  misc_feature 1..225: note = Encodes 16S rRNA from Prevotella
  source 1..225: mol_type = genomic DNA
agagtttgatcatggctcaggatgaacgctagctacaggcttaacacatgcaagtcgaggggcagcatgtcggtggcttgccaccggcgatggcgaccggcgcacgggtgagtaacgcgtatccaacctgcccacaacctccgaatagcccgccgaaaggcggattaatgcgggatgtggtctgaagaagacatctgaactagaccaaaggttttttccggttgt

SEQ ID NO: 1057 - DNA, 225 bp, unidentified
  misc_feature 1..225: note = Encodes 16S rRNA from Clostridium XlVa
  source 1..225: mol_type = genomic DNA
agagtttgatcctggctcaggacgaacgctggcggcgtgcttaacacatgcaagtcgaacgaggataatgacttcggtcattattcgagtggcggacgggtgagtaacgcgtgagcaatctgtccttaagagggggataacaactggaaacagttgctaataccgcataagaccacggcttcacatggagctgaggtaaaagaagcaattcgcttaagggtgagc

SEQ ID NO: 1058 - DNA, 225 bp, unidentified
  misc_feature 1..225: note = Encodes 16S rRNA from Butyricimonas
  source 1..225: mol_type = genomic DNA
agagtttgatcctggctcaggatgaacgctagcggcaggcttaacacatgcaagtcgaggggcagcgcggggtagcaatactctggcggcgaccggcggaagggtgcgtaacgcgtgagcaacttgcccgtcactgtgggataggcactggaaacggtgtgtaataccacgtaatacatttgctcgcatgggtggatgttgaaaggattaccggtgacggatggg

SEQ ID NO: 1059 - DNA, 225 bp, unidentified
  misc_feature 1..225: note = Encodes 16S rRNA from Blautia
  source 1..225: mol_type = genomic DNA
agagtttgatcctggctcaggatgaacgctggcggcgtgcctaacacatgcaagtcgaacggagcttatttctgcggagatttcggtcaaagcgggtttaagtttagtggcggacgggtgagtaacgcgtggagaacctgccctgtaccgggggataacagccggaaacggctgctaataccgcataagcgcacgaaggcgcatgccttagtgtgaaaaactccg

SEQ ID NO: 1060 - DNA, 204 bp, unidentified
  misc_feature 1..204: note = Encodes 16S rRNA from Prevotella
  source 1..204: mol_type = genomic DNA
agagtttgatcatggctcaggatgaacgctagctacaggctttggtcaatgggcgcgagcctgaaccagccaagtagcgtgcaggatgacggccctatgggttgtaaactgcttttatgcggggataaagttcactacgtgtagtgttttgtaggtaccgcatgaataaggaccggctaattccgtgccagcagccgcggtaat

SEQ ID NO: 1061 - DNA, 225 bp, unidentified
  misc_feature 1..225: note = Encodes 16S rRNA from Clostridium XlVa
  source 1..225: mol_type = genomic DNA
agagtttgatcctggctcaggatgaacgctggcggcgtgcctaacacatgcaagtcgaacggggtacagacgctgtgagaagaagtgcttgcacggaatcaaacttgtttgtacctagtggcggacgggtgagtaacgcgtggaaaacctgcctcatacagggggataacaggaagaaattcctgctaataccgcataagcgcacaagagggcatcctcaggtgt

SEQ ID NO: 1062 - DNA, 225 bp, unidentified
  misc_feature 1..225: note = Encodes 16S rRNA from Blautia
  source 1..225: mol_type = genomic DNA
agagtttgatcatggctcaggatgaacgctggcggcgtgcctaacacatgcaagtcgaacgggacttatcaggaaaaaagcttcggcagatggaatggtaagtctagtggcggacgggtgagtaacgcgtggggaacctgccctgtactgggggataacagtgagaaatcactgctaataccgcataagcgcacagtaccgcatggtacagtgtgaaaaactccg

SEQ ID NO: 1063 - DNA, 225 bp, unidentified
  misc_feature 1..225: note = Encodes 16S rRNA from Clostridium IV
  source 1..225: mol_type = genomic DNA
agagtttgatcctggctcaggacgaacgctggcggcgcgcctaacacatgcaagtcgaacgggaaatatctgaaagcttgcttttggatatttttagtggcggacgggtgagtaacacgtgagcaacctgccttagagagggggataacgtctggaaacggacgctaataccgcataacatcacgatatggcatcgtattgtgatcaaaggagcaatccgcttta

SEQ ID NO: 1064 - DNA, 225 bp, unidentified
  misc_feature 1..225: note = Encodes 16S rRNA from Flavobacterium
  source 1..225: mol_type = genomic DNA
agagtttgatcatggctcaggatgaacgctagcggcaggcttaacacatgcaagtcgaggggcagcatgagagcgtagcaatacattcttgatggcgaccggcgcaagggtgcgtaacgcgtgagcaacttgcccgcatcaggggcataatcggtggaaacgccgtctaactccccataacatacgaggtggcatcactttgtattgaaatccttggaggatgcg

SEQ ID NO: 1065 - DNA, 225 bp, unidentified
  misc_feature 1..225: note = Encodes 16S rRNA from Prevotella
  source 1..225: mol_type = genomic DNA
agagtttgatcctggctcaggatgaacgctagctacaggcttaacacatgcaagtcgaggggcagcatgtcgtgtgcttgcacacgatgatggcgaccggcgcacgggtgagtaacgcgtatccaacctgcccatgaccccgggatagcccgctgaaaagcggattaacaccggatgcggtcgaacgaggacatctgatttcgaccaaagcttcggcggtcatgg

SEQ ID NO: 1066 - DNA, 225 bp, unidentified
  misc_feature 1..225: note = Encodes 16S rRNA from Clostridium XlVa
  source 1..225: mol_type = genomic DNA
agagtttgatcctggctcaggatgaacgctggcggcgtgcctaacacatgcaagtcgaacggggttgtgcgctgaggaagcttcggcagaatcttgcacaacctagtggcggacgggtgagtaacgcgtggacaacctgcccctgcctgggggacaacagccggaaacggctgctaataccgcataagctctgttattcgcatgggaagcagaggaaaggagaga

SEQ ID NO: 1067 - DNA, 225 bp, unidentified
  misc_feature 1..225: note = Encodes 16S rRNA from Clostridium XlVa
  source 1..225: mol_type = genomic DNA
agagtttgatcctggctcaggatgaacgctggcggcgtgcttaacacatgcaagtcgaacgaagcactggggatgaagttttcggacagaattccctttgacttagtggcggacgggtgagtaacgcgtgggtaacctgcctcacactgggggacaacagctggaaacggctgctaataccgcataagcgcacgaagccgcatggctatgtgtgaaaaactccgg

SEQ ID NO: 1068 - DNA, 225 bp, unidentified
  misc_feature 1..225: note = Encodes 16S rRNA from Eubacterium
  source 1..225: mol_type = genomic DNA
agagtttgatcctggctcaggatgaacgctggcggcgtgcctaacacatgcaagtcgagcgagaaacttatgtgatgcgatttcggtcaaatcttttaagtggaaagcggcggacgggtgagtaacgcgtaggcaacctgcccttagcagggggatagccattggaaacgatgattaaaaccccataatacggatatatcacatgttaaatccgtcaaagattta

SEQ ID NO: 1069 - DNA, 225 bp, unidentified
  misc_feature 1..225: note = Encodes 16S rRNA from Butyricicoccus
  source 1..225: mol_type = genomic DNA
agagtttgatcctggctcaggataaacgctggcggcgtgcataacacattcaagtcgaacggacgatacgagaaacttcggttttttgtaaagttagtggcggacgggtgagtaacacgtgagcaatctgcctttgattgggggataacgcagggaaacttgtgctaataccgcataaagtgccgaggacgcatgaccacggcaccaaagctccggcgatcaaag

SEQ ID NO: 1070 - DNA, 225 bp, unidentified
  misc_feature 1..225: note = Encodes 16S rRNA from Fluviicola
  source 1..225: mol_type = genomic DNA
agagtttgatcatggctcaggatgaacgctagcggcaggcttaacacatgcaagtcgaggggtaacaggcggtagcaatactgtgctgacgaccggcgcacgggtgcgtaacgcgtatgcaacctaccttcaacagggggataagcgggagaaattctgtctaataccccatagagtctagagggcacatgttttttagactaaagccttggtggttggagatgg

SEQ ID NO: 1071 - DNA, 225 bp, unidentified
  misc_feature 1..225: note = Encodes 16S rRNA from Anaerovibrio
  source 1..225: mol_type = genomic DNA
agagtttgatcatggctcaggacgaacgctggcggcgtgcttaacacatgcaagtcgaacggggcgaagaagagcttgctctttggagcctagtggcaaacgggtgagtaacgcgtaggcaacctgcccttcagatggggacaacacctcgaaaggggtgctaataccgaatgacgtatgctggtcgcatgaccggcataccaaaggccgggcaaccggtcactg

SEQ ID NO: 1072 - DNA, 225 bp, unidentified
  misc_feature 1..225: note = Encodes 16S rRNA from Blautia
  source 1..225: mol_type = genomic DNA
agagtttgatcctggctcaggatgaacgctggcggcgtgcctaacacatgcaagtcgaacggatttcctaatgacagaggcttcggccaacgaagtttggaagttagtggcggacgggtgagtaacgcgtggagaacctgccctgtactgggggataacatcaggaaactggtgctaaaaccgcataagcgcacaagaccgcatggtcaagtgtgaaaaactccg

SEQ ID NO: 1073 - DNA, 225 bp, unidentified
  misc_feature 1..225: note = Encodes 16S rRNA from unidentified taxa
  source 1..225: mol_type = genomic DNA
agagtttgatcctggctcagaacgaacgctggtagcgtggattaggcatgcaagtcgaacgggatccgggaggtagcaatacttcctggtgagagtggcggattggggaggaacacgtgagcaacctgcctttgagtcggggaaaaccgttggaaacgacggctaataccggatgtggcgcccggagacatcttcggagcgctaaagggggccgcaaggctctcg

SEQ ID NO: 1074 - DNA, 225 bp, unidentified
  misc_feature 1..225: note = Encodes 16S rRNA from Clostridium sensu stricto
  source 1..225: mol_type = genomic DNA
agagtttgatcctggctcaggacgaacgctggcggcatgcctaacacatgcaagtcgaacggaataagaatggttgtagcgatactttcgttcttatttagtggcgaacgggtgagtaacacgtgagcaacctgccttctactcagggataacagccggaaacggctgctaataccggataagaccacgccgaggcatctcggaggggtcaaagcgccttagcgg

SEQ ID NO: 1075 - DNA, 225 bp, unidentified
  misc_feature 1..225: note = Encodes 16S rRNA from Spirochaeta
  source 1..225: mol_type = genomic DNA
agagtttgatcctggctcagaacgaacgctggcggcgcgtcttaagcatgcaagtcgagcggcaagctgccttcgggcagcctagagcggcggactggtgagtaacgcgtggatgacgcaccctcctgatcgggatagcctgtggaaacacagggtaataccggataagcccgcccgcgttggaggcgagcggggaaaggggctattgccccgctggaggagcgg

SEQ ID NO: 1076 - DNA, 225 bp, unidentified
  misc_feature 1..225: note = Encodes 16S rRNA from Clostridium XI
  source 1..225: mol_type = genomic DNA
agagtttgatcatggctcaggatgaacgctggcggcgtgcttaacacatgcaagtcgaacggagacatgttttggaagttttcggatggaagagatatgtcttagtggcggacgggtgagtaacacgtaaacaatctgcctttgagagcgggacaacagatagaaatatttgctaataccgcataagaccacaggttcgcatgaactaggggtaaaaggggagca

SEQ ID NO: 1077 - DNA, 225 bp, unidentified
  misc_feature 1..225: note = Encodes 16S rRNA from Anaerovorax
  source 1..225: mol_type = genomic DNA
agagtttgatcctggctcaggatgaacgctggcggcgtgcctaacacatgcaagtcgagcgagaaacctctttgaagatacttcggttgattctgtgaggcggaaagcggcggacgggtgagtaacgcgtaggcaacctgccccatgcagagggatagcctcgggaaaccgggattaaaacctcataatacggaagagagacatctctttttcgtcaaagattta

SEQ ID NO: 1078 - DNA, 225 bp, unidentified
  misc_feature 1..225: note = Encodes 16S rRNA from Roseburia
  source 1..225: mol_type = genomic DNA
agagtttgatcctggctcaggatgaacgctggcggcgtgcttaacacatgcaagtcgaacgaatttctttcagaacgcggcttcggccaagggacggaagaagtgagtggcggacgggtgagtaacgcgtgggtaacctgcctcacattgggggataccagtcggaaacgactgctaataccgcataagaccccggcaccgcatggtgctgaggccaaaactccg

SEQ ID NO: 1079 - DNA, 225 bp, unidentified
  misc_feature 1..225: note = Encodes 16S rRNA from Mucilaginibacter
  source 1..225: mol_type = genomic DNA
agagtttgatcatggctcaggatgaacgctagcggcaggcctaatacatgcaagtcgaacgggatgggccccttcgggggccctgagagtggcgcacgggtgcgcaacgcgtatgcaaccaacccccgacaggcggatagccggtggaaacgccggataatacgccatggttccggtggagggcatcctctactggataaagccgagaggcggtcggggacgggc

SEQ ID NO: 1080 - DNA, 225 bp, unidentified
  misc_feature 1..225: note = Encodes 16S rRNA from Clostridium XI
  source 1..225: mol_type = genomic DNA
agagtttgatcctggctcaggatgaacgctggcggcatgcctaacacatgcaagtcgaacggagatagaaatatcttagtggcgaacgggtgagtaacacgtgagcaacctgccttgtacacagggataacagatggaaacatctgctaataccggataagaccacagaccggcatcggtcaggggtaaaagtgatttagcggtacaagatgggctcgcgtccaa

SEQ ID NO: 1081 - DNA, 225 bp, unidentified
  misc_feature 1..225: note = Encodes 16S rRNA from Lachnospiracea incertae sedis
  source 1..225: mol_type = genomic DNA
agagtttgatcatggctcaggatgaacgctggcggcgtgcctaacacatgcaagtcgaacgaagctctgctgcggaactcttcggagggaaggagcggatgactgagtggcggacgggtgagtaacgcgtgggtaacctgccctgtacagggggacaacagttagaaatgactgctaataccgcataagcgtacggtgccgcatggcacagtgcgaaaaaccgag

SEQ ID NO: 1082 - DNA, 225 bp, unidentified
  misc_feature 1..225: note = Encodes 16S rRNA from Prevotella
  source 1..225: mol_type = genomic DNA
agagtttgatcatggctcaggatgaacgctagctacaggcctaacacatgcaagtcgaggggcagcatggaggttgcttgcaacttccgatggcgaccggcgaatgggtgagtcacgcgtgtccaacctgcctccggcccggggatagcccttggaaatgaggattaagacccgataggtggcgcttccgcatggcggcgccatgaaacgagaccggagatgggg

SEQ ID NO: 1083 - DNA, 225 bp, unidentified
  misc_feature 1..225: note = Encodes 16S rRNA from Clostridium III
  source 1..225: mol_type = genomic DNA
agagtttgatcctggctcaggacgaacgctggcggcgtgcctaacacatgcaagtcgaacgagaatttagtaaatgatttcttcggaatgattttgctaaaggaaagtggcggacgggcgagtaacgcgtgagtaacctgcccataagagggggataatccttggaaacgaggactaataccgcatattgtagctttaccgcatggtttagttatgaaagattta

SEQ ID NO: 1084 - DNA, 225 bp, unidentified
  misc_feature 1..225: note = Encodes 16S rRNA from Lachnospiracea incertae sedis
  source 1..225: mol_type = genomic DNA
agagtttgatcctggctcaggataaacgctggcggcgtgcttaacacatgcaagtcgaacgaagcattttgccacgatcccttcggggtgacggcattctgacttagtggcggacgggtgagtaacgcgtggacaacctgccgcatgcagggggataacagccggaaacggctgctaataccgcataagcgcacagtgccgcatggcacggtgtgaaaaactttc

SEQ ID NO: 1085 - DNA, 225 bp, unidentified
  misc_feature 1..225: note = Encodes 16S rRNA from Coprococcus
  source 1..225: mol_type = genomic DNA
agagtttgatcctggctcaggatgaacgctggcggcgtgcttaacacatgcaagtcgaacggagtttagcgcttccgaagcttcggcagaggattgttaaacttagtggcggacgggtgagtaacgcgtgggtaacctgccatgtacagggggataacacttagaaataggtgctaataccgcataagcgcacaggaccgcatggtccggtgtgaaaaactgagg

SEQ ID NO: 1086 - DNA, 225 bp, unidentified
  misc_feature 1..225: note = Encodes 16S rRNA from Acholeplasma
  source 1..225: mol_type = genomic DNA
agagtttgatcctggctcaggatgaacgctggcggcgtgcctaatacatgcaagtcgaacgctaactttcgggttagagtggcgaacgggtgagtaacacgtaggtaacctgcccataagacgaggataactactggaaacggtagctaatactggatagtatatagagtcgcatggctttatatttaaagatgccttcaagcatcacttatggatggacctgcg

SEQ ID NO: 1087 - DNA, 225 bp, unidentified
  misc_feature 1..225: note = Encodes 16S rRNA from Clostridium III
  source 1..225: mol_type = genomic DNA
agagtttgatcctggctcaggacgaacgctggcggcgtgcctaacacatgcaagtcgaacgagaatttagcaaatgatttcttcggaatgattttactaaaggaaagtggcggacgggcgagtaacgcgtgagtaacctgcccataagagggggataatccttggaaacggggactaataccgcatatagtaattttaccgcatggtttaattatgaaagattta

SEQ ID NO: 1088 - DNA, 225 bp, unidentified
  misc_feature 1..225: note = Encodes 16S rRNA from Lactobacillus
  source 1..225: mol_type = genomic DNA
agagtttgatcctggctcaggatgaacgccggcggtgtgcctaatacatgcaagtcgaacgcgttggcccaactgattgaacgtgcttgcacggacttgacgttggtttaccagcgagtggcggacgggtgagtaacacgtaggtaacctgccccaaagcgggggataacatttggaaacagatgctaataccgcataacaatttgaatcgcatgattcaaattt

SEQ ID NO: 1089 - DNA, 225 bp, unidentified
  misc_feature 1..225: note = Encodes 16S rRNA from Clostridium IV
  source 1..225: mol_type = genomic DNA
agagtttgatcatggctcaggacgaacgctggcggcgtgcttaacacatgcaagtcgaacgagaatcagtggaaagagttttcggacgatggaagctgaggaaagtggcggacgggtgagtaacgcgtgaggaacctgccttggagagggggacaacagccggaaacggctgctaataccgcatgacatatctgaatcgcatggtttggatatcaaagaattatc

SEQ ID NO: 1090 - DNA, 225 bp, unidentified
  misc_feature 1..225: note = Encodes 16S rRNA from Prevotella
  source 1..225: mol_type = genomic DNA
agagtttgatcatggctcaggatgaacgctagctacaggcttaacacatgcaagtcgaggggcatcgggagggaagcttgctttccttgccggcgaccggcgcacgggtgagtaacgcgtatccaacctgccgcacagtaggggatagcccggagaaatccggattaataccctatgttctccgagtcagtcatctgaattggagcaaaggttcgccgctgtgcg

SEQ ID NO: 1091 - DNA, 225 bp, unidentified
  misc_feature 1..225: note = Encodes 16S rRNA from Bifidobacterium
  source 1..225: mol_type = genomic DNA
agagtttgatcatggctcaggatgaacgctggcggcgtgcttaacacatgcaagtcgaacgggatcctgcgggctttgcttgcgggtgagagtggcgaacgggtgagtaatgcgtgaccaacctgccccatgctccggaatagctcctggaaacgggtggtaatgccggatgctcccgcgccccgcatggggtgtggggaaagctttcgtggcatgggatggggt

SEQ ID NO: 1092 - DNA, 225 bp, unidentified
  misc_feature 1..225: note = Encodes 16S rRNA from Adhaeribacter
  source 1..225: mol_type = genomic DNA
agagtttgatcctggctcaggatgaacgctggcggcaggcttaatacatgcaagtcgaacggtaaggcccgaggtagcaataccgagggtacacgagtggcgcacgggtgcgtaacgcgtatgtaatctgcccctgaccggaacaaaacagctggaaacggctgctaatattccatggccatcttcccgggcatccgggaggatgtaaagattcattggtcgggg

SEQ ID NO: 1093 - DNA, 225 bp, unidentified
  misc_feature 1..225: note = Encodes 16S rRNA from Hydrogenoanaerobacterium
  source 1..225: mol_type = genomic DNA
agagtttgatcatggctcaggagaaacgctggcggcgcacataagacatgcaagtcgaacggaatttagccgaatgtttacatgaggcgaagatttagtggcggacgggtgagtaacacgtgagcaacctaccttggagagggggataacattgagaaatcagtgctaataccgcataaaactaatttattgcatgatagattagtcaaaggagaaatccgctct

SEQ ID NO: 1094 - DNA, 225 bp, unidentified
  misc_feature 1..225: note = Encodes 16S rRNA from Acetivibrio
  source 1..225: mol_type = genomic DNA
agagtttgatcctggctcaggacgaacgctggcggcgtgcttaacacatgcaagtcgaacgggacttcagggaacgaggcttcggccaagcgaactgaagtttagtggcggacgggtgagtaacgcgtgagtaacctgcctatcacagggggacaacagttggaaacgactgctaataccgcataacgtattttcggggcatcccggggataccaaaggagcaat

SEQ ID NO: 1095 - DNA, 225 bp, unidentified
  misc_feature 1..225: note = Encodes 16S rRNA from unidentified taxa
  source 1..225: mol_type = genomic DNA
agagtttgatcctggctcaggatgaacgctggcggcgtgcttcatacatgcaagtcgaacgagaaatggcagcttgctgccatggaaagtggcggacgggtgagtaatacatagggaatctgcccctagccgggggacaacagttggaaacgactgctaataccgcatatgagatagattgaaatatttatcttgaaaactccggtggctagggatgagcctgtg

SEQ ID NO: 1096 - DNA, 225 bp, unidentified
  misc_feature 1..225: note = Encodes 16S rRNA from Flammeovirga
  source 1..225: mol_type = genomic DNA
agagtttgatcatggctcaggatgaacgctagcggcaggccttatacatgcaagtcgaggggtaacatggtgtagcaatacattgatgacgaccggcgtatgggtgagtaatacgtacgtaatctacctcatatagaagaataactcctagaaatgggaactaatgcttcatacagttttaaaaggaatcttttaaaatgaaagatttatcgatatgggatgagc

SEQ ID NO: 1097 - DNA, 225 bp, unidentified
  misc_feature 1..225: note = Encodes 16S rRNA from Dethiosulfovibrio
  source 1..225: mol_type = genomic DNA
agagtttgatcatggctcaggatgaacgctggcggcgtgcttaacacattcaagtcgaacggagtattatcgggagcttgcttttgataatacttagtggcggacgggtgagtaatacatgagcaacctgcctttaagagggggataacacagagaaatttgtgctaataccgcatagaacactgagatggcatcatcatagtgggaaaggagcaatccgcttaa

SEQ ID NO: 1098 - DNA, 225 bp, unidentified
  misc_feature 1..225: note = Encodes 16S rRNA from Hippea
  source 1..225: mol_type = genomic DNA
agagtttgatcctggctcaggacgaacgctggcggcgtgcctaacacatgcaagtcgagcgaattcttacagagtatcgtaagagttagcggcaaacgggtgagtaacacatgggaaacctcccttagaatggggaacatctccgtgaaaacggagctaataccgcataagaccacagtttggcatcaaacaggggtaaaagcagcaatgcgttctaagatggtc

SEQ ID NO: 1099 - DNA, 225 bp, unidentified
  misc_feature 1..225: note = Encodes 16S rRNA from Faecalibacterium
  source 1..225: mol_type = genomic DNA
agagtttgatcctggctcaggataaacgctggcggcgcacataagacatgcaagtcgaacggacgaagttagaatctttacgtttttaactaagttagtggcggactggtgagtaacgcgtgaataacctacctattagaggggaataacgaagagaaattttcgctaataccgcataagctgataggaccgcatggtctagtcagaaaaggagtaatccgctaa

SEQ ID NO: 1100 - DNA, 225 bp, unidentified
  misc_feature 1..225: note = Encodes 16S rRNA from Spirochaeta
  source 1..225: mol_type = genomic DNA
agagtttgatcatggctcagaacgaacgctggcggcgcgttttaagcatgcaagtcgcagggtaaaattttagcaatagaattgagactggcgaacgggtgagtaacacgtgaaaatctaccttgagatgggggatagccggtagaaatatcgggtaataccgcatatgccgagaggtgaaaggggcaactgctccgtcttgagatgagtttgcgtctgattaga

SEQ ID NO: 1101 - DNA, 225 bp, unidentified
  misc_feature 1..225: note = Encodes 16S rRNA from Brevundimonas
  source 1..225: mol_type = genomic DNA
agagtttgatcatggctcagaatgaacgctggcggtatgcttaatacatgcaagtcgaacgagaaagttcagcaatggacgagtaaagtggcgtacgggtgagtaatatataggaatctacccagtaatgaggaataagcactggaaacggtgtctaataccacatactaccatttatttgggaaagggttaatggcaacattaacctgttattggatgagccta

SEQ ID NO: 1102 - DNA, 225 bp, unidentified
  misc_feature 1..225: note = Encodes 16S rRNA from Mucilaginibacter
  source 1..225: mol_type = genomic DNA
agagtttgatcatggctcaggatgaacgctagcggcaggcctaatacatgcaagtcgaacgggatgggctccttcgggggccctgagagtggcgcacgggtgcgcaacgcgtatgcaaccaacccccgacaggcggatagccggtggaaacgccggataatacgccatggttccgtgggagggcatcctcctgaggataaagccgagaggcggtcggggacgggc

SEQ ID NO: 1103 - DNA, 225 bp, unidentified
  misc_feature 1..225: note = Encodes 16S rRNA from Hydrogenoanaerobacterium
  source 1..225: mol_type = genomic DNA
agagtttgatcatggctcaggacgaacgctggcggcgcgcctaacacatgcaagtcgaacggaactagtgaccggagggtagagggatctatcttgcgatcactagttcagtggcggacgggtgagtaaaacatgagcaacctggctagtagagggggatagcttttggaaacagaagataataccgcatacatcagagatttcgcatgaagtttttggaaaagg

SEQ ID NO: 1104 - DNA, 225 bp, unidentified
  misc_feature 1..225: note = Encodes 16S rRNA from Asaccharobacter
  source 1..225: mol_type = genomic DNA
agagtttgatcctggctcaggatgaacgctggcggcgtgcctaacacatgcaagtcgaacggttaacccgccttcgggcggtcataaagtggcgaacgggtgagtaacacgtgaccaacctgccccgcgctccgggacagcctcgcgaaagcgggattaataccggatgcaccgcacctttcgcatgatcggtgcgggaaagctccggcggcgcgggatggggtc

SEQ ID NO: 1105 - DNA, 225 bp, unidentified
  misc_feature 1..225: note = Encodes 16S rRNA from Clostridium IV
  source 1..225: mol_type = genomic DNA
agagtttgatcctggctcaggatgaacgctggcggcgtgcataacacattcaagtcgaacgaagcatgtagacggaagttttcggatggaagtatatatgacttagtggcggacgggtgagtaacgcgtgagcaaccttcctgcctgtgagggataacacagggaaacttgtgctaataccgcatgacgcacagacatcgcatggtgagtgtgccaaagatttat

SEQ ID NO: 1106 - DNA, 225 bp, unidentified
  misc_feature 1..225: note = Encodes 16S rRNA from Mogibacterium
  source 1..225: mol_type = genomic DNA
agagtttgatcatggctcaggatgaacgctggcggcgtgcctaatacatgcaagtcgagcgagaagccaatttgaagcgttttcggacaattctgtttggtggaaagcggcggacgggtgagtaacgcgtaggcaacctgcccttagcagagggatagccattggaaacgatgattaaaacctcataatgccggttttacacatgttggaccggccaaagattta

SEQ ID NO: 1107 - DNA, 225 bp, unidentified
  misc_feature 1..225: note = Encodes 16S rRNA from Clostridium IV
  source 1..225: mol_type = genomic DNA
agagtttgatcctggctcaggacgaacgctggcggcgtgcctaacacatgcaagtcgaacggagttattagagtgaagttttcggatggagcgaagataacttagtggcggacgggtgagtaacgcgtgagtaacctgcccattagagggggataacgttctgaaaagaacgctaataccgcataatatatttagttcgcatgaactgaatatcaaaggagcaat

SEQ ID NO: 1108 - DNA, 225 bp, unidentified
  misc_feature 1..225: note = Encodes 16S rRNA from Oscillibacter
  source 1..225: mol_type = genomic DNA
agagtttgatcatggctcaggacgaacgctggcggcgtgcctaacacatgcaagtcgaacgaagctccggaagggcgacttcggtcaaacggaaggaagacttagtggcgaacgggtgagtaacgcgtgaggaacctgcctttcagtgggggacaacagttggaaacgactgctaataccgcataacgtacggaggtcgcatgaccattgtaccaaagatttatt

SEQ ID NO: 1109 - DNA, 225 bp, unidentified
  misc_feature 1..225: note = Encodes 16S rRNA from Clostridium XlVa
  source 1..225: mol_type = genomic DNA
agagtttgatcatggctcaggatgaacgctggcggcgtgcctaacacatgcaagtcgagcggagagacagcggagattcaatcgatgatctgcttcttcttagcggcggatgggtgagtaacacgtgggtaacctgccctgcactgggggataacagttggaaacgactgttaataccgcatatgcgcacgggaccgcatggtcctgggcggaaagatttatcgg

SEQ ID NO: 1110 - DNA, 225 bp, unidentified
  misc_feature 1..225: note = Encodes 16S rRNA from Faecalibacterium
  source 1..225: mol_type = genomic DNA
agagtttgatcctggctcaggacgaacgctggcggcatgcctaacacatgcaagtcgaacggtctaagagataaatttttaatttatttcaaggatagtggcgaacgggtgagtaacgcgtgagcaacctaccttttagagggggataacgcttggaaacaggcgctaataccgcataagctccgagtattgagtgatacaaggagaaaaggaggaatccgctaa

SEQ ID NO: 1111 - DNA, 225 bp, unidentified
  misc_feature 1..225: note = Encodes 16S rRNA from Altererythrobacter
  source 1..225: mol_type = genomic DNA
agagtttgatcctggctcagaacgaacgctggcggcatgcttaacacatgcaagtcgaacggtgttttctagtacttgtattaggaaacatagtggcaaacgggtgagtaacgcgtgggaatgtacccttaagtattggataacgtctggaaacggacgctaatacaatatacgctcgagagaggaaagagagatcgctgaaggagtagcccgcgttagattagg

SEQ ID NO: 1112 - DNA, 225 bp, unidentified
  misc_feature 1..225: note = Encodes 16S rRNA from Gelidibacter
  source 1..225: mol_type = genomic DNA
agagtttgatcctggctcaggataaacgctagcggcaggcctaacacatgcaagtcgagcggtaacgggagtagcaatacttgccgacgagcggcggacgggtgagtaacgcgtatgcaacctaccctttattcagggatagccttccgaaaggaggattaatacctgatggttcatttgagaggcatcttgataatgataaagatttattgataaaggatgggc

SEQ ID NO: 1113 - DNA, 225 bp, unidentified
  misc_feature 1..225: note = Encodes 16S rRNA from Prevotella
  source 1..225: mol_type = genomic DNA
agagtttgatcatggctcaggatgaacgctagctacaggcttaacacatgcaagtcgaggggcatcacgggattggtttcggccattcctggtggcgaccggcgcacgggtgagtaacgcgtatccaacctgcccgcaaccgcggaatagcccgccgaaaggcggattaatgccgcatgcgctcgcgcgctggcatctgatcgcgagcaaaggtttttccggttg

SEQ ID NO: 1114 - DNA, 225 bp, unidentified
  misc_feature 1..225: note = Encodes 16S rRNA from Anaerovorax
  source 1..225: mol_type = genomic DNA
agagtttgatcatggctcaggatgaacgctggcggcgtgcctaacacatgcaagtcgagcgagaatctttgaagtagcttgctacggagaagaggacagcggcggacgggtgagtaacgcgtaggtaagctgccccttgcagaaggatagcctcgggaaactgggattaatacttcataaagcgttttcatcgcatggtgagaacgccaaagatctatcggcaag

SEQ ID NO: 1115 - DNA, 225 bp, unidentified
  misc_feature 1..225: note = Encodes 16S rRNA from Riemerella
  source 1..225: mol_type = genomic DNA
agagtttgatcatggctcaggatgaacgctagcgggaggcctaacacatgcaagccgagcggtagaaagtagcttgctacttttgagagcggcgtacgggtgcggaacacgtgtgcaacctgcctttatctggggaatagcctttcgaaaggaagattaatgccccataacatattgattggcatcaattaatattgaaagctccggcggatagagatgggcacg

SEQ ID NO: 1116 - DNA, 225 bp, unidentified
  misc_feature 1..225: note = Encodes 16S rRNA from Sphingobacterium
  source 1..225: mol_type = genomic DNA
agagtttgatcatggctcaggatgaacgctagcggcaggcctaatacatgcaagtcgaacgggatctactggtaagcttgcttattggtagtgagagtggcgcacgggtgcgtaacgcgtgagcaacctacccttgtcagggggatagcccggcgaaagtcggattaataccgcatgacatcattgagaggcatctttcggtgatcaaagatttatcggacaagg

SEQ ID NO: 1117 - DNA, 225 bp, unidentified
  misc_feature 1..225: note = Encodes 16S rRNA from Syntrophococcus
  source 1..225: mol_type = genomic DNA
agagtttgatcatggctcaggatgaacgctggcggcgtgcctaacacatgcaagtcgaacgaggctctgatccccgatgattcgtctgaagggaaaggatgtccgagtggcggatgggtgagtaacgcgtggagaacctgccccctgctgggggataacaactggaaacggttgacaataccgcataagcgcttttgatcgcatgatctgaagcggaaagattta

SEQ ID NO: 1118 - DNA, 225 bp, unidentified
  misc_feature 1..225: note = Encodes 16S rRNA from Bacteroides
  source 1..225: mol_type = genomic DNA
agagtttgatcatggctcaggatgaacgctagctacaggcttaacacatgcaagtcgaggggcatcgcggtgtagcaatacactggcggcgaccggcgcacgggtgagtaacacgtatccaacctgccttcagctcggggatagccctctgaaaggaggattaatacccgatgtggtttttcgcagacatctgcgtataattaaagatttatcggctgatgatgg

SEQ ID NO: 1119 - DNA, 225 bp, unidentified
  misc_feature 1..225: note = Encodes 16S rRNA from Papillibacter
  source 1..225: mol_type = genomic DNA
agagtttgatcctggctcaggatgaacgctggcggcgtgcataacacattcaagtcgaacgaagcactttggcggaaccttcgggggaagctgatttgacttagtggcggacgggtgagtaacgcgtgagcaaccttcctgcttgtgagggataacacagggaaacttgtgctaataccgcatgacgcatagacatcgcatggtgactatgccaaagacatgttg

SEQ ID NO: 1120 - DNA, 225 bp, unidentified
  misc_feature 1..225: note = Encodes 16S rRNA from Butyricicoccus
  source 1..225: mol_type = genomic DNA
agagtttgatcctggctcaggatgaacgctggcggcgtgcataacacattcaagtcgaacgggacttagagggcttgccctttaagtttagtggcggacgggtgagtaacgcgtgagtaacctacctacatgagagggataacacagggaaacttgtgctaataccacataacatactgaattcgcatgtatttagtatcaaagagcaatcgcatatagatggac

SEQ ID NO: 1121 - DNA, 225 bp, unidentified
  misc_feature 1..225: note = Encodes 16S rRNA from Clostridium IV
  source 1..225: mol_type = genomic DNA
agagtttgatcatggctcaggatgaacgctggcggcgtgcctaacacatgcaagtcgaacggactgatttccttcgggaatgaaagttagtggcggacgggtgagtaacgcgtgaggaacctgccttacagagggggataacgataagaaattgtcgctaataccgcataacacctcacacccgcatgggtgaggggtcaaaggagcaatccgctgtaagatggc

SEQ ID NO: 1122 - DNA, 225 bp, unidentified
  misc_feature 1..225: note = Encodes 16S rRNA from Hydrogenoanaerobacterium
  source 1..225: mol_type = genomic DNA
agagtttgatcatggctcaggacgaacgctggcggtatgcctaacacatgcaagtcgaacgggtgtgtaaagagcttgctctttatttcactagtggcggacgggtgagtaacgcgtgagtaatctgccttgaagtggggaataacatttggaaacaaatgctaataccgcgtaatatactttcttcgcatgaagtttgtatcatagtttttcgcttcaagatga

SEQ ID NO: 1123 - DNA, 225 bp, unidentified
  misc_feature 1..225: note = Encodes 16S rRNA from Marvinbryantia
  source 1..225: mol_type = genomic DNA
agagtttgatcatggctcaggatgaacgctggcggcgtgcctaacacatgcaagtcgaacgaagaccccgaagcggagatttcggttgaagctaagggaggactgagtggcggacgggtgagtaacgcgtggataacctgccccatacagggggatagcagttggaaacgactgataataccgcataagcgcacgaggagacatctccctgtgtgaaaagaatta

SEQ ID NO: 1124 - DNA, 225 bp, unidentified
  misc_feature 1..225: note = Encodes 16S rRNA from Brevibacillus
  source 1..225: mol_type = genomic DNA
agagtttgatcatggctcaggatgaacgctggcggcgtgcctaatacatgcaagtcgaacggagaggcctcgacggaaaggtgcttgcaccttgaagatgaggaatcttagtggcgaacgggtgagtaatacatgagcaacctacccctttgactgggataacattctgaaaaggatgctaataccggataattaatattgaggcatctcgatattattaaaggt

SEQ ID NO: 1125 - DNA, 225 bp, unidentified
  misc_feature 1..225: note = Encodes 16S rRNA from Clostridium IV
  source 1..225: mol_type = genomic DNA
agagtttgatcctggctcaggataaacgctggcggcgtgcataacacattcaagtcgaacgaagcactttttcttgagacttcggtcaagagaggatttgacttagtggcggacgggtgagtaacgcgtgagcaacctgcctaccggtgcgggataacgtttggaaacggacgctaataccgcataacgcatagatatcgcatggtatttgtgccaaagattcat

SEQ ID NO: 1126 - DNA, 225 bp, unidentified
  misc_feature 1..225: note = Encodes 16S rRNA from Prevotella
  source 1..225: mol_type = genomic DNA
agagtttgatcatggctcaggatgaacgctagcggcaggcttaacacatgcaagtcgaggggcatcgcggggtagcaatactctggcggcgaccggcgaaagggtgagtaacgcgtgagcaacatgcccttgggtgggggatagtcattggaaacgatgcgtaataccccgtacgacgagagaccgcatgatttttcgttaatagatttattgcccaaggattgg

SEQ ID NO: 1127 - DNA, 225 bp, unidentified
  misc_feature 1..225: note = Encodes 16S rRNA from Clostridium IV
  source 1..225: mol_type = genomic DNA
agagtttgatcatggctcaggatgaacgctggcggcgtgcctaacacatgcaagtcgaacggaacttgagggcttgcccttaagtttagtggcggacgggtgagtaacgcgtgagtaacctgcctttgagaggggaataacttcccgaaagggatgctaataccgcataacacatagctgtcgcatggcagagatgtcaaagattttatcgctcaaagatggact

SEQ ID NO: 1128 - DNA, 225 bp, unidentified
  misc_feature 1..225: note = Encodes 16S rRNA from Aminobacter
  source 1..225: mol_type = genomic DNA
agagtttgatcctggctcagaacgaacgctggcggcaggcttaacacatgcaagtcgagcgccccgcaaggggagcggcagacgggtgagtaacgcgtgggaatctaccttttgctacggaataactcagggaaacttgtgctaataccgtatgtgtccttcgggagaaagatttatcggcaagagatgagcccgcgttggattagctagttggtggggtaaagg

SEQ ID NO: 1129 - DNA, 225 bp, unidentified
  misc_feature 1..225: note = Encodes 16S rRNA from Sporotomaculum
  source 1..225: mol_type = genomic DNA
agagtttgatcatggctcaggacgaacgctggcggcgtgcttaacacatgcaagtcgaacgggcgacccttctacggaaggggagctagtggcggacgggtgagtaacgcgtgagcaaccaacccataagagggggataacaacgggaaaccgttgctaataccgcataagaccaagacagcgcatgctgaaggggtcaaaggagtaatccgcttatggacgggc

SEQ ID NO: 1130 - DNA, 225 bp, unidentified
  misc_feature 1..225: note = Encodes 16S rRNA from Clostridium IV
  source 1..225: mol_type = genomic DNA
agagtttgatcatggctcaggacgaacgctggcggcgcgcctaacacatgcaagtcgaacggagagcgtgttttgaattcttcggaaggaaagatacgtttcttagtggcggacgggtgagtaacacgtgagcaacctgccttgcagagagggataacgattggaaacgatcgctaataccacataacatatggatatcgcatggtgaccatatcaaagatttat

SEQ ID NO: 1131 - DNA, 225 bp, unidentified
  misc_feature 1..225: note = Encodes 16S rRNA from Pedobacter
  source 1..225: mol_type = genomic DNA
agagtttgatcctggctcaggatgaacgctagcggcaggcctaacacatgcaagtcgaggggcagcgcggggtagcaataccctggcggcgaccggcggatgggtgcgtaacgcgtatgcaacctgcctcggacaggaggataaccctgggaagctgggactaatactccgtatgacgagacctcgcatggggtcttgttgaaagccttggtggtccgagatggg

SEQ ID NO: 1132 - DNA, 225 bp, unidentified
  misc_feature 1..225: note = Encodes 16S rRNA from Victivallis
  source 1..225: mol_type = genomic DNA
agagtttgatcatggctcagaatgaacgctggcggcatggattaggcatgcaagtcgaacggggcgcagcgatgcgcccagtggcgaaagggtgagtagcacgtgaagaacctgcccccggatccggaacaagcgctggaaacggcgtctgatacgggatgtggacgcggcccgcatgggccgcgctctaaagattcatcgtccggggagggcttcgcgtcccat

SEQ ID NO: 1133 - DNA, 225 bp, unidentified
  misc_feature 1..225: note = Encodes 16S rRNA from Gelidibacter
  source 1..225: mol_type = genomic DNA
agagtttgatcatggctcaggataaacgctagcggcaggcctaacacatgcaagtcgagcggtaacgggagtagcaatacttgccgacgagcggcggacgggtgagtaacgcgtatgcaacctaccctttattcagggatagccttccgaaaggaggattaatacctgatagtactcaatgagggcatccaaagtgagttaaagatttattgataaaggatgggc

SEQ ID NO: 1134 - DNA, 225 bp, unidentified
  misc_feature 1..225: note = Encodes 16S rRNA from Prevotella
  source 1..225: mol_type = genomic DNA
agagtttgatcatggctcaggatgaacgctagctacaggcttaacacatgcaagtcgaggggcagcatggctgttgcttgcaacagccgatggcgaccggcgcacgggtgagtaacgcgtatccaacctgccccataccgcggcacagcccggagaaatccggattaactccgcatgcggtcctttgatggcatcagtttaggaccaaacgttcagggtatggga

SEQ ID NO: 1135 - DNA, 225 bp, unidentified
  misc_feature 1..225: note = Encodes 16S rRNA from Wautersiella
  source 1..225: mol_type = genomic DNA
agagtttgatcctggctcaggatgaacgctagcgggaggcttaacacatgcaagccgaggggtagagatagcttgctattttgagaccggcgcacgggtgcgtaacgcgtatgcaacttgccctattgaaagggatagcccagagaaatttggattaataccttataataaatttcattgcatgatgagattttgaaagatttatcgcagtaggataggcatgcg

SEQ ID NO: 1136 - DNA, 225 bp, unidentified
  misc_feature 1..225: note = Encodes 16S rRNA from Slackia
  source 1..225: mol_type = genomic DNA
agagtttgatcctggctcaggatgaacgctggcggcgtgcctaacacatgcaagtcgaacggttaaaccggcttttagccggacataaagtggcgaacgggtgagtaacacgtgaccaacctgccccccgcaccgggacaacgggcggaaacgcccgctaataccggatactccgggcgccggcgcatgccggccccgggaaagcccaggcggcgggggatgggg

SEQ ID NO: 1137 - DNA, 225 bp, unidentified
  misc_feature 1..225: note = Encodes 16S rRNA from Pyramidobacter
  source 1..225: mol_type = genomic DNA
agagtttgatcctggctcaggacgaacgctggcggcgtgcttaacacatgcaagttgggcgaggatggtttgaggagacatatgttgaattgaatcgttcgagcagcggacgggtgagtaaagcacaaggacttgtccgaaagagagggacaccttcgggaaaccggagctaatacctcataagccggaaggtgaaaagcagagatgcgcttttggagagacttg

SEQ ID NO: 1138 - DNA, 225 bp, unidentified
  misc_feature 1..225: note = Encodes 16S rRNA from Lachnospiracea incertae sedis
  source 1..225: mol_type = genomic DNA
agagtttgatcatggctcaggatgaacgctggcggcgtgcttaacacatgcaagtcgaacggactttgctcgctgaaaaaggaaggtgcttgcacctgagagtttcttgaggaaagttagtggcggacgggtgagtaacgcgtgggtaacctgcctatcacagggggataacagttggaaacgactgctaataccgcataagcgcacggtatcgcatgatacagt

SEQ ID NO: 1139 - DNA, 225 bp, unidentified
  misc_feature 1..225: note = Encodes 16S rRNA from Clostridium XlVa
  source 1..225: mol_type = genomic DNA
agagtttgatcctggctcaggatgaacgctggcggcgtgcttaacacatgcaagtcgaacggggtacagacgctgaagagtggagtgcttgcacaaagcgattcttgtttgtacctagtggcggacgggtgagtaacgcgtgggtaacctgccatacacagggggacaacagttggaaacgactgctaataccgcatatgcacacagtgaggcatctcacagggt

SEQ ID NO: 1140 - DNA, 225 bp, unidentified
  misc_feature 1..225: note = Encodes 16S rRNA from Prevotella
  source 1..225: mol_type = genomic DNA
agagtttgatcatggctcaggatgaacgctagctacaggcttaacacatgcaagtcggggggcagcacgggaagcagcaatgcttttgggtggcgaccggcgaatgggtgagtaacgagtatccaacctgccccgtgctccgggacagccccgcgaaagcgggattaataccggatggtgcgtatgttccgcatgggatatacgtcaaagattcatcggcacggg

SEQ ID NO: 1141 - DNA, 225 bp, unidentified
  misc_feature 1..225: note = Encodes 16S rRNA from Lentisphaera
  source 1..225: mol_type = genomic DNA
agagtttgatcctggctcagaatgaacgctggcggcatggattaggcatgcaagtcgaacgccccgggcttgcccggggagtggcgaaagggtgcgcaacgcgtggggaacccgcccccgggcccgggacaagcgctggaaacggcgtctgatacgggatgtcgagccgggccgcatggcccggcgtcgaaagattcatcgcccggggagggccccgcgtcccat

SEQ ID NO: 1142 - DNA, 225 bp, unidentified
  misc_feature 1..225: note = Encodes 16S rRNA from Desulfoluna
  source 1..225: mol_type = genomic DNA
agagtttgatcatggctcagaatgaacgctggcggcgtgcctcaggcatgcaagtcgaacgagaaagttccttcggggatgagtatagtggcgcacgggtgagtaatacttaggtaacgtaccttttcgctggggatagctaggggaaactttagataataccgaatatatccatttttactgcggtttaaatggagaaagccgtaaggcgcgaagagagcggcc

SEQ ID NO: 1143 - DNA, 225 bp, unidentified
  misc_feature 1..225: note = Encodes 16S rRNA from Clostridium III
  source 1..225: mol_type = genomic DNA
agagtttgatcctggctcaggacgaacgctggcggcgtgcttcatacatgcaagtcgaacgagaatctctggcttgccagagaggaaagtggcggacgggtgagtaatatgtagagaatctgccctagagagtgggacaacagagggaaacttctgctaataccgcatatgcgcgtagctgagatgctattcgtgaaaactccggtgctctgggatgagtctgca

SEQ ID NO: 1144 - DNA, 225 bp, unidentified
  misc_feature 1..225: note = Encodes 16S rRNA from Clostridium sensu stricto
  source 1..225: mol_type = genomic DNA
agagtttgatcatggctcaggacgaacgctggcggcgcgcctaacacatgcaagtcgaacgggactagtgactggagctaagaagttttcttggttgcattcactagttcagtggcggacgggtgagtaaagcatgagtaacttgcccattagtggggaatagcttttggaaacagaagataataccgcatacatcggtttggacacatgttcggaccggaaaag

SEQ ID NO: 1145 - DNA, 225 bp, unidentified
  misc_feature 1..225: note = Encodes 16S rRNA from Prevotella
  source 1..225: mol_type = genomic DNA
agagtttgatcctggctcaggatgaacgctagctacaggcttaacacatgcaagtcgaggggcagcacggggactgcttgcagttcccggtggcgaccggcgcacgggtgagtaacgcgtatccaacctgcccgcaactgcggaatagcccgccgaaaggcggattaatgccgcatgagctcgcgcgagggcatcatttcgcgagcaaaggttcattccggttgc

SEQ ID NO: 1146 - DNA, 225 bp, unidentified
  misc_feature 1..225: note = Encodes 16S rRNA from Clostridium III
  source 1..225: mol_type = genomic DNA
agagtttgatcatggctcaggacgaacgctggcggcgtgcctaacacatgcaagtcgaacggagttattgcgattgatcccttcggggtgacgttgttctaacttagtggcggacgggcgagtaacgcgtgaataacctgcccataagaggggaataatccatggaaacgtggactaataccgcatattgtaattttatcgcatggtttaattatgaaagattta

SEQ ID NO: 1147 - DNA, 225 bp, unidentified
  misc_feature 1..225: note = Encodes 16S rRNA from Clostridium IV
  source 1..225: mol_type = genomic DNA
agagtttgatcatggctcaggatgaacgctggcggcgtgcataacacattcaagtcgaacgaagcactgacgatgaagtcttcggatggaattgtctttgacttagtggcggacgggtgagtaacgcgtgagcaaccttcctggcagtgagggataacacagggaaacttgtgctaataccgcatgacgcacgggaatcgcatggttttagtgccaaagatttat

SEQ ID NO: 1148 - DNA, 225 bp, unidentified
  misc_feature 1..225: note = Encodes 16S rRNA from Prevotella
  source 1..225: mol_type = genomic DNA
agagtttgatcatggctcaggatgaacgctagctacaggcctaacacatgcaagtcgaggggcagcatgagggtagctcgctacctttgatggcgaccggcgaatgggtgagtcacgcgtgtccaacctgcctccggcccggggatagcccttggaaatgaggattaagacccgataggtggcgcttccgcatggcggcgccatgaaactggaccggagatgggg

SEQ ID NO: 1149 - DNA, 225 bp, unidentified
  misc_feature 1..225: note = Encodes 16S rRNA from unidentified taxa
  source 1..225: mol_type = genomic DNA
agagtttgatcctggctcaggacaaacgctggcggcgtgcctaatacatgcaagtcgaacgagaatcaggagcttgctcctgaggaaagtggcggacgggtgagtaatatgtaggaaatctgcccttaggagggggacaacagttggaaacgactgctaataccccatatgagcgtagctgaaatgctattcttgaaatgatttttcgcctaaggatgagcctgc

SEQ ID NO: 1150 - DNA, 225 bp, unidentified
  misc_feature 1..225: note = Encodes 16S rRNA from Helicobacter
  source 1..225: mol_type = genomic DNA
agagtttgatcatggctcagagttaacgctggcggcgtgcctaacacatgcaagtcgagcgaattcttacagagtatcgtaagagttagcggcaaacgggtgagtaacacatgggaaaccttccttagaaaggggaacacctccgtgaaaacggagttaataccgcataagaccacagtttggcatcgaacaggggtaaaagcagcaatgcgttctaagatggtc

SEQ ID NO: 1151 - DNA, 225 bp, unidentified
  misc_feature 1..225: note = Encodes 16S rRNA from Clostridium XlVa
  source 1..225: mol_type = genomic DNA
agagtttgatcctggctcaggatgaacgctggcggcgtgcttaacacatgcaagtcgaacggagataagctctgatgaagcttcggcagaatcttgcttatcttagtggcggacgggtgagtaacgcgtgggtaacctacctgcaacagggggataacgattggaaacgatcgctaataccgcataacccgctagagtcgcatgactcagacggaaaagatttat

SEQ ID NO: 1152 - DNA, 225 bp, unidentified
  misc_feature 1..225: note = Encodes 16S rRNA from Coprococcus
  source 1..225: mol_type = genomic DNA
agagtttgatcctggctcaggatgaacgctggcggcgtgcttaacacatgcaagtcgaacggagtttagcgcttccaaagcttcggcagaggattgttaaacttagtggcggacgggtgagtaacgcgtgggtaacctgccatatacagggggataacacttagaaataggtgctaataccgcataagcgcacggcatcgcatgatgccgtgtgaaaaactccgg

SEQ ID NO: 1153 - DNA, 225 bp, unidentified
  misc_feature 1..225: note = Encodes 16S rRNA from Bradyrhizobium
  source 1..225: mol_type = genomic DNA
agagtttgatcatggctcagaacgaacgctggcggcacgcctaacacatgcaagtcggacggtatggatagcttgctattcatatagtggcggactggtgagtaatatgtaggaatctgcccataggttagggatagcaccgggaaactggtggtaatacctgatatcctggagacaggaaaggagcaattcgccgatggaggagcctatatctgattagatagt

SEQ ID NO: 1154 - DNA, 225 bp, unidentified
  misc_feature 1..225: note = Encodes 16S rRNA from Clostridium IV
  source 1..225: mol_type = genomic DNA
agagtttgatcctggctcaggacgaacgctggcggcgtgcctaacacatgcaagtcgagcggacttataaatagaaggtgcttgcactggaaatttacaagttagcggcggacgggtgagtaacgcgtgagcaacctgtcctctacagggggataagatttcgaaagggattctaataccgcatgagaccacagcagggcatcctgcgggggtcaaaggaggaat

SEQ ID NO: 1155 - DNA, 225 bp, unidentified
  misc_feature 1..225: note = Encodes 16S rRNA from Sphingobacterium
  source 1..225: mol_type = genomic DNA
agagtttgatcatggctcaggatgaacgctagcggcaggcctaatacatgcaagtcggacgggatccattgatagcttgctatccatggtgagagtggcgcacgggtgcgtaacgcgtgagcaacctacctccatcagggggatagcctctcgaaagagagattaacaccgcataacataatgttccggcatcgggatattattaaatatttataggatggagat

SEQ ID NO: 1156 - DNA, 225 bp, unidentified
  misc_feature 1..225: note = Encodes 16S rRNA from Gelidibacter
  source 1..225: mol_type = genomic DNA
agagtttgatcatggctcaggataaacgctagcggcaggcctaacacatgcaagtcgagcggcatcgggagtggcaacacttgccggcgagcggcggacgggtgagtaacgcgtatgcaacctgcccaccacacggagatagccgaccgaaaggacgattaaactccgatggcaccttctgggggcatccccgaaaggttaaatattcataggtggtggatgggc

SEQ ID NO: 1157 - DNA, 225 bp, unidentified
  misc_feature 1..225: note = Encodes 16S rRNA from Vasilyevaea
  source 1..225: mol_type = genomic DNA
agagtttgatcatggctcagaacgaacgctggcggcaggcttaacacatgcaagtcgaacgccccgcaaggggagtggcagacgggtgagtaacgcgtgggaatctacccagttctacggaacaactgagggaaacttcagctaataccgtatacgccctacgggggaaagatttatcggaattggatgagcccgcgttggattagctagttggtggggtaatgg

SEQ ID NO: 1158 - DNA, 225 bp, unidentified
  misc_feature 1..225: note = Encodes 16S rRNA from Eubacterium
  source 1..225: mol_type = genomic DNA
agagtttgatcatggctcaggacgaacgctggcggcgtgcttaacacatgcaagtcgaacgaagcttgattaatgaattcttcggaatgatttatgatatgactgagtggcggacgggtgagtaacgcgtgagtaacctgcctcttggagggggatagtgtttggaaacgaacagtaataccgcataacgtgcattgatggcatcatcgatgtaccaaagattta

SEQ ID NO: 1159 - DNA, 225 bp, unidentified
  misc_feature 1..225: note = Encodes 16S rRNA from Clostridium XlVa
  source 1..225: mol_type = genomic DNA
agagtttgatcatggctcaggatgaacgctggcggcgtgcttaatacatgcaagtcgaacgagcagagatattcgtatcaaagcgagtggcggacgggtgagtaacgcgtgggaaacctgccctataccgggggataacagttggaaacgactgctaataccgcataagcgcacgatgtcgcatgacattgtgcgaaaaactccggtggtataggatggtcccgc

SEQ ID NO: 1160 - DNA, 225 bp, unidentified
  misc_feature 1..225: note = Encodes 16S rRNA from Eubacterium
  source 1..225: mol_type = genomic DNA
agagtttgatcctggctcaggacgaacgctggcggcgtgcttaacacatgcaagtcgaacgaagcttgaagatagatttcttcggaatgacatctgatatgactgagtggcggacgggtgagtaacgcgtgagcaacctgcccttcggagggggatagcgtttggaaacgaacggtaataccgcataatgttaacggaaggcatcttctgttaaccaaaactccg

SEQ ID NO: 1161 - DNA, 225 bp, unidentified
  misc_feature 1..225: note = Encodes 16S rRNA from Syntrophococcus
  source 1..225: mol_type = genomic DNA
agagtttgatcatggctcaggatgaacgctggcggcgtgcctaacacatgcaagtcgaacgggaactccgatctgaaggttcgctggatgattggaaattctagtggcggacgggtgagtaacgcgtgggtaacctgccctttagagggagataacagagagaaatttctgataatatcccatatgcttacagcttcgcatgaagcagtgaggaaagaatttcgc

SEQ ID NO: 1162 - DNA, 225 bp, unidentified
  misc_feature 1..225: note = Encodes 16S rRNA from Prevotella
  source 1..225: mol_type = genomic DNA
agagtttgatcatggctcaggatgaacgctagctacaggcttaacacatgcaagtcgaggggcagcatgtaggttgcttgcaacctatgatggcgaccggcgcacgggtgcgtaacgcgtatccaaccttccccgcagtagggtgcagcccgttgaaagacggattaatcccctatgttgtccattgacggcatccgatttggacgaaaggtttcaccgctgcgg

SEQ ID NO: 1163 - DNA, 225 bp, unidentified
  misc_feature 1..225: note = Encodes 16S rRNA from Treponema
  source 1..225: mol_type = genomic DNA
agagtttgatcctggctcagaacgaacgctggcggcgcgtcttaagcatgcaagtcggacggcaagattggtgcttgcactgatcctagagtggcggactggtgagtaacgcgtgggtgacgtaccctccggacggggatagctactagaaatagtagataataccggatacggtgcactgtgtcagaggcagtgcaggaaaggttcttttgaaccgccggggga

SEQ ID NO: 1164 - DNA, 225 bp, unidentified
  misc_feature 1..225: note = Encodes 16S rRNA from Anaerovorax
  source 1..225: mol_type = genomic DNA
agagtttgatcatggctcaggatgaacgctggcggcgtgcctaacacatgcaagtcgagcgagaagctttccagaagatacttcggttgattcagggaagtggaaagcggcggacgggtgagtaacgcgtaggcaacctgccccttgcagagggatagcctcgggaaaccgggattaaaacctcataatgcggtgagaagacatcttcatatcgccaaagattta

SEQ ID NO: 1165 - DNA, 225 bp, unidentified
  misc_feature 1..225: note = Encodes 16S rRNA from Erysipelotrichaceae incertae sedis
  source 1..225: mol_type = genomic DNA
agagtttgatcctggctcaggatgaacgctggcggcatgcctaatacatgcaagtcgaacggagcctttcggggctcagtggcgaacgggtgagtaacacgtaggtaacctgcccatgtgcccgggacaacagctggaaacggctgctaaaaccggataggtatcgaggaggcatctcctggatattaaaggggctttcgggccctgaacatggatggacctgcg

SEQ ID NO: 1166 - DNA, 225 bp, unidentified
  misc_feature 1..225: note = Encodes 16S rRNA from Sulfurovum
  source 1..225: mol_type = genomic DNA
agagtttgatcatggctcagagtgaacgctggcggcgtgcttaacacatgcaagtcgaacgagaacggtccttcgggatgtcagctaagtggcggacgggtgagtaatgtatagttaatctgccctttagagggggataacagttggaaacgactgctaataccccatactccttttaccttaatggtaattgggaaacgttttttcgctaaaggatgagactat

SEQ ID NO: 1167 - DNA, 225 bp, unidentified
  misc_feature 1..225: note = Encodes 16S rRNA from Clostridium IV
  source 1..225: mol_type = genomic DNA
agagtttgatcatggctcaggagaaacgctggcggcgcacataagacatgcaagtcgaacggaatttagccaaatgtttacatgaggcgaaaatttagtggcggacgggtgagtaacacgtgagcaacctgcctttaagagggggataacattgagaaatcagtgctaataccgcataaagcatatccaccgcatgatggatataagccaaaggagaaatccgct

SEQ ID NO: 1168 - DNA, 225 bp, unidentified
  misc_feature 1..225: note = Encodes 16S rRNA from Papillibacter
  source 1..225: mol_type = genomic DNA
agagtttgatcatggctcaggatgaacgctggcggcgtgcataacacattcaagtcgaacgaagcactttggttggagacttcggtcaaagaccgatttgacttagtggcggacgggtgagtaacgcgtgagcaacctgccttgaagagggggataacacagggaaacttgtgctaataccgcataacgtacgtggatcgcatggttcgtgtaccaaagccttta

SEQ ID NO: 1169 - DNA, 225 bp, unidentified
  misc_feature 1..225: note = Encodes 16S rRNA from Paracoccus
  source 1..225: mol_type = genomic DNA
agagtttgatcatggctcagaacgaacgctggcggcaggcctaacacatgcaagtcgagcgcaccttcgggtgagcggcggacgggtgagtaacgcgtgggaatatgcccttctctacggaatagtctcgggaaactgggggtaataccgtatacgccctacgggggaaagatttatcggagaaggattagcccgcgttggattaggtagttggtggggtaacgg

SEQ ID NO: 1170 - DNA, 225 bp, unidentified
  misc_feature 1..225: note = Encodes 16S rRNA from Hydrogenoanaerobacterium
  source 1..225: mol_type = genomic DNA
agagtttgatcatggctcaggacgaacgctggcggcgcgcctaacacatgcaagtcgaacggaactagtgaccggagggtagaaaacttctatcttgcgatcactagttcagtggcggacgggtgagtaaaacatgagcaacctggctagtagagggggatagcttttggaaacagaagataataccgcatacatcagagatttcgcatgaagtttttggaaaag

SEQ ID NO: 1171 - DNA, 225 bp, unidentified
  misc_feature 1..225: note = Encodes 16S rRNA from Adhaeribacter
  source 1..225: mol_type = genomic DNA
agagtttgatcatggctcaggatgaacgctggcggcaggcttaatacatgcaagtcgaacggtaacgaccggtagcaatactggggcgacgagtggcgcacgggtgcgtaacgcgtatgcaacctaccctcaaccggggcataacgccgagaaattggcgctaatatcccatgtgtatatggagtggcatctctccatatataaagatccgttggttaaggatgg

SEQ ID NO: 1172 - DNA, 225 bp, unidentified
  misc_feature 1..225: note = Encodes 16S rRNA from Lachnospiracea incertae sedis
  source 1..225: mol_type = genomic DNA
agagtttgatcatggctcaggatgaacgctggcggcgcgcttaacacatgcaagtcgaacgagatgagtgacttcggtcatgagtctagtggcggacgggtgagtaacgcgtggacaacttgccttatagtgggggatagccgaaagaaatttcgattaataccgcataatacaatttgatcgcatgattggattgggaaaggcttcggtcgctaaaagaaaggt

SEQ ID NO: 1173 - DNA, 225 bp, unidentified
  misc_feature 1..225: note = Encodes 16S rRNA from Bacteroides
  source 1..225: mol_type = genomic DNA
agagtttgatcatggctcaggatgaacgctagctacaggcttaacacatgcaagtcgaggggcagcatgggggaggtttcggccacccccgatggcgaccggcgaatgggtgagtaacgcgtatccaacctgcccctgtcccggggacagcccttagaaatgaggattaacccccgatggcgcggattagccgcatggcttttccgccaaatgcgaaggacaggg

SEQ ID NO: 1174 - DNA, 225 bp, unidentified
  misc_feature 1..225: note = Encodes 16S rRNA from Hydrogenoanaerobacterium
  source 1..225: mol_type = genomic DNA
agagtttgatcatggctcaggagaaacgctggcggcgcacataagacatgcaagtcgaacggaacttaaattgatgtttacattagcttaagtttagtggcggactggtgagtaacacgtgagcaacctgccctttagaggggaataacattgagaaatcagtgctaataccgcataaagcaacattatcgcatgatgaagttgccaaaggagaaatccgctgaa

SEQ ID NO: 1175 - DNA, 225 bp, unidentified
  misc_feature 1..225: note = Encodes 16S rRNA from Telmatospirillum
  source 1..225: mol_type = genomic DNA
agagtttgatcatggctcagaacgaacgctggcggcatgcttaacacatgcaagtcgaacggtgttgttcagtacttgtattgagcaacatagtggcaaacgggtgagtaacgcgtgggaacgtacccaacagtattggataacgtttggaaacgaacgctaatacaatatacgcttgagagaggaaagagagatcgctgatggagcggcccgcgttagattagg

SEQ ID NO: 1176 - DNA, 225 bp, unidentified
  misc_feature 1..225: note = Encodes 16S rRNA from Clostridium XlVa
  source 1..225: mol_type = genomic DNA
agagtttgatcatggctcaggatgaacgctggcggcgtgcctaacacatgcaagtcgaacgaagcacttctcccgttgaagcctattagcttgctatgaagcggaaacaattgaagtgacttagtggcggacgggtgagtaacgcgtgggtaacctgccctgtacagggggacaacagctagaaatggctgctaataccgcataagcgcacagcatcgcatggtg

SEQ ID NO: 1177 - DNA, 225 bp, unidentified
  misc_feature 1..225: note = Encodes 16S rRNA from Hydrogenoanaerobacterium
  source 1..225: mol_type = genomic DNA
agagtttgatcatggctcaggacgaacgctggcggcacgcttaacacatgcaagtcgaacggaacttgggagcttgctttcaagtttagtggcggacgggtgagtaacacgtgagcaacctgcctttcggcggggaataatgattggaaacgatcactaataccccataaaacagagataccgcatggtaattctgtcaaagattcatcaccgaaagatgggctc

SEQ ID NO: 1178 - DNA, 225 bp, unidentified
  misc_feature 1..225: note = Encodes 16S rRNA from Clostridium IV
  source 1..225: mol_type = genomic DNA
agagtttgatcatggctcaggatgaacgctggcggcgtgcataacacattcaagtcgaacgaagcactgacgaggaagtcttcggatggaattgtctttgacttagtggcggacgggtgagtaacgcgtgagcaaccttcctggcagtgagggataacacagggaaacttgtgctaataccgcatgacgcactgagatcgcatggttttagtgccaaagattcat

SEQ ID NO: 1179 - DNA, 225 bp, unidentified
  misc_feature 1..225: note = Encodes 16S rRNA from Vasilyevaea
  source 1..225: mol_type = genomic DNA
agagtttgatcctggctcagaacgaacgctggcggcaggcttaacacatgcaagtcgaacgccccgcaaggggagtggcagacgggtgagtaacgcgtgggaatctacccagttctacggaataacccagggaaacttggactaataccgtatacgccctacgggggaaagatttatcggaattggatgagcccgcgttggattagctagttggtggggtaatgg

SEQ ID NO: 1180 - DNA, 225 bp, unidentified
  misc_feature 1..225: note = Encodes 16S rRNA from Anaeroplasma
  source 1..225: mol_type = genomic DNA
agagtttgatcatggctcaggattaacgctggcggcgtgcctaatacatgcaagtcgaatggtagtagcaatacaaaccatggcgaacgggtgagtaacacgtaggcaacctgactttaagacgaggataaccgttggaaacgacggataatactggataggacatcacaaagggcatccttagatgtttaaaggttatcatgccacttagagaggggcctgcgg

SEQ ID NO: 1181 - DNA, 225 bp, unidentified
  misc_feature 1..225: note = Encodes 16S rRNA from Sporotomaculum
  source 1..225: mol_type = genomic DNA
agagtttgatcctggctcaggacgaacgctggcggcgtgcttaacacatgcaagtcgaacgaggaatgccgaaaagcttgctttttgacatttcgagtggcggacgggtgagtaacgcgtgaggaacctgtcttctacagggggataacgtcccgaaagggacgctaataccgcataagaccacggtgccgcatggcacaggggtcaaaggagcaatccggtgga

SEQ ID NO: 1182 - DNA, 225 bp, unidentified
  misc_feature 1..225: note = Encodes 16S rRNA from Clostridium IV
  source 1..225: mol_type = genomic DNA
agagtttgatcctggctcaggatgaacgctggcggcgtgcctaacacatgcaagtcgaacggagcttgagggcttgcccttaagcttagtggcggacgggtgagtaacgcgtgagtaacctgcctttgagaggggaataacttcccgaaagggatgctaataccgcataacacataactgtcgcatggcagaaatgtcaaagattatatcgctcaaagatggact

SEQ ID NO: 1183 - DNA, 225 bp, unidentified
  misc_feature 1..225: note = Encodes 16S rRNA from Enterorhabdus
  source 1..225: mol_type = genomic DNA
agagtttgatcatggctcaggatgaacgctggcggcgtgcctaacacatgcaagtcgaacggagaaaccgccctcgggcggagatgaagtggcgaacgggtgagtaacacgtgaccaacctgccccgcgctccgggacagcctcgcgaaagcgggattaataccggatgcgccgcgggccccgcatggggcccgcgggaaagcccaggcggcgcgggatggggtc

SEQ ID NO: 1184 - DNA, 225 bp, unidentified
  misc_feature 1..225: note = Encodes 16S rRNA from Bacteroides
  source 1..225: mol_type = genomic DNA
agagtttgatcctggctcaggatgaacgctagctacaggcttaacacatgcaagtcgaggggcagcattaagtcagcttgctgatttagatggcgaccggcgcacgggtgagtaacgcgtatccaacctgccccctacccggggatagccttgcgaaagtaagattaatacccggtgctgttgcgatcccgcatggggatgcaacgaaagattcatcggtagggg

SEQ ID NO: 1185 - DNA, 225 bp, unidentified
  misc_feature 1..225: note = Encodes 16S rRNA from Anaerotruncus
  source 1..225: mol_type = genomic DNA
agagtttgatcctggctcaggatgaacgctggcggcgtgcctaacacatgcaagtcgaacgaagctccgatacggaatcttcggaggaagtagaggaagacttagtggcggacgggtgagtaacgcgtgagcaacctgcctttcggagggggataacgattggaaacgatcgctaataccgcataacatatacgtatcgcatggtatgtatatcaaagctgaggc

SEQ ID NO: 1186 - DNA, 225 bp, unidentified
  misc_feature 1..225: note = Encodes 16S rRNA from Rhodopirellula
  source 1..225: mol_type = genomic DNA
agagtttgatcatggctcagaatgaacgttggcggcgtggattaggcatgcaagtcgaacggtaaggttacttagcttgctttgtaaccctagagtggcgaaagggatagtacaatgtagatcatataccctcaggttggggatagcgtctggaaacgggcggtaatacccgataacatctccggatcaaaggtgagattccgcctgaggattagtttacacact

SEQ ID NO: 1187 - DNA, 225 bp, unidentified
  misc_feature 1..225: note = Encodes 16S rRNA from Clostridium XlVa
  source 1..225: mol_type = genomic DNA
agagtttgatcctggctcaggatgaacgctggcggcgtgcttaatacatgcaagtcgaacgaggaattgtgattgaagttttcggatggatttcacttttccgagtggcggacgggtgagtaacgcgtgggtaacctgccttacacagggggacaacagctggaaacggctgctaataccgcataacccgctagagtcgcatgactcagacggaaaagatttatc

SEQ ID NO: 1188 - DNA, 225 bp, unidentified
  misc_feature 1..225: note = Encodes 16S rRNA from Gelidibacter
  source 1..225: mol_type = genomic DNA
agagtttgatcatggctcaggataaacgctagcggcaggcctaacacatgcaagtcgagcggcagcgggagtggcaacacttgccggcgagcggcggacgggtgagtaacgcgtatgcaacctgcccaccacacggagatagccgaccgaaaggacgattaaactccgatggcattgggagccggcatcggcatccaattaaatatttataggtggtggatgggc

SEQ ID NO: 1189 - DNA, 225 bp, unidentified
  misc_feature 1..225: note = Encodes 16S rRNA from Anaerofustis
  source 1..225: mol_type = genomic DNA
agagtttgatcatggctcaggacgaacgctggcggcgtgcttaacacatgcaagtcgaacgggaagctttggttagttcgctaaacaaagtggacagtggcgaacgggtgagtaacgcgtaggtaaccaacctcatactgggggatagcctttggaaacgaagagtaataccgcataagaccacactgtcgcatggcagaggggtaaaagatttatcggtatgag

SEQ ID NO: 1190 - DNA, 225 bp, unidentified
  misc_feature 1..225: note = Encodes 16S rRNA from Butyricicoccus
  source 1..225: mol_type = genomic DNA
agagtttgatcctggctcaggataaacgctggcggcgcacataagacatgcaagtcgaacgggaactttattgaagttatctgatataaagttctagtggcggactggtgagtaatgtataagcaacctgcctgcaagaggggaataacagtgagaaatcattgctaataccgcataagctgtgagtatggcatcatacaaacagaaaaggaagcaattccgctt

SEQ ID NO: 1191 - DNA, 225 bp, unidentified
  misc_feature 1..225: note = Encodes 16S rRNA from Butyricicoccus
  source 1..225: mol_type = genomic DNA
agagtttgatcctggctcaggatgaacgctggcggcgtgcataacacattcaagtcgaacggagatattgggatcaatccttcgggaagcgtttcaatattttagtggcggacgggtgagtaacgcgtgagcaacctgccttgaagagggggataacacagggaaacttgtgctaataccgcataacgtacgatggtcgcatggccgacgtaccaaagctccgac

SEQ ID NO: 1192 - DNA, 225 bp, unidentified
  misc_feature 1..225: note = Encodes 16S rRNA from Clostridium XlVa
  source 1..225: mol_type = genomic DNA
agagtttgatcctggctcaggatgaacgctggcggcgtgcctaacacatgcaagtcgaacgaagacgcttattcagattctttcgggatgacgaatttgtggactgagtggcggacgggtgagtaacgcgtgggtaacctgccttgtacagggggacaacagttagaaatgactgctaataccgcataagccaacggaatcgcatgattcagttggaaaaactcc

SEQ ID NO: 1193 - DNA, 225 bp, unidentified
  misc_feature 1..225: note = Encodes 16S rRNA from Cryptanaerobacter
  source 1..225: mol_type = genomic DNA
agagtttgatcatggctcaggacgaacgctggcggcatgcctaacacatgcaagtcgaacggaacaagactggctgtagcgatactttcggtcttgtttagtggcgaacgggtgagtaacacgtgagcaacctgccttttacacagggataacagccggaaacggctgctaataccggataagaccacaccgaggcatctcggaggggtcaaagcgatttagcgg

SEQ ID NO: 1194 - DNA, 225 bp, unidentified
  misc_feature 1..225: note = Encodes 16S rRNA from Clostridium XlVa
  source 1..225: mol_type = genomic DNA
agagtttgatcatggctcaggatgaacgctggcggcgtgcttaatacatgcaagtcgaacgaagctgatgcgacggaacctttcggggggaagatgcattagactgagtggcggacgggtgagtaacgcgtgggtaacctgccttatacagggggataacatttggaaacagatgctaataccgcataagcgcacagaaccgcatggttcagtgtgaaaagctcc

SEQ ID NO: 1195 - DNA, 225 bp, unidentified
  misc_feature 1..225: note = Encodes 16S rRNA from Mogibacterium
  source 1..225: mol_type = genomic DNA
agagtttgatcatggctcaggatgaacgctggcggcgtgcctaatacatgcaagtcgagcgagaatctcctttgaagcgttttcggacaattctgtggagaggaaagcggcggacgggtgagtaacgcgtaggcaacctgcccttagcagagggatagccattggaaacgatgattaaaacctcataatgccattcttacacatgttgggatggccaaagattta

SEQ ID NO: 1196 - DNA, 225 bp, unidentified
  misc_feature 1..225: note = Encodes 16S rRNA from Syntrophococcus
  source 1..225: mol_type = genomic DNA
agagtttgatcatggctcaggatgaacgctggcggcgtgcttaacacatgcaagtcgaacggagctattttagaaagcggagcttgctctgatggatatgatagcttagtggcggacgggtgagtaacgcgtgggcaacctgccttacacagggggacaacagttggaaacgactgctaataccgcataagccggtaatctcgcatgggatatccggaaaagatt

SEQ ID NO: 1197 - DNA, 225 bp, unidentified
  misc_feature 1..225: note = Encodes 16S rRNA from Bacteroides
  source 1..225: mol_type = genomic DNA
agagtttgatcatggctcaggatgaacgctagcggcaggcttaacacatgcaagtcgaggggcagcgtgggggtagcaatactcccgacggcgaccggcgcacgggtgagtaacgcgtatgcaacctttcccagacagggggatagcccagggaaacttggattaataccccgtaggccggatgagggcatcctcgtccggttaaagttccggcggtctggggtg

SEQ ID NO: 1198 - DNA, 225 bp, unidentified
  misc_feature 1..225: note = Encodes 16S rRNA from Treponema
  source 1..225: mol_type = genomic DNA
agagtttgatcatggctcagaacgaacgctggcggcgcgtcttaagcatgcaagtcgggcgggattcatgtgcttgcacatgatgagagcggcggactggcgaggagcgcgtgggtgacgcaccccccggacggggacagccggcagaaatgccgggtgataccggatgaggtcccccttgttggaggagggggaggaaaggggcttcggccccgccgggggagc

SEQ ID NO: 1199 - DNA, 225 bp, unidentified
  misc_feature 1..225: note = Encodes 16S rRNA from Coraliomargarita
  source 1..225: mol_type = genomic DNA
agagtttgatcatggctcagagtgaacgctggcggcgtggctaagacatgcaagttgagcgagaatataccttcgggtatagggaagcggcaaacgggtgagtaacacgtaagtaacctacccttgagactgggatagctcagcgaaagttgaggtaataccggatgacaaccattaacgcatgttaatggattcaaagggatgagacgatgctcaaggaggggc

SEQ ID NO: 1200 - DNA, 225 bp, unidentified
  misc_feature 1..225: note = Encodes 16S rRNA from Ruminococcus
  source 1..225: mol_type = genomic DNA
agagtttgatcctggctcaggacgaacgctggcggcacgcttaacacatgcaagtcgaacgggactaagagagaagcttgcttcacttttagtttagtggcggacgggtgagtaacacgtgagtaacctgcccttatcaggggaatagcctccggaaacggagagtaataccgcataagatgacgatgtggcatcacatagtcataaaagattttatcggataag

SEQ ID NO: 1201 - DNA, 225 bp, unidentified
  misc_feature 1..225: note = Encodes 16S rRNA from Prevotella
  source 1..225: mol_type = genomic DNA
agagtttgatcctggctcaggatgaacgctagctacaggcttaacacatgcaagtcgaggggcagcatgtcgtgtgcttgcacacgatgatggcgaccggcgcacgggtgagtaacgcgtatccaacctgcccatgactccgggatagcccgctgaaaagcggattaacaccggatggggtcgaacgaggacatctgatttcgaccaaagctttttgcggtcatg

SEQ ID NO: 1202 - DNA, 225 bp, unidentified
  misc_feature 1..225: note = Encodes 16S rRNA from Pseudaminobacter
  source 1..225: mol_type = genomic DNA
agagtttgatcctggctcagaacgaacgctggcggcaggcttaacacatgcaagtcgagcgccccgcaaggggagcggcagacgggtgagtaacgcgtgggaatctacccaactctacggaataacccagggaaacttggactaataccgtatacgtcctccgggagaaagatttatcggagttggatgagcccgcgtcggattagctagttggtgaggtaatgg

SEQ ID NO: 1203 - DNA, 225 bp, unidentified
  misc_feature 1..225: note = Encodes 16S rRNA from Prevotella
  source 1..225: mol_type = genomic DNA
agagtttgatcatggctcaggatgaacgctagcggcaggcttaacacatgcaagtcgaggggcagcgcgttgtagcaatacaatggcggcgaccggcgaaagggtgagtaacgcgtgagcgacgtgcccgtcacagggggacaagggctggaaacggcttctgataccccataggaatgtatgcttcatggtgtatgtttgaaagatttatcggtgacggatcgg

SEQ ID NO: 1204 - DNA, 225 bp, unidentified
  misc_feature 1..225: note = Encodes 16S rRNA from Treponema
  source 1..225: mol_type = genomic DNA
agagtttgatcctggctcagaacgaacgctggcggcgcgtcttaagcatgcaagtcgagcggcaagatggggttcgccccgtcccagagcggcggactggtgagtaacacgtgggtgacgcaccctcgggatcgggatagcctgcagaaatgcagggtaataccggatgatgtccgtgcagccggaatgcacggaggaaaggggcttcggccccgccggaggaac

SEQ ID NO: 1205 - DNA, 225 bp, unidentified
  misc_feature 1..225: note = Encodes 16S rRNA from Syntrophococcus
  source 1..225: mol_type = genomic DNA
agagtttgatcatggctcaggatgaacgctggcggcgtgcttaacacatgcaagtcgaacgggaactctagactgaaggttcgctggaagtttagaaattctagtggcggacgggtgagtaacgcgtgggtaacctgcctataagacgtgaacaacagttagaaatgactgctaatacacgataagcacaccagtatcgcatgatacagtgtgaaaagaatttcg

SEQ ID NO: 1206 - DNA, 225 bp, unidentified
  misc_feature 1..225: note = Encodes 16S rRNA from Clostridium IV
  source 1..225: mol_type = genomic DNA
agagtttgatcatggctcaggatgaacgctggcggcgtgcataacacattcaagtcgaacggagatatactgattaatccttcgggaagcgtcggtatattttagtggcggacgggtgagtaacgcgtgagcaacctgccttgaagagggggataacacagggaaacttgtgctaataccgcataacatacaagaatcgcatggttttagtatcaaagctccgac

SEQ ID NO: 1207 - DNA, 225 bp, unidentified
  misc_feature 1..225: note = Encodes 16S rRNA from Tenacibaculum
  source 1..225: mol_type = genomic DNA
agagtttgatcctggctcaggatgaacgctagcggcaggcttaacacatgcaagtcgaggggtaacaggcggtagcaatactgtgctgacgaccggcgcacgggtgcgtaacgcgtatgcaacctgcccgcgacagggggataacggagggaaacttccactaatatcccatggtgccgaaggttcgcatgggctttcggctaaaggggcgacccggttgcggat

SEQ ID NO: 1208 - DNA, 205 bp, unidentified
  misc_feature 1..205: note = Encodes 16S rRNA from Parabacteroides
  source 1..205: mol_type = genomic DNA
agagtttgatcctggctcaggatgaacgctagcgacaggcttatggtcaatggacgcgagtctgaaccagccaagtcgcgtgcgggacgaaggccctccgggtcgtaaaccgctttagccggggagtaacgtgggggacgtgtccctcagtgagagtacccggagaataagcatcggctaactccgtgccagcagccgcggtaat

SEQ ID NO: 1209 - DNA, 225 bp, unidentified
  misc_feature 1..225: note = Encodes 16S rRNA from Luteimonas
  source 1..225: mol_type = genomic DNA
agagtttgatcctggctcagaacgaacgctggcggcaggcctaaaacatgcaagttgaacgggtgtagcaatacatcagtagcggacgggtgaggaacatatgggaacgtgccctttggtgggggataacttctggaaacgggaggtaataccgcataagccatgagtgggaaatatttatagccggaggagcggcccatattggattagctagttggttaggta

SEQ ID NO: 1210 - DNA, 225 bp, unidentified
  misc_feature 1..225: note = Encodes 16S rRNA from Eubacterium
  source 1..225: mol_type = genomic DNA
agagtttgatcctggctcaggacgaacgctggcggcgtgcttaacacatgcaagtcgaacgaagcttgaatttagatttcttcggaatgataaatgatatgactgagtggcggacgggtgagtaacgcgtgagcaacctgcccttcggagggggatagcgtttggaaacgaacggtaataccgcataatgttaacggatggcatcgtctgttaaccaaaactccg

SEQ ID NO: 1211 - DNA, 225 bp, unidentified
  misc_feature 1..225: note = Encodes 16S rRNA from Roseburia
  source 1..225: mol_type = genomic DNA
agagtttgatcatggctcaggatgaacgctggcggcgtgcctaacacatgcaagtcgaacggacccatgggagtgattagcttgctatgaactcccggaaggttagtggcggacgggtgagtaacgcgtgggtaacctgcctcatacagggggatagcagttggaaacgactggtaataccgcataagcgcacagtaccgcatggtacagtgtgaaaagctccga

SEQ ID NO: 1212 - DNA, 225 bp, unidentified
  misc_feature 1..225: note = Encodes 16S rRNA from Oscillibacter
  source 1..225: mol_type = genomic DNA
agagtttgatcatggctcaggacgaacgctggcggcgtgcttaacacatgcaagtcgaacgaagctctcacgcttgagttttcggacaagagggtgagaagacttagtggcggactggtgagtaacgcgtgagcaacctgccctccggtgggggacaacagttggaaacgactgctaataccgcataatgtacaggggccgcatgacccttgtaccaaagcttaa

SEQ ID NO: 1213 - DNA, 225 bp, unidentified
  misc_feature 1..225: note = Encodes 16S rRNA from unidentified taxa
  source 1..225: mol_type = genomic DNA
agagtttgatcatggctcaggacgaacgctggcggcgtgcttcatacatgcaagtcgaacgagaatcagaagcttgcttctgaggaaagtggcggacgggtgagtaatatgtagagaatctgccctttagatggggacaacagttggaaacgactgctaatacccaatatgcgcgtagttgagatactattcgtgaaaactccggtgctaaaggatgagtctgca

SEQ ID NO: 1214 - DNA, 225 bp, unidentified
  misc_feature 1..225: note = Encodes 16S rRNA from Prevotella
  source 1..225: mol_type = genomic DNA
agagtttgatcatggctcaggatgaacgctagctacaggcttaacacatgcaagtcgaggggcagcacggaggtagcttgctacttttggtggcgaccggcgaatgggtgagtaacgcgtatccaacctgccgcgtgcccggggatagcccctggaaacggggattaagacccgatggcgtggtgccgccgcatgacggcgccattaaaccggcacgcgatgggg

SEQ ID NO: 1215 - DNA, 225 bp, unidentified
  misc_feature 1..225: note = Encodes 16S rRNA from Clostridium IV
  source 1..225: mol_type = genomic DNA
agagtttgatcatggctcaggacgaacgctggcggcgcgcctaacacatgcaagtcgaacggagagtgcgctttgaatccttcgggacgattagctcatttcttagtggcggacgggtgagtaacacgtgagcaacctgccttgcagagcgggataacgattggaaacgatcgctaataccgcataatatatgattgtcgcatggctttcatatcaaagatttat

SEQ ID NO: 1216 - DNA, 225 bp, unidentified
  misc_feature 1..225: note = Encodes 16S rRNA from Treponema
  source 1..225: mol_type = genomic DNA
agagtttgatcatggctcagaacgaacgctggcggcgcgtcttaagcatgcaagtcgagcgggattatccagcttgctggatatgagagcggcggactggtgagtaacacgtaggcaacgtacccttcggacggggatagccggcagaaatgtcgggtaataccggatgtgaacatgagccgtaaaggttcatgtggaaaggagcttcggctccgccggaggagc

SEQ ID NO: 1217 - DNA, 225 bp, unidentified
  misc_feature 1..225: note = Encodes 16S rRNA from Clostridium IV
  source 1..225: mol_type = genomic DNA
agagtttgatcatggctcaggatgaacgctggcggcgtgcttaacacattcaagtcgaacggtgaagggggcttcggttcccggatcagtggcggacgggtgagtaacgcgtgaataacctgcctgtgtgtgggggataacagttggaaacggctgctaataccgcataacgtacggacaccgcatgatgaccgtaccaaagatttattgcgcacagatggattc

SEQ ID NO: 1218 - DNA, 225 bp, unidentified
  misc_feature 1..225: note = Encodes 16S rRNA from Victivallis
  source 1..225: mol_type = genomic DNA
agagtttgatcctggctcagaacgaacgctggcggcatggattaggcatgcaagtcgaacgggtgcagcaatgcaccagtggcgcaagggtgaggaacacgtgagtaatctaccctcaagattgggatagctcctggaaacgggaattaataccggatgaaacagtttatccgcatggatgaacttttaaagcagcaatgcgcttgaggaggagctcgcgtccca

SEQ ID NO: 1219 - DNA, 225 bp, unidentified
  misc_feature 1..225: note = Encodes 16S rRNA from Clostridium XlVa
  source 1..225: mol_type = genomic DNA
agagtttgatcctggctcaggatgaacgctggcggcgtgcctaacacatgcaagtcgaacgaagaccccgaggcagagatttcggtcgaagccaagggaggactgagtggcggacgggtgagtaacgcgtggataacctgccccatacagggggatagcagttggaaacgactgataataccgcataagcgcacgagggggcatcctcaagtgtgaaaaacttta

SEQ ID NO: 1220 - DNA, 225 bp, unidentified
  misc_feature 1..225: note = Encodes 16S rRNA from Oscillibacter
  source 1..225: mol_type = genomic DNA
agagtttgatcatggctcaggacaaacgctggcggcgtgcctaacacatgcaagtcgaacggagcttatcaccttcgggaggtaagcttagtggcggactggtgagtaacgcgtgagcaacctgcccttcagtgggggacaacagccggaaacggctgctaataccgcatgagattatgggaaggcatcttcttgtaattaaagatttattgctgaaggatgggc

SEQ ID NO: 1221 - DNA, 225 bp, unidentified
  misc_feature 1..225: note = Encodes 16S rRNA from Papillibacter
  source 1..225: mol_type = genomic DNA
agagtttgatcatggctcaggataaacgctggcggcgtgcataacacattcaagtcgaacgaagcacttcggaacgagacttcggtcaagtgaagatttgacttagtggcggacgggtgagtaacgcgtgagcaatctgcctcggggtgcgggataacgtttggaaacgaacgctaataccgcatgacgcatgaggttcacatggaccatatgccaaaggtttac

SEQ ID NO: 1222 - DNA, 225 bp, unidentified
  misc_feature 1..225: note = Encodes 16S rRNA from Cellulosilyticum
  source 1..225: mol_type = genomic DNA
agagtttgatcatggctcaggataaacgctggcggcgcacataagacatgcaagtcgaacgagtttaatacctagcttgctaggtaagcgactagtggcggactggtgagtaacacgtaaggaacctgcctattagagaggaatacctttgagaaatcagagctaatacctcatatgccttatttatcgcatgataaaagagggaaaggagcaatccactaatag

SEQ ID NO: 1223 - DNA, 225 bp, unidentified
  misc_feature 1..225: note = Encodes 16S rRNA from Treponema
  source 1..225: mol_type = genomic DNA
agagtttgatcctggctcagaacgaacgctggcggcgcgtcttaagcatgcaagtcgggcgggattccccagcttgctggggatgagagcggcggactggtgagtaacgcgtgggcgacgcgccccgtggaccgggatagcctgtggaaacacagggtaataccgggcgagctcccccgcgccggaggcgggggaggaaaggagccgaggctccgccacgggagc

SEQ ID NO: 1224 - DNA, 225 bp, unidentified
  misc_feature 1..225: note = Encodes 16S rRNA from Ruminococcus
  source 1..225: mol_type = genomic DNA
agagtttgatcatggctcaggacgaacgctggcggcgtgcctaacacatgcaagtcgaacggagctgaggagcttgcttctcagcttagtggcggacgggtgagtaacgcgtgagtaacctgcctccgagagtggaataacgttttgaaaagaacgctaataccgcataatattatgaagtcgcatggctttataatcaaagagtatatcgctcggagatggact

SEQ ID NO: 1225 - DNA, 225 bp, unidentified
  misc_feature 1..225: note = Encodes 16S rRNA from Coraliomargarita
  source 1..225: mol_type = genomic DNA
agagtttgatcctggctcagagtgaacgctggcggcgtggctaagacatgcaagttgagcgagaatatgctttcgggcatagggaagcggcaaacgggtgagtaacacgtaagtaacctgcccttgagactgggatagctcagcgaaagttgaggtaataccggatgacaaccattgatgcatgttaatggattgaaagggatgaaaggatgctcaaggaggggc

SEQ ID NO: 1226 - DNA, 225 bp, unidentified
  misc_feature 1..225: note = Encodes 16S rRNA from Butyricicoccus
  source 1..225: mol_type = genomic DNA
agagtttgatcatggctcaggacgaacgctggcggcgtgcctaacacatgcaagtcgaacggagttgaggagcttgctccttaacttagtggcgatcggtagccggactgagaggttgaacggccacattgggactgagacacggcccagactcctacgggaggcagcagtgggggatattgcgcaatgggggcaaccctgacgcagcaacgccgcgtgaaggat

SEQ ID NO: 1227 - DNA, 225 bp, unidentified
  misc_feature 1..225: note = Encodes 16S rRNA from Blautia
  source 1..225: mol_type = genomic DNA
agagtttgatcatggctcaggatgaacgctggcggcgtgcctaacacatgcaagtcgaacggagcttatggtgaaagatacttcggtagatggaagcgtaagcttagtggcggacgggtgagtaacgcgtggagaacctgccctgtaccgggggataacagagggaagcttctgctaataccgcataagcgcacggcaccgcatggtgcagtgtgaaaaactccg

SEQ ID NO: 1228 - DNA, 225 bp, unidentified
  misc_feature 1..225: note = Encodes 16S rRNA from Lachnospiracea incertae sedis
  source 1..225: mol_type = genomic DNA
agagtttgatcatggctcaggatgaacgctggcggcacgcttaacacatgcaagtcgagcggagaattgacttcggttgattcttagcggcggacgggtgaggaacgcgtgggtaatctgccctatacaggggaataacacagagaaatttgtgataaaaccgcataagcccacgggatcgcatggtcctgtgagaaaaactccggtggtataggatgagcccgc

SEQ ID NO: 1229 - DNA, 225 bp, unidentified
  misc_feature 1..225: note = Encodes 16S rRNA from Prevotella
  source 1..225: mol_type = genomic DNA
agagtttgatcatggctcaggatgaacgctagcggcaggcttaacacatgcaagtcgaggggcagcgcggggtagcaatactctggcggcgaccggcagacgggtgcgtaacgcgtatgcaacctacccaccacaggggtatagcccggcgaaagccggaataatcccccatggttccaacccaccgcatgatgagttggataaacccgcgagggggtgatggat

SEQ ID NO: 1230 - DNA, 225 bp, unidentified
  misc_feature 1..225: note = Encodes 16S rRNA from Clostridium IV
  source 1..225: mol_type = genomic DNA
agagtttgatcatggctcaggacgaacgctggcggcatgcctaacacatgcaagtcgaacggagttatttggattcgtctggataacttagtggcggacgggtgagtaacacgtgagcaacctgcccttcagagggggacaacagctggaaacggctgctaataccgcataacatatacgaaaggcatcttttgtatatcaaagatttatcgctgagggatgggc

SEQ ID NO: 1231 - DNA, 225 bp, unidentified
  misc_feature 1..225: note = Encodes 16S rRNA from Clostridium IV
  source 1..225: mol_type = genomic DNA
agagtttgatcatggctcaggatgaacgctggcggcgtgcataacacattcaagtcgaacgagcgagtgcccttcgggacacgagctagtggcggacgggtgagtaacgcgtgagcaacctgcccctgtgtgcgggataacgtcgggaaactgacgctaataccgcataacacatgagtcccgcatggggcatatgtcaaagatttattgcacagggatgggctc

SEQ ID NO: 1232 - DNA, 225 bp, unidentified
  misc_feature 1..225: note = Encodes 16S rRNA from Clostridium III
  source 1..225: mol_type = genomic DNA
agagtttgatcatggctcaggacgaacgctggcggcgtgcctaacacatgcaagtcgaacgagaaatatggaaaggatcccttcggggagaatagaaatatggacagtggcggacgggcgagtaacgcgtgagtaacctgcccataagcgggggatagccgatggaaacgtcgagtaataccccatgatgtatatatatcgcatggtatatatattaaagattta

SEQ ID NO: 1233 - DNA, 225 bp, unidentified
  misc_feature 1..225: note = Encodes 16S rRNA from Neptunomonas
  source 1..225: mol_type = genomic DNA
agagtttgatcctggctcaggatgaacgctagctacaggcttaacacatgcaagtcgaggggaatattgcacaatgggggaaaccctgatgcagccatgccgcgtgtgtgaagaaggccttcgggttgtaaagcacttttgcattcgaggaagacagcgtataaataaatgcgctatttgacgttagagtgtgaataagcaccggcaaactccgtgccagcagcc

SEQ ID NO: 1234 - DNA, 225 bp, unidentified
  misc_feature 1..225: note = Encodes 16S rRNA from Clostridium IV
  source 1..225: mol_type = genomic DNA
agagtttgatcctggctcaggatgaacgctggcggcgtgcataacacattcaagtcgaacggacaccttcgggtgtcagtggcggacgggtgagtaacgcgtgagtaacctgccgcggattggggaataacgaccggaaacagtcgctaataccgcataacgcacgatgaccgcatggtcgacgtgccaaagatttatcgatccgcgatggactcgcgtccaatt

SEQ ID NO: 1235 - DNA, 225 bp, unidentified
  misc_feature 1..225: note = Encodes 16S rRNA from Howardella
  source 1..225: mol_type = genomic DNA
agagtttgatcctggctcaggacgaacgctggcggcatgcttaacacatgcaagtcgaacggactgattccttcgggatgaaagttagtggcgaacgggtgagtaatgtatgagcaacctgcctctgtcaacgggataacagttggaaacgactgctaatacggtataagaccacggcaccgcatggtgctgcggtaaaagatttttcggacagagatgggctca

SEQ ID NO: 1236 - DNA, 225 bp, unidentified
  misc_feature 1..225: note = Encodes 16S rRNA from Clostridium IV
  source 1..225: mol_type = genomic DNA
agagtttgatcatggctcaggatgaacgctggcggcgtgcataacacattcaagtcgaacggagatagaagcttcggtttttatcttagtggcggacgggtgagtaacgcgtgagcaacctgcccctgtgtgcgggataacgtttggaaacggacgctaataccgcatgacccaacgggaccgcatgatcttgttggcaaagattcattgcacagggatgggctc

SEQ ID NO: 1237 - DNA, 220 bp, unidentified
  misc_feature 1..220: note = Encodes 16S rRNA from Roseburia
  source 1..220: mol_type = genomic DNA
agagtttgatcatggctcaggatgaacgctagctacaggcttaacacatgcaagtcgagaggcagcagtggggaatattgcacaatgggggaaaccctgatgcagcgacgccgcgtgagcgaagaagtatttcggtatgtaaagctctatcagcagggaagataatgacggtacctgactaagaagcaccggctaaatacgtgccagcagccgcggtaat

SEQ ID NO: 1238 - DNA, 225 bp, unidentified
  misc_feature 1..225: note = Encodes 16S rRNA from Oscillibacter
  source 1..225: mol_type = genomic DNA
agagtttgatcctggctcaggacgaacgctggcggcgtgcttaacacatgcaagtcgaacgaagctctcacgcttgagttttcggacaagagggtgagatgacttagtggcggactggtgagtaacgcgtgagcaacctgccctccggtgggggacaacagttggaaacgactgctaataccgcataatgtacagagaccgcatgatctttgtaccaaagcttta

SEQ ID NO: 1239 - DNA, 225 bp, unidentified
  misc_feature 1..225: note = Encodes 16S rRNA from Clostridium XlVa
  source 1..225: mol_type = genomic DNA
agagtttgatcatggctcaggatgaacgctggcggcgtgcttaacacatgcaagtcgaacgaggaattaccgatgaagttttcggatggatttggtttttccgagtggcggacgggtgagtaacgcgtgggtaacctgccttacactgggggacaacagagagaaatttctgctaataccgcataacccgctaggggcgcatgccccggacggaaaagatttatc

SEQ ID NO: 1240 - DNA, 225 bp, unidentified
  misc_feature 1..225: note = Encodes 16S rRNA from Clostridium IV
  source 1..225: mol_type = genomic DNA
agagtttgatcatggcttaggatgaacgctggcggcgtgcataacacattcaagtcgaacggagagtgagcttcggctcacaatcagtggcggacgggtgagtaacgcgtgagcaacctgcccggaagcgtgggataacagagggaaacttctgctaataccgtatatcgtattcggatcgcatgttctgaatacaaaagggtttccgcttccggatgggctcgc

SEQ ID NO: 1241 - DNA, 225 bp, unidentified
  misc_feature 1..225: note = Encodes 16S rRNA from Sporobacter
  source 1..225: mol_type = genomic DNA
agagtttgatcatggctcaggatgaacgctggcggcgtgcctaacacattcaagtcgaacggtgaagggacttcggtcccggatcagtggcggacgggtgagtaacgcgtgagcaacctgcctctgactgggggataacagccggaaacggctgctaataccgcataacgtgcgaccttcgcatgaaggacgcaccaaagatttatcggtcagagatgggctcgc

SEQ ID NO: 1242 - DNA, 225 bp, unidentified
  misc_feature 1..225: note = Encodes 16S rRNA from Clostridium XlVa
  source 1..225: mol_type = genomic DNA
agagtttgatcctggctcaggatgaacgctggcggcgtgcctaacacatgcaagtcgaacgaagcatattggaaagagcccttcgggacgatggaagatatgacttagtggcggacgggtgagtaacgcgtgggcaacctgccgtacacagggggacaacagctggaaacggctgctaataccgcataagcgcacagcttcgcatggagtagtgtgaaaagcatt

SEQ ID NO: 1243 - DNA, 225 bp, unidentified
  misc_feature 1..225: note = Encodes 16S rRNA from Butyricicoccus
  source 1..225: mol_type = genomic DNA
agagtttgatcctggctcaggatgaacgctggcggcgtgcataacacattcaagtcgaacgaagcacttcggacagatcccttcggggtgaagactgatttgacttagtggcggacgggtgagtaacgcgtgagcaacctgccttgaagagggggataacacagggaaacttgtgctaataccgcataacgtaccgacatcgcatggtgatggtaccaaagcctt

SEQ ID NO: 1244 - DNA, 225 bp, unidentified
  misc_feature 1..225: note = Encodes 16S rRNA from Clostridium XlVa
  source 1..225: mol_type = genomic DNA
agagtttgatcatggctcagattgaacgctggcggcgtgcctaacacatgcaagtcgaacgagcgaggtatgaaacctagtgaataccgagcgagtggcggacgggtgagtaacgcgtgggtaacctgccttacagagggggataacagtctgaaaagactgctaataccgcataagcacacagtaccgcatggtacagggtgaaaagaattatcactgtaagat

SEQ ID NO: 1245 - DNA, 225 bp, unidentified
  misc_feature 1..225: note = Encodes 16S rRNA from Filomicrobium
  source 1..225: mol_type = genomic DNA
agagtttgatcatggctcagaacgaacgctggcggcaggcctaacacatgcaagtcgaacgccctagcaatagggagtggcagacgggtgagtaacgcgtgggaaccttcccagtggtacggaatagcccagggaaacttggagtaataccgtataatacccgaaaggggaaagatttatcgccattggatgggcccgcgttggattagctagttggtgaggtaa

SEQ ID NO: 1246 - DNA, 225 bp, unidentified
  misc_feature 1..225: note = Encodes 16S rRNA from Bacteroides
  source 1..225: mol_type = genomic DNA
agagtttgatcctggctcaggatgaacgctagctacaggcctaacacatgcaagtcgcggggcagcatgggcgtagcaatacgcctgatggcgaccggcgcacgggtgcgtaacgcgtatccaacctggcccttactcgggtatagccctgcgaaagtaggattaatccccgatgttgtcaagcgatagccttttcacttgaccaaagagttattcggtaaggga

SEQ ID NO: 1247 - DNA, 225 bp, unidentified
  misc_feature 1..225: note = Encodes 16S rRNA from Clostridium XlVa
  source 1..225: mol_type = genomic DNA
agagtttgatcatggctcaggatgaacgctggcggcgtgcctaacacatgcaagtcgaacgggactttatggaatgcgattcgtcaaatgaaataaagtttagtggcggacgggtgagtaacgcgtgggtaacctgccttacagagggggataacggttggaaacgactgctaataccgcataagcccacagtaccgcatggtacagggggaaaagatttatcgc

SEQ ID NO: 1248 - DNA, 225 bp, unidentified
  misc_feature 1..225: note = Encodes 16S rRNA from Brevundimonas
  source 1..225: mol_type = genomic DNA
agagtttgatcatggctcaggacgaacgctggcggtgtgcctcatacatgcaagtcgaacgataaggttccttcgggaatacataagtggcggacgggtgagtacaacataggaaatctgccccaaagcgggggacaacagagggaaacttctgctaataccccatacgagcttagttgaaatactaatcttgaaagatttatcactttgggatgagcctgtgcc

SEQ ID NO: 1249 - DNA, 225 bp, unidentified
  misc_feature 1..225: note = Encodes 16S rRNA from Clostridium IV
  source 1..225: mol_type = genomic DNA
agagtttgatcatggctcaggacgaacgctggcggcgtgcctaacacatgcaagtcgagcggagacataagaggaagcggaagttttcggatggaagcggacatttatgttttagcggcggacgggtgagtaacgcgtgagcaacctgtccctcacagggggataacacaccgaaaggtgtactaataccgcatgacactgctgaaggacatcctatagcagtca

SEQ ID NO: 1250 - DNA, 225 bp, unidentified
  misc_feature 1..225: note = Encodes 16S rRNA from Paracoccus
  source 1..225: mol_type = genomic DNA
agagtttgatcatggctcagaacgaacgctggcggcaggcctaacacatgcaagtcgagcgagaccttcgggtctagcggcggacgggtgagtaacgcgtgggaatatgcccttctctacggaatagtcctgggaaactgggggtaataccgtatacgccctttgggggaaagatttatcggagaaggattagcccgcgttggattaggtagttggtggggtaat

SEQ ID NO: 1251 - DNA, 225 bp, unidentified
  misc_feature 1..225: note = Encodes 16S rRNA from Schlegelella
  source 1..225: mol_type = genomic DNA
agagtttgatcctggctcagattgaacgctggcggcatgccttacacatgcaagtcgaacggcagcgggggagcttgctcctgccggcgagtggcgaacgggtgagtaatgcatcggaacgtgtcctgttgtgggggataactgatcgaaagatcagctaataccgcatgagacctgagggtgaaagcgggggatcgaaagacctcgcgcgacaggagcggccga

SEQ ID NO: 1252 - DNA, 225 bp, unidentified
  misc_feature 1..225: note = Encodes 16S rRNA from Clostridium XI
  source 1..225: mol_type = genomic DNA
agagtttgatcctggctcaggatgaacgctggcggcgtgcctaacacatgcaagtcgagcgaacccttcggggtgagcggcggacgggtgagtaacgcgtgggtaacctgccctgtacacacggataacataccgaaaggtatgctaatacgagataatatattttaatcgcatggttaagatatcaaagctccggcggtacaggatggacccgcgtctgattag

SEQ ID NO: 1253 - DNA, 225 bp, unidentified
  misc_feature 1..225: note = Encodes 16S rRNA from Diaphorobacter
  source 1..225: mol_type = genomic DNA
agagtttgatcctggctcagattgaacgctggcggcatgccttacacatgcaagtcgaacggtaacggaccttcgggtgccgacgagtggcgaacgggtgagtaatacatcggaacgtgcccgatcgtgggggataacgaggcgaaagctttgctaataccgcatacgatctacggatgaaagcaggggaccgcaaggccttgcgcggacggagcggccgatggc

SEQ ID NO: 1254 - DNA, 225 bp, unidentified
  misc_feature 1..225: note = Encodes 16S rRNA from Clostridium sensu stricto
  source 1..225: mol_type = genomic DNA
agagtttgatcatggctcaggacgaacgctggcggcgcgcctaacacatgcaagtcgaacgggactagtgaccggagcttagaagtcttctaggttgcgttcactagttcagtggcggacgggtgagtaaagcatgagtaactttcccattagtggggaatagcttttggaaacagaagataataccgcatacatcgttgaggactcatgttctcttcggaaaag

SEQ ID NO: 1255 - DNA, 225 bp, unidentified
  misc_feature 1..225: note = Encodes 16S rRNA from Saccharopolyspora
  source 1..225: mol_type = genomic DNA
agagtttgatcctggctcaggacgaacgctggcggcgtgcttaacacatgcaagtcgaacgctgaagctctgcccttgtggtggggtggatgagtggcgaacgggtgagtaacacgtgggtaatctgccccatactctgggataacccctggaaacgggggctaataccggataggacattctgccgcatggtggggtgtggaaagttccggcggtatgggatgg

SEQ ID NO: 1256 - DNA, 225 bp, unidentified
  misc_feature 1..225: note = Encodes 16S rRNA from Prevotella
  source 1..225: mol_type = genomic DNA
agagtttgatcctggctcaggatgaacgctagctacaggcttaacacatgcaagtcgaggggcatcaggtatcaagcttgcttgatatgctggcgaccggcgcacgggtgcgtaacacgtatcgaaccttcccgcctctccgggacagccctctgaaaggaggattaataccggatggcttcaccttgccgcatggcatggtgaataaagattcatcggagacgg

SEQ ID NO: 1257 - DNA, 225 bp, unidentified
  misc_feature 1..225: note = Encodes 16S rRNA from Eggerthella
  source 1..225: mol_type = genomic DNA
agagtttgatcctggctcaggatgaacgctggcggcgtgcctaacacatgcaagtcgaacgatgaaaccgcctccgggcggacatgaagtggcgaacgggtgagtaacacgtgaccaacctgccccgcgcaccgggacagccccccgaaagggggattaataccggatactccggccgggccgcatggcccggccgggaaagctccggcggcgcgggatggggtc

SEQ ID NO: 1258 - DNA, 225 bp, unidentified
  misc_feature 1..225: note = Encodes 16S rRNA from Gelidibacter
  source 1..225: mol_type = genomic DNA
agagtttgatcctggctcaggataaacgctagcggcaggcctaacacatgcaagtcgagcggcagcgggagtagcaatacttgccggcgagcggcggacgggtgagtaacgcgtatgcaacctgcccaccacacggagatagccgaccgaaaggacgattaaactccgatggcattgggacccggcatcgggatccaattaaatatttataggtggtggatgggc

SEQ ID NO: 1259 - DNA, 225 bp, unidentified
  misc_feature 1..225: note = Encodes 16S rRNA from Prevotella
  source 1..225: mol_type = genomic DNA
agagtttgatcctggctcaggatgaacgctagctacaggcttaacacatgcaagtcgaggggcagcatggcggtggcttgccaccgccgatggcgaccggcgcacgggtgagtaacgcgtatccaacctgcccacaacctccgaatagcccgccgaaaggcggattaatgcgggatgtggtctgaagaagacatctgaactagaccaaaggttttttccggttgt

SEQ ID NO: 1260 - DNA, 225 bp, unidentified
  misc_feature 1..225: note = Encodes 16S rRNA from Pseudomonas
  source 1..225: mol_type = genomic DNA
agagtttgatcatggctcagattgaacgctggcggcaggcctaacacatgcaagtcgagcggatgaagggagcttgctcccggattcagcggcggacgggtgagtaatgcctaggaatctgcctggtagtgggggacaacgttccgaaaggagcgctaataccgcatacgtcctacgggagaaagtgggggatcttcggacctcacgctatcagatgagcctagg

SEQ ID NO: 1261 - DNA, 225 bp, unidentified
  misc_feature 1..225: note = Encodes 16S rRNA from Prevotella
  source 1..225: mol_type = genomic DNA
agagtttgatcatggctcaggatgaacgctagctacaggcttaacacatgcaagtcggggggcagcacggggtgcagcaatgcacttgggtggcgaccggcgaatgggtgagtaacgagtatccaacctgccccgcgctccgggacagccccgcgaaagcgggattaataccggatgcggcatggttcccgcatgggctccatgtcaaagattcatcggcgcggg

SEQ ID NO: 1262 - DNA, 225 bp, unidentified
  misc_feature 1..225: note = Encodes 16S rRNA from Prevotella
  source 1..225: mol_type = genomic DNA
agagtttgatcatggctcaggatgaacgctagctacaggcttaacacatgcaagtcgaggggcatcggggaggtagcttgctatctctgccggcgaccggcgcacgggtgagtaacgcgtatccaacctgccgcatagtcgggcacagccctctgaaaggaggattaatgccggatgtggtcttagtgagacatctcatatagactgaagatttattgctatgcg

SEQ ID NO: 1263 - DNA, 225 bp, unidentified
  misc_feature 1..225: note = Encodes 16S rRNA from Prevotella
  source 1..225: mol_type = genomic DNA
agagtttgatcatggctcaggatgaacgctagctacaggcttaacacatgcaagtcgaggggcagcatggcggtggcttgccactgccgatggcgaccggcgcacgggtgagtaacgcgtatccaacctgcccgcaaccgcggaatagcccgccgaaaggcggattaatgccgcatgagctcgcgtgggggcatctgcccgcgagcaaaggttcactccggttgc

SEQ ID NO: 1264 - DNA, 225 bp, unidentified
  misc_feature 1..225: note = Encodes 16S rRNA from Brevundimonas
  source 1..225: mol_type = genomic DNA
agagtttgatcatggctcaggacgaacgctggcggtgtgcctcatacatgcaagtcgaacgagaagctttcttcggaaagtggaaagtggcggacgggtgagtacaacataggaaatctgccctaaagtgggggacaacagagggaaactcctgctaataccccatacgagcttagttgaaatactaatcttgaaagatttatcgctttaggatgagcctgtgcc

SEQ ID NO: 1265 - DNA, 225 bp, unidentified
  misc_feature 1..225: note = Encodes 16S rRNA from Bacteroides
  source 1..225: mol_type = genomic DNA
agagtttgatcctggctcaggatgaacgctggcggcgtgcctaacacatgcaagtcgaggggcagcatggtcttagcttgctaaggccgatggcgaccggcgcacgggtgagtaacgcgtatccaacctgccgtccagtaggggacagcccgtagaaatgcggattaataccctatgttctccgaggatgacatcagattcggagtaaagattcatcgctggacg

SEQ ID NO: 1266 - DNA, 225 bp, unidentified
  misc_feature 1..225: note = Encodes 16S rRNA from Clostridium XlVa
  source 1..225: mol_type = genomic DNA
agagtttgatcctggctcaggataaacgctggcggcgtgcttaacacatgcaggtcgaacgaggtatcgaagattaatcttcggaagcgtttttgataccgagtggcggacgggtgagtaacgcgtgggtaacctgcccggaagagggggacaacagttggaaacgactgctaataccgcataagccgacggagccgcatggctctgccggaaaaggagtgatcc

SEQ ID NO: 1267 - DNA, 209 bp, unidentified
  misc_feature 1..209: note = Encodes 16S rRNA from Photobacterium
  source 1..209: mol_type = genomic DNA
agagtttgatcctggctcagattgaacgctggcgggggaatattgcacaatgggggaaaccctgatgcagccatgccgcgtgtgtgaagaaggccttcgggttgtaaagcacttttgcattcgaggaagacagcgtataaataaatgcgctatttgacgttagagtgtgaataagcaccggcaaactccgtgccagcagccgcggtaat

SEQ ID NO: 1268 - DNA, 225 bp, unidentified
  misc_feature 1..225: note = Encodes 16S rRNA from Clostridium XlVa
  source 1..225: mol_type = genomic DNA
agagtttgatcatggctcaggatgaacgctggcggcgtgcttaatacatgcaagtcgaacgggataaattggaagcttgcttttgatttatctagtggcggacgggtgagtaacgcgtgggtaacctgcctcatacagggggataacagttagaaatgactgctaaaaccgcataacattgtggtaccgcatgatatcacgatcaaatatttataggtatgagat

SEQ ID NO: 1269 - DNA, 225 bp, unidentified
  misc_feature 1..225: note = Encodes 16S rRNA from Clostridium XlVb
  source 1..225: mol_type = genomic DNA
agagtttgatcatggctcaggatgaacgctggcggcgtgcctaacacatgcaagtcgagcgaagggttgagagcttgctcttaactacttagcggcggacgggtgagtaacgcgtgggtaacctgccctgtacagaggaataacagttagaaatgactgctaatgcctcataagccgacgaaatggcatcattatgtcggaaaagatttatcggtacaggaggga

SEQ ID NO: 1270 - DNA, 225 bp, unidentified
  misc_feature 1..225: note = Encodes 16S rRNA from Prevotella
  source 1..225: mol_type = genomic DNA
agagtttgatcatggctcaggatgaacgctagctacaggcttaacacatgcaagtcgaggggcagcagggcaatagcttgctattgctgctggcgaccggcgcacgggtgagtaacgcgtatccaacctaccccgcggtcagggacagcccggcgaaagtcggattaatacctgatgcagtcagaagagggcatctgattttgacgaaagattttatcgcctcgg

SEQ ID NO: 1271 - DNA, 225 bp, unidentified
  misc_feature 1..225: note = Encodes 16S rRNA from Clostridium IV
  source 1..225: mol_type = genomic DNA
agagtttgatcatggctcaggacgaacgctggcggcgtgcttaacacatgcaagtcgaacgaagcttgatttatgatttcttcggaatgaataatgatatgacttagtggcggacgggtgagtaacgcgtgaggaacctgcctttcagagggggacaacatttggaaacgaatgctaataccgcataacgcattttaaggacatccttttaatgccaaagattta

SEQ ID NO: 1272 - DNA, 225 bp, unidentified
  misc_feature 1..225: note = Encodes 16S rRNA from Anaeroplasma
  source 1..225: mol_type = genomic DNA
agagtttgatcatggctcaggattaacgctggcggcgtgcctaatacatgcaagtcggatggttagcttgctaaccatggcgaacgggtgagtaacacgtaggtaacctgtctaagacacgaggataaccattggaaacgatggataatactggataggacatttgaaggcatctttggatgtttaaagatttatcggtaatagaggggcctgcggcgcattagc

SEQ ID NO: 1273 - DNA, 225 bp, unidentified
  misc_feature 1..225: note = Encodes 16S rRNA from Caldilinea
  source 1..225: mol_type = genomic DNA
agagtttgatcctggctcaggatgaacgctggcggcgtgcttaacacatgcaagtcgaacgtgagggtgcagcaatgtacctgaaagtggcaaacgggtgagtaacacgtagatgacctgcctcgtagtgggggataaccacgggaaactgtggctaataccgcatggtcttgttagtatgggaatactttcaagtaaagctttatgtgctatgagaggggtctg

SEQ ID NO: 1274 - DNA, 225 bp, unidentified
  misc_feature 1..225: note = Encodes 16S rRNA from Clostridium XlVa
  source 1..225: mol_type = genomic DNA
agagtttgatcatggctcaggatgaacgctggcggcgtgcctaacacatgcaagtcgaacggagacttggcgctgacgagtgaaatagcttgctatggaacaaatcttgccaagacttagtggcggacgggtgagtaacgcgtggacaacctggcccatacagggggacagcagctggaaacggctgataataccgcataagcgcacagtatcacatggtacagt

SEQ ID NO: 1275 - DNA, 225 bp, unidentified
  misc_feature 1..225: note = Encodes 16S rRNA from Victivallis
  source 1..225: mol_type = genomic DNA
agagtttgatcatggctcagaatgaacgctggcggcatggattaggcatgcaagtcgaacggggcgcagcgatgcgcccagtggcgaaagggtgagtagcacgtgaagaacctgcccccggatccggaacaagcgctggaaacggcgtctgatacgggatgtggacgtcccccgcatggggggcgctctaaagattcatcgtccggggagggcttcgcgtcccat

SEQ ID NO: 1276 - DNA, 225 bp, unidentified
  misc_feature 1..225: note = Encodes 16S rRNA from Brevundimonas
  source 1..225: mol_type = genomic DNA
agagtttgatcatggctcaggacgaacgctggcggcgtgcttcatacatgcaagtcgaacgagaatctctagcttgctagagaggaaagtggcggacgggtgagtaatatgtagagaatctgccctagagagtgggacaacagagggaaacttctgctaataccgcatatgcgcgtagctgagatgctattcgtgaaaactctggtgctctgggatgagtctgca

SEQ ID NO: 1277 - DNA, 225 bp, unidentified
  misc_feature 1..225: note = Encodes 16S rRNA from unidentified taxa
  source 1..225: mol_type = genomic DNA
agagtttgatcatggctcaggatgaacgctggcggcgtgcttcatacatgcaagtcgaacgagaaatgatagcttgctatcatggaaagtggcggacgggtgagtaatacatagggaatctgcccttagccgggggacaacagttggaaacgactgctaataccgcatatgagtatagttttatacttgaaaactccggtggctaaggatgagcctgtgcctgat

SEQ ID NO: 1278 - DNA, 225 bp, unidentified
  misc_feature 1..225: note = Encodes 16S rRNA from Prevotella
  source 1..225: mol_type = genomic DNA
agagtttgatcatggctcaggatgaacgctagctacaggcttaacacatgcaagtcgaggggcagcatgtcagtggcttgccactgatgatggcgaccggcgcacgggtgagtaacgcgtatccaaccttcccccaagtagggaatagcccggcgaaagtcggattaatgccctatgttttccttatgtgagcattctgtgaggaacaaagattgatcgcttggg

SEQ ID NO: 1279 - DNA, 225 bp, unidentified
  misc_feature 1..225: note = Encodes 16S rRNA from Slackia
  source 1..225: mol_type = genomic DNA
agagtttgatcctggctcaggatgaacgctggcggcgtgcctaacacatgcaagtcgaacggagaagccgccctcgggcgggtatgaagtggcgaacgggtgagtaacacgtgaccaacctgccccgcgcaccgggacaaccccccgaaaggggggctgataccggatacgcccccggcgccgcatggcggcggggggaaagcccagacggcgcgggatggggtc

SEQ ID NO: 1280 - DNA, 225 bp, unidentified
  misc_feature 1..225: note = Encodes 16S rRNA from Pedobacter
  source 1..225: mol_type = genomic DNA
agagtttgatcatggctcaggatgaacgctagcggcaggcttaacacatgcaagtcgaggggcatcgcgggagtagcaatacacctggcggcgaccggcggaagggtgcgtaacgcgtgagcaacatgcccgtcacagggggataacagatggaaacgtctcctaataccccgtaacatcatctgcggcatcgcaggtggttgaaagtttcggcggtgacggatt

SEQ ID NO: 1281 - DNA, 225 bp, unidentified
  misc_feature 1..225: note = Encodes 16S rRNA from Prevotella
  source 1..225: mol_type = genomic DNA
agagtttgatcctggctcaggatgaacgctagctacaggcttaacacatgcaagtcgaggggcagcacggttgttgcttgcaacaactggtggcgaccggcgcacgggtgagtaacgcgtatccaacctgcccgcaaccgcggaatagcccgccgaaaggcggattaatgccgcatgagctcgcgcgagggcatcatttcgcgagcaaaggttcactccggttgc

SEQ ID NO: 1282 - DNA, 225 bp, unidentified
  misc_feature 1..225: note = Encodes 16S rRNA from Trueperella
  source 1..225: mol_type = genomic DNA
agagtttgatcatggctcaggacgaacgctggcggcgtgcttaacacatgcaagtcgaacgatgaagctggtgcttgcactggtggattagtggcgaacgggtgagtaatacgtgagtaacctgcccttgtctttgggataagcctgggaaactgggtctaatactggatattctgcgctggccgcatggttggtgttggaaagggttatggactggatggggat

SEQ ID NO: 1283 - DNA, 225 bp, unidentified
  misc_feature 1..225: note = Encodes 16S rRNA from Oscillibacter
  source 1..225: mol_type = genomic DNA
agagtttgatcatggctcaggataaacgctggcggcgcacataagacatgcaagtcgaacggaagtcgtaattaaaaaggaacaaagatttatcggagtgagattttaactacaatggctttagtggcggactggtgagtaatgtataagtaacctgcctattagaggggaacaacagttggaaacagctgctaataccgcatatgccataagaaccgcatggtt

SEQ ID NO: 1284 - DNA, 225 bp, unidentified
  misc_feature 1..225: note = Encodes 16S rRNA from unidentified taxa
  source 1..225: mol_type = genomic DNA
agagtttgatcatggctcaggatgaacgctggcggcgtgcttcatacatgcaagtcgaacgagaattggtagcttgctaccaaggaaagtggcggacgggtgagtaatacatagggaatctgcccttagctgggggacaacagttggaaacgactgctaataccgcatatgagtatagttgagatattatacttgaaaactccggtggctagggatgagcctgtg

SEQ ID NO: 1285 - DNA, 225 bp, unidentified
  misc_feature 1..225: note = Encodes 16S rRNA from Victivallis
  source 1..225: mol_type = genomic DNA
agagtttgatcatggctcagaatgaacgctggcggcatggattaggcatgcaagtcgaacggggtccttcgggacctagtggcgaaagggtgagtaacacgtgagcaatctgcccccaaggccggaataagcactggaaacggtgtctaaaaccggatgaggcctggagtcgcatgactcctcagccaaatattcataccctggggatgagctcgcggcccatta

SEQ ID NO: 1286 - DNA, 225 bp, unidentified
  misc_feature 1..225: note = Encodes 16S rRNA from Bacteroides
  source 1..225: mol_type = genomic DNA
agagtttgatcatggctcaggatgaacgctagcggcaggcttaacacatgcaagtcgaggggcagcggagaagtagcaatacttctgccggcgaccggcgcacgggtgagtaacgcgtatgcaacctttcccagacagggggatagcccagggaaacttggattaataccccgtaggccgtggggcggcatcgccctatggttaaagttccggcggtctggggtg

SEQ ID NO: 1287 - DNA, 225 bp, unidentified
  misc_feature 1..225: note = Encodes 16S rRNA from Micrococcus
  source 1..225: mol_type = genomic DNA
agagtttgatcatggctcaggatgaacgctggcggcgtgcttaacacatgcaagtcgaacgatgaagcccagcttgctgggtggattagtggcgaacgggtgagtaacacgtgagtaacctgcccttaactctgggataagcctgggaaactgggtctaataccggataggagcgcctaccgcatggtgggtgttggaaagatttatcggttttggatggactcg

SEQ ID NO: 1288 - DNA, 225 bp, unidentified
  misc_feature 1..225: note = Encodes 16S rRNA from Olivibacter
  source 1..225: mol_type = genomic DNA
agagtttgatcatggctcaggatgaacgctagcggcaggcctaatacatgcaagtcgtacggtaagcggtccttcgggaccgtgagagtggcggacgggtgcgtaacgcgtatgcaaccaacccccctcgccgggatagccggtggaaacgccggataataccggatgcgccgcgggggaggcatcttcccggcggcaaggcggagacgcggagggggacgggca

SEQ ID NO: 1289 - DNA, 225 bp, unidentified
  misc_feature 1..225: note = Encodes 16S rRNA from Anaerophaga
  source 1..225: mol_type = genomic DNA
agagtttgatcatggctcaggatgaacgctagcgacaggcctaacacatgcaagtcgaggggtaacagggagcttgctccgctgacgaccggcgcacgggtgagtaacgcgtatgcaacctgcccgcgggatcgggatagccccccgaaagggggattaacaccggatgaggctgcgagggggcatccccatgtagccaaatgcgaagctcgcggatgggcatgc

SEQ ID NO: 1290 - DNA, 225 bp, unidentified
  misc_feature 1..225: note = Encodes 16S rRNA from Selenomonas
  source 1..225: mol_type = genomic DNA
agagtttgatcatggctcaggacgaacgctggcggcgtgcttaacacatgcaagtcgaacggggcgattgaaagcttgcttttatgagcctagtggcaaacgggtgagtaacgcgtgggcaacctgccggaaagatggggacaacatcccgaaaggggtgctaataccgaatgttgtatacggggcgcatgccttgtatattaaaggattttatccgctttccga

SEQ ID NO: 1291 - DNA, 151 bp, unidentified
  misc_feature 1..151: note = Encodes 16S rRNA from Megasphaera
  source 1..151: mol_type = genomic DNA
agagtttgatcctggctcagattgaacgctggcggcaggcttaacacatgcaagtcgtacggtaacagagggaagcttgcttctctgctgacgagtgacggtaccgaacatagaaagccacggctaactacgtgccagcagccgcggtaat

SEQ ID NO: 1292 - DNA, 225 bp, unidentified
  misc_feature 1..225: note = Encodes 16S rRNA from Clostridium XlVa
  source 1..225: mol_type = genomic DNA
agagtttgatcctggctcaggatgaacgctggcggcgtgcctaacacatgcaagtcgaacgaagcacacggattgatcccttcggggtgattgaagtatgactgagtggcggacgggtgagtaacgcgtgggtaacctgcctcatacagggggataacagttagaaatgactgctaataccgcataagcgcacagcatcgcatggtgcagtgtgaaaaactccgg

SEQ ID NO: 1293 - DNA, 225 bp, unidentified
  misc_feature 1..225: note = Encodes 16S rRNA from Clostridium XlVa
  source 1..225: mol_type = genomic DNA
agagtttgatcatggctcaggatgaacgctggcggcgtgcctaacacatgcaagtcgaacggggtacagacgctgtgagaagaagtgcttgcacggaatcaaacttgtttgtacttagtggcggacgggtgagtaacgcgtggaaaacctgcctcatacagggggataacaggaagaaattcctgctaataccgcataagcgcacaggaaggcatctttcagtgt

SEQ ID NO: 1294 - DNA, 225 bp, unidentified
  misc_feature 1..225: note = Encodes 16S rRNA from Eubacterium
  source 1..225: mol_type = genomic DNA
agagtttgatcatggctcaggatgaacgctggcggcgtgcttaacacatgcaagtcgagcgagaaatcgctcagttgatacttcggttgaaaacagagcgacggaaagcggcggacgggtgagtaacgcgtgggaaacctgccctttacagggggacagccgagggaaacttcgattaataccccataatgccatagtatcgcatggtaccatggccaaagattt

SEQ ID NO: 1295 - DNA, 225 bp, unidentified
  misc_feature 1..225: note = Encodes 16S rRNA from unidentified taxa
  source 1..225: mol_type = genomic DNA
agagtttgatcatggctcaggatgaacgctggcggcgtgcttcatacatgcaagtcgaacgagaattgatagcttgctatcaaggaaagtggcggacgggtgagtaatacatagggaatctgcccttagctgggggacaacagttggaaacgactgctaataccgcatatgagtatgattgagatattatacttgaaaactccggtggctaaggatgagcctgtg

SEQ ID NO: 1296 - DNA, 225 bp, unidentified
  misc_feature 1..225: note = Encodes 16S rRNA from Clostridium XlVa
  source 1..225: mol_type = genomic DNA
agagtttgatcatggctcaggatgaacgctggcggcgtgcctaacacatgcaagtcgaacggaaatgttttgatgaagatttcggttggattcaatacattttagtggcggacgggtgagtaacacgtgggtaacctgccctgtaccgggggataacacttagaaataggtgataataccgcataagcgcacactgaggcatctcagagtgtgaaaaactccggt

SEQ ID NO: 1297 - DNA, 225 bp, unidentified
  misc_feature 1..225: note = Encodes 16S rRNA from Treponema
  source 1..225: mol_type = genomic DNA
agagtttgatcctggctcagaacgaacgctggcggcgcgtcttaagcatgcaagtcgagcgggattacctagcttgctaggtatgagagcggcggactggtgagtaacgcgtgggtgacgtacccttctgacggggatagccggtagaaataccgggtaataccggatgcgttctcctgtcttggaagcaggagaagaaaggagctacggctccgcaggaggaac

SEQ ID NO: 1298 - DNA, 225 bp, unidentified
  misc_feature 1..225: note = Encodes 16S rRNA from Cryptanaerobacter
  source 1..225: mol_type = genomic DNA
agagtttgatcatggctcaggacgaacgctggcggcatgcctaacacatgcaagtcgaacggaataagaatggctgtagcgatactttcgttcttatttagtggcgaacgggtgagtaacacgtgagcaacctgccttctacacagggataacagccggaaacggctgctaataccggataagaccacactgaggcatctcagaggggtcaaagcgatttagcgg

SEQ ID NO: 1299 - DNA, 225 bp, unidentified
  misc_feature 1..225: note = Encodes 16S rRNA from Xanthomonas
  source 1..225: mol_type = genomic DNA
agagtttgatcctggctcagagtgaacgctggcggcaggcctaacacatgcaagtcgaacggcagcacaggagagcttgctctctgggtggcgagtggcggacgggtgaggaatacatcggaatctaccttgtcgtgggggataacgtagggaaacttacgctaataccgcatacgacctacgggtgaaagcaggggaccttcgggccttgcgcgattggatgag

SEQ ID NO: 1300 - DNA, 225 bp, unidentified
  misc_feature 1..225: note = Encodes 16S rRNA from Asteroleplasma
  source 1..225: mol_type = genomic DNA
agagtttgatcatggctcaggataaacgccggcggcgtgcctaatacatgcaagtcgaacgggagtagcaatactctagtggcgtacgggtgagtaacacgttggtaacctaccccaaggaccggaataccaaggagaaatctttgctaatgccggatgaaaccatagaagcgcaagcttcattgatcaaaggcggcaattgccgcgccatgggatggacctgcg

SEQ ID NO: 1301 - DNA, 225 bp, unidentified
  misc_feature 1..225: note = Encodes 16S rRNA from unidentified taxa
  source 1..225: mol_type = genomic DNA
agagtttgatcatggctcaggatgaacgctggcggcgtgcttcatacatgcaagtcgaacgagaattggtagcttgctaccaaggaaagtggcggacgggtgagtaatacatagggaatctgcccttagccgggggacaacagttggaaacgactgctaataccgcatatgaggtaagttgagatacttatcttgaaaactccggtggctaaggatgagcctgtg

SEQ ID NO: 1302 - DNA, 225 bp, unidentified
  misc_feature 1..225: note = Encodes 16S rRNA from Sporotomaculum
  source 1..225: mol_type = genomic DNA
agagtttgatcctggctcaggacgaacgctggcggcgtgcttaacacatgcaagtcgaacgaggaatgttgaaaagcttgctttttgacatttcgagtggcggacgggtgagtaacgcgtgaggaacctgtcttctacagggggataacgtcccgaaagggacgctaataccgcataagaccacagtatcgcatgatacaggggtcaaaggagcaatccggtaga

SEQ ID NO: 1303 - DNA, 225 bp, unidentified
  misc_feature 1..225: note = Encodes 16S rRNA from Bacteroides
  source 1..225: mol_type = genomic DNA
agagtttgatcatggctcaggatgaacgctagcgacaggcctaacacatgcaagtcgaggggcagcatggttggtagcaataccgactgatggcgaccggcgcacgggtgcgtaacaggtgtgcaatctgtcctataccaagggatagcccgctgaaaggcggattaaaactttatgtgtcatatggaggcatctctgtgtgatgaaacgcgagggtataggatg

SEQ ID NO: 1304 - DNA, 225 bp, unidentified
  misc_feature 1..225: note = Encodes 16S rRNA from Asaccharobacter
  source 1..225: mol_type = genomic DNA
agagtttgatcatggctcaggatgaacgctggcggcgtgcttaacacatgcaagtcgaacgattaacccgccttcgggcggtcatagagtggcgaacgggtgagtaacacgtgaccaacctgccccgcgcaccgggacagcctcgcgaaagcgggattaataccggatactccgggggcgccgcatggcgcccccgggaaagctccggcggcgcgggatggggtc

SEQ ID NO: 1305 - DNA, 225 bp, unidentified
  misc_feature 1..225: note = Encodes 16S rRNA from Clostridium IV
  source 1..225: mol_type = genomic DNA
agagtttgatcatggctcaggacgaacgctggcggtatgcctaacacatgcaagtcgaacgagtgtcgaagagcttgctcttcttctactagtggcggacgggtgagtaacgcgtgagtaatctgcctcaaagtgggggataacacttagaaatgagtgctaataccgcgtaatgtgctagcttcgcatgaagtctgcaccatagtttttcgctttgagatgagc

SEQ ID NO: 1306 - DNA, 225 bp, unidentified
  misc_feature 1..225: note = Encodes 16S rRNA from unidentified taxa
  source 1..225: mol_type = genomic DNA
agagtttgatcatggctcaggacgaacgctggcggcgtgcttcatacatgcaagtcgaacgagaaactgacttcggttagtggaaagtggcggacgggtgagtaatgtgtagagaatctgccctggagagtgggacaacagttggaaacgactgctaataccgcatatgagcgtacctgcaatggtattcttgaaatgaattatcgctccgggatgagtctgcat

SEQ ID NO: 1307 - DNA, 225 bp, unidentified
  misc_feature 1..225: note = Encodes 16S rRNA from Clostridium XlVa
  source 1..225: mol_type = genomic DNA
agagtttgatcctggctcaggatgaacgctggcggcgtgcttaatacatgcaagtcgaacgagcagagatattcgtatcgaagcgagtggcggacgggtgagtaacgcgtgggaaacctgccctataccgggggataacagttggaaacgactgctaataccgcataagcgcacggagttgcatgactctgtgtgaaaaactccggtggtataggatggtcccgc

SEQ ID NO: 1308 - DNA, 225 bp, unidentified
  misc_feature 1..225: note = Encodes 16S rRNA from Treponema
  source 1..225: mol_type = genomic DNA
agagtttgatcatggctcagaacgaacgctggcggcgcgtcttaagcatgcaagtcgaacggcaagctagacttcggtttagcctagagtggcggactggtgagtaacgcgtagatgacgtaccttaaggatggggatagccgatagaaatatcgggtaataccgaatacggtcactgctgttagagggcagtgaggaaagcagctatggctgcgccttaagaac

SEQ ID NO: 1309 - DNA, 225 bp, unidentified
  misc_feature 1..225: note = Encodes 16S rRNA from Prevotella
  source 1..225: mol_type = genomic DNA
agagtttgatcctggctcaggatgaacgctagctacaggcttaacacatgcaagtcgaggggcagcgggggcgtagcaatacgcctgccggcgaccggcgcacgggtgagtaacgcgtatccaacctcccccccagtaggggatagcccggcgaaagtcggattaataccctatgtcgtccaggacgggcatcttttccggacgaaagattgatcgctgggggat

SEQ ID NO: 1310 - DNA, 225 bp, unidentified
  misc_feature 1..225: note = Encodes 16S rRNA from Turicibacter
  source 1..225: mol_type = genomic DNA
agagtttgatcatggctcaggatgaacgctggcggtatgcttaatacatgcaagtcgagcgagatcttcggatcgagcggcgaacgggtgagtaacacgtaggtaatctgccctttagactgggataccctgaggaaacttaggctaataccggatatgaacttcgaaggcatctttgaagtttgaaagttccgtttggaacactttgggatgaacctgcggcgc

SEQ ID NO: 1311 - DNA, 225 bp, unidentified
  misc_feature 1..225: note = Encodes 16S rRNA from Clostridium IV
  source 1..225: mol_type = genomic DNA
agagtttgatcatggctcaggacgaacgctggcggcgtgcctaacacatgcaagtcgaacggagttattagagtgaagttttcggatggagcgaagataacttagtggcggacgggtgagtaacgcgtgagtaacctgcccattagagggggataacgttctgaaaagaacgctaataccgcataacatattcggttcgcatgaactgaatatcaaaggagtaat

SEQ ID NO: 1312 - DNA, 225 bp, unidentified
  misc_feature 1..225: note = Encodes 16S rRNA from Clostridium IV
  source 1..225: mol_type = genomic DNA
agagtttgatcatggctcaggatgaacgctggcggcgtgcataacacattcaagtcgaacggactgattttgtagcttgctacgaatgaaagttagtggcggacgggtgagtaacgcgtgagcaacctgcctctgtgtgtgggataccgtctggaaacggacgttaataccgcatgatccatagagatcgcatgatatttatggcaaagatttattgcacagaga

SEQ ID NO: 1313 - DNA, 225 bp, unidentified
  misc_feature 1..225: note = Encodes 16S rRNA from Clostridium IV
  source 1..225: mol_type = genomic DNA
agagtttgatcatggctcaggacaaacgctggcggcgtgcttaacacatgcaagtcgaacggagtacccgagaaagaagcttcggcagattgatcggaatacttagtggcggacgggtgagtaacacgtgagtaacctgcccttgagtgggggataacactccgaaaggagtgctaataccgcataacatggatatgttgcatggcaaatccatcaaagatttat

SEQ ID NO: 1314 - DNA, 225 bp, unidentified
  misc_feature 1..225: note = Encodes 16S rRNA from Oscillibacter
  source 1..225: mol_type = genomic DNA
agagtttgatcctggctcaggacgaacgctggcggcgtgcttaacacatgcaagtcgaacgaagctctcacactcgagttttcggacaagagagtgagatgacttagtggcggactggtgagtaacgcgtgagcaacctgccctccggtgggggacaacagctggaaacggctgctaataccgcataatgtgtacggaccgcatgatctgtacaccaaagcttta

SEQ ID NO: 1315 - DNA, 225 bp, unidentified
  misc_feature 1..225: note = Encodes 16S rRNA from Deinococcus
  source 1..225: mol_type = genomic DNA
agagtttgatcatggctcagggtgaacgctggcggcgtgcttaagacatgcaagtagaacggtcttttcggagacagtggcgcacgggtgagtaacacgtaactgacctgccccaaagtcgcggataactgggtgaaagtccagctaatacgtgatgtgctgtcagattttgttctgccagtaaaggtttactgctttgggatggggttgcgttccatcagctag

SEQ ID NO: 1316 - DNA, 225 bp, unidentified
  misc_feature 1..225: note = Encodes 16S rRNA from Pedobacter
  source 1..225: mol_type = genomic DNA
agagtttgatcatggctcaggatgaacgctagcggcaggcctaatacatgcaagtcgaacggtaaatgtcccttcggggacatgagagtggcggacgggtgcgtaacgcgtatgcaaccaacccccctcaccgggatagccggtggaaacgccggataacaccggatgcgcccatggggaggcatctccctgcgggcaaggcggcgacgcggagggggacgggca

SEQ ID NO: 1317 - DNA, 225 bp, unidentified
  misc_feature 1..225: note = Encodes 16S rRNA from Anaerovorax
  source 1..225: mol_type = genomic DNA
agagtttgatcctggctcaggatgaacgctggcggcgtgcctaacacatgcaagtcgagcgggaatgtccggaatgaaacttcggtcgaatgaagggcaggacagcggcggacgggtgagtaacgcgtaggtaagctgccccttgcacagggatagcctcgggaaactgggattaatacctgataaagcgcagacagcacatgctgactgcgccaaagatttatc

SEQ ID NO: 1318 - DNA, 225 bp, unidentified
  misc_feature 1..225: note = Encodes 16S rRNA from Clostridium IV
  source 1..225: mol_type = genomic DNA
agagtttgatcatggctcaggacgaacgctggcggcgtgcctaacacatgcaagtcgaacggacttagctgagtgcttgcactcggcgacagttagtggcggacgggtgagtaacgcgtgaataacctgcccaacagagggggataacgtttggaaacgaacgctaataccgcataacattggagcatcgcatggtgttctaatcaaaggagcaatccgctgatg

SEQ ID NO: 1319 - DNA, 225 bp, unidentified
  misc_feature 1..225: note = Encodes 16S rRNA from Bacteroides
  source 1..225: mol_type = genomic DNA
agagtttgatcctggctcaggatgaacgctagctacaggcctaacacatgcaagtcgaggggcagcgcgggtagcaatacctggcggcgaccggcgcacgggtgcgtaacaggtgtgcaatctgtcctataccgggggatagcccggcgaaagccgaattaaaactccatgtgtcacgaagccgcatgactttgtgatgaaacgttatagggtatagggtgagca

SEQ ID NO: 1320 - DNA, 225 bp, unidentified
  misc_feature 1..225: note = Encodes 16S rRNA from Clostridium IV
  source 1..225: mol_type = genomic DNA
agagtttgatcatggctcaggatgaacgctggcggcgtgcataacacattcaagtcgaacgaagcactgtcgaggaagtcttcggatggaattgactttgacttagtggcggacgggtgagtaacgcgtgagcaaccttcctgtttgtgagggataacacagggaaacttgtgctaataccgcatgatgcatgggaatcgcatggtttcgatgccaaagatttat

SEQ ID NO: 1321 - DNA, 225 bp, unidentified
  misc_feature 1..225: note = Encodes 16S rRNA from Rhodococcus
  source 1..225: mol_type = genomic DNA
agagtttgatcatggctcaggacgaacgctggcggcgtgcttaacacatgcaagtcgaacggtaaggccccttcgggggtacacgagtggcgaacgggtgagtaacacgtgggtgatctgccctgcactctgggataagcctgggaaactgggtctaataccggatatgagctcctgtcgcatggcgggggttggaaaggtttactggtgcaggatgggcccgcg

SEQ ID NO: 1322 - DNA, 225 bp, unidentified
  misc_feature 1..225: note = Encodes 16S rRNA from Treponema
  source 1..225: mol_type = genomic DNA
agagtttgatcatggctcagaacgaacgctggcggcgcgtcttaagcatgcaagtcggacggcaagatcggtgcttgcactgatcctagagtggcggactggtgagtaacgcgtgggtgacgtaccctccggacggggatagctactagaaatagtagataataccggatacggtgcactgtgtcagaggcagtgcaggaaaggttcttttgaaccgccggagga

SEQ ID NO: 1323 - DNA, 225 bp, unidentified
  misc_feature 1..225: note = Encodes 16S rRNA from Mucilaginibacter
  source 1..225: mol_type = genomic DNA
agagtttgatcatggctcaggatgaacgctagcggcaggcctaatacatgcaagtcggacgggatctccccttcgggggagtgagagtggcgcacgggtgcgtaacgcgtatgcaaccaaccctcatccgggggacagccggtggaaacgccgggtaataccccataccgattcctgtgggcatccacggggattgaaagacttaggtcggaggaggacgggcat

SEQ ID NO: 1324 - DNA, 225 bp, unidentified
  misc_feature 1..225: note = Encodes 16S rRNA from Clostridium XlVa
  source 1..225: mol_type = genomic DNA
agagtttgatcatggctcaggatgaacgctggcggcgtgcctaacacatgcaagtcgaacggtgatgagcagaaattttcggatggaagcttatcatagtggcggacgggtgagtaacgcgtggataacctgcctcttgctgggggatagcagccggaaacggctggtaataccgcatacgttcatttccccgcatggggaggtgaggaaagatttatcggcgag

SEQ ID NO: 1325 - DNA, 225 bp, unidentified
  misc_feature 1..225: note = Encodes 16S rRNA from Olivibacter
  source 1..225: mol_type = genomic DNA
agagtttgatcctggctcaggatgaacgctagcggcaggcctaatacatgcaagtcggacgggatctccccttcgggggagtgagagtggcgcacgggtgcgtaacgcgtatgcaaccaaccctcatccgggggacagccggtggaaacgccgggtaataccccatatccactttgggaggcatcttctgaggtggaaagacttaggtcggaggaggacgggcat

SEQ ID NO: 1326 - DNA, 225 bp, unidentified
  misc_feature 1..225: note = Encodes 16S rRNA from Clostridium XlVa
  source 1..225: mol_type = genomic DNA
agagtttgatcatggctcaggatgaacgctggcggcacgcttaacacatgcaagtcgaacgaggttatgaacttcggttaataacctagtggcggacgggtgcgtaacgcgtgggtaatctgcccttgacagggggataacgtatagaaatgtacgctaataccgcataagcccacggagaggcatctctctgagggaaaagggatactggtcaaggatgagccc

SEQ ID NO: 1327 - DNA, 225 bp, unidentified
  misc_feature 1..225: note = Encodes 16S rRNA from Barnesiella
  source 1..225: mol_type = genomic DNA
agagtttgatcatggctcaggatgaacgctagcgacaggcctaacacatgcaagtcgaggggcagcatggagtagcaatactctgatggcgaccggcgcacgggtgcgtaacaggtgtgcaatctgtcctataccgggggatagcccggcgaaagccgaattaaaactccatgtgagcgattggcgcatgccagtctcttgaaacgtttagggtatagggtgagc

SEQ ID NO: 1328 - DNA, 225 bp, unidentified
  misc_feature 1..225: note = Encodes 16S rRNA from Clostridium XlVb
  source 1..225: mol_type = genomic DNA
agagtttgatcatggctcaggatgaacgctggcggcgtgcctaacacatgcaagtcgagcgaagaattgagagcttgctcttaattacttagcggcggacgggtgagtaacgcgtgggtaacctgccctgtacaggggaataacagttagaaatgactgctaatgccccataagccgacgaaatggcatctttatgtcggaaaagatttatcggtacaggaggga

SEQ ID NO: 1329 - DNA, 225 bp, unidentified
  misc_feature 1..225: note = Encodes 16S rRNA from Gelidibacter
  source 1..225: mol_type = genomic DNA
agagtttgatcctggctcaggataaacgctagcggcaggcctaacacatgcaagtcgagcggcagcgggagtggcaacacttgccggcgagcggcggacgggtgagtaacgcgtatgcaacctgcccatcacacggagatagccgaccgaaaggacgattaaactccgatggcatcaagagggggcatccccatttgattaaatattcataggtgatggatgggc

SEQ ID NO: 1330 - DNA, 225 bp, unidentified
  misc_feature 1..225: note = Encodes 16S rRNA from Methanobrevibacter
  source 1..225: mol_type = genomic DNA
agagtttgatcatggctcaggacgaacgctggcggcgtgcctaacacatgcaagtcgaacgaatttagattcgtggcgtacggctcagtaacacgtggataacctacccttaggactgggataactctgggaaactggggctaataccggatagatgatttttcttggaatgggattttgtttaaatgttttttcgcctaaggatgggtctgcggcagattaggt

SEQ ID NO: 1331 - DNA, 225 bp, unidentified
  misc_feature 1..225: note = Encodes 16S rRNA from Anaerotruncus
  source 1..225: mol_type = genomic DNA
agagtttgatcatggctcaggacgaacgctggcggcgtgcctaacacatgcaagtcgaacggagtttactttttagatttcttcggaatgacgagttgtaaacttagtggcggacgggtgagtaacgcgtgagcaacctgcctttcagagggggacaacagttggaaacgactgctaataccgcataatattaggtttagacatctttacctaatcaaaggagca

SEQ ID NO: 1332 - DNA, 225 bp, unidentified
  misc_feature 1..225: note = Encodes 16S rRNA from Lachnospiracea incertae sedis
  source 1..225: mol_type = genomic DNA
agagtttgatcatggctcaggatgaacgctagctacaggcttaacacatgcaagtcgaacgaggcgaggagtgcttgcacaccgaacctagtggcggacgggtgcgtaacgcgtgggtaacctgccctaaacagggggataacgtatagaaatgtacgctaataccgcataagctcacggaaccgcatggttttgagggaaaaggatttccggtttaggatgggc

SEQ ID NO: 1333 - DNA, 225 bp, unidentified
  misc_feature 1..225: note = Encodes 16S rRNA from Erysipelotrichaceae incertae sedis
  source 1..225: mol_type = genomic DNA
agagtttgatcatggctcaggatgaacgctggcggcatgcctaagacatgcaagtcgtacgaggtggcccattgaaatggagtgcttgcacaaagtggatttggattcccacctagtggcggaagggtgagtaacacgtaggtaatctaccttagagactgggataacaattagaaatgattgctaataccggatgataattatgaggtaaacttgtaatttaaa

SEQ ID NO: 1334 - DNA, 225 bp, unidentified
  misc_feature 1..225: note = Encodes 16S rRNA from Mesorhizobium
  source 1..225: mol_type = genomic DNA
agagtttgatcatggctcagaacgaacgctggcggcaggcttaacacatgcaagtcgaacgccccgcaaggggagtggcagacgggtgagtaacgcgtgggaatctacccatcactacggaacaactccgggaaactggagctaataccgtatacgtccttcgggagaaagatttatcggtgatggatgagcccgcgttggattagctagttggtggggtaatgg

SEQ ID NO: 1335 - DNA, 225 bp, unidentified
  misc_feature 1..225: note = Encodes 16S rRNA from Clostridium XI
  source 1..225: mol_type = genomic DNA
agagtttgatcatggctcaggacgaacgctggcggcgtgcctaacacatgcaagtcgagcggggatttagtggaaggaagcttcggcggacggaaggtaaatcttagcggcggacgggtgagtaacgcgtgaacaatctgtcccggacagggggataacacatggaaacaggtgctaataccgcataagaccacagcgtcgcatggcggtggggtaaaaggagga

SEQ ID NO: 1336 - DNA, 225 bp, unidentified
  misc_feature 1..225: note = Encodes 16S rRNA from Planctomyces
  source 1..225: mol_type = genomic DNA
agagtttgatcatggctcagaatgaacgttggtagcgtggattaggcatgcaagtcgagcgacaaggtttcttcggaaactggaggagcggcaaacggggtaggataacatcggaacgtaccctcttgtccgggatacccgcgggaaactgcggttaataccggataatcccgaaagggcaaaggtccgccgcgggaggagcggccgatgtgatatcagctagtt

SEQ ID NO: 1337 - DNA, 225 bp, unidentified
  misc_feature 1..225: note = Encodes 16S rRNA from Aerococcus
  source 1..225: mol_type = genomic DNA
agagtttgatcctggctcaggacgaacgctggcggcatgcctaatacatgcaagtcgagcgaacagatgaagtgcttgcacttctgacgttagcggcgaacgggtgagtaacacgtaaggaatctacctataagcgggggataacattcggaaacgggtgctaataccgcataatatcttcttccgcatggaagaagattgaaagacggctctgctgtcacttat

SEQ ID NO: 1338 - DNA, 225 bp, unidentified
  misc_feature 1..225: note = Encodes 16S rRNA from Victivallis
  source 1..225: mol_type = genomic DNA
agagtttgatcatggctcagaacgaacgctggcggcatggattaggcatgcaagtcgaacggtgcagcaatgcatagtggcgcaagggtgaggaacgcgtgagtaatctgccctcaagttgggaacagcttctggaaacggaaattaataccgaatgtgaccattggaaggcatctttcagtggttaaaggccgcaaggtcgcttgaggaggggctcgcgtccca

SEQ ID NO: 1339 - DNA, 225 bp, unidentified
  misc_feature 1..225: note = Encodes 16S rRNA from unidentified taxa
  source 1..225: mol_type = genomic DNA
agagtttgatcctggctcaggacgaacgctggcggcgtgcttcatacatgcaagtcgaacgagaatcaggagcttgcttctgaggaaagtggcggacgggtgagtaatatgtagagaatctgcccttaagcgggggacaacagttggaaacgactgctaataccccatatgcgcgtagttgcgatactattcgtgaaaactccggtgcttaaggatgagtctgca

SEQ ID NO: 1340 - DNA, 225 bp, unidentified
  misc_feature 1..225: note = Encodes 16S rRNA from Bacteroides
  source 1..225: mol_type = genomic DNA
agagtttgatcctggctcaggatgaacgctagctacaggcttaacacatgcaagtcgcggggtatcgcggtgagtagcaatactttctggcggcgaccggcggatgggtgagtaacgcgtatccaacctggccctatctcggggacagcccctcgaaagagggattaatacccgatgttccctggtttccgcatgtttaccagggcaaaggcttttgtcggatag

SEQ ID NO: 1341 - DNA, 225 bp, unidentified
  misc_feature 1..225: note = Encodes 16S rRNA from Clostridium XI
  source 1..225: mol_type = genomic DNA
agagtttgatcatggctcaggatgaacgctggcggcgtgcctaacacatgcaagtcgagcgagaagttgctgacggagatttcggtcaacagaagcgatggatagcggcggacgggtgagtaacgcgtaggtaagctgccccgcacacaggaatagcctagggaaacctggattaatgcctgatgacgcggcggagtcacatggctctgtcgccaaagatttatc

SEQ ID NO: 1342 - DNA, 225 bp, unidentified
  misc_feature 1..225: note = Encodes 16S rRNA from Clostridium XlVa
  source 1..225: mol_type = genomic DNA
agagtttgatcctggctcaggatgaacgctggcggcgtgcctaacacatgcaagtcgaacgaagaccccgaagcggagatttcggttgaagcagagggaggactgagtggcggacgggtgagtaacgcgtggataacctgccccatacagggggatagcagttggaaacgactgataataccgcatgagcgcacgtggagacatctccatgtgtgaaaagattta

SEQ ID NO: 1343 - DNA, 200 bp, unidentified
  misc_feature 1..200: note = Encodes 16S rRNA from Ruminococcus
  source 1..200: mol_type = genomic DNA
agagtttgatcatggctcagattgaacgctggcggcaggcttaacacatgcaagtcgtacggtaacggagggaactctgatgcagcgatgccgcgtggaggaagaaggttttcggattgtaaactcctgtttcgagggacgataatgacggtacctcgggaggaagctccggctaactacgtgccagcagccgcggtaat

SEQ ID NO: 1344 - DNA, 225 bp, unidentified
  misc_feature 1..225: note = Encodes 16S rRNA from Saccharofermentans
  source 1..225: mol_type = genomic DNA
agagtttgatcatggctcaggatgaacgctggcggcgtgcctaacacattcaagtcgaacggagaagaaggcttcggccttcggatcagtggcggacgggtgagtaacgcgtgagtaatctgcctttgattggggaataacacagggaaacctgtgctaataccgcataacacagcgacaccgcatgatgatgctgtcaaagaattatcgatcaaagatgagctc

SEQ ID NO: 1345 - DNA, 225 bp, unidentified
  misc_feature 1..225: note = Encodes 16S rRNA from Oscillibacter
  source 1..225: mol_type = genomic DNA
agagtttgatcctggctcaggacgaacgctggcggcgtgcctaacacatgcaagtcgaacgaagctcttttcaatgcgattcgtcaagttgaaaggatgacttagtggcgaacgggtgagtaacgcgtgagcaacctgccccggagtgggggacaacagttggaaacgactgctaataccgcatgatatatactaacggcatcgttggtatatcaaagatttatt

SEQ ID NO: 1346 - DNA, 225 bp, unidentified
  misc_feature 1..225: note = Encodes 16S rRNA from Lachnospiracea incertae sedis
  source 1..225: mol_type = genomic DNA
agagtttgatcatggctcaggatgaacgctggcggcgtgcttaacacatgcaagtcgaacgaagcaccctcacctcgatactgaatgcgagcttgctcaaatgacgtatcacccgagggtgactgagtggcggacgggtgagtaacgcgtgggtaacctgccttagacagggggataacaacaagaaattgttgctaataccgcataagcacacagcatcgcatg

SEQ ID NO: 1347 - DNA, 207 bp, unidentified
  misc_feature 1..207: note = Encodes 16S rRNA from Fibrobacter
  source 1..207: mol_type = genomic DNA
agagtttgatcctggctcaggatgaacgctagctacaggcttaacacatgcaaatgggggaaaccctgatgcagcaacgccacgtgtgggaagaagcatttcggtgtgtaaaccactgtcgtgagggaataatacgcgtcttcgggcgcgggagaatgtacctcgaaaggaagcaccggcaaacttcgtgccagcagccgcggtaat

SEQ ID NO: 1348 - DNA, 225 bp, unidentified
  misc_feature 1..225: note = Encodes 16S rRNA from Kiloniella
  source 1..225: mol_type = genomic DNA
agagtttgatcctggctcagaacgaacgctggcggcaggcttaacacatgcaagtcaagggggtgtagcaatacacaaccggcgcacgggtgagtaacgcgtgggaatatgtccatttgtggggaatagcttctggaaacggaaggtaataccgcatacgcccttcgggggaaagatttatcgcagatggagtggcccgcgttagattagctagttggtgaggta

SEQ ID NO: 1349 - DNA, 225 bp, unidentified
  misc_feature 1..225: note = Encodes 16S rRNA from Olivibacter
  source 1..225: mol_type = genomic DNA
agagtttgatcatggctcaggatgaacgctagcggcaggcttaacacatgcaagtcgaggggcagcgcgttgtagcaatacaatggcggcgaccggcggaagggtgcgtaacgcgtgagcaacctgcccctgtcagggggatagtcgatggaaacgtcgcgtaataccccgtacgatgcggagtcgcatgattctgcattaaaagatttatcggacagggatggg

SEQ ID NO: 1350 - DNA, 225 bp, unidentified
  misc_feature 1..225: note = Encodes 16S rRNA from Clostridium IV
  source 1..225: mol_type = genomic DNA
agagtttgatcatggctcaggatgaacgctggcggcgtgcataacacattcaagtcgaacgaagcaccggcgaggaagtcttcggatggaattgcccttgacttagtggcggacgggtgagtaacgcgtgagcaaccttcctgcttgtgagggataacacagggaaacttgtgctaataccgcatgacgcacgattgtcgcatggcagatgtgccaaagatttat

SEQ ID NO: 1351 - DNA, 225 bp, unidentified
  misc_feature 1..225: note = Encodes 16S rRNA from Spirochaeta
  source 1..225: mol_type = genomic DNA
agagtttgatcctggctcagaacgaacgctggcggcgcgttttaagcatgcaagtcgagcggtaagccggagcaatccggcctagagcggcggacgggtgagtaacacgtggataatctggcctacagtttgggatagcctggtgaaagtcaggataataccggatacgacggtttggtcacaagagcgaatcgggaaaggggctaaggcctcgctgaaggatga

SEQ ID NO: 1352 - DNA, 225 bp, unidentified
  misc_feature 1..225: note = Encodes 16S rRNA from Prevotella
  source 1..225: mol_type = genomic DNA
agagtttgatcatggctcaggatgaacgctagctacaggcttaacacatgcaagtcgaggggcagcatgtcgtgtgcttgcacgcgatgatggcgaccggcgcacgggtgagtaacgcgtatccaacctgcccatgaccccgggatagcccgctgaaaagcggattaacaccggatgcggtcgaaagaggacatctgatttcgaccaaagcttcggcggtcatgg

SEQ ID NO: 1353 - DNA, 225 bp, unidentified
  misc_feature 1..225: note = Encodes 16S rRNA from Olivibacter
  source 1..225: mol_type = genomic DNA
agagtttgatcctggctcaggatgaacgctagcggcaggcctaatacatgcaagtcgaacggtaaacgccccttcgggggtgtgagagtggcgcacgggtgcgtaacgcgtatgcaacccacccgctgccgggggatagcccggagaaatccgaattaataccccatgaggagtaaccaaggcatcttggttatttcaaaacttcggtggcggcggacgggcatg

SEQ ID NO: 1354 - DNA, 225 bp, unidentified
  misc_feature 1..225: note = Encodes 16S rRNA from Prevotella
  source 1..225: mol_type = genomic DNA
agagtttgatcatggctcaggatgaacgctagctacaggcttaacacatgcaagtcgaggggcatcaggtatcaagcttgcttgatatgctggcgaccggcgcacgggtgcgtaacacgtatcgaaccttcccgcctctccgggacagccctctgaaaggaggattaataccggatggcttcgcggagccgcatggctctgcgaataaagatttatcggagacgg

SEQ ID NO: 1355 - DNA, 225 bp, unidentified
  misc_feature 1..225: note = Encodes 16S rRNA from Parabacteroides
  source 1..225: mol_type = genomic DNA
agagtttgatcatggctcaggatgaacgctagcgacaggcttaacacatgcaagtcgaggggcagcgggggcgatggcaacattgcccgccggcgaccggcgcactggtgagtaacacgtatgcaacctgccccgcacagggggataacccagagaaatttggcctaataccccgtaacaccgttgggggcatccccggtggttgaaagaggcgactcggtgcgg

SEQ ID NO: 1356 - DNA, 225 bp, unidentified
  misc_feature 1..225: note = Encodes 16S rRNA from Prevotella
  source 1..225: mol_type = genomic DNA
agagtttgatcctggctcaggatgaacgctagctacaggcttaacacatgcaagtcgcggggcagcatggaggttgcttgcaacctctgatggcgaccggcgcacgggtgagtaacgcgtatccaacctgccctgcggtagggaacagcccggcgaaagtcggattaatgccctatgtgctcatttgaaggcatctgattttgagcaaaggattcgttcgccgca

SEQ ID NO: 1357 - DNA, 225 bp, unidentified
  misc_feature 1..225: note = Encodes 16S rRNA from Leifsonia
  source 1..225: mol_type = genomic DNA
agagtttgatcctggctcaggacgaacgctggcggcgtgcttaacacatgcaagtcgaacggtgaacgagggagcttgcttcctccggatcagtggcgaacgggtgagtaacacgtgagcaatctgccccgaactctgggataagcgttggaaacgacgtctaataccggatacgacgcgggagggcatcctctccgcgtggaaagaatttcggttcgggatgag

SEQ ID NO: 1358 - DNA, 225 bp, unidentified
  misc_feature 1..225: note = Encodes 16S rRNA from Clostridium IV
  source 1..225: mol_type = genomic DNA
agagtttgatcctggctcaggacgaacgctggcggcgtgcttaacacatgcaagtcgaacgagaatccggggaaggagttttcggacaacggaaccggaggaaagtggcggacgggtgagtaacgcgtgaggaacctgccttggagagggggacaacagctggaaacggctgctaataccgcatgatacgtgatggggacatccctgacacgtcaaagatttatc

SEQ ID NO: 1359 - DNA, 225 bp, unidentified
  misc_feature 1..225: note = Encodes 16S rRNA from Victivallis
  source 1..225: mol_type = genomic DNA
agagtttgatcctggctcagaacgaacgctggcggcatggattaggcatgcaagtcgaacggtgtagcaatgcacagtggcgcaagggtgaggaacgcgtgagtaatctaccctcaagttgggaacagcttctggaaacggaaattaataccgaatgtgaccgttggaaggcatcttctgatggttaaaggccgcaaggtcgcttgaggaggggctcgcgtccca

SEQ ID NO: 1360 - DNA, 225 bp, unidentified
  misc_feature 1..225: note = Encodes 16S rRNA from Treponema
  source 1..225: mol_type = genomic DNA
agagtttgatcatggctcagaacgaacgctggcggcgcgtcttaagcatgcaagtcgaacggcaagttaccttcgggtaacctagagtggcggactggtgagtaacacgtaggtgacgtaccccccggacggggatagctcctagaaataggagataataccggataaggttgcacgggctggaaccgtgtaaggaaaggtgcttcggcaccgccgggggagcgg

SEQ ID NO: 1361 - DNA, 225 bp, unidentified
  misc_feature 1..225: note = Encodes 16S rRNA from unidentified taxa
  source 1..225: mol_type = genomic DNA
agagtttgatcatggctcaggacgaacgctggcggcgtgcttcatacatgcaagtcgaacgagaagttaccttcgggtaatggatagtggcggacgggtgagtaatgtgtagagaatctgccttcaagagggggatagcagttggaaacgactattaataccccatatgcgcgtagttggaatactattcgtgaaagattaatcgcttgaagatgagtctgcatc

SEQ ID NO: 1362 - DNA, 225 bp, unidentified
  misc_feature 1..225: note = Encodes 16S rRNA from Sporotomaculum
  source 1..225: mol_type = genomic DNA
agagtttgatcctggctcaggacgaacgctggcggcgtgcttaacacatgcaagtcgaacgaggaatgccaaaaagcttgctttttaacatttcgagtggcggacgggtgagtaacgcgtgaggaacctgtcttctacagggggataacgtcccgaaagggacgctaataccgcataagaccacggtatcgcatgatacaggggtcaaaggagcaatccggtaga

SEQ ID NO: 1363 - DNA, 225 bp, unidentified
  misc_feature 1..225: note = Encodes 16S rRNA from Spirochaeta
  source 1..225: mol_type = genomic DNA
agagtttgatcctggctcagaacgaacgctggcggcgcgttttaagcatgcaagttgagcggtaacttggatttattcaagctagagcggcggacgggtgagtaacacgtggataatctggcctacagttgggaatagcctgatgaaagtcaggataatgccgaatgagcagttgacggcacaagctgttgattggaaaggggctaaggcctcgctgaaggatga

SEQ ID NO: 1364 - DNA, 225 bp, unidentified
  misc_feature 1..225: note = Encodes 16S rRNA from Clostridium III
  source 1..225: mol_type = genomic DNA
agagtttgatcctggctcaggacgaacgctggcggcgcgcctaacacatgcaagtcgaacgggactagtgaccggagagtagatgaggatctattttgcgatcactagttcagtggcggacgggtgagtaaagcatgagcaacctggctactagagggggatagcttttggaaacagaagataataccgcatacatcaaagatttcgcatgagatttttggaaaa

SEQ ID NO: 1365 - DNA, 225 bp, unidentified
  misc_feature 1..225: note = Encodes 16S rRNA from Clostridium XlVa
  source 1..225: mol_type = genomic DNA
agagtttgatcatggctcaggatgaacgctggcggcgtgcctaacacatgcaagtcgaacgaggctctgcgaaatgaagattcgtctgattttcaaagatgtccgagtggcggatgggtgagtaacgcgtggagaacctgccctatgctgggggataacaactggaaacggttgacaataccgcataagcttccatggtcgcatgaccttggaaggaaagattta

SEQ ID NO: 1366 - DNA, 225 bp, unidentified
  misc_feature 1..225: note = Encodes 16S rRNA from Anaerovorax
  source 1..225: mol_type = genomic DNA
agagtttgatcatggctcaggatgaacgctggcggcgtgcctaacacatgcaagtcgagcgagaattccctgaatgaaacttcggtcgaatgacgggaaggaaagcggcggacgggtgagtaacgcgtaggcaacctgccctttgcagagggatagccactggaaacggtgattaaaacctcataacacgggactgagacatctcagacccgccaaagatttatc

SEQ ID NO: 1367 - DNA, 225 bp, unidentified
  misc_feature 1..225: note = Encodes 16S rRNA from Oscillibacter
  source 1..225: mol_type = genomic DNA
agagtttgatcatggctcaggacgaacgctggcggcgtgcttaacacatgcaagtcgaacgagtgagcgttattgcactaagttaactaatgaagttaatttagtgcaatagtgcaagctagtggcggactggtgagtaacgcgtgagcaacctacctttaacagggggataacacttagaaataggtgctaataccgcataacattaagttgtggcatcacaat

SEQ ID NO: 1368 - DNA, 225 bp, unidentified
  misc_feature 1..225: note = Encodes 16S rRNA from Victivallis
  source 1..225: mol_type = genomic DNA
agagtttgatcatggctcagaacgaacgctggcggcatggattaggcatgcaagtcgaacgaagcagcaatgcttagtggcgaaagggtgaggaacgcgtgagtaatctgcccccaagttgggaataacagctggaaacggctgctaataccgaatgtggctgattgaccgcatggttgattggctaaagatttatcgcttggggatgagctcgcgtcccattag

SEQ ID NO: 1369 - DNA, 225 bp, unidentified
  misc_feature 1..225: note = Encodes 16S rRNA from Lachnospiracea incertae sedis
  source 1..225: mol_type = genomic DNA
agagtttgatcctggctcaggatgaacgctggcggcgtgcttaacacatgcaagtcgaacggagtattagattttttaatacttagtggcggacgggtgagtaacgcgtgggtaacctgcctcacacagggggataacagttggaaacgactgttaataccgcataagaccacagtaccgcatggtacaggggtaaaaactccggtggtgtgagatggacccgcg

SEQ ID NO: 1370 - DNA, 225 bp, unidentified
  misc_feature 1..225: note = Encodes 16S rRNA from Spirochaeta
  source 1..225: mol_type = genomic DNA
agagtttgatcatggctcagaacgaacgctggcggcgcgtcttaagcatgcaagtcgagcgggaaacagtagcttgctactgttgagagcggcggactggtgagtaacacgtgggtgacgcacccctgtgagggggacagccggcagaaatgccgggtaataccgcatacgattgccttaagtgatgttgaggcaatgaaaggagcgaatgctccgcgcagggag

SEQ ID NO: 1371 - DNA, 225 bp, unidentified
  misc_feature 1..225: note = Encodes 16S rRNA from Clostridium XlVb
  source 1..225: mol_type = genomic DNA
agagtttgatcctggctcaggatgaacgctggcggcgtgcctaacacatgcaagtcgaacgagagaagcgaaaagcttgctttttgccgatcgagtggcggacgggtgagtaacgcgtgagcaacctgccttacattggggaataacgtttggaaacggacggtaataccgcatatgcagacaagtacggcatcgtacggtttggaaagatttatcgatgtaaga

SEQ ID NO: 1372 - DNA, 225 bp, unidentified
  misc_feature 1..225: note = Encodes 16S rRNA from Oscillibacter
  source 1..225: mol_type = genomic DNA
agagtttgatcatggctcaggacgaacgctggcggcgtgcttaacacatgcaagtcgaacggggcgcagcgacggaagttttcggacggaagacgctgttgccaagtggcggacgggtgagtaacgcgtgaggaacctgcctttcagagggggacaacagttggaaacgactgctaataccgcataatgcggcgagacggcatcgtcttgccgccaaaggagcaa

SEQ ID NO: 1373 - DNA, 225 bp, unidentified
  misc_feature 1..225: note = Encodes 16S rRNA from Prevotella
  source 1..225: mol_type = genomic DNA
agagtttgatcatggctcaggatgaacgctagctacaggcttaacacatgcaagtcgaggggcagcatggcggtggcttgccaccgccgatggcgaccggcgcacgggtgagtaacgcgtatccaacctgcccgcaaccgcggaatagcccgccgaaaggcggattaatgccgcatgagcccgcgagacggcatcagcgcgcgggcaaaggtatattccggttgt

SEQ ID NO: 1374 - DNA, 225 bp, unidentified
  misc_feature 1..225: note = Encodes 16S rRNA from Anaeroplasma
  source 1..225: mol_type = genomic DNA
agagtttgatcctggctcaggattaacgctggcggcgtgcctaatacatgcaagtcgaatggtggtagcaatacaaaccatggcgaacgggtgagtaacacgtaggtaacctatcttaaagacgaggataaccattggaaacgatggataatactggataggacatcataaagggcatccttagatgtttaaaggagcaatccacttttagaggggcctgcggcg

SEQ ID NO: 1375 - DNA, 225 bp, unidentified
  misc_feature 1..225: note = Encodes 16S rRNA from Adlercreutzia
  source 1..225: mol_type = genomic DNA
agagtttgatcatggctcaggatgaacgctggcggcgtgcttaacacatgcaagtcgaacggttaaaccggcttcggccggacatagagtggcgaacgggtgagtaacacgtgaccaacctgccccgcgcaccgggacagcctcgcgaaagcgggattaataccggatactccggcgggggcgcatgcccccgccgggaaagctccggcggcgcgggatggggtc

SEQ ID NO: 1376 - DNA, 225 bp, unidentified
  misc_feature 1..225: note = Encodes 16S rRNA from Clostridium XlVa
  source 1..225: mol_type = genomic DNA
agagtttgatcatggctcaggatgaacgctggcggcgtgcttaacacatgcaagtcgaacgaagcattacgtttcaaagcctccgggcagcgagatgttttgacttagtggcggacgggtgagtaacgcgtgggtaacctgccttgtactgggggataacagttagaaatgactgctaataccgcataagcccacggtttcgcatggaactgtgagaaaagattt

SEQ ID NO: 1377 - DNA, 225 bp, unidentified
  misc_feature 1..225: note = Encodes 16S rRNA from Beijerinckia
  source 1..225: mol_type = genomic DNA
agagtttgatcatggctcagaacgaacgctggcggcaggcttaacacatgcaagtcgaacgccccgcaaggggagtggcagacgggtgagtaacgcgtgggaatctaccgtgccctgcggaatagctccgggaaactggaattaataccgcatacgccctacgggggaaagatttatcggggtatgatgagcccgcgttggattagctagttggtggggtaaagg

SEQ ID NO: 1378 - DNA, 225 bp, unidentified
  misc_feature 1..225: note = Encodes 16S rRNA from Prevotella
  source 1..225: mol_type = genomic DNA
agagtttgatcatggctcaggatgaacgctagctacaggcttaacacatgcaagtcgaggggcagcatgtcggtggcttgccaccggcgatggcgaccggcgcacgggtgagtaacgcgtatccaacctgcccgcaaccgcggaatagcccgccgaaaggcggattaatgccgcatgagctcgcgcgagggcatctgatcgcgagcaaaggttgattccggttgc

SEQ ID NO: 1379 - DNA, 225 bp, unidentified
  misc_feature 1..225: note = Encodes 16S rRNA from Coprococcus
  source 1..225: mol_type = genomic DNA
agagtttgatcatggctcaggatgaacgctggcggcgtgcctaacacatgcaagtcgaacgaagcacttctcccgtcaaaggtgattagcttgctatgaagcggagacatttgaagtgacttagtggcggacgggtgagtaacgcgtgggtaacctgccccataccgggggacaacagttggaaacggctgctaataccgcataagcgcacgatgtcgcatggca

SEQ ID NO: 1380 - DNA, 225 bp, unidentified
  misc_feature 1..225: note = Encodes 16S rRNA from Lentisphaera
  source 1..225: mol_type = genomic DNA
agagtttgatcatggctcagaatgaacgctggcggcatggattaggcatgcaagtcgaacgagaaagcggcctcggccgcgagtaaagtggcgaaagggtgagtagcacgtggggaacctgccccggggaccggaacaagcccgtgaaaacgggtctgaaaccggatgtcgccccggcccgcatgggccggaggcgaaaaattcattgccccgggatggccccgc

SEQ ID NO: 1381 - DNA, 225 bp, unidentified
  misc_feature 1..225: note = Encodes 16S rRNA from Clostridium XlVa
  source 1..225: mol_type = genomic DNA
agagtttgatcctggctcaggatgaacgctggcggcgtgcttaacacatgcaagtcgaacggagatatatttatgaagttttcggatggaatatatatatcttagtggcggacgggtgagtaacgcgtaaacaatctgccttagagagggggataacagatagaaatatctgctaataccgcataagaccacgtacaggcatctagacggggtaaaaggagtaat

SEQ ID NO: 1382 - DNA, 225 bp, unidentified
  misc_feature 1..225: note = Encodes 16S rRNA from Saccharofermentans
  source 1..225: mol_type = genomic DNA
agagtttgatcatggctcaggacgaacgctggcggcgtgcctaacacatgcaagtcgagcggactctttacaggaaagtgcttgcaccggaatgtaaagagttagcggcggacgggtgagtaacgcgtgagcaatctgtcccatacagggggataataccgcgaaagaggttctaataccgcatgagaccacagtgaggcatctcacaggggtcaaaggagcaat

SEQ ID NO: 1383 - DNA, 225 bp, unidentified
  misc_feature 1..225: note = Encodes 16S rRNA from Porphyrobacter
  source 1..225: mol_type = genomic DNA
agagtttgatcatggctcagaacgaacgctggcggcatgcctaacacatgcaagtcgaacgagaccttcgggtctagtggcgcacgggtgcgtaacgcgtgggaacctgcccttaggttcggaataactccccgaaaggggtgctaataccggataatgtcttcggaccaaagatttatcgcctttggatgggcccgcgttggattagcttgttggtgaggtaac

SEQ ID NO: 1384 - DNA, 225 bp, unidentified
  misc_feature 1..225: note = Encodes 16S rRNA from Rhodobacter
  source 1..225: mol_type = genomic DNA
agagtttgatcatggctcagaatgaacgctggcggcaggcctaacacatgcaagtcgaacgaagtcttcggacttagtggcggacgggtgagtaacacgtgggaacgtaccctttgctacggaatagcctcgggaaactgggagtaataccgtatgtgcccttcgggggaaagatttatcggcaaaggatcggcccgcgttggattagctagttggtggggtaat

SEQ ID NO: 1385 - DNA, 225 bp, unidentified
  misc_feature 1..225: note = Encodes 16S rRNA from Oscillibacter
  source 1..225: mol_type = genomic DNA
agagtttgatcctggctcaggacgaacgctggcggcgtgcctaacacatgcaagtcgaacgagaatctaatgacggagttttcggacaactgagttagaggaaagtggcggactggtgagtaacgcgtgagcaacctgcctttcagagggggacaacagttggaaacgactgctaataccgcataacatacacatgaggcatctcgagtgtatcaaaggagcaat

SEQ ID NO: 1386 - DNA, 225 bp, unidentified
  misc_feature 1..225: note = Encodes 16S rRNA from Roseburia
  source 1..225: mol_type = genomic DNA
agagtttgatcatggctcaggatgaacgctggcggcgtgcttaacacatgcaagtcgaacggggtattaacgctgaacgagcgaatagcttgctaggaacgagttcttgttaagacctagtggcggacgggtgagtaacgcgtgggtaacctgcccattaccgggggacaacagttggaaacgactgctaataccgcataagcgcacggggacgcatgtttctgt

SEQ ID NO: 1387 - DNA, 225 bp, unidentified
  misc_feature 1..225: note = Encodes 16S rRNA from Prevotella
  source 1..225: mol_type = genomic DNA
agagtttgatcctggctcaggatgaacgctagctacaggcttaacacatgcaagtcgaggggcatcaggaggtcagcttgctgaccttgctggcgaccggcgcacgggtgagtaacacgtatccaacctgccctgtacacggggatagccctctgaaaggaggattaatacccgatgttgtcgcggagggacatccctctgcgaccaaagtctcaacggtacggg

SEQ ID NO: 1388 - DNA, 225 bp, unidentified
  misc_feature 1..225: note = Encodes 16S rRNA from Aquiflexum
  source 1..225: mol_type = genomic DNA
agagtttgatcatggctcaggatgaacgctggcggcaggcttaatacatgcaagtcgaacggtaaggccgagcgtagcaatacgcgaggtacacgagtggcgcacgggtgcgtaacgcgtatgcaacctgcccccttccgggacaaaacgtcgagaaattggcgctaatatcccatggcgaccttatgaggcatctcgtttggtccaaagattcattggaagggg

SEQ ID NO: 1389 - DNA, 225 bp, unidentified
  misc_feature 1..225: note = Encodes 16S rRNA from Rhodopirellula
  source 1..225: mol_type = genomic DNA
agagtttgatcatggctcagaatgaacgttggcggcgtggattaggcatgcaagtcgtacggtaagccccatagcttgctacggggcctagagtggcgaaagggataggataatgtagatgacataccctcgggaccgggatagcgtttggaaacgaacggtaataccggataacatctccggatcaaaggtgagattccgcctgaggattggtttacacactat

SEQ ID NO: 1390 - DNA, 225 bp, unidentified
  misc_feature 1..225: note = Encodes 16S rRNA from Bacteroides
  source 1..225: mol_type = genomic DNA
agagtttgatcctggctcaggatgaacgctagctacaggcttaacacatgcaagtcgaggggcagcattaagtcagcttgctgatttagatggcgaccggcgcacgggtgagtaacgcgtatccaacctgccccctacccggggatagccttgcgaaagtaagattaatacccggtgctgttatgatcccgcatggggatataacgaaagattcatcggtagggg

SEQ ID NO: 1391 - DNA, 225 bp, unidentified
  misc_feature 1..225: note = Encodes 16S rRNA from Bacteroides
  source 1..225: mol_type = genomic DNA
agagtttgatcctggctcaggatgaacgctagctacaggcttaacacatgcaagtcgaggggcagcatggccgaagcttgcttcggccgatggcgaccggcgcacgggtgcgtaacacgtatccaatctacccgtcacttggggataggctttcgaaagaaagattaatacccgatggtatgtccatgccgcatgacgtggacattaaagatttatcggtgtcgg

SEQ ID NO: 1392 - DNA, 225 bp, unidentified
  misc_feature 1..225: note = Encodes 16S rRNA from Clostridium XlVa
  source 1..225: mol_type = genomic DNA
agagtttgatcatggctcaggatgaacgctggcggcgtgcctaacacatgcaagtcgaacggagatgtgcaccgaatgaggattcgtctgatttcaccgcgcatctgagtggcggatgggtgagtaacgcgtggataacctgcccttcactgggggataacaaccggaaacgggtgctaataccgcataggcgcacgaagtcgcatgactttgagcgtaaagatt

SEQ ID NO: 1393 - DNA, 225 bp, unidentified
  misc_feature 1..225: note = Encodes 16S rRNA from Clostridium IV
  source 1..225: mol_type = genomic DNA
agagtttgatcctggctcaggatgaacgctggcggcgtgcctaatacatgcaagtcgaacggagcaccttggtgctcagtggcgaacgggtgaggagaacataggtaacctgcccctccgagggggacaacagctggaaacggctgctaagaccgcatagacgcattcagggcatcctggatgcgctaaatgaccggatggtcagcggggggatggacctatgca

SEQ ID NO: 1394 - DNA, 225 bp, unidentified
  misc_feature 1..225: note = Encodes 16S rRNA from Prevotella
  source 1..225: mol_type = genomic DNA
agagtttgatcctggctcaggatgaacgctagcggcaggcctaacacatgcaagtcgaggggcagcgcgggatagcaatatcctggcggcgaccggcagaagggtgcgtaacgcgtgagcgacatgcccgtcaccgggggacaagcgctggaaacggcgtctaataccccatatgcctggggagtgcatgcttccttggtgaaagtttcgacggtgacggattgg

SEQ ID NO: 1395 - DNA, 225 bp, unidentified
  misc_feature 1..225: note = Encodes 16S rRNA from Mogibacterium
  source 1..225: mol_type = genomic DNA
agagtttgatcatggctcaggatgaacgctggcggcgtgcctaatacatgcaagtcgagcgagaaattactttgacgcgttttcggacaagtctgtgtaatggaaagcggcggacgggtgagtaacgcgtaggcaacctgcccttagcagagggatagccattggaaacgatgattaaaacctcataatgctgcactaacacatgttagagcagccaaagattta

SEQ ID NO: 1396 - DNA, 225 bp, unidentified
  misc_feature 1..225: note = Encodes 16S rRNA from Prevotella
  source 1..225: mol_type = genomic DNA
agagtttgatcatggctcaggatgaacgctagctacaggcttaacacatgcaagtcgaggggaaacgatatcgaaagcttgctttcgataggcgtcgaccggcgcacgggtgagtaacgcgtatccaacctgcctggaaatagggaataatccgtggaaacgcggcctaatgtcctatgtgctccgaagaggacatctgatttggagtaaagatttatcgtttcc

SEQ ID NO: 1397 - DNA, 225 bp, unidentified
  misc_feature 1..225: note = Encodes 16S rRNA from Clostridium XlVa
  source 1..225: mol_type = genomic DNA
agagtttgatcatggctcaggatgaacgctggcggcgtgcttaatacatgcaagtcgaacggagatattccaccgagagaagctgagtgcttgcacaaggccaatctcaccggattatcttagtggcggacgggtgagtaacgcgtgggtaacctgccttatacaggggaataacagccagaaatgactgctaataccgcataagcgcacgagaccgcatggtca

SEQ ID NO: 1398 - DNA, 225 bp, unidentified
  misc_feature 1..225: note = Encodes 16S rRNA from Prevotella
  source 1..225: mol_type = genomic DNA
agagtttgatcctggctcaggatgaacgctagctacaggcttaacacatgcaagtcgaggggaaacggtagtgggtggcttgccacccgctggacgtcgaccggcggatgggtgcgtaacgcgtatccaacctgccgcagtcccggggatagcccgtggaaacgcggattaacacccgatggtgcatacgttccgcatggcgcgtatgccaaatgcgaaggactg

SEQ ID NO: 1399 - DNA, 225 bp, unidentified
  misc_feature 1..225: note = Encodes 16S rRNA from Capnocytophaga
  source 1..225: mol_type = genomic DNA
agagtttgatcctggctcaggatgaacgctagcggcaggcctaacacatgcaagtcgaggggcagcgcggtgcagcaatgcactggcggcgaccggcgcacgggtgcgtaacgcgtatgcaacccacccgcaacaggggtataacggagggaaacttccactaatcccccatattgccgtcatcccgcatggggaggcggcgaaagcttcggcggttgcggacgg

SEQ ID NO: 1400 - DNA, 225 bp, unidentified
  misc_feature 1..225: note = Encodes 16S rRNA from Acholeplasma
  source 1..225: mol_type = genomic DNA
agagtttgatcatggctcaggatgaacgctggcggcgtgcctaatacatgcaagtcgaacgggagtgcttgcactccagtggcgaacgggtgagtaacacgtaggtaatctagcattaagacgaggatagcttctagaaatgggagataatactggataggaaattttcctgcatggggaaatttttaaagatttatcgcttaatggggagcctgcggtgcatta

SEQ ID NO: 1401 - DNA, 225 bp, unidentified
  misc_feature 1..225: note = Encodes 16S rRNA from Clostridium IV
  source 1..225: mol_type = genomic DNA
agagtttgatcctggctcaggacgaacgctggcggcgtgcctaacacatgcaagtcgaacggagttattagagtgaagttttcggatggagcgataataacttagtggcggacgggtgagtaacgcgtgagtaacctgcccatcagagggggataacgttctgaaaagaacgctaataccgcataacatatttggttcgcatggactgaatatcaaaggagcaat

SEQ ID NO: 1402 - DNA, 225 bp, unidentified
  misc_feature 1..225: note = Encodes 16S rRNA from Succinivibrio
  source 1..225: mol_type = genomic DNA
agagtttgatcatggctcagattgaacgctggcggcaggcctaatacatgcaagtcgaacggtaacatggaagtagcaatacttttgatgacgagtggcggacgggtgagtaatacgtagataatctgccttctagagggaaataacagagagaaatttctgctaatgtcccataagaccacactatggcatcttagagtgatcaaaggagtaatccgctagaag

SEQ ID NO: 1403 - DNA, 225 bp, unidentified
  misc_feature 1..225: note = Encodes 16S rRNA from Pseudonocardia
  source 1..225: mol_type = genomic DNA
agagtttgatcctggctcaggacgaacgctggcggcgtgcttaatacatgcaagtcgagcgagctacttcggtagcgagcggcgcacgggtgagtaacgcgtagatgatctaccctcgagactgagatacctctgggaaactggagttaataccagataacgcacattggttggttctgatgtgttaaagcggtgcaagtcgcacttgaggatgagtctgcggcc

SEQ ID NO: 1404 - DNA, 225 bp, unidentified
  misc_feature 1..225: note = Encodes 16S rRNA from Clostridium XlVa
  source 1..225: mol_type = genomic DNA
agagtttgatcctggctcaggatgaacgctggcggcgtgcttaacacatgcaagtcgaacggacatggcaccggagcagaagagttcgcttggacgctccaccgtcatgttagtggcggacgggtgagtaacgcgtgagcaaccaaccctatgcagggggataacagttagaaatgactgctaataccgcataagcccacagcatcgcatggtgcagggggaaaa

SEQ ID NO: 1405 - DNA, 225 bp, unidentified
  misc_feature 1..225: note = Encodes 16S rRNA from Butyricimonas
  source 1..225: mol_type = genomic DNA
agagtttgatcctggctcaggatgaacgctagcgacaggcttaacacatgcaagtcgaggggcagcatggcggtagcaatactgctgatggcgaccggcgcactggtgagtaacacgtatgcaacctgccccgcgcagggggataatccggagaaatctggtctaataccccgtacgccgcgcttccgcatggtagtgcggtgaaaggagcgatccggcacggga

SEQ ID NO: 1406 - DNA, 225 bp, unidentified
  misc_feature 1..225: note = Encodes 16S rRNA from Anaerovorax
  source 1..225: mol_type = genomic DNA
agagtttgatcctggctcaggatgaacgctggcggcgtgcctaacacatgcaagtcgagcgggaaatacagaacagaaggttcgctggaagttttgtatggagagcggcggacgggtgagtaacgcgtaggcaacctgccctttgcagagggatagccactggaaacggtgattaaaacctcataatgccattgattcacatgtttcgatggccaaagatttatc

SEQ ID NO: 1407 - DNA, 225 bp, unidentified
  misc_feature 1..225: note = Encodes 16S rRNA from Prevotella
  source 1..225: mol_type = genomic DNA
agagtttgatcctggctcaggatgaacgctagctacaggcttaacacatgcaagtcgaggggtaacgtgagggaagcttgcttcccttgacgacgaccggcgaatgggtgagtaacgcgtatccaacctgccgcacgcccgggaacagcccttggaaacgaggattaaatcccgataccttatgctgctgcatggtggtataagaaaacaggcatgcgatgggga

SEQ ID NO: 1408 - DNA, 225 bp, unidentified
  misc_feature 1..225: note = Encodes 16S rRNA from Butyricimonas
  source 1..225: mol_type = genomic DNA
agagtttgatcctggctcaggatgaacgctagcgacaggcttaacacatgcaagtcgaggggcagcatgagggtagcaataccttcgatggcgaccggcgcactggtgagtaacacgtatgcaacctgcccttgtcagggggataatccggggaaacccggtctaataccgcataacaccttggggggcctccccttaggttgaaagatacgtcggacagggatg

SEQ ID NO: 1409 - DNA, 225 bp, unidentified
  misc_feature 1..225: note = Encodes 16S rRNA from Parabacteroides
  source 1..225: mol_type = genomic DNA
agagtttgatcatggctcaggatgaacgctagcgacaggcttaacacatgcaagtcgaggggcagcggggcgtggcaacacgccgccggcgaccggcgcactggtgagtaacacgtatgcaacctgcccatgagagggggataacccgtggaaacgcggactaataccccgtaagccggcgtgccgcatggcatgttggtgaaaggagcgatccgttcatggatg

SEQ ID NO: 1410 - DNA, 225 bp, unidentified
  misc_feature 1..225: note = Encodes 16S rRNA from Clostridium XlVa
  source 1..225: mol_type = genomic DNA
agagtttgatcatggctcaggatgaacgctggcggcgtgcctaacacatgcaagtcgaacggagtaccaccggactgagattcgtcgaaggaaggtgactacttagtggcggacgggtgagtaacgcgtgggtaacctgcctcatagagggggacaacagttggaaacgattgctaataccgcataagcccgcagtaccgcatggtacagagggaaaagattcat

SEQ ID NO: 1411 - DNA, 225 bp, unidentified
  misc_feature 1..225: note = Encodes 16S rRNA from Clostridium XlVb
  source 1..225: mol_type = genomic DNA
agagtttgatcatggctcaggatgaacgctggcggcgtgcttaacacatgcaagtcgaacgaagaggtgctgagggataggcttcggctttgaacacggcgcatatcttagtggcggacgggtgagtaacgcgtgggcaacctgccctttacaggggaataatcattggaaacgatgactaataccgcatgtcaccgtgagatggcatcattttacgggaaaagg

SEQ ID NO: 1412 - DNA, 225 bp, unidentified; identical to SEQ ID NO: 100
  misc_feature 1..225: note = Encodes 16S rRNA from Bacteroides
  source 1..225: mol_type = genomic DNA

SEQ ID NO: 1413 - DNA, 225 bp, unidentified
  misc_feature 1..225: note = Encodes 16S rRNA from unidentified taxa
  source 1..225: mol_type = genomic DNA
agagtttgatcctggctcaggacgaacgctggcggcgtgcttcatacatgcaagtcgaacgagaagtcaccttcgggtgatggatagtggcggacgggtgagtaatgtgtagagaatctgccctagagagggggatagcagttggaaacgactattaataccccatatgcgcgtagttgcgatactattcgtgaaagattaatcgctctaggatgagtctgcatc

SEQ ID NO: 1414 - DNA, 225 bp, unidentified
  misc_feature 1..225: note = Encodes 16S rRNA from Riemerella
  source 1..225: mol_type = genomic DNA
agagtttgatcatggctcaggatgaacgctagcgggaggcctaacacatgcaagccgagcggtagaaagtagcttgctacttttgagagcggcgtacgggtgcgtaacacgtgtgcaacctgcctttatctggagaatagcctttcgaaaggaagattaatgctccataacatattgaatggcatcatttaatattgaaagctgcggcggatagagatgggcacg

SEQ ID NO: 1415 - DNA, 225 bp, unidentified
  misc_feature 1..225: note = Encodes 16S rRNA from Anaeroplasma
  source 1..225: mol_type = genomic DNA
agagtttgatcatggctcaggattaacgctggcggcgtgcctaatacatgcaagtcggatggttagcttgctaaccatggcgaacgggtgagtaacacgtaggtaacctgtcttttagccgaggataaccattggaaacgatggataatactggataggacatttgaaggcatctttagatgtttaaagatttatcactagaagaggggcctgcggcgcattagc

SEQ ID NO: 1416 - DNA, 225 bp, unidentified
  misc_feature 1..225: note = Encodes 16S rRNA from Ruminococcus
  source 1..225: mol_type = genomic DNA
agagtttgatcctggctcaggacgaacgctggcggcgtgcctaacacatgcaagtcgaacggagctgaagagcttgcttttcagcttagtggcggacgggtgagtaacgcgtgagtaacctgcctccgagagtggaataacgttttgaaaagaacgctaataccgcataacgcacaagagtcgcatggctaaagtgccaaagatttcatcgctcggagatggact

SEQ ID NO: 1417 - DNA, 225 bp, unidentified
  misc_feature 1..225: note = Encodes 16S rRNA from unidentified taxa
  source 1..225: mol_type = genomic DNA
agagtttgatcctggctcagaacgaacgctggtagcgtggattaggcatgcaagtcgaacgggatcgcccgattagcaataaccgggcgtgagagtggcggattggggaggaacacgtgagcaacctgcccttgagttggggaaaaccgttggaaacgacggctaataccggatgtggcgcccgacgacatcgtcggagcgctaaagggggccgcaaggctcccg

SEQ ID NO: 1418 - DNA, 225 bp, unidentified
  misc_feature 1..225: note = Encodes 16S rRNA from Lachnospiracea incertae sedis
  source 1..225: mol_type = genomic DNA
agagtttgatcctggctcaggatgaacgctggcggcgtgcttaatacatgcaagtcgaacgaagcacccctcccgatgatatgacgagcttgctctgaattgaatcacctggggtgactgagtggcggacgggtgagtaacgcgtgggtaacctacctatgacagggggatagcagttggaaacgactgataataccgcataagtgcacagtatcgcatgataca

SEQ ID NO: 1419 - DNA, 225 bp, unidentified
  misc_feature 1..225: note = Encodes 16S rRNA from Syntrophococcus
  source 1..225: mol_type = genomic DNA
agagtttgatcctggctcaggatgaacgctggcggcgtgcctaacacatgcaagtcgaacgaggctcttttctttgaagtttcgaccgaaaagagaagatcaccgagtggcggatgggtgagtaacgcgtggagaacctacccttatcagggggataacaactggaaacggttgacaataccgcatatatgagcagaccgcatgatcagctcaggaaagatttat

SEQ ID NO: 1420 - DNA, 225 bp, unidentified
  misc_feature 1..225: note = Encodes 16S rRNA from Clostridium IV
  source 1..225: mol_type = genomic DNA
agagtttgatcatggctcaggatgaacgctggcggcgtgcataacacattcaagtcgaacgaagcactttggacggaacccttcggggggaagactgatttgactgagtggcggacgggtgagtaacgcgtgagcaacctgccttgaagagggggataacacagggaaacttgtgctaataccgcataacatatcgtgatcgcatggtcgtggtatcaaagctcc

SEQ ID NO: 1421 - DNA, 225 bp, unidentified
  misc_feature 1..225: note = Encodes 16S rRNA from Barnesiella
  source 1..225: mol_type = genomic DNA
agagtttgatcatggctcaggatgaacgctagcgacaggcctaacacatgcaagtcgaggggcagcgcgttggtagcaataccgatggcggcgaccggcgcacgggtgcgtaacaggtgtgcaatctgtccatagtcggaggatagcccgctgaaaggcggattaatactccatgtgagttgaagccgcatggttttaatttgaaacgcgaggactatggttgag

SEQ ID NO: 1422 - DNA, 225 bp, unidentified
  misc_feature 1..225: note = Encodes 16S rRNA from Olivibacter
  source 1..225: mol_type = genomic DNA
agagtttgatcctggctcaggatgaacgctagcggcaggcttaacacatgcaagtcgaggggcagcgcgttgtagcaatacaatggcggcgaccggcggaagggtgcgtaacgcgtgagcaacctgcccctgtcagggggatagtcgatggaaacgtcgcgtaataccccgtacgatgcgtgaccgcatggtcgtgcattgaaagatttatcggacagggatggg

SEQ ID NO: 1423 - DNA, 225 bp, unidentified
  misc_feature 1..225: note = Encodes 16S rRNA from Clostridium XlVa
  source 1..225: mol_type = genomic DNA
agagtttgatcatggctcaggatgaacgctggcggcgtgcttaatacatgcaagtcgaacgaagcactttttccggaagccctcgggccgaaggaagctgtgacttagtggcggacgggtgagtaacgcgtgggtaacctgcctcatacagggggacaacagttggaaacggctgctaataccccataagcgcacaacatcgcatggtgatgtgtgaaaagattt

SEQ ID NO: 1424 - DNA, 225 bp, unidentified
  misc_feature 1..225: note = Encodes 16S rRNA from Cryptanaerobacter
  source 1..225: mol_type = genomic DNA
agagtttgatcatggctcaggacgaacgctggcggcgtgcttaacacatgcaagtcgaacggacgaatgtttttgcactcagtatgttgtaaaatatattgagtgcagaaatatgagttagtggcggactggtgagtaacgcgtgagcaacctgcctttaactggggaataccacttagaaataggtgctaataccgcataacattgcactgtggcatcacagag

SEQ ID NO: 1425 - DNA, 225 bp, unidentified
  misc_feature 1..225: note = Encodes 16S rRNA from Saccharofermentans
  source 1..225: mol_type = genomic DNA
agagtttgatcatggctcaggacgaacgctggcggcgtgcctaacacatgcaagtcgagcggactttcatcaggaaggtgcttgcactggaaagatgagagttagcggcggacgggtgagtaacgcgtgagcaatctgtcccatacagggggataataccgcgaaagaggttctaataccgcatgagaccacggtgaggcatctcacaggggtcaaaggagcaat

SEQ ID NO: 1426 - DNA, 225 bp, unidentified
  misc_feature 1..225: note = Encodes 16S rRNA from Clostridium IV
  source 1..225: mol_type = genomic DNA
agagtttgatcatggctcaggatgaacgctggcggcgtgcataacacattcaagtcgaacgaagcactgtcgaggaagtcttcggatggaattgactttgacttagtggcggacgggtgagtaacgcgtgagcaaccttcctggtagtgagggataacacagggaaacttgtgctaataccgcatgacgcatgattgtcgcatggcagacatgccaaagacatgt

SEQ ID NO: 1427 - DNA, 225 bp, unidentified
  misc_feature 1..225: note = Encodes 16S rRNA from Coprococcus
  source 1..225: mol_type = genomic DNA
agagtttgatcatggctcaggatgaacgctggcggcgtgcttaacacatgcaagtcgaacggagtttagcgcttccgaagcttcggcagaggattgttaaacttagtggcggacgggtgagtaacgcgtgggtaacctgccatgtacagggggataacacttagaaataggtgctaataccgcataagcgcacatgatcgcatgatcaggtgtgaaaaactgagg

SEQ ID NO: 1428 - DNA, 225 bp, unidentified
  misc_feature 1..225: note = Encodes 16S rRNA from Barnesiella
  source 1..225: mol_type = genomic DNA
agagtttgatcctggctcaggatgaacgctagcgacaggcctaacacatgcaagtcgaggggcagcgggagtgaagcttgcttcacttgccggcgaccggcgcacgggtgagtaacgcgtatgcaacctgcctgtaacagggggataacccggagaaatccggactaagaccgcataacgctgagaagccgcatgacttttcagccaaatattcataggttacag

SEQ ID NO: 1429 - DNA, 225 bp, unidentified
  misc_feature 1..225: note = Encodes 16S rRNA from Clostridium sensu stricto
  source 1..225: mol_type = genomic DNA
agagtttgatcatggctcaggacgaacgctggcggcgtgcctaacacatgcaagtcgagcggagacatatcacggaaggattcgtccggaaggggtatgtttgagcggcggacgggtgagtaacgcgtgatgaacctgtccttcacagggggataagacatcgaaaggtgttctaataccgcataggaccacggtaccgcatggtacaggggtgaaaggagcgat

SEQ ID NO: 1430 - DNA, 225 bp, unidentified
  misc_feature 1..225: note = Encodes 16S rRNA from Hydrogenoanaerobacterium
  source 1..225: mol_type = genomic DNA
agagtttgatcatggctcaggagaaacgctggcggcgcacataagacatgcaagtcgaacggaatttagccaaatgtttacatgaggcgaagatttagtggcggacgggtgagtaacacgtgagcaacctaccttgaagagggggataacattgagaaatcagtgctaataccgcataacacttcatattcacatgaataagaagtcaaaggagaaatccgcttt

SEQ ID NO: 1431 - DNA, 225 bp, unidentified
  misc_feature 1..225: note = Encodes 16S rRNA from Clostridium XlVb
  source 1..225: mol_type = genomic DNA
agagtttgatcatggctcaggatgaacgctggcggcgtgcttaacacatgcaagtcgagcgaagttattagagcttgctttgataacttagcggcggacgggtgagtaacgcgtgggtaacctgccctgtacagaggaataacagttagaaatgactgctaatacctcataagccgacggaatggcatcattttgtcggaaaagatttatcggtacaggagggac

SEQ ID NO: 1432 - DNA, 225 bp, unidentified
  misc_feature 1..225: note = Encodes 16S rRNA from Selenomonas
  source 1..225: mol_type = genomic DNA
agagtttgatcctggctcaggacgaacgctggcggcgtgcttaacacatgcaagtcgaacggagctgaatagcttgctatgaaagcttagtggcaaacgggtgagtaacgcgtgggcaacctgccggaaagatggggacaacatcccgaaaggggtgctaataccgaatgttgtatatagagcgcatgctctgtatattaaaggatactatccgctttccgatgg

SEQ ID NO: 1433 - DNA, 225 bp, unidentified
  misc_feature 1..225: note = Encodes 16S rRNA from Prevotella
  source 1..225: mol_type = genomic DNA
agagtttgatcctggctcaggatgaacgctggcggcgtgcctaacacatgcaagtcgaggggcatcaggacggtagcttgctatcgttgctggcgaccggcgcacgggtgagtaacgcgtatccaaccttcccatgactccggttcagcccgccgaaaggcggattactcccggatggtttccgaagagggcatctgatttggaataaagattgatcggtcatgg

SEQ ID NO: 1434 - DNA, 225 bp, unidentified
  misc_feature 1..225: note = Encodes 16S rRNA from Hydrogenoanaerobacterium
  source 1..225: mol_type = genomic DNA
agagtttgatcatggctcaggacgaacgctggcggcgcgcctaacacatgcaagtcgaacgggactagtgaccggaggatagatgaagtttatcttgcgatcactagttcagtggcggacgggtgagtaaagcatgagcaacttgcctgatagagggggatagcttttggaaacagaagataataccgcatacttcaaaagtttcgcatggagtttttggaaaag

SEQ ID NO: 1435 - DNA, 225 bp, unidentified
  misc_feature 1..225: note = Encodes 16S rRNA from Spirochaeta
  source 1..225: mol_type = genomic DNA
agagtttgatcctggctcagaacgaacgctggcggcgcgtcttaagcatgcaagtcgagcggtaacttaccttcgggtaagctagagcggcggactggtgagtaacacgtgggtgacataccctccggatcgggatagctcctagaaataggagataataccgggtacgaccactacggtcagagcgtagtgaggaaaggtgcattagcaccgccggaggagtgg

SEQ ID NO: 1436 - DNA, 225 bp, unidentified
  misc_feature 1..225: note = Encodes 16S rRNA from Enterorhabdus
  source 1..225: mol_type = genomic DNA
agagtttgatcatggctcaggatgaacgctggcggcgtgcttaacacatgcaagtcgaacgattaacccgccttcgggcggtcatagagtggcgaacgggtgagtaacacgtgaccaacctgccccgcgcaccgggacagcctcgcgaaagcgggattaataccggatactccgcaccccccgcatggggggtgcgggaaagctccggcggcgcgggatggggtc

SEQ ID NO: 1437 - DNA, 225 bp, unidentified
  misc_feature 1..225: note = Encodes 16S rRNA from Thermoanaerobacter
  source 1..225: mol_type = genomic DNA
agagtttgatcctggctcaggatgaacgctggcggcgcgcctaacacatgcaagtcgagcggcgaaggggattcgtccccggaccagcggcgaacgggtgagtaacgcgtgggcaacctgccccgggcccggggatagcggggggaaacccccggtaagacccgacgcgcccggaggggggcatccccctccgggcgaaggagacggcccgggatgggcccgcgt

SEQ ID NO: 1438 - DNA, 225 bp, unidentified
  misc_feature 1..225: note = Encodes 16S rRNA from unidentified taxa
  source 1..225: mol_type = genomic DNA
agagtttgatcatggctcaggacgaacgctagcgacgtgtctaagaaatgcaagtcgggcgatgacggaggcttcggcctcccgattagcggcgaacggtcgcgtaacacgtaagcaatctgccccaaagttcgggatagcccggcgaaagtcggattaataccggatgtggatgtttttgcgcatgcatttgcatctaaagcagcgatgcgctttgggatgagc

SEQ ID NO: 1439 - DNA, 225 bp, unidentified
  misc_feature 1..225: note = Encodes 16S rRNA from Syntrophococcus
  source 1..225: mol_type = genomic DNA
agagtttgatcatggctcaggatgaacgctggcggcgtgcttaacacatgcaagtcgaacgggaactctgaactgaaggttcgctggatgtttagaaattctagtggcggacgggtgagtaacgcgtgggtaacctgcctataagacgtgaacaacagttagaaatgactgctaatacacgataagcacacagtattgcatgatacagtgtgaaaagaatttcgc

SEQ ID NO: 1440 - DNA, 225 bp, unidentified
  misc_feature 1..225: note = Encodes 16S rRNA from Sphingobium
  source 1..225: mol_type = genomic DNA
agagtttgatcatggctcagagtgaacgctagcggaatgctttatacatgcaagtcgaacggagttttattgtgaagtagcaatatggaatagtaaaacttagtggcgaactggcgagtaatagttaggaacttaccgagtagtgggggacaacagttagaaatgactgctaataccgcatacgcccgagaggggaaagatttatcgctatttgagaggcctaac

SEQ ID NO: 1441 - DNA, 225 bp, unidentified
  misc_feature 1..225: note = Encodes 16S rRNA from Clostridium XlVa
  source 1..225: mol_type = genomic DNA
agagtttgatcatggctcaggatgaacgctggcggcgtgcctaacacatgcaagtcgaacgaagctcactttttgaattcttcggaaggaaaaaagagaagacttagtggcggacgggtgagtaacgcgtgggtaatctgccctgtacagggggacaacagttagaaatgactgctaataccgcataagcgtacggtaccgcatggtacagtacgaaaaactgag

SEQ ID NO: 1442 - DNA, 225 bp, unidentified
  misc_feature 1..225: note = Encodes 16S rRNA from Geosporobacter
  source 1..225: mol_type = genomic DNA
agagtttgatcctggctcaggatgaacgctggcggcgtgcctaacacatgcaagtcgagcgggaatctcctgattgaaacttcggtagatagacggagaggatagcggcggacgggtgagtaacgcgtaggtaagctgccctatgcacagggatagcctagggaaacctggattaatacctgatgacgctgcgaggtcacatggccatgcagccaaagtttttcg

SEQ ID NO: 1443 - DNA, 225 bp, unidentified
  misc_feature 1..225: note = Encodes 16S rRNA from Enterorhabdus
  source 1..225: mol_type = genomic DNA
agagtttgatcatggctcaggatgaacgctggcggcgtgcctaacacatgcaagtcgaacggttaagccggcttcggccgggcatacagtggcgaacgggtgagtaacacgtgaccaacctgccccgcgcaccgggacagccccccgaaagggggattaataccggatactccgcctcccccgcatgaggggggcgggaaagctccggcggcgcgggatggggtc

SEQ ID NO: 1444 - DNA, 225 bp, unidentified
  misc_feature 1..225: note = Encodes 16S rRNA from unidentified taxa
  source 1..225: mol_type = genomic DNA
agagtttgatcctggctcagaacgaacgctggtagcgtggattaggcatgcaagtcgaacgggatccgggaggtagcaatacttcctggtgagagtggcggattggggaggaacacgtgagcaacctgcctttgagtcggggaaaaccgttggaaacgacggctaataccggatgtggcgcccggtgacatcactggagcgctaaagggggccgcaaggctctcg

SEQ ID NO: 1445 - DNA, 225 bp, unidentified
  misc_feature 1..225: note = Encodes 16S rRNA from Clostridium XlVa
  source 1..225: mol_type = genomic DNA
agagtttgatcctggctcaggatgaacgctggcggcgtgcctaacacatgcaagtcgaacggagtacagacgctgtgagaggaagtgcttgcacagacttgaacttgtttgtacttagtggcggacgggtgagtaacgcgtggaaaacctgcctcatacagggggataacagggagaaattcctgctaataccgcataagcgcacggaaccgcatggttcagtgt

SEQ ID NO: 1446 - DNA, 225 bp, unidentified
  misc_feature 1..225: note = Encodes 16S rRNA from Parabacteroides
  source 1..225: mol_type = genomic DNA
agagtttgatcctggctcaggatgaacgctagcgacaggcttaacacatgcaagtcgaggggcagcgcggcgtgagcaatcatgctggcggcgaccggcgcactggtgagtaacacgtatgcaacctgccccctgccggggaataaaccagggaaacttggcctaatgccgcataacacgccttccggcatcggtaggcgttgaaagctccggcggcaggggatg

SEQ ID NO: 1447 - DNA, 225 bp, unidentified
  misc_feature 1..225: note = Encodes 16S rRNA from Cryptanaerobacter
  source 1..225: mol_type = genomic DNA
agagtttgatcatggctcaggacgaacgctggcggcgtgcttaatacatgcaagtcgaacggatatgtagcaatacatattagtggcggacgggtgagtaacgcgtaatcaacctgccttttacaggggaataacacttggaaacaggtgctaataccgcatatgaccacaacacggcatcgtgaaggggtaaaagttttatcggtaaaagagggggttgcgtat

SEQ ID NO: 1448 - DNA, 225 bp, unidentified
  misc_feature 1..225: note = Encodes 16S rRNA from Anaeroplasma
  source 1..225: mol_type = genomic DNA
agagtttgatcctggctcaggattaacgctggcggcgtgcctaatacatgcaagtcgaatggttagcttgctaaccatggcgaacgggtgagtaacacgtaggcaacctgactataagacgaggataaccattggaaacgatggataatactggataggatatagatgggcatccatttatatttaaagatttatcacttaatgaggggcctgcggcgcattagc

SEQ ID NO: 1449 - DNA, 225 bp, unidentified
  misc_feature 1..225: note = Encodes 16S rRNA from Spirochaeta
  source 1..225: mol_type = genomic DNA
agagtttgatcatggctcagaacgaacgctggcggcgcgtcttaagcatgcaagtcgggcggcaagctgccttcgggcagcctagagcggcggactggtgagtaacgcgtgggtgacgcacccccttgacggggacagcccgcagaaatgcggggtaataccggataaggtccccggggttggagcccggggaggaaaggagctattgctccgcgaggggagcgg

SEQ ID NO: 1450 - DNA, 225 bp, unidentified
  misc_feature 1..225: note = Encodes 16S rRNA from Prevotella
  source 1..225: mol_type = genomic DNA
agagtttgatcatggctcaggatgaacgctagctacaggcttaacacatgcaagtcgaggggcagcgggagagtagcttgctactcttgccggcgaccggcgaatgggtgagtaacgcgtatccaacctgccacatgcccgggaatagcccttggaaatgaggattaagtcccgatatgcttatttgtcgcatgacatgtaagtgaaacaggcatgtgatgggga

SEQ ID NO: 1451 - DNA, 225 bp, unidentified
  misc_feature 1..225: note = Encodes 16S rRNA from Roseburia
  source 1..225: mol_type = genomic DNA
agagtttgatcatggctcaggatgaacgctggcggcgtgcttaacacatgcaagtcgaacggactctaagtagaaagcggagcttgctccaatggaaatttagagttagtggcggacgggtgagtaacgcgtgggtaacctgccttgcacagggggacaacagttggaaacgactgctaataccgcataagccggtagtgccgcatggcacattcggaaaagatt

SEQ ID NO: 1452 - DNA, 225 bp, unidentified
  misc_feature 1..225: note = Encodes 16S rRNA from Pedobacter
  source 1..225: mol_type = genomic DNA
agagtttgatcctggctcaggatgaacgctagcggcaggcctaatacatgcaagtcgaacggtaagcggtccttcgggactgtgagagtggcggacgggtgcgtaacgcgtatgcaaccaacccccgacgggcggatagccggtggaaacgccggataagccgccatgcggccgaggaggggcatccctctttggtcaaagcggagacgcggtgggggacgggca

SEQ ID NO: 1453 - DNA, 225 bp, unidentified
  misc_feature 1..225: note = Encodes 16S rRNA from Pedobacter
  source 1..225: mol_type = genomic DNA
agagtttgatcatggctcaggatgaacgctagcggcaggcctaacacatgcaagtcgaggggcagcgcggtgcagcaatgcactggcggcgaccggcgcacgggtgcgtaacgcgtatgcaacccacccgcaacaggggtataacggagggaaacttccactaatcccccatattgccgtctttccgcatgggggggcggcgaaagcttcggcggttgcggacgg

SEQ ID NO: 1454 - DNA, 225 bp, unidentified
  misc_feature 1..225: note = Encodes 16S rRNA from Eggerthella
  source 1..225: mol_type = genomic DNA
agagtttgatcctggctcaggatgaacgctggcggcgtgcttaacacatgcaagtcgaacgagaacgcaccttcgggtgctagtagagtggcgaacgggtgagtaacacgtgagcaacctgccttccacttcgggataacccagggaaacctgtgctaataccgaatactccgggacctccgcatgggggacccgggaaagcgcatacggtggaagatgggctcg

SEQ ID NO: 1455 - DNA, 225 bp, unidentified
  misc_feature 1..225: note = Encodes 16S rRNA from Prevotella
  source 1..225: mol_type = genomic DNA
agagtttgatcctggctcaggatgaacgctagctacaggcttaacacatgcaagtcgaggggcagcatgaagtttgcttgcaaactttgatggcgaccggcgcacgggtgagtaacgcgtatccaacctgcccattacccggggatagcccgccgaaaggcgaattaatacccgatgtggtcccatgacggcatcagagtgggaccaaagtcttgtcggtaacgg

SEQ ID NO: 1456 - DNA, 225 bp, unidentified
  misc_feature 1..225: note = Encodes 16S rRNA from Rikenella
  source 1..225: mol_type = genomic DNA
agagtttgatcctggctcaggatgaacgctagcggcaggcttaacacatgcaagtcgaggggcagcgcggagtagcaatactctggcggcgaccggcgcacgggtgcgtaacgcgtatgcaacctgcctgcgacagggggataacctggagaaattcggactaataccccataccacgcctggcggcatcgccgggcgttgaaaggagcgatccggtcgcagatg

SEQ ID NO: 1457 - DNA, 225 bp, unidentified
  misc_feature 1..225: note = Encodes 16S rRNA from Anaerophaga
  source 1..225: mol_type = genomic DNA
agagtttgatcctggctcaggatgaacgctagcgacaggcttaacacatgcaagtcgaggggcagcgagtggcgttgttcgcaacgccatgtcggcgaccggcgcactggtgagtaacacgtatgcaacctgcccttcaccggggcataacccttggaaacgaggcctaattccccatatacagcattcgggcatccgtgagctgtgaaaggtttattccggtga

SEQ ID NO: 1458 - DNA, 225 bp, unidentified
  misc_feature 1..225: note = Encodes 16S rRNA from Spirochaeta
  source 1..225: mol_type = genomic DNA
agagtttgatcctggctcagaacgaacgctggcggcgcgtcttaagcatgcaagtcgggcggcaagctgccttcgggcagcctagagcggcggactggtgagtaacgcgtgggtgacgcacccccttgacggggacagcccgcagaaatgcggggtaataccggataaggtccccggggccggagcccggggaggaaaggagctattgctccgcgaggggagcgg

SEQ ID NO: 1459 - DNA, 225 bp, unidentified
  misc_feature 1..225: note = Encodes 16S rRNA from Clostridium IV
  source 1..225: mol_type = genomic DNA
agagtttgatcctggctcaggagaaacgctggcggcgcacataagacatgcaagtcgaacggaatttagccgaatgtttacatgaggcgaagatttagtggcggacgggtgagtaacacgtgagcaacctaccttagagagggggataacattgagaaatcagtgctaataccgcataacactatagtaccacatggtacattagtcaaaggagaaatccacttt

SEQ ID NO: 1460 - DNA, 225 bp, unidentified
  misc_feature 1..225: note = Encodes 16S rRNA from Weissella
  source 1..225: mol_type = genomic DNA
agagtttgatcatggctcaggatgaacgctggcggcgtgcctaatacatgcaagtcgaacgctttgtgcttaattgatatgatgagcttgctctgatttgattttttgatttcaaagagtggcgaacgggtgagtaacacgtgggtaacctacctcttagcaggggataacatttggaaacaagtgctaataccgtataatatcaacaaccgcatggttgttgat

SEQ ID NO: 1461 - DNA, 225 bp, unidentified
  misc_feature 1..225: note = Encodes 16S rRNA from Butyricicoccus
  source 1..225: mol_type = genomic DNA
agagtttgatcctggctcaggataaacgctggcggcgcacataagacatgcaagtcgaacgggaactttgttgaagttatctgatataaagttctagtggcggactggtgagtaatgtataagcaacctgcctacaagaggggaataacagtgagaaatcattgctaataccgcataagctgtgagaatggcatcattcaaacagaaaaggaagcaattctgctt

SEQ ID NO: 1462 - DNA, 216 bp, unidentified
  misc_feature 1..216: note = Encodes 16S rRNA from Hahella
  source 1..216: mol_type = genomic DNA
agagtttgatcatggctcaggatgaacgctagcggcaggcttaacacatgcaagtcgagcgggaactctgatgcagccatgccgcgtgtgtgaagaaggccttcgggttgtaaagcactttagttttcgagaaagggtgctgttctaatagggcagtattcagatgttagaaaaagaataagtaccggcaaactccgtgccagcagccgcggtaat

SEQ ID NO: 1463 - DNA, 225 bp, unidentified
  misc_feature 1..225: note = Encodes 16S rRNA from Acholeplasma
  source 1..225: mol_type = genomic DNA
agagtttgatcctggctcaggatgaacgctggcggcgtgcctaatacatgcaagtcgtacgctaaacttcggtttagagtggcgaacgggtgagtaacacgtaggtaacctgcccataagacgaggataactactggaaacggtagctaatactggatagtatatagaatcgcatgattttatatttaaagatgcgtttgcatcacttatggatggacctgcggc

SEQ ID NO: 1464 - DNA, 225 bp, unidentified
  misc_feature 1..225: note = Encodes 16S rRNA from Clostridium XlVa
  source 1..225: mol_type = genomic DNA
agagtttgatcctggctcaggatgaacgctggcggcgtgcctaacacatgcaagtcgaacgaagaccccgaggcggagatttcggtcaaagccaagggaggactgagtggcggacgggtgagtaacgcgtggataacctgccccatacagggggatagcagttggaaacgactgataataccgcataagcgcacaagggagacatcttccagtgtgaaaagattt

SEQ ID NO: 1465 - DNA, 225 bp, unidentified
  misc_feature 1..225: note = Encodes 16S rRNA from Cellulosilyticum
  source 1..225: mol_type = genomic DNA
agagtttgatcatggctcaggacgaacgctggcggcgtgcttaacacatgcaagtcgaacggagcgtacggacggaagttttcggacggaagactgtacgcttagtggcggacgggtgagtaacgcgtgagcaatctgcccataagagggggacaacagccggaaacagctgctaataccgcatgagaccacattaccgcatggtagaggggtcaaagaaattcg

SEQ ID NO: 1466 - DNA, 225 bp, unidentified
  misc_feature 1..225: note = Encodes 16S rRNA from unidentified taxa
  source 1..225: mol_type = genomic DNA
agagtttgatcatggctcagaacgaacgctggtagcgtggattaggcatgcaagtcgaacgggatccatgaagtagcaatacggattggtgagagtggcggaagggcgaggaacacgtgagcaacctgtccttgaggtggggaaaaccgttggaaacgacggctaataccgaatgtggcgcccggagacatctccggagcgctaaagggggccgcaaggctctcc

SEQ ID NO: 1467 - DNA, 225 bp, unidentified
  misc_feature 1..225: note = Encodes 16S rRNA from Clostridium XlVa
  source 1..225: mol_type = genomic DNA
agagtttgatcctggctcaggatgaacgctggcggcgtgcctaacacatgcaagtcgaacggtgaaacagaagcggaggttttcggactgaagcatttgtggaacagtggcggacgggtgagtaacgcgtggataacctgccccatacagggggatagcagttggaaacgactgataataccgcataagcgcacagcaccacatggtggagtgtgaaaaactatt

SEQ ID NO: 1468 - DNA, 225 bp, unidentified
  misc_feature 1..225: note = Encodes 16S rRNA from Pseudoflavonifractor
  source 1..225: mol_type = genomic DNA
agagtttgatcatggctcaggacgaacgctggcggcgtgcttaacacatgcaagtcgaacgaggaatgttaaaaagcttgctttttaacatttcgagtggcggacgggtgagtaacgcgtgaggaacctgtcttctacagggggataacgtcccgaaagggacgctaataccgcataagaccacggtgccgcatggcacaggggtcaaaggaggaatccggtaga

SEQ ID NO: 1469 - DNA, 225 bp, unidentified
  misc_feature 1..225: note = Encodes 16S rRNA from Calditerricola
  source 1..225: mol_type = genomic DNA
agagtttgatcatggctcagaatgaacgctggcggcatggattaggcatgcaagtcgaacgggatccctcgggatctagtggcgaaagggtgagtaacacgtgagcaacctgcccccaaggccggaataagcactggaaacggtgtctaaaaccggatgaggcctctgtccacatggacagtcagccaaatattcataccctggggatgggctcgcggcccatta

SEQ ID NO: 1470 - DNA, 225 bp, unidentified
  misc_feature 1..225: note = Encodes 16S rRNA from Clostridium IV
  source 1..225: mol_type = genomic DNA
agagtttgatcatggctcaggacgaacgctggcggcgtgcctaacacatgcaagtcgagcggagacatacgacggagaggaagttttcggatggaatcaaagatgtatgttttagcggcggacgggtgagtaacgcgtgagcaacctgtccctcacagggggataacacaccgaaaggtgtactaataccgcatgacactgacttgagacatcttgagacagtca

SEQ ID NO: 1471 - DNA, 225 bp, unidentified
  misc_feature 1..225: note = Encodes 16S rRNA from Clostridium IV
  source 1..225: mol_type = genomic DNA
agagtttgatcctggctcaggacgaacgctggcggcgtgcttaacacatgcaagtcgaacgagaatctgtggaaggagttttcggacaacggaaacagaggaaagtggcggacgggtgagtaacgcgtgaggaacctgccttggagagggggacaacagctggaaacggctgctaataccgcatgatgcacgatggggacatccctgacgtgccaaagatttatc

SEQ ID NO: 1472 - DNA, 225 bp, unidentified
  misc_feature 1..225: note = Encodes 16S rRNA from Adlercreutzia
  source 1..225: mol_type = genomic DNA
agagtttgatcatggctcaggatgaacgctggcggcgtgcttaacacatgcaagtcgaacggttaaaccggcttcggccggacatagagtggcgaacgggtgagtaacacgtgaccaacctgccccgcgcaccgggacagcctcgcgaaagcgggattaataccggatactccggcggcgcgggatggggtcgcggcccatcaggtagtaggtcgggtaggggcc

SEQ ID NO: 1473 - DNA, 225 bp, unidentified
  misc_feature 1..225: note = Encodes 16S rRNA from Bulleidia
  source 1..225: mol_type = genomic DNA
agagtttgatcatggctcaggatgaacgctggcggcgtgcctaatacatgcaagtcgaacgagagcgaccagcttgctggtcaatcgagtggcgaacgggtgagtaacacataaacaatctgccctgaagactgggataacgtagggaaacccacgctaataccggataggcagtgagggggcatcctcttactgttaaagctgggctacagcactgcaggatga

SEQ ID NO: 1474 - DNA, 225 bp, unidentified
  misc_feature 1..225: note = Encodes 16S rRNA from Lachnospiracea incertae sedis
  source 1..225: mol_type = genomic DNA
agagtttgatcctggctcaggatgaacgctggcggcgtgcctaacacatgcaagtcgagcggagtaagacaccgaatgaggatccgtctgatttcaccgtcttacttagcggcggatgggtgagtaacgcgtggacaacctgcccttcactgggggataacaaccggaaacgggtgctaataccgcatgggcgcgaacgaccgcatgatcgatcgcgtaaagatt

SEQ ID NO: 1475 - DNA, 225 bp, unidentified
  misc_feature 1..225: note = Encodes 16S rRNA from Mucilaginibacter
  source 1..225: mol_type = genomic DNA
agagtttgatcatggctcaggatgaacgctggcggcaggcctaatacatgcaagtcggacggcagcatgccgtagcaatacggtgatggcgagtggcgtacgggtgcgtaacacgtgtgcaacctgccccgcacagggacaaaacgccgggaaactggcgctaatatcccatgacgccgcgctggggcatccctttgcggctaaagaggcgactcggtgcgggat

SEQ ID NO: 1476 - DNA, 225 bp, unidentified
  misc_feature 1..225: note = Encodes 16S rRNA from Victivallis
  source 1..225: mol_type = genomic DNA
agagtttgatcctggctcagaacgaacgctggcggcatggattaggcatgcaagtcgaacggaagcagcaatgcttcagtggcggaagggtgaggaacgcgtgagtaatctgccctcaagttgggaataacagttggaaacgactgctaataccgaatgtggctgtaatttcgcatgaagttatggttaaagatttattgcttgaggatgagctcgcgtcccatt

SEQ ID NO: 1477 - DNA, 225 bp, unidentified
  misc_feature 1..225: note = Encodes 16S rRNA from Anaerovorax
  source 1..225: mol_type = genomic DNA
agagtttgatcatggctcaggatgaacgctggcggcgtgcctaacacatgcaagtcgagcgggaaatcgctgattgagatttcggttgattgaagcgatggatagcggcggacgggtgagtaacgcgtaggtaatctgccttcagcacagggatagcctagggaaacctggattaatacctgataacgcattgaagtcacatggctttgatgccaaagatttatc

SEQ ID NO: 1478 - DNA, 225 bp, unidentified
  misc_feature 1..225: note = Encodes 16S rRNA from Clostridium XlVb
  source 1..225: mol_type = genomic DNA
agagtttgatcctggctcaggatgaacgctggcggcgtgcttaacacatgcaagtcgagcgaagtttattgagcttgcttaataaacttagcggcggacgggtgagtaacgcgtgggtaacctgccctgtacagaggaataacagttagaaatgactgctaatgcctcataagccgacggaatggcatctttcagtcggaaaagatttatcggtacaggagggac

SEQ ID NO: 1479 - DNA, 225 bp, unidentified
  misc_feature 1..225: note = Encodes 16S rRNA from Clostridium XlVa
  source 1..225: mol_type = genomic DNA
agagtttgatcatggctcaggatgaacgctggcggcgcatttaagacatgcaagtcgaacgaaaaaatttaatctaaacggaattgaagaattatctgataagaagttttaaccgaattttttagtggcggacgggtgagtaatacatagataatctgccttttagagggaaataactactggaaacggtagataatgtcccataagaccacactaccgcatgat

SEQ ID NO: 1480 - DNA, 225 bp, unidentified
  misc_feature 1..225: note = Encodes 16S rRNA from Prevotella
  source 1..225: mol_type = genomic DNA
agagtttgatcctggctcaggatgaacgctagcggcaggcttaacacatgcaagtcgaggggcagcgggctgtagcaatacggtgccggcgaccggcggacgggtgcgtaacgcgtatgcaacctgcccggcacaggggaatagcccggcgaaagccggagtaatgccccatggttccagcatcccgcatggggagctggataaacccgcgagggggtgccggat

SEQ ID NO: 1481 - DNA, 225 bp, unidentified
  misc_feature 1..225: note = Encodes 16S rRNA from Bacteroides
  source 1..225: mol_type = genomic DNA
agagtttgatcatggctcaggatgaacgctagcgacaggcctaacacatgcaagtcgaggggcagcacgaaggaagcttgctttctttggtggcgaccggcgcacgggtgcgtaacgcgtatgcaacctgtccataaccgagggatagcctcccgaaagggagattaaaacttcatgtgccacatgagggcatccgagagtggtgaaacgttacgggttatggtt

SEQ ID NO: 1482 - DNA, 225 bp, unidentified
  misc_feature 1..225: note = Encodes 16S rRNA from Schwartzia
  source 1..225: mol_type = genomic DNA
agagtttgatcctggctcaggacgaacgctggcggcgtgcttaacacatgcaagtcgaacggggcgatttgaaagcttgcttttgatgagcctagtggcaaacgggtgagtaacgcgtaggcaacctgccctcaggatggggacaacggcccgaaaggaccgctaataccgaatgacgtatctttttcgcatggaagagataccaaaggcggagcaatccgtcac

SEQ ID NO: 1483 - DNA, 225 bp, unidentified
  misc_feature 1..225: note = Encodes 16S rRNA from Pyramidobacter
  source 1..225: mol_type = genomic DNA
agatttgatcctggctcaggatgaacgctggcggcgtgcttaacacatgcaagttgcgcggggatctgatgatgagacttcggtggatttgttagatcctagcggcggacgggtgagtaaagcacaaggacgtgtccgagcgagggggacaactgcgggaaaccgtagctaataccccgtaagccgagaggtgaaagcagcaatgcgcgagcggagcgacttgtg

SEQ ID NO: 1484 - DNA, 225 bp, unidentified
  misc_feature 1..225: note = Encodes 16S rRNA from Eubacterium
  source 1..225: mol_type = genomic DNA
agagtttgatcctggctcaggacgaacgctggcggcgtgcctaacacatgcaagtcgaacgaagcttgatttcagatttcttcggaaagacgaatgatatgactgagtggcggacgggtgagtaacgcgtgagcaacctgccctttggatcgggatagcgtttggaaacgaacggtaataccgaataaagtatttggatggcatcatctgaataccaaagctccg

SEQ ID NO: 1485 - DNA, 225 bp, unidentified
  misc_feature 1..225: note = Encodes 16S rRNA from Lachnospiracea incertae sedis
  source 1..225: mol_type = genomic DNA
agagtttgatcatggctcaggatgaacgctggcggcgtgcctaacacatgcaagtcgaacgaagacatgcggacggaatcctccgggaggaaggctgcatggactgagtggcggacgggtgagtaacgcgtgggtaacctgccctgtacagggggacaacagttggaaacgactgctaataccgcataagcatacaggaccgcatggtccggtatgaaaaactcc

SEQ ID NO: 1486 - DNA, 225 bp, unidentified
  misc_feature 1..225: note = Encodes 16S rRNA from Clostridium XlVa
  source 1..225: mol_type = genomic DNA
agagtttgatcatggctcaggatgaacgctggcggcgtgcttaacacatgcaagtcgaacgaggcttaacgaatgagatcttcggatggattttgttaatccgagtggcggacgggtgagtaacgcgtgggtaacctgccttacacagggggacaacagccggaaacggctgctaataccgcataacccgctagggccgcatggcccggacggaaaagatttatc

SEQ ID NO: 1487 - DNA, 225 bp, unidentified
  misc_feature 1..225: note = Encodes 16S rRNA from Roseburia
  source 1..225: mol_type = genomic DNA
agagtttgatcctggctcaggatgaacgctggcggcgtgcttaacacatgcaagtcgaacgaagcacatggacggaattccttcggggaggaagaccatgtgactgagtggcggacgggtgagtaacgcgtgggtaacctacctcatacagggggataacagctggaaacggctgttaataccgcataagcgcacagggccgcatggtccggtgtgaaaaactcc

SEQ ID NO: 1488 - DNA, 225 bp, unidentified
  misc_feature 1..225: note = Encodes 16S rRNA from Clostridium XlVb
  source 1..225: mol_type = genomic DNA
agagtttgatcatggctcaggatgaacgctggcggcgtgcttaacacatgcaagtcgaacgagagaagacgaaaagcttgctttttgtcctatcgagtggcggacgggtgagtaacgcgtgagtaacctgccccatactggggaataacgtttggaaacggacgctaataccgcataagcaggcggagggacatccctcagtttgaaaagatttatcggtatggg

SEQ ID NO: 1489 - DNA, 225 bp, unidentified
  misc_feature 1..225: note = Encodes 16S rRNA from Enterorhabdus
  source 1..225: mol_type = genomic DNA
agagtttgatcctggctcaggatgaacgctggcggcgtgcctaacacatgcaagtcgaacggttaaaccgccctcgggcggacatagagtggcgaacgggtgagtaacacgtgaccaacctgccccgcgcaccgggacaaccgctggaaacggcggctaataccgggtactccggagggggcgcatgcccccgccgggagagctccggcggcgcgggatggggtc

SEQ ID NO: 1490 - DNA, 225 bp, unidentified
  misc_feature 1..225: note = Encodes 16S rRNA from Pedobacter
  source 1..225: mol_type = genomic DNA
agagtttgatcctggctcaggatgaacgctagcggcaggcctaatacatgcaagtcgaacggtaaatgtcccttcggggacatgagagtggcggacgggtgcgtaacgcgtatgcaaccaacccccctcaccgggatagccggtggaaacgccggataagaccggatgcgcccatggggaggcatctccctgcgggcaaggcggcgacgcggagggggacgggca

SEQ ID NO: 1491 - DNA, 225 bp, unidentified
  misc_feature 1..225: note = Encodes 16S rRNA from Clostridium sensu stricto
  source 1..225: mol_type = genomic DNA
agagtttgatcatggctcaggacgaacgctggcggcgtgcttaacacatgcaagtcgaacgagacttaagagcggaagtcttcggatggaaggtcataagtcgagtggcggacgggtgagtaacgcgtgagcaacctgtcttatacagggggataacactccgaaaggagcgctaataccgcataagaccacgatgccgcatggtatcggggtaaaaggagcgat

SEQ ID NO: 1492 - DNA, 225 bp, unidentified
  misc_feature 1..225: note = Encodes 16S rRNA from Clostridium XlVa
  source 1..225: mol_type = genomic DNA
agagtttgatcatggctcaggatgaacgctggcggcgtgcttaacacatgcaagtcgaacggacttaggccaccgaactgaatttagcttgctattgaaggttcaccggtctaagttagtggcggacgggtgagtaacgcgtgggcaacctgcctttatccgggggataacagttagaaatgactgctaataccgcataagcgcacgaggaggcatctccttgtg

SEQ ID NO: 1493 - DNA, 225 bp, unidentified
  misc_feature 1..225: note = Encodes 16S rRNA from Clostridium III
  source 1..225: mol_type = genomic DNA
agagtttgatcatggctcaggacgaacgctggcggcgcgcctaacacatgcaagtcgaacgggactagtgaccggagaatagatgaggttatctattttgcgatcactagttcagtggcggacgggtgagtaaagcatgagcaacctggctactagagggggatagcttttggaaacagaagataataccgcatacatcaaagatttcgcatgagatttttggaa

SEQ ID NO: 1494 - DNA, 225 bp, unidentified
  misc_feature 1..225: note = Encodes 16S rRNA from Desulfotomaculum
  source 1..225: mol_type = genomic DNA
agagtttgatcatggctcaggacgaacgctggcggcgtgcttaatacatgcaagtcgaacggaagtaaagatttcggtttttactttagtggcgaacgggtgagtaacgcgtgaacaacctgactcgaagagggggataacaacgggaaactgttgctaataccgcataagaccacagaaccgcatgattcaggggtcaaagatttatcgctttgagaggggttc

SEQ ID NO: 1495 - DNA, 225 bp, unidentified
  misc_feature 1..225: note = Encodes 16S rRNA from Clostridium IV
  source 1..225: mol_type = genomic DNA
agagtttgatcctggctcaggacgaacgctggcggcgtgcctaacacatgcaagtcgaacggaagcgtacattagaagttttcggatggaagatatacgttttagtggcggacgggtgagtaacgcgtgagtaacctgcctttcagagggggataacgttttgaaaagaacgctaataccgcataacgtaaaggagtcgcatggcttcattaccaaaggagcaat

SEQ ID NO: 1496 - DNA, 225 bp, unidentified
  misc_feature 1..225: note = Encodes 16S rRNA from Proteiniclasticum
  source 1..225: mol_type = genomic DNA
agagtttgatcatggctcaggacgaacgctggcggcgtgcttaacacatgcaagtcgaacgagggatgggggagagcttgctctttttcattccgagtggcggacgggtgagtaacgcgtgaggaacctgtctttcacagggggataacgtaccgaaagggacgctaataccgcataagaccacagcaccgcatggtgaaggggtcaaaggaggaatccggtgga

SEQ ID NO: 1497 - DNA, 225 bp, unidentified
  misc_feature 1..225: note = Encodes 16S rRNA from Prevotella
  source 1..225: mol_type = genomic DNA
agagtttgatcatggctcaggatgaacgctagctacaggcttaacacatgcaagtcgaggggcagcatgggagttgcttgcaacttctgatggcgaccggcgcacgggtgagtaacgcgtatccgaccttcccccaggtagggaacagcccggcgaaagtcggattaatgccctatagtctgcgaattgcgcatgttgtttgcagtaaagatttatcgccttggg

SEQ ID NO: 1498 - DNA, 225 bp, unidentified
  misc_feature 1..225: note = Encodes 16S rRNA from Faecalibacterium
  source 1..225: mol_type = genomic DNA
agagtttgatcctggctcaggatgaacgctggcggcgtgcataacacattcaagtcgaacggagttgcgatggaaagaggcttcggccaatggaagttgtaacttagtggcggacgggtgagtaacgcgtgagcaacctacctatgcgcgggggacaacagttggaaacgactgctaataccgcataaatcatggtaaaggcatctttatcatggcaaagattaa

SEQ ID NO: 1499 - DNA, 225 bp, unidentified
  misc_feature 1..225: note = Encodes 16S rRNA from Microbacterium
  source 1..225: mol_type = genomic DNA
agagtttgatcatggctcaggatgaacgctggcggcgtgcttaacacatgcaagtcgaacgatgaagctggagcttgctctggtggattagtggcgaacgggtgagtaacacgtgagcaacctgcccctgactctgggataacagccggaaacggctgctaataccggatatgcaccatgaacgcatgttctgtggtgggaaagatttttcggttggggatgggc

SEQ ID NO: 1500 - DNA, 225 bp, unidentified
  misc_feature 1..225: note = Encodes 16S rRNA from Leucobacter
  source 1..225: mol_type = genomic DNA
agagtttgatcctggctcaggacgaacgctggcggcgtgcttaacacatgcaagtcgaacgatgaagcccagcttgctgggtggaagagtggcgaacgggtgagtaacacgtgagtaacctgcccttgactctgggataagcgctggaaacggcgtctaatactggatacgacctatcaccgcatggtgtgtgggtggaaagatttatcggttttggatggactc

SEQ ID NO: 1501 - DNA, 225 bp, unidentified
  misc_feature 1..225: note = Encodes 16S rRNA from Prevotella
  source 1..225: mol_type = genomic DNA
agagtttgatcctggctcaggatgaacgctagctacaggcttaacacatgcaagtcgaggggtaacatgattggagcttgctctgattgatgacgaccggcgcacgggtgcgtaacgcgtatccaaccttccccctaccagggaatagcccgttgaaagacggattaatgccctatgttgtgtgataatggcatcagagttacacgaaagactttgtcggtatgg

SEQ ID NO: 1502 - DNA, 225 bp, unidentified
  misc_feature 1..225: note = Encodes 16S rRNA from Sphingobacterium
  source 1..225: mol_type = genomic DNA
agagtttgatcatggctcaggatgaacgctagcggcaggcctaatacatgcaagtcgaacgggatccagatcaaagcttgctttggtttggtgagagtggcgcacgggtgcgtaacgcgtgagcaacctacccttgtcagggggatagcccggcgaaagtcggattaataccgcatgacatcattgagaggcatctttctatgatcaaagatttatcggacaagg

SEQ ID NO: 1503 - DNA, 225 bp, unidentified
  misc_feature 1..225: note = Encodes 16S rRNA from Fusibacter
  source 1..225: mol_type = genomic DNA
agagtttgatcctggctcaggattaacgctggcggcgtgcctaacacatgcaagtcgagcgggaaatttgagagtgaagcttcggcggaacttttaaatggagagcggcggacgggtgagtaacgcgtaggtaacctgccctgcacagagggatagccactggaaacggtgattaatacctcataaaactgttttgccgcatgacaaaacagccaaagatttatc

SEQ ID NO: 1504 - DNA, 225 bp, unidentified
  misc_feature 1..225: note = Encodes 16S rRNA from Howardella
  source 1..225: mol_type = genomic DNA
agagtttgatcctggctcaggataaacgctggcggcgcacataagacatgcaagtcgaacggaagtcgttattttagaagtggaaagaagatttatctgatagaagcagaagaaataacaatggctttagtggcggactggtgagtaacacgtaagcaacctggctattagaggggaataacagtgagaaatcattgctaataccgcataagcttgtaataccgc

SEQ ID NO: 1505 - DNA, 225 bp, unidentified
  misc_feature 1..225: note = Encodes 16S rRNA from Pedobacter
  source 1..225: mol_type = genomic DNA
agagtttgatcatggctcaggatgaacgctagcggcaggcctaatacatgcaagtcgaacggtaaagtccccttcgggggattgagagtggcggacgggtgcgtaacgcgtatgcaaccaacccccctcaccgggatagccggtggaaacgccggataagaccggatgcgcccatggggaggcatctccctgcgggcaaggcggcgacgcggagggggacgggca

SEQ ID NO: 1506 - DNA, 225 bp, unidentified
  misc_feature 1..225: note = Encodes 16S rRNA from Caldilinea
  source 1..225: mol_type = genomic DNA
agagtttgatcatggctcaggatgaacgctggcggcgtgcttaacacatgcaagtcgaacgtgagagatagcaatatcttgaaagtggcaaacgggtgagtaacacgtagataacctgcctcggagtgggggataaccacgggaaactgtggctaataccgcatagtcttgcggacacgggagtgtcggcaagtaaagctttagtgcttcgagaggggtctgcgt

SEQ ID NO: 1507 - DNA, 225 bp, unidentified
  misc_feature 1..225: note = Encodes 16S rRNA from Turicibacter
  source 1..225: mol_type = genomic DNA
agagtttgatcctggctcaggatgaacgctggcggcgtgcctaatacatgcaagtcgaacggagcacttcggtgcttagtggcgaacgggtgagtaacacataaacaatctaccctgaagactgggataacggttggaaacgaccgctaataccggataggtaactctgaggcatcttagagttattaaagttgggttacaacactgcaggatgagtttatgtcg

SEQ ID NO: 1508 - DNA, 225 bp, unidentified
  misc_feature 1..225: note = Encodes 16S rRNA from Clostridium IV
  source 1..225: mol_type = genomic DNA
agagtttgatcctggctcaggacgaacgctggcggcgtgcttaacacatgcaagtcgaacggtcttcttacgggtagcaatacttgtttgaagatagtggcggacgggtgagtaacgcgtgagcaacctgcccatcagaggggaatagcgtctggaaacggacgataataccgcataaaactgagtcaccgcatgatgacacagccaaaggagaaatccgctgat

SEQ ID NO: 1509 - DNA, 225 bp, unidentified
  misc_feature 1..225: note = Encodes 16S rRNA from Alistipes
  source 1..225: mol_type = genomic DNA
agagtttgatcatggctcaggatgaacgctagcggcaggcctaacacatgcaagtcgaggggcagcgcggtgtagcaatacactggcggcgaccggcgcacgggtgcgtaacgcgtatgcaacccacccgcgacaggggcataacggggggaaacccccactaattccccgtaaggccgcgtccccgcatggggatgcggcgaaagccttcgggcggttgcggac

SEQ ID NO: 1510 - DNA, 225 bp, unidentified
  misc_feature 1..225: note = Encodes 16S rRNA from Clostridium XlVa
  source 1..225: mol_type = genomic DNA
agagtttgatcatggctcaggatgaacgctggcggcgtgcttaatacatgcaagtcgaacggaagatacccagagcttgctcttgatatctttagtggcggacgggtgagtaacgcgtgggtaacctgcctcatacagggggataacagttagaaatgactgctaaaaccgcataacattgcagtgccgcatgatactgcgatcaaatatttataggtatgagat

SEQ ID NO: 1511 - DNA, 225 bp, unidentified
  misc_feature 1..225: note = Encodes 16S rRNA from Clostridium XlVa
  source 1..225: mol_type = genomic DNA
agagtttgatcatggctcaggatgaacgctggcggcgtgcttaacacatgcaagtcgaacggagcttattaagaaagcggagcttgctccaatggatttttaagcttagtggcggacgggtgagtaacgcgtgggtaacctgccttgcacagggggacaacagttggaaacgactgctaataccgcataagccggtagcttcgcatgaagcatccggaaaagatt

SEQ ID NO: 1512 - DNA, 225 bp, unidentified
  misc_feature 1..225: note = Encodes 16S rRNA from Prevotella
  source 1..225: mol_type = genomic DNA
agagtttgatcatggctcaggatgaacgctagctacaggcttaacacatgcaagtcgaggggaaacggaaggcggagcttgctttgcctagacgtcgaccggcggatgggtgcgtaacgcgtatccaacctgcccgtgtcccggggatagcccatggaaacgtggattaacacccgatggtcctgcgcttccgcatggcggcgcaggtaaacgtgagggacatgg

SEQ ID NO: 1513 - DNA, 225 bp, unidentified
  misc_feature 1..225: note = Encodes 16S rRNA from Clostridium XlVa
  source 1..225: mol_type = genomic DNA
agagtttgatcctggctcaggatgaacgctggcggcgtgcctaacacatgcaagtcgaacgagggtcctaaacctgagattcgtcgaaggggagggaattccgagtggcggatgggtgagtaacgcgtggagaacctgccctttgctgggggataacaactggaaacggttgacaataccgcataagctcggttggccgcatgaccgaccgaggaaagatttatc

SEQ ID NO: 1514 - DNA, 225 bp, unidentified
  misc_feature 1..225: note = Encodes 16S rRNA from Butyricimonas
  source 1..225: mol_type = genomic DNA
agagtttgatcctggctcaggatgaacgctagcgacaggcttaacacatgcaagtcgaggggcagcatgggggtggcaacacctctgatggcgaccggcgcactggtgagtaacacgtatgcgacctgccccgttccggggtatagaccagggaaacttggcgtaatcccccatgtgccctggggctgcatggccccatggtgaaaggttcgccgggacgggatg

SEQ ID NO: 1515 - DNA, 225 bp, unidentified
  misc_feature 1..225: note = Encodes 16S rRNA from Anaerovibrio
  source 1..225: mol_type = genomic DNA
agagtttgatcctggctcaggacgaacgctggcggcgtgcttaacacatgcaagtcgaacggggcgaagaggagcttgctcttcctagcctagtggcaaacgggtgagtaacgcgtaggcaacctgcccttcagatggggacaacatttcgaaaggaatgctaataccgaatgatgtacattggtcgcatgactgatgcaccaaaggccgggcaaccggtcactg

SEQ ID NO: 1516 - DNA, 225 bp, unidentified
  misc_feature 1..225: note = Encodes 16S rRNA from Prevotella
  source 1..225: mol_type = genomic DNA
agagtttgatcatggctcaggatgaacgctagctacaggcttaacacatgcaagtcgaggggcagcatgtcgtgtgcttgcacacgatgatggcgaccggcgcacgggtgagtaacgcgtatccaacctgcccatgactccgggatagcccgctgaaaagcggattaacaccggatgcggtcgaaagaggacatctgatttcgaccaaagcttcggcggtcatgg

SEQ ID NO: 1517 - DNA, 225 bp, unidentified
  misc_feature 1..225: note = Encodes 16S rRNA from Pseudoflavonifractor
  source 1..225: mol_type = genomic DNA
agagtttgatcatggctcaggatgaacgctggcggcgtgcataacacattcaagtcgaacggactgattcgatagcttgctattgatgaaagttagtggcggacgggtgagtaacgcgtgagcaacctgcccctatgtgcgggataacgtctggaaacggacgctaataccgcataaaccaatcggaccgcatgatctggttggcaaagatttattgcataggga

SEQ ID NO: 1518 - DNA, 225 bp, unidentified
  misc_feature 1..225: note = Encodes 16S rRNA from Corynebacterium
  source 1..225: mol_type = genomic DNA
agagtttgatcatggctcaggacgaacgctggcggcgtgcttaacacatgcaagtcgaacggaaaggcccagcttgctgggtgctcgagtggcgaacgggtgagtaacacgtgggtgatctgcccctaacttcgggataagcttgggaaactgggtctaataccggataggacaatcgtttagtgtcggttgtggaaagttttttcggttagggatgagcccgcg

SEQ ID NO: 1519 - DNA, 225 bp, unidentified
  misc_feature 1..225: note = Encodes 16S rRNA from Leucobacter
  source 1..225: mol_type = genomic DNA
agagtttgatcatggctcaggacgaacgctggcggcgtgcttaacacatgcaagtcgaacgatgaagcctagcttgctgggtggaagagtggcgaacgggtgagtaacacgtgagtaacctgccccgaactctgggataagcgctggaaacggcgtctaatactggatatgcaccatggaggcatcttctgtggtgggaaagatttatcggttcgggatgggctc

SEQ ID NO: 1520 - DNA, 225 bp, unidentified
  misc_feature 1..225: note = Encodes 16S rRNA from Kerstersia
  source 1..225: mol_type = genomic DNA
agagtttgatcctggctcagattgaacgctagcgggatgctttacacatgcaagtcgaacggcagcacgaggagcttgctccttggtggcgagtggcgaacgggtgagtaatatatcggaacatgcccagtagcgggggataactactcgaaagagtggctaataccgcatacgtcctacgggagaaagcaggggaccttcgggccttgcactattggagtggcc

SEQ ID NO: 1521 - DNA, 225 bp, unidentified
  misc_feature 1..225: note = Encodes 16S rRNA from Slackia
  source 1..225: mol_type = genomic DNA
agagtttgatcctggctcaggatgaacgccggcggcgcgcctaacacatgcaagtcgagcggaggacctgtcttcggacaggcgatcagcggcgaacgggtgagtaacgcgtgggcaacctgccccccgcacgggaatagccccgggaaaccgggggtaatgcccgacggcccggcagaggggcatccctctgccggcgaagccatcgcggcgggggatgggccc

SEQ ID NO: 1522 - DNA, 225 bp, unidentified
  misc_feature 1..225: note = Encodes 16S rRNA from Lactococcus
  source 1..225: mol_type = genomic DNA
agagtttgatcatggctcaggacgaacgctggcggcgtgcctaatacatgcaagttgagcgctgaaggttggtacttgtaccgactggatgagcagcgaacgggtgagtaacgcgtggggaatctgcctttgagcgggggacaacatttggaaacgaatgctaataccgcataaaaactttaaacacaagttttaagtttgaaagatgcaattgcatcactcaaa

SEQ ID NO: 1523 - DNA, 225 bp, unidentified
  misc_feature 1..225: note = Encodes 16S rRNA from Prevotella
  source 1..225: mol_type = genomic DNA
agagtttgatcatggctcaggatgaacactagctacaggcttaacacatgcaagtcgaggggtaacatgattggagcttgctccgattgatgacgaccggcgcacgggtgcgtaacgcgtatccaaccttccccctaccagggaatagcccgttgaaagacggattaatgccctatgttgtgtgataatggcatcagagttacacgaaagactttgtcggtatgg

SEQ ID NO: 1524 - DNA, 225 bp, unidentified
  misc_feature 1..225: note = Encodes 16S rRNA from Clostridium IV
  source 1..225: mol_type = genomic DNA
agagtttgatcctggctcaggacgaacgctggcggcgcgcctaacacatgcaagtcgaacggagagtgggttttgattctttcgggatgatgaattcatttcttagtggcggacgggtgagtaacacgtgagcaacctgccttgcagagcgggataacggttggaaacgatcgctaataccgcataacatatgattgtcgcatggctatcatatcaaagatttat

SEQ ID NO: 1525 - DNA, 225 bp, unidentified
  misc_feature 1..225: note = Encodes 16S rRNA from Prevotella
  source 1..225: mol_type = genomic DNA
agagtttgatcctggctcaggatgaacgctagctacaggcttaacacatgcaagtcgaggggaaacggaagggaaagcttgctttccctagacgtcgaccggcggatgggtgcgtaacgcgtatccaacctgcccgtgtcccggggatagcccatggaaacgtggattaacacccgatggccctgcgcttccgcatggcggcgcaggtaaacgcgagggacatgg

SEQ ID NO: 1526 - DNA, 225 bp, unidentified
  misc_feature 1..225: note = Encodes 16S rRNA from Bacteroides
  source 1..225: mol_type = genomic DNA
agagtttgatcctggctcaggatgaacgctagctacaggcctaacacatgcaagtcgcggggcagcattgaggtagcaatacctcagatggcgaccggcgcacgggtgcgtaacgcgtatccaacctggcccttactcgggtatagccctgcgaaagtaggattaatccccgatgttgtcaagatggagccttttttcttgaccaaagatttatcggtaagggat

SEQ ID NO: 1527 - DNA, 225 bp, unidentified
  misc_feature 1..225: note = Encodes 16S rRNA from Lactobacillus
  source 1..225: mol_type = genomic DNA
agagtttgatcatggctcaggacgaacgctggcggcgtgcctaatacatgcaagtcgaacgaactctggtattgattggtgcttgcatcatgatttacatttgagtgagtggcgaactggtgagtaacacgtgggaaacctgcccagaagcgggggataacacctggaaacagatgctaataccgcataacaacttggaccgcatggtccgagtttgaaagatgg

SEQ ID NO: 1528 - DNA, 225 bp, unidentified
  misc_feature 1..225: note = Encodes 16S rRNA from Prevotella
  source 1..225: mol_type = genomic DNA
agagtttgatcatggctcaggatgaacgctagctacaggcttaacacatgcaagtcgaggggcagcatgattctagcttgctagaattgatggcgaccggcgcacgggtgcgtaacgcgtatccaaccttcccgcgagtcaggcacagcccggcgaaagtcggattaattcctgatgttctcctttgacggcatcagagaaggagtaaagaatttttcgcttgcg

SEQ ID NO: 1529 - DNA, 225 bp, unidentified
  misc_feature 1..225: note = Encodes 16S rRNA from Clostridium XlVa
  source 1..225: mol_type = genomic DNA
agagtttgatcctggctcaggatgaacgctggcggcgtgcctaacacatgcaagtcgaacggagtttatgaagttttcggactgagtaaacttagtggcggacgggtgagtaacgcgtgggtaacctgcctcatacagggggataacagttggaaacggctgctaaaaccgcataagcatacattgtcgcatgacagagtgtgaaaatatttataggtatgagat

SEQ ID NO: 1530 - DNA, 225 bp, unidentified
  misc_feature 1..225: note = Encodes 16S rRNA from Clostridium sensu stricto
  source 1..225: mol_type = genomic DNA
agagtttgatcctggctcaggacgaacgctggcggcgtgcttaacacatgcaagtcgagcgaggatctcaccggaaggccttcgggccggaaggtaagattcgagcggcggacgggtgagtaacgcgtgagcgatctgtcccgcacagggggataacacttggaaacaggtgctaataccgcataagaccacgaggccgcatggccatggggtaaaaggagcgat

SEQ ID NO: 1531 - DNA, 225 bp, unidentified
  misc_feature 1..225: note = Encodes 16S rRNA from Syntrophococcus
  source 1..225: mol_type = genomic DNA
agatttgatcctggctcaggatgaacgctggcggcgtgcctaacacatgcaagtcgagcggagtatgacgagtgcttgcacatgtcatacttagcggcggatgggtgaggaacgcgtggagaacctgcccctcacagggggataacagttggaaacgactgttaataccgcatatgctcacggtgccgcatggcacagggaggaaagatttcatcggtgagagat

SEQ ID NO: 1532 - DNA, 225 bp, unidentified
  misc_feature 1..225: note = Encodes 16S rRNA from Clostridium XlVa
  source 1..225: mol_type = genomic DNA
agagtttgatcctggctcaggatgaacgctggcggcgtgcctaacacatgcaagtcgaacggaaattgctgattgaagctttcgggtggatttcagtaattttagtggcggacgggtgagtaacacgtgggtaacctgccctgtaccgggggataacagttggaaacggctgttaataccgcataagcgcacagcttcgcatgaagcagtgtgaaaaactccggt

SEQ ID NO: 1533 - DNA, 225 bp, unidentified
  misc_feature 1..225: note = Encodes 16S rRNA from Victivallis
  source 1..225: mol_type = genomic DNA
agagtttgatcatggctcagaatgaacgctggcggcatggattaggcatgcaagtcgaacgagaaagcggcttcggccgcgagtaaagtggcgaaagggtgagtagcacgtggggaacctgccccggggaccggaacaagcctgtgaaaacgggtctgagaccggatgtcgccccggcccgcatgggccggaggcgaaagattaatcgccccgggatggccccgc

SEQ ID NO: 1534 - DNA, 225 bp, unidentified
  misc_feature 1..225: note = Encodes 16S rRNA from Bacteroides
  source 1..225: mol_type = genomic DNA
agagtttgatcctggctcaggatgaacgctagctacaggcctaacacatgcaagtcgcggggcagcatgggcgtagcaatacgcctgatggcgaccggcgcacgggtgcgtaacgcgtatccaacctggcccttactcgggtatagccctgcgaaagtaggattaatccccgatgttgtcaagcgatagccttttcacttgaccaaagagtttttcggtaaggga

SEQ ID NO: 1535 - DNA, 225 bp, unidentified
  misc_feature 1..225: note = Encodes 16S rRNA from unidentified taxa
  source 1..225: mol_type = genomic DNA
agagtttgatcctggctcaggatcaacgctggcggcgtgcctaatgcatgcaagtcgagcggggtgtccttcggggcgcttacgcggcggacgggtgcggaacacgtgggcaacctgccctgaggtgggggatagccggtggaaacaccgggtaattccgcatacggtcacggaccggggggtctgtgaggaaaggctcgtaagagtcgccttgggaggggcctg

SEQ ID NO: 1536 - DNA, 225 bp, unidentified
  misc_feature 1..225: note = Encodes 16S rRNA from Clostridium XlVa
  source 1..225: mol_type = genomic DNA
agagtttgatcctggctcaggatgaacgctggcggcgtgcctaacacatgcaagtcgaacgaagcatgctggaaagagaccttcggggaaccggaaatcatgacttagtggcggacgggtgagtaacgcgtgggcaacctgccgtacacagggggacaacagctggaaacggctgctaataccgcataagcgcacagcttcgcatggagcggtgtgaaaagcatt

SEQ ID NO: 1537 - DNA, 225 bp, unidentified
  misc_feature 1..225: note = Encodes 16S rRNA from Prevotella
  source 1..225: mol_type = genomic DNA
agagtttgatcatggctcaggatgaacgctagctacaggcttaacacatgcaagtcgaggggcagcatggcggtagcaataccgccgatggcgaccggcgcacgggtgagtaacgcgtatccaaccttccccctggtagggcatagcccggcgaaagtcggattaataccctatgttttcctttgacggcatccgacgaggaacaaagatttatcgcccggggat

SEQ ID NO: 1538 - DNA, 225 bp, unidentified
  misc_feature 1..225: note = Encodes 16S rRNA from unidentified taxa
  source 1..225: mol_type = genomic DNA
agagtttgatcctggctcagaacgaacgctggtagcgtggattaggcatgcaagtcgaacgggatcagccggttagcaataattggctgtgagagtggcggattggggaggaacacgtgagcaacctgcccttgagttggggaaaaccgttggaaacgacggctaataccggatgtggcgcccggagacatcttcggagcgctaaagggggccgcaaggctcccg

SEQ ID NO: 1539 - DNA, 225 bp, unidentified
  misc_feature 1..225: note = Encodes 16S rRNA from Clostridium XlVa
  source 1..225: mol_type = genomic DNA
agagtttgatcatggctcaggatgaacgctggcggcgtgcctaacacatgcaagtcgaacgaagaccccgaagcggaaatttcggttgaagtggagggaggactgagtggcggacgggtgagtaacgcgtggataacctgccccatacagggggatagcagttggaaacgactgataataccgcatgagcgcacgtggagacatctccatgtgtgaaaagaaata

SEQ ID NO: 1540 - DNA, 225 bp, unidentified
  misc_feature 1..225: note = Encodes 16S rRNA from Treponema
  source 1..225: mol_type = genomic DNA
agagtttgatcatggctcagaacgaacgctggcggcgcgtcttaagcatgcaagtcgagcgggaatagaggtgcttgcacttctatgagagcggcggactggtgagtaacacgtaggcaacgtacccttcggacggggatagccggcagaaatgtcgggtaataccggatgtgaacttacttcgtgaaggagtaagtggaaaggagcttcggctccgccggagga

SEQ ID NO: 1541 - DNA, 225 bp, unidentified
  misc_feature 1..225: note = Encodes 16S rRNA from Pyramidobacter
  source 1..225: mol_type = genomic DNA
agagtttgatcctggctcaggatgaacgctggcggcgtgcttaacacatgcaagttgcgcggggatctgacgatgagacttcggtggatttgttagatcctagcggcggacgggtgagtaaagcacaaggacgtgtccgagcgaggggggcaactgcgggaaaccgtagctaataccccgtaagccgagaggtgaaagcagcaatgcgcgagcggagcgacttgt

SEQ ID NO: 1542 - DNA, 225 bp, unidentified
  misc_feature 1..225: note = Encodes 16S rRNA from Robinsoniella
  source 1..225: mol_type = genomic DNA
agagtttgatcctggctcaggatgaacgctggcggcgtgcctaacacatgcaagtcgaacggggtgtcaatcttcggaaagacacttagtggcggacgggtgagtaacgcgtgggtaacctgcctcatacagggggatagcagttggaaacgactgataataccgcataagcgcacagcatcgcatgatgcagtgtgaaaaactccggtggtatgagatggaccc

SEQ ID NO: 1543 - DNA, 225 bp, unidentified
  misc_feature 1..225: note = Encodes 16S rRNA from Lachnospiracea incertae sedis
  source 1..225: mol_type = genomic DNA
agagtttgatcatggctcaggatgaacgctggcggcgtgcttaacacatgcaagtcgagcgaagcactctggaagattccttcgggatgattccttagtgacttagcggcggacgggtgagtaacgcgtgggcaacctgccttgtacagggggataacagttagaaatgactgctaataccgcataagcacacagcatggcatcatgcagtgtgaaaaactccgg

SEQ ID NO: 1544 - DNA, 225 bp, unidentified
  misc_feature 1..225: note = Encodes 16S rRNA from Clostridium XI
  source 1..225: mol_type = genomic DNA
agagtttgatcctggctcaggacgaacgctggcggcgtgcctaacacatgcaagtcgagcgaggatttagcggaaggaagcttcggcagagagaaggtaaatcttagcggcggacgggtgagtaacgcgtgaacaatctgtcccggacagggggataacacatggaaacaggtgctaataccgcataagaccacagcgtcgcatggcggtggggtaaaaggagaa

SEQ ID NO: 1545 - DNA, 225 bp, unidentified
  misc_feature 1..225: note = Encodes 16S rRNA from Bifidobacterium
  source 1..225: mol_type = genomic DNA
agagtttgatcatggctcaggatgaacgctggcggcgtgcttaacacatgcaagtcgaacgggatccctggcagcttgctgccggggtgagagtggcgaacgggtgagtaatgcgtgaccgacctgccccatgcaccggaatagctcctggaaacgggtggtaatgccggatgttccacatgagcgcatgcgagtgtgggaaaggctttttgcggcatgggatgg

SEQ ID NO: 1546 - DNA, 225 bp, unidentified
  misc_feature 1..225: note = Encodes 16S rRNA from Bacteroides
  source 1..225: mol_type = genomic DNA
agagtttgatcctggctcaggatgaacgctagctacaggcttaacacatgcaagtcgaggggcagcggggagtggcaacactctgccggcgaccggcgcacgggtgagtaacacgtatccaacctgccctgagcttggggatagccctctgaaaggaggattaatacccgatgtggttgtttggcgacatcgcctttcaattaaagatttatcggctcatgatgg

SEQ ID NO: 1547 - DNA, 225 bp, unidentified
  misc_feature 1..225: note = Encodes 16S rRNA from Gordonibacter
  source 1..225: mol_type = genomic DNA
agagtttgatcatggctcaggatgaacgctggcggcgtgcttaacacatgcaagtcgaacgattaaaccggctccggccggaaatagagtggcgaacgggtgagtaacacgtgaccaacctgccccgcgcaccgggacagcctcgcgaaagcgggattaataccggatactccggcggcgcgggatggggtcgcggcccatcaggtagtgggtcgggtagaggcc

SEQ ID NO: 1548 - DNA, 225 bp, unidentified
  misc_feature 1..225: note = Encodes 16S rRNA from Enterorhabdus
  source 1..225: mol_type = genomic DNA
agagtttgatcatggctcaggatgaacgctggcggcgtgcctaacacatgcaagtcgaacggttaagccggcttcggccgggaataaagtggcgaacgggtgagtaacacgtgaccaacctgccccgcgcaccgggacagccccccgaaagggggattaataccggatactccgcggcccccgcatgggggccgcgggaaagctccggcggcgcgggatggggtc

SEQ ID NO: 1549 - DNA, 225 bp, unidentified
  misc_feature 1..225: note = Encodes 16S rRNA from Lactobacillus
  source 1..225: mol_type = genomic DNA
agagtttgatcctggctcaggacgaacgctggcggcgtgcctaatacatgcaagtcgaacgagtttgcttttaatgaaggcggtgcttgcaccaactgatttaaaaataaacgagtggcggacgggtgagtaacacgtgggtaacctaccctaaagtgggggataacatttggaaacagatgctaataccgcataatattaaaaaccacatggtttttaattgaa

SEQ ID NO: 1550 - DNA, 225 bp, unidentified
  misc_feature 1..225: note = Encodes 16S rRNA from Bacteroides
  source 1..225: mol_type = genomic DNA
agagtttgatcatggctcaggatgaacgctagctacaggcttaacacatgcaagtcgaggggcagcataggggaggtttcggccacccccgatggcgaccggcggatgggtgagtaacgcgtatccaacctgcccctgtcccggggacagcccttagaaatgaggattaacccccgatggcgcggagaggccgcatggcttttccgccaaatgcgaaggacaggg

SEQ ID NO: 1551 - DNA, 225 bp, unidentified
  misc_feature 1..225: note = Encodes 16S rRNA from Prevotella
  source 1..225: mol_type = genomic DNA
agagtttgatcatggctcaggatgaacgctagctacaggcttaacacatgcaagtcgaggggcatcaggacggtagcttgctatcgttgctggcgaccggcgcacgggtgcgtaacacgtatcgaacctacctgccgctcggggatagccctctgaaaggaggattaatacccgatggtttccaatggggacatccccgttggaataaagattcattggcggcgg

SEQ ID NO: 1552 - DNA, 225 bp, unidentified
  misc_feature 1..225: note = Encodes 16S rRNA from Tannerella
  source 1..225: mol_type = genomic DNA
agagtttgatcatggctcaggatgaacgctagcgacaggcctaacacatgcaagtcgagggagaagttagaagtagcttgctacggaagatggaaaccggcgcacgggtgcgtaacaggtgtgcaatctgtccatagtcggggaatagcccagcgaaagttggattaaagctccatgtgagtgagaatcgcatgtttttcacttgaaacgtaaggactatgggtg

SEQ ID NO: 1553 - DNA, 225 bp, unidentified
  misc_feature 1..225: note = Encodes 16S rRNA from Bacteroides
  source 1..225: mol_type = genomic DNA
agagtttgatcctggctcaggatgaacgctagctacaggcttaacacatgcaagtcgaggggcatcaggggactagcttgctagtcctgctggcgaccggcgcacgggtgagtaacacgtatccaacctgcccccagcttggggatagccctctgaaaggaggattaatacccgatatgcttgttctccggcatcggaggacaatcaaagattcatcggctgtgg

SEQ ID NO: 1554 - DNA, 225 bp, unidentified
  misc_feature 1..225: note = Encodes 16S rRNA from Prevotella
  source 1..225: mol_type = genomic DNA
agagtttgatcatggctcaggatgaacgctagcggcaggcttaacacatgcaagtcgaggggcagcgcggagtagcaatactttggcggcgaccggcggaagggtgcgtaacgcgtgagcaacctgcccgtgtccggggcataatcggtggaaacgccgtctaattccccatacgttgctgggcgacatcgcttagtaatgaaaacttattgcggacacggatgg

SEQ ID NO: 1555 - DNA, 225 bp, unidentified
  misc_feature 1..225: note = Encodes 16S rRNA from Clostridium XlVb
  source 1..225: mol_type = genomic DNA
agagtttgatcatggctcaggatgaacgctggcggcgtgcctaacacatgcaagtcgaacgagagaggcgaagagcttgctttttgccaatcgagtggcggacgggtgagtaacgcgtgagcaacctgccttacattggggaataacgtttggaaacggacggtaataccgcatatgcagacaagtacggcatcgtacggtttggaaagatttatcgatgtaaga

SEQ ID NO: 1556 - DNA, 225 bp, unidentified
  misc_feature 1..225: note = Encodes 16S rRNA from Gelidibacter
  source 1..225: mol_type = genomic DNA
agagtttgatcatggctcaggataaacgctagcggcaggcctaacacatgcaagtcgagcggcagcgggagtggcaacacttgccggcgagcggcggacgggtgagtaacgcgtatgcaacctgcccaccacacggagatagccgaccgaaaggacgattaaactccgatggcattgggactcggcatcgggatccaattaaatatttataggtggtggatgggc

SEQ ID NO: 1557 - DNA, 225 bp, unidentified
  misc_feature 1..225: note = Encodes 16S rRNA from unidentified taxa
  source 1..225: mol_type = genomic DNA
agagtttgatcatggctcaggatgaacgctggcggcgtgcttcatacatgcaagtcgaacgtgaagctgacttcggtcagtggaaagtggcggacgggtgagtaatacataggaaatctgcccttagctgggggacaacagttggaaacgactgctaataccgcatatgagcttagctgaaatgctaatcttgaaaactacggtggctaaggatgagcctgtgcc

SEQ ID NO: 1558 - DNA, 225 bp, unidentified
  misc_feature 1..225: note = Encodes 16S rRNA from Rhodoplanes
  source 1..225: mol_type = genomic DNA
agagtttgatcatggctcagaacgaacgctggcggcaggcttaacacatgcaagtcgaacgccccgcaaggggagtggcagacgggtgagtaacacgtgggaacgtgccttttggttcggaacaacttcgggaaactggagctaataccggataagcccttcgggggaaagatttatcgccaaaagatcggcccgcgtctgattagctagttggtggggtaatgg

SEQ ID NO: 1559 - DNA, 225 bp, unidentified
  misc_feature 1..225: note = Encodes 16S rRNA from Selenomonas
  source 1..225: mol_type = genomic DNA
agagtttgatcatggctcaggacgaacgctggcggcgtgcttaacacatgcaagtcgaacgagacggatagaagcttgcttttagaagtcgagtggcaaacgggtgagtaacgcgtagacaacctgcctctgggatggggacaacagcccgaaagggctgctaataccgaatgaaatggtttcttctcctgaagttatcatgaaagatggcctctatttataagc

SEQ ID NO: 1560 - DNA, 225 bp, unidentified
  misc_feature 1..225: note = Encodes 16S rRNA from Escherichia/Shigella
  source 1..225: mol_type = genomic DNA
agagtttgatcatggctcagattgaacgctggcggcaggcctaacacatgcaagtcgaacggtaacaggaagcagcttgctgcttcgctgacgagtggcggacgggtgagtaatgtctgggaaactgcctgatggagggggataactactggaaacggtagctaataccgcataatgtcgcaagaccaaagagggggaccttcgggcctcttgccatcggatgtg

SEQ ID NO: 1561 - DNA, 225 bp, unidentified
  misc_feature 1..225: note = Encodes 16S rRNA from Rikenella
  source 1..225: mol_type = genomic DNA
agagtttgatcctggctcaggatgaacgctagcggcaggcttaacacatgcaagtcgaggggcagcaggccgggtagcaatacttggtgctggcgaccggcgcacgggtgcgtaacgcgtatgcaacctgcccgtaacaggggtataacggagggaaacttccactaatcccccatattgtcactttttcgcatggggaggtgacgaaagcttaattgtggttac

SEQ ID NO: 1562 - DNA, 225 bp, unidentified
  misc_feature 1..225: note = Encodes 16S rRNA from Coprococcus
  source 1..225: mol_type = genomic DNA
agagtttgatcatggctcaggatgaacgctggcggcgtgcttaacacatgcaagtcgaacggaacattccacccgaagattgaagaagcttgcttcggattgattcaaccggaatgtttagtggcggacgggtgagtaacgcgtgggtaacctaccttacacagggggataacagttagaaatgactgctaataccgcataagcgcacggtaccgcatggtacag

SEQ ID NO: 1563 - DNA, 225 bp, unidentified
  misc_feature 1..225: note = Encodes 16S rRNA from Clostridium sensu stricto
  source 1..225: mol_type = genomic DNA
agagtttgatcctggctcaggacgaacgctggcggcgcgcctaacacatgcaagtcgaacgggactagtgaccggagcttagaatttctctaggttgcgttcactagttcagtggcggacgggtgagtaaagcatgagtaactttcccattagtggggaatagcttttggaaacagaagataataccgcatacatcgttgaggactcatgttctcttcggaaaag

SEQ ID NO: 1564 - DNA, 225 bp, unidentified
  misc_feature 1..225: note = Encodes 16S rRNA from Hyphomicrobium
  source 1..225: mol_type = genomic DNA
agagtttgatcctggctcagaacgaacgctggcggcaggcctaacacatgcaagtcgaacgctgtagcaatacagagtggcagacgggtgagtaacacgtgggaatcttcctatcggtacggaatagctcagggaaacttggggtaataccgcatacgcccttcgggggaaagatttatcgccgatagatgagcccgcgtctgattagctagttggtgaggtaat

SEQ ID NO: 1565 - DNA, 225 bp, unidentified
  misc_feature 1..225: note = Encodes 16S rRNA from Erysipelotrichaceae incertae sedis
  source 1..225: mol_type = genomic DNA
agagtttgatcatggctcaggatgaacgctggcggcatgcctaatacatgcaagtcgaacgaagcgacctcaacagaattgtgcttgcacaaggaagatgagattctcgcttagtggcgaacgggtgagtaacacgtaggtaacctgcccatctacctgggacaacagttagaaatgactgctaaaaccggataggtaacattgaggcatctcgatgttattaaa

SEQ ID NO: 1566 - DNA, 225 bp, unidentified
  misc_feature 1..225: note = Encodes 16S rRNA from unidentified taxa
  source 1..225: mol_type = genomic DNA
agagtttgatcctggctcagaacgaacgctggtagcgtggattaggcatgcaagtcgaacgggatcaccgatatagtaatattgaggtgtgagagtggcggattggggaggaacacgtgagcaacctgccttggagtcggggaaaaccgttggaaacgacggctaataccggatgtggcgcccggtgacatcaccggagcgctaaagggggccgcaaggctctcg

SEQ ID NO: 1567 - DNA, 225 bp, unidentified
  misc_feature 1..225: note = Encodes 16S rRNA from Staphylococcus
  source 1..225: mol_type = genomic DNA
agagtttgatcctggctcaggatgaacgctggcggtatgcctaatacatgcaagtcgagcgagagacttcggtctctagcggcgaacgggtgagtaacaagttggtaatctgcctattagttggggatacccaggcgaaagcttggctaataccgtaatacgtaataagctgaaatgcttattataaaaggcgcttcggcgtcgctaatagatgagcctgcttct

SEQ ID NO: 1568 - DNA, 225 bp, unidentified
  misc_feature 1..225: note = Encodes 16S rRNA from unidentified taxa
  source 1..225: mol_type = genomic DNA
agagtttgatcatggctcagaacgaacgctggtagcgtggattaggcatgcaagtcgaacgggatccatgaagtagcaatacggattggtgagagtggcggaagggcgaggaacacgtgggcaacctgtccaggaggtggggaaaacctcgggaaactgaggctaataccgaatgtggcgcccgcacgcatgtgcggagcgccaaagggggcgaaagctccccct

SEQ ID NO: 1569 - DNA, 225 bp, unidentified
  misc_feature 1..225: note = Encodes 16S rRNA from Victivallis
  source 1..225: mol_type = genomic DNA
agagtttgatcctggctcagaacgaacgctggcggcatggattaggcatgcaagtcgaacgaagtagcaatacttagtggcgcaagggtgaggaacacgtgagtgacctgcccgcaagtttggaacagctcctggaaacgggaattaataccggatgtgatcatattgctgcatggtgatatgattaaagcagtaatgcgcttgcggatgggctcgcgtcccatt

SEQ ID NO: 1570 - DNA, 225 bp, unidentified
  misc_feature 1..225: note = Encodes 16S rRNA from Selenomonas
  source 1..225: mol_type = genomic DNA
agagtttgatcctggctcaggacgaacgctggcggcgtgcttaacacatgcaagtcgaacgagggaattcttttcggagaatataccgagtggcaaacgggtgagtaacgcgtaggcaacctgccttcaagatggggacaacagtccgaaagggctgctaataccgaatgacatgtctgaaccgcatgggacggacagcaaagacggcctccaaactatgctgtc

SEQ ID NO: 1571 - DNA, 225 bp, unidentified
  misc_feature 1..225: note = Encodes 16S rRNA from Desulfobulbus
  source 1..225: mol_type = genomic DNA
agagtttgatcctggctcagaacgaacgctggcggcgtgcttaacacatgcaagtcgaacgcgaaagcggcttcggccgtgagtagagtggcgcacgggtgagtaacgcgtagataacctgtcttcatatccgggataacacgccgaaaggggtactaataccggatatactcgcatttcaataggtgaggcgaggaaaggtggcctctgattcaagctactgta

SEQ ID NO: 1572 - DNA, 225 bp, unidentified
  misc_feature 1..225: note = Encodes 16S rRNA from Clostridium III
  source 1..225: mol_type = genomic DNA
agagtttgatcctggctcaggacgaacgctggcggcgtgcctaacacatgcaagtcgagcggagccaattgacggatcccttcggggtgaagacgaggaagcttagcggcggacgggtgagtaacgcgtgagtaacctgcctgtaagagggggataattcctggaaacggggactaataccgcatattgagcacatatcgcatggtatatgcttgaaagatttat

SEQ ID NO: 1573 - DNA, 225 bp, unidentified
  misc_feature 1..225: note = Encodes 16S rRNA from Spirochaeta
  source 1..225: mol_type = genomic DNA
agagtttgatcatggctcagaacgaacgctggcggtgcgttttaagcatgcaagttgagcggcagtagtagcaatactatgagagcggcggacgggtgagtaacacgtggataatctaccttgaagtttggaatataccgtggaaacacggagtaataccggataagacggtacttggggacaagtattgggaaaggtgctacggcatcgctttaagatgagtcc

SEQ ID NO: 1574 - DNA, 225 bp, unidentified
  misc_feature 1..225: note = Encodes 16S rRNA from Kordia
  source 1..225: mol_type = genomic DNA
agagtttgatcctggctcaggataaacgctagcggcaggcctaacacatgcaagtcgagcggtaacacggtgtagcaatacattggtgacgagcggcggacgggtgagtaacgcgtatgcaacctacccactacacaaggatagccttccgaaaggaggattaatacttgatagtactctaagatggcatcaaaacagagttaaagatttatcggtagtggatgg

SEQ ID NO: 1575 - DNA, 225 bp, unidentified
  misc_feature 1..225: note = Encodes 16S rRNA from Bosea
  source 1..225: mol_type = genomic DNA
agagtttgatcctggctcagagcgaacgctggcggcaggcttaacacatgcaagtcgaacgcatccttcgggatgagtggcagacgggtgagtaacacgtgggaacgtacctctttgttcggaataactcatggaaacgtgagctaataccggatacgcccttttggggaaagatttatcgcagagagatcggcccgcgtctgattagctagttggtgaggtaat

SEQ ID NO: 1576 - DNA, 225 bp, unidentified
  misc_feature 1..225: note = Encodes 16S rRNA from Enterococcus
  source 1..225: mol_type = genomic DNA
agagtttgatcctggctcaggacgaacgctggcggcgtgcctaatacatgcaagttgaacgcttctttctgatcgaacttcggttcaccaagaaagaagagtagcgaacgggtgagtaacacgtgggtaacctgcccatcagcgggggataacacttggaaacaggtgctaataccgcataatactttttctctcatgagtgaaagttgaaaggcgcttttgcgt

SEQ ID NO: 1577 - DNA, 225 bp, unidentified
  misc_feature 1..225: note = Encodes 16S rRNA from Clostridium III
  source 1..225: mol_type = genomic DNA
agagtttgatcatggctcaggacgaacgctggcggcgtgcctaacacatgcaagtcgaacggagctatttagacagaacccttcggggggaagattacttagcttagtggcggacgggtgagtaacgcgtgagtaacctgcccataagagggggataacacagagaaatttgtgctaataccgcatatagatataatatcgcatggtaatgtattgaaagattta

SEQ ID NO: 1578 - DNA, 225 bp, unidentified
  misc_feature 1..225: note = Encodes 16S rRNA from Xanthobacter
  source 1..225: mol_type = genomic DNA
agagtttgatcatggctcagagcgaacgctggcggcaggcctaacacatgcaagtcgagcgcccagcaatgggagcggcagacgggtgagtaacgcgtggggatctacccattggtacggaataacccagggaaacttggactaataccgtatgtgtccttcgggagaaagatttatcgccaatggatgaacccgcgtctgattagctagttggtgaggtaaagg

SEQ ID NO: 1579 - DNA, 225 bp, unidentified
  misc_feature 1..225: note = Encodes 16S rRNA from Lactobacillus
  source 1..225: mol_type = genomic DNA
agagtttgatcatggctcaggacgaacgctggcggcatgcctaatacatgcaagtcgaacgagttcccgttgattgacgtgcttgcactgatttcaacattggaacgagtggcgaactggtgagtaacacgtggaaaacctgcccagaagcaggggataacacttggaaacaggtgctaataccgtataacaacaaaaaccgcatggtttttgtttgaaaggtgg

SEQ ID NO: 1580 - DNA, 225 bp, unidentified
  misc_feature 1..225: note = Encodes 16S rRNA from Prevotella
  source 1..225: mol_type = genomic DNA
gctttgatcatggctccggatgcacgctcgctccaggcttaacacatgccagtcgaggggtaacggcagtgaagcttgctttactggccgacgaccggcgcacgggtgagtaacgcgtatccaacctgcccatgactcagggataacctttcgaaagggagcctaatacctgatgttgtgagacgagggcatctgagtgtcaccaaagattcatcggtcatggat

SEQ ID NO: 1581 - DNA, 225 bp, unidentified
  misc_feature 1..225: note = Encodes 16S rRNA from Acidaminococcus
  source 1..225: mol_type = genomic DNA
agagtttgatcatggctcaggacgaacgctggcggcgtgcttaacacatgcaagtcgaacgggaaacttatttcggtaagtttctagtggcgaacgggtgagtaacgcgtgggtaacctgccctccagatggggacaacattccgaaagggatgctaataccgaatacgatccctccaccgcatggaggagggatgaaagatggcctctgcttgcaagctatcgc

SEQ ID NO: 1582 - DNA, 225 bp, unidentified
  misc_feature 1..225: note = Encodes 16S rRNA from Eubacterium
  source 1..225: mol_type = genomic DNA
aggtttgatcctggctcaggatgaacgctggcggcgtgcctaacacatgcaagtcgagcgagaaacctatgtgatgaaacttcggtagaatcttttaggtggaaagcggcggacgggtgagtaacgcgtaggcaacctgcccctagcagggggatagccattggaaacgatgattaaaaccccataatgcagatttatcacatgttggatctgccaaagatttat

SEQ ID NO: 1583 - DNA, 225 bp, unidentified
  misc_feature 1..225: note = Encodes 16S rRNA from Bacteroides
  source 1..225: mol_type = genomic DNA
agagtttgatcctggctcaggatgaacgctagctacaggcttaacacatgcaagtcgaggggcagcatgatcgaagcttgctttgatcgatggcgaccggcgcacgggtgcgtaacacgtatccaatctacccaccgctcagggatagccttgcgaaagtaagattaatacctgatggtttccttatgtggcatcatgtatggaataaagattcatcggcgatgg

SEQ ID NO: 1584 - DNA, 225 bp, unidentified
  misc_feature 1..225: note = Encodes 16S rRNA from Clostridium XlVa
  source 1..225: mol_type = genomic DNA
agagtttgatcctggctcaggataaacgctggcggcgcacataagacatgcaagtcgaacgaacgacttcaaattgttttactttttgaagaagttagtggcggactggtgaggaacacgtaaacaatctgcctataagaggggaacaacattgagaaatcagtgctaataccgcataagcctacgctatcgcatgataaagtaggaaaaggagtaatccgctta

SEQ ID NO: 1585 - DNA, 225 bp, unidentified
  misc_feature 1..225: note = Encodes 16S rRNA from Lactobacillus
  source 1..225: mol_type = genomic DNA
agagtttgatcctggctcaggacgaacgctggcggcatgcctaatacatgcaagtcgaacgagcttccgttgaatgacgtgcttgcactgattttaacaatgaagcgagtggcgaactggtgagtaacacgtgggaaatctgcccagaagcaggggataacacttggaaacaggtgctaataccgtataacaacaaaatccgcatggattttgtttgaaaggtgg

SEQ ID NO: 1586 - DNA, 225 bp, unidentified
  misc_feature 1..225: note = Encodes 16S rRNA from Devosia
  source 1..225: mol_type = genomic DNA
agagtttgatcctggctcagaacgaacgctggcggcaggcttaacacatgcaagtcgaacggtctcttcggaggcagtggcagacgggtgagtaacgcgtgggaatctacctagttctacggaacaacagttggaaacgactgctaataccgtatacgccctatgggggaaagatttatcggaattagatgagcccgcgtaagattagctagttggtgaggtaat

SEQ ID NO: 1587 - DNA, 225 bp, unidentified
  misc_feature 1..225: note = Encodes 16S rRNA from Pedobacter
  source 1..225: mol_type = genomic DNA
agagtttgatcatggctcaggatgaacgctagcggcaggcttaacacatgcaagtcgaggggcagcgcgggggtagcaatacacctggcggcgaccggcggaagggtgcgtaacgcgtgagcaacatgcccgtcacagggggataaaagatggaaacgtctcctaataccccgtaacatcatttgtggcatcgcagatggttgaaagctattatgcggtgacgga

SEQ ID NO: 1588 - DNA, 225 bp, unidentified
  misc_feature 1..225: note = Encodes 16S rRNA from Clostridium IV
  source 1..225: mol_type = genomic DNA
agagtttgatcctggctcaggacgaacgctggcggcgtgcttaacacatgcaagtcgaacgggactgcccgaatgaagttttcggatggaatttgggtatgtttagtggcgaacgggtgagtaacgcgtgagtaacctgccttggagagggggacaacagccggaaacggctgctaataccgcatgacgtcacgggagggcatccttctgtgaccaaagatttat

SEQ ID NO: 1589 - DNA, 225 bp, unidentified
  misc_feature 1..225: note = Encodes 16S rRNA from Clostridium XlVa
  source 1..225: mol_type = genomic DNA
agagtttgatcatggctcaggatgaacgctggcggcgtgcctaacacatgcaagtcgaacgaagcacttctcccgttgaagttgattagcttgctatgaagcggaaacatttgaagtgacttagtggcggacgggtgagtaacgcgtgggtaacctgccctgtactgggggacaacagttggaaacggctgctaataccgcataagcgcacagcatcgcatggtg

SEQ ID NO: 1590 - DNA, 225 bp, unidentified
  misc_feature 1..225: note = Encodes 16S rRNA from Corynebacterium
  source 1..225: mol_type = genomic DNA
agagtttgatcatggctcaggatgaacgctggcggcgtgcttaacacatgcaagtcgaacggaaaggccttgtgcttgcacaaggtactcgagtggcgaacgggtgagtaacacgtgggtgatctgccctgcactgtgggataagcctgggaaactgggtctaataccatataggaccgcactttggatggtgtggtggaaagcttttgcggtgtgggatgagcc

SEQ ID NO: 1591 - DNA, 225 bp, unidentified
  misc_feature 1..225: note = Encodes 16S rRNA from Spirochaeta
  source 1..225: mol_type = genomic DNA
agagtttgatcctggctcagaacgaacgctggcggcgcgtcttaagcatgcaagtcgagcgggattatggtgcttgcaccatatgagagcggcggactggtgagtaacgcgtaggtgacgaaccccccggacggggacagcctctagaaatagagggtaataccggatgaggcgtgcagtgttagaggctgcacgtgaaagcagctccggctgcgccgggggatc

SEQ ID NO: 1592 - DNA, 225 bp, unidentified
  misc_feature 1..225: note = Encodes 16S rRNA from Anaeroplasma
  source 1..225: mol_type = genomic DNA
agagtttgatcatggctcaggatgaacgctggcggcgtgcctaatacatgcaagtcgaacgaggtttctcttcggggaaaccgagtggcgaacgggtgagtaacacataggtaatctacctttcagaatgggatacccaagagaaattttggctaataccgtatacaatcatttctccgcatggagatttgatgaaaggggctccaaagcctcgctgttagatga

SEQ ID NO: 1593 - DNA, 225 bp, unidentified
  misc_feature 1..225: note = Encodes 16S rRNA from Clostridium XlVa
  source 1..225: mol_type = genomic DNA
agagtttgatcatggctcaggatgaacgctggcggcgtgcttaacacatgcaagtcgaacgaggaatttcagatgaagttttcggatggattctggctttccgagtggcggacgggtgagtaacgcgtgggtaacctgccttacacagggggacaacagccggaaacggctgctaataccgcataacctgctagagtcgcatgactcagacagaaaagatttatc

SEQ ID NO: 1594 - DNA, 183 bp, unidentified
  misc_feature 1..183: note = Encodes 16S rRNA from Lachnospiracea incertae sedis
  source 1..183: mol_type = genomic DNA
agagtttgatcatggctcaggataaacgctggcggcgtgctttggacaatgggggcaaccctgatccagcgacgccgcgtgaacgaagaagtatctcggtatgtaaagttctatcagcagggaagataatgacggtacctgactaagaagcaccggctaaatacgtgccagcagccgcgtaat

SEQ ID NO: 1595 - DNA, 225 bp, unidentified
  misc_feature 1..225: note = Encodes 16S rRNA from Saccharofermentans
  source 1..225: mol_type = genomic DNA
agagtttgatcatggctcaggacgaacgctggcggcgtgcctaacacatgcaagtcgagcgaggacaatggtttcggctgttgttcgagcggcggacgggtgagtaacgcgtgaacaatctgtccctgacagggggataacacttggaaacaggtgctaataccgcataagaccacgggatcgcatggtactggggtcaaaggagcaatccggtgaggggtgagt

SEQ ID NO: 1596 - DNA, 225 bp, unidentified
  misc_feature 1..225: note = Encodes 16S rRNA from Slackia
  source 1..225: mol_type = genomic DNA
agagtttgatcatggctcaggatgaacgccggcggcgcgcctaacacatgcaagtcgagcggcggaccggctccggccggcgagcagcggcgaacgggtgagtaacgcgtgggcaacctgccccccccctcgggaatagcggccggaaacggccggtaatgcccgacggcccccgggagaggcatctcccccggggcaaagccctggcggggggggatgggcccg

SEQ ID NO: 1597 - DNA, 225 bp, unidentified
  misc_feature 1..225: note = Encodes 16S rRNA from Limibacter
  source 1..225: mol_type = genomic DNA
agagtttgatcatggctcaggatgaacgctggcggcaggcctaatacatgcaagtcgcacgggatcgctccttcgggggcgtgagagtggcggacgggtgcgcaacgcgtatgcaaccagccccctgcaggcggatagccggtggaaacgccggataatacgccatgtttcgggtagagggcatcctttacctgagaaagcggagacgcggcgggggacgggcat

SEQ ID NO: 1598 - DNA, 225 bp, unidentified
  misc_feature 1..225: note = Encodes 16S rRNA from Sphingobium
  source 1..225: mol_type = genomic DNA
agagtttgatcatggctcagagcgaacgctagcggcatgctttatacatgcaagtcgaacgaacgagtttatattgagtagcaatacgatttataaatgagttagtggcgaacgggtgagtaatatataggaatttgcccagtagtgggggacaacagttagaaatgactgctaataccgcatacgtccgagaggagaaagatttatcgctattggagaagccta

SEQ ID NO: 1599 - DNA, 225 bp, unidentified
  misc_feature 1..225: note = Encodes 16S rRNA from Clostridium XlVa
  source 1..225: mol_type = genomic DNA
agagtttgatcatggctcaggatgaacgctggcggcgtgcttaacacatgcaagtcgaacgaagcatctttatatgatccctttggggtgatgaattgatgactgagtggcggacgggtgagtaacgcgtgggaaacctgccctgtaccgggggatagcagttggaaacggctgataataccgcataagcgcacagtaagacatcttaccgtgtgaaaaactccg

SEQ ID NO: 1600 - DNA, 225 bp, unidentified
  misc_feature 1..225: note = Encodes 16S rRNA from Riemerella
  source 1..225: mol_type = genomic DNA
agagtttgatcatggctcaggatgaacgctagcgggaggcctaacacatgcaagccgagcgggatttagtagttagcttgctaactactgatgagagcggcgtacgggtgcggaacacgtgtgcaacctgcctttatctgggagatagcctttcgaaaggaagattaatatcccataatatattgattggcatcgattaatattgaaagctccggcggataaaga

SEQ ID NO: 1601 - DNA, 225 bp, unidentified
  misc_feature 1..225: note = Encodes 16S rRNA from Saccharofermentans
  source 1..225: mol_type = genomic DNA
agagtttgatcatggctcaggacgaacgctggcggcgtgcctaacacatgcaagtcgagcggactttcatcaggaaggtgcttgcaccggaaagatggaagttagcggcggacgggtgagtaacgcgtgagcaatctgtcccatacagggggataataccgcgaaagaggttctaataccgcatgagaccacagtgaggcatctcacaggggtcaaaggagcaat

SEQ ID NO: 1602 - DNA, 225 bp, unidentified
  misc_feature 1..225: note = Encodes 16S rRNA from Bacteroides
  source 1..225: mol_type = genomic DNA
agagtttgatcctggctcaggatgaacgctagctacaggcttaacacatgcaagtcgaggggcagcaggagattagcttgctaatcttgctggcgaccggcgcacgggtgagtaacgcgtatccaacctgccccgtactcggggacagccctctgaaaggaggattaatacccgatattgtcgctgtgggacatcccatggtgacgaaagattcatcggtacggc

SEQ ID NO: 1603 - DNA, 225 bp, unidentified
  misc_feature 1..225: note = Encodes 16S rRNA from Prevotella
  source 1..225: mol_type = genomic DNA
agagtttgatcatggctcaggatgaacgctagctacaggcttaacacatgcaagtcgaggggcagcacggggtatggcttgccataccctggtggcgaccggcgcacgggtgagtaacgcgtatccaacctgcccgcaaccgcggaatagcccgccgaaaggcggattaatgccgcatgagctcgcgtgggggcatctgcccgcgagcaaaggtccattccggtt

SEQ ID NO: 1604 - DNA, 225 bp, unidentified
  misc_feature 1..225: note = Encodes 16S rRNA from Selenomonas
  source 1..225: mol_type = genomic DNA
agagtttgatcctggctcaggacgaacgctggcggcgtgcttaacacatgcaagtcgaacggggcgattgaaagcttgcttttatgagcctagtggcaaacgggtgagtaacgcgtgggcaacctaccggaaagatggggacaacatcccgaaaggggtgctaataccgaatgttgtatatgaggcgcatgcttcatatattaaaggattctatccgctttccga

SEQ ID NO: 1605 - DNA, 225 bp, unidentified
  misc_feature 1..225: note = Encodes 16S rRNA from Victivallis
  source 1..225: mol_type = genomic DNA
agagtttgatcctggctcagaacgaacgctggcggcatggattaggcatgcaagtcgaacgaagcagcaatgcttagtggcgcaagggtgaggaacgcgtgagtgacctacccgcaagtttggaacagctcctggaaacgggaattaataccggatgtgatcatagggctgcatggttttatgattaaagcagcaatgcgcttgcggatgggctcgcgtcccatt

SEQ ID NO: 1606 - DNA, 225 bp, unidentified
  misc_feature 1..225: note = Encodes 16S rRNA from Howardella
  source 1..225: mol_type = genomic DNA
agagtttgatcatggctcaggataaacgctggcggcgcacataagacatgcaagtcgaacggacttaacttctagcttgctagaagagcggttagtggcggactggtgagtaacacgtaagaaatctgcctatcagaggggaataacagtgagaaatcactgctaataccgcatatgccatagttatcgcatgatgacagtgggaaagaagcaattcgctgatag

SEQ ID NO: 1607 - DNA, 225 bp, unidentified
  misc_feature 1..225: note = Encodes 16S rRNA from Pelospora
  source 1..225: mol_type = genomic DNA
agagtttgatcatggctcaggatgaacgctggcggcgcgcctaacacatgcaagtcgaacgaaatgagtagcttcggttacgagtttagtggcggacgggtgagtaacgcgtggataatttgcctttcagtgggggatagctgagagaaatctcaattaataccgcataacataatttgttcgcatgagtgagttattaaagatgcaaatcgctggaagagaagt

SEQ ID NO: 1608 - DNA, 225 bp, unidentified
  misc_feature 1..225: note = Encodes 16S rRNA from Clostridium sensu stricto
  source 1..225: mol_type = genomic DNA
agagtttgatcatggctcaggacgaacgctggcggcgcgcctaacacatgcaagtcgaacgggactagtgaccggagcttagaggctttctaggttgcgatcactagttcagtggcggacgggtgagtaaagcatgagtaactttcccataagtggggaatagcttttggaaacagaagataataccgcatgaatcgttgaggacacatgttcacaacggaaaag

SEQ ID NO: 1609 - DNA, 225 bp, unidentified
  misc_feature 1..225: note = Encodes 16S rRNA from Selenomonas
  source 1..225: mol_type = genomic DNA
agagtttgatcatggctcagattgaacgctggcggcgtgcttaacacatgcaagtcgaacgagacggatagaagcttgcttttagaagtcgagtggcaaacgggtgagtaacgcgtagacaacctgcctctgggatggggacaacagcccgaaagggctgctaataccgaatgaaatggtttcttctcctgaagagatcatgaaagatggcctctaaattatgct

SEQ ID NO: 1610 - DNA, 225 bp, unidentified
  misc_feature 1..225: note = Encodes 16S rRNA from Fibrobacter
  source 1..225: mol_type = genomic DNA
agagtttgatcctggctcaggatgaacgctagcgacaggcctaacacatgcaagtcgagcgaggacgtagcaatacgagccgagcggcgaatgggtgagtaacgcgtaagcaatctgccccgcattccggaacaaccgtgccaacgcgcggctaatgccgggagccgtggcggtccacatgggccgttgacgaaagatttatcgatgcgggatgagcttgcgtcc

SEQ ID NO: 1611 - DNA, 225 bp, unidentified
  misc_feature 1..225: note = Encodes 16S rRNA from Clostridium III
  source 1..225: mol_type = genomic DNA
agagtttgatcctggctcaggacgaacgctggcggcgtgcctaacacatgcaagtcgaacgagaagtcttgaaatgattccttcgggatgaatggatagatggacagtggcggacgggcgagtaacgcgtgagtaacctgcccataagcgggggatagccgatggaaacgtcgagtaataccccatgacataattgagtcgcatggcttaattatcaaagattta

SEQ ID NO: 1612 - DNA, 225 bp, unidentified
  misc_feature 1..225: note = Encodes 16S rRNA from Sphingomonas
  source 1..225: mol_type = genomic DNA
agagtttgatcatggctcagaacgaacgctggcggcatgcctaacacatgcaagtcgaacgagatcttcggatctagtggcgcacgggtgcgtaacgcgtgggaatctgccctttggttcggaataacagttggaaacgactgctaataccggatgatgacgtaagtccaaagatttatcgccagaggatgagcccgcgtaggattagctagttggtgtggtaag

SEQ ID NO: 1613 - DNA, 225 bp, unidentified
  misc_feature 1..225: note = Encodes 16S rRNA from Selenomonas
  source 1..225: mol_type = genomic DNA
agagtttgatcatggctcaggacgaacgctggcggcgtgcttaacacatgcaagtcgaacggggcgattgaaagcttgcttttgagagcctagtggcaaacgggtgagtaacgcgtaggcaacctgccttcgggatggggacaacaggacgaaagccctgctaataccgaatgaagcatcctccctgcatggggagggtatgaaagatggcctctgaatatgcta

SEQ ID NO: 1614 - DNA, 225 bp, unidentified
  misc_feature 1..225: note = Encodes 16S rRNA from Eggerthella
  source 1..225: mol_type = genomic DNA
agagtttgatcctggctcaggatgaacgctggcggcgtgcctaacacatgcaagtcgaacgatgaaaccgccctcgggcggacatgaagtggcgaacgggtgagtaacacgtgaccaacctgccccgcgctccgggacagcctcgcgaaagcgggattaataccggatgcgccccggcggccgcatggccgccgggggaaagccctaagcggcgcgggatggggt

SEQ ID NO: 1615 - DNA, 225 bp, unidentified
  misc_feature 1..225: note = Encodes 16S rRNA from Treponema
  source 1..225: mol_type = genomic DNA
agagtttgatcatggctcagaacgaacgctggcggcgcgtcttaagcatgcaagtcgggcgggattccccagcttgctggggatgagagcggcggactggtgagtaacgcgtgggcgacgcgccccgtggaccgggatagcctgtggaaacacagggtaataccgggcgagctcccccgcgccggaggcgggggaggaaaggagccgaggctccgccacgggagc

SEQ ID NO: 1616 - DNA, 225 bp, unidentified
  misc_feature 1..225: note = Encodes 16S rRNA from Mogibacterium
  source 1..225: mol_type = genomic DNA
agagtttgatcatggctcaggatgaacgctggcggcgtgcctaatacatgcaagtcgagcgagaaattaatcagaggcgttttcggacaagtcagattaatggaaagcggcggacgggtgagtaacgcgtaggcaacctgcccttagcagagggatagccattggaaacgatgattaaaacctcataacgccaactcaacacatgttgagctggccaaagattta

SEQ ID NO: 1617 - DNA, 225 bp, unidentified
  misc_feature 1..225: note = Encodes 16S rRNA from Adlercreutzia
  source 1..225: mol_type = genomic DNA
agagtttgatcatggctcaggatgaacgctggcggcgtgcctaacacatgcaagtcgaacagttaaaccggcttcggccggaaatagagtggcgaacgggtgagtaacacgtgaccaacctgccccgcgcaccgggatagccccccgaaagggggattaataccggatgcgccgggagggccgcatggccctcccgggaaagcccaggcggcgcgggatggggtc

SEQ ID NO: 1618 - DNA, 225 bp, unidentified
  misc_feature 1..225: note = Encodes 16S rRNA from Selenomonas
  source 1..225: mol_type = genomic DNA
agagtttgatcctggctcaggacgaacgctggcggcgtgcttaacacatgcaagtcgaacgagacgattttaagcttgcttagatgagtcgagtggcaaacgggtgagtaacgcgtagacaacctgccgcaaagatggggacaacagtccgaaaggactgctaataccgaatgttgtcagttttccgcatgggagactgattaaagatggcctctacttgtaagc

SEQ ID NO: 1619 - DNA, 225 bp, unidentified
  misc_feature 1..225: note = Encodes 16S rRNA from Methylomicrobium
  source 1..225: mol_type = genomic DNA
agagtttgatcctggctcagattgaacgctggcggcgtgcttaacacatgcaagtcgagcggtagcaggcgtagcaatacgtgctgacgagcggcgaacgggtgagtaatgcttaggaatcttcctcgtagtggggaataacttggggaaactcaagctaataccgcatacgaactacggttgaaagcgggggatcgcaagacctcgcgctatgagatgagccta

SEQ ID NO: 1620 - DNA, 225 bp, unidentified
  misc_feature 1..225: note = Encodes 16S rRNA from Leuconostoc
  source 1..225: mol_type = genomic DNA
agagtttgatcctggctcaggatgaacgctggcggcgtgcctaatacatgcaagtcgaacgcacagcgaaaggtgcttgcacctttcaagtgagtggcgaacgggtgagtaacacgtggacaacctgcctcaaggctggggataacatttggaaacagatgctaataccgaatgaaacttagtgtcgcatgacacaaagttaaaaggcgctttggcgtcacctag

SEQ ID NO: 1621 - DNA, 225 bp, unidentified
  misc_feature 1..225: note = Encodes 16S rRNA from Pyramidobacter
  source 1..225: mol_type = genomic DNA
agagtttgatcatggctcagattgaacgctggcggcgtgcttaacacatgcaagttgtgcggcgagttttcgaagaagacttcggttggaattggaaatgagcagcagcggacgggtgagtaaagcacaaggacgtgtcctgcagagggggacaactacgggaaaccgcagctaataccccatacgccgagaggtgaaagcagcaatgcgctggaggagcggctt

SEQ ID NO: 1622 - DNA, 225 bp, unidentified
  misc_feature 1..225: note = Encodes 16S rRNA from Butyrivibrio
  source 1..225: mol_type = genomic DNA
agagtttgatcctggctcaggatgaacgctggcggcgtgcctaacacatgcaagtcgaacggtgctttgcggtgatgaagcttcggcagattcttgtaaagcatagtggcggacgggtgagtaacgcgtgggcaacctgcctctcagtgggggatagcagctggaaacggctggtaataccgcatatgcgcacggttccgcatggaacagtgtgaaaagatatat

SEQ ID NO: 1623 - DNA, 225 bp, unidentified
  misc_feature 1..225: note = Encodes 16S rRNA from Bacteroides
  source 1..225: mol_type = genomic DNA
agagtttgatcctggctcaggatgaacgctagctacaggcttaacacatgcaagtcgaggggcagcgggaggtcagcttgctgacttcgccggcgaccggcgcacgggtgagtaacacgtatccaacctgccgcgcactccgggacagccctctgaaaggaggattaataccggatggtgtcatggagggacatcccttcgtgactaaagattcatcggtgcgcc

SEQ ID NO: 1624 - DNA, 225 bp, unidentified
  misc_feature 1..225: note = Encodes 16S rRNA from Butyricimonas
  source 1..225: mol_type = genomic DNA
agagtttgatcatggctcaggatgaacgctagcggcaggcttaacacatgcaagtcgaggggcagcgcgggagtagcaatacacctggcggcgaccggcggaagggtgcgtaacgcgtgagcaacatacccgtcactgggggataacagttggaaacgactcctaataccccataatacaagaggtgacatcatcttttgttgaaagttacggcggtgacggatt

SEQ ID NO: 1625 - DNA, 225 bp, unidentified
  misc_feature 1..225: note = Encodes 16S rRNA from Ruminococcus
  source 1..225: mol_type = genomic DNA
agagtttgatcatggctcaggacgaacgctggcggcacgcctaacacatgcaagtcgaacggtgaatacttagcttgctttgtattcatagtggcggacgggtgagtaacacgtgagcaacctgcctctgagagagggatagcttctggaaacggatggtaatacctcatgatatagcgttctcgcatgggaatgttatcaaatgaatttcgctcagagatgggc

SEQ ID NO: 1626 - DNA, 225 bp, unidentified
  misc_feature 1..225: note = Encodes 16S rRNA from Clostridium sensu stricto
  source 1..225: mol_type = genomic DNA
agagtttgatcctggctcaggacgaacgctggcggcgcgcctaacacatgcaagtcgaacgggactagtgaccggagcttagaggtaatttgtctaggttgcgatcactagttcagtggcggacgggtgagtaaagcatgagtaactttcccataagtggggaatagcttttggaaacagaagataataccgcataaatcgttgagggcacatgctcacaacgga

SEQ ID NO: 1627 - DNA, 225 bp, unidentified
  misc_feature 1..225: note = Encodes 16S rRNA from Butyrivibrio
  source 1..225: mol_type = genomic DNA
agagtttgatcctggctcaggatgaacgctggcggcgtgcctaacacatgcaagtcgaacggggttatctcgccgttgaagcttcggcagagacatgaggtaacttagtggcggacgggtgagtaacgcgtgggcaacctgccccgtaccgggggatagcagttggaaacgactgataataccgcataagcgcacggtgtggcatcacacagtgtgaaaaactcc

SEQ ID NO: 1628 - DNA, 225 bp, unidentified
  misc_feature 1..225: note = Encodes 16S rRNA from Corynebacterium
  source 1..225: mol_type = genomic DNA
agagtttgatcatggctcaggatgaacgctggcggcgtgcttaacacatgcaagtcgaacggaaaggcctcagcttgctggggtactcgagtggcgaacgggtgagtaacacgtgggtgatctgccctgcactttgggataagcccgggaaactgggtctaataccgaatatgaccacttcttggatgttgtggtggaaagcttttgcggtgtgggatgagcctg

SEQ ID NO: 1629 - DNA, 225 bp, unidentified
  misc_feature 1..225: note = Encodes 16S rRNA from Proteiniborus
  source 1..225: mol_type = genomic DNA
agagtttgatcctggctcaggatgaacgctggcggcgtgcttaacacatgcaagtcgagcgagaactcgctcagccgattcttcggaagaaagcagagcgacggaaagcggcggacgggtgagtaacgcgtgggaaacctgccctgtgcagggggacagccgagggaaacttcgattaataccccataacaccaaagcatcgcatggtgcaatggtcaaagattt

SEQ ID NO: 1630 - DNA, 225 bp, unidentified
  misc_feature 1..225: note = Encodes 16S rRNA from Spirochaeta
  source 1..225: mol_type = genomic DNA
agagtttgatcctggctcagaacgaacgctggcggcgcgtcttaagcatgcaagtcgagcgggaagaagtagcttgctacttctgagagcggcggactggtgagtaacgcgtgggtgacgcacccctgtgtcggggacagcccgtggaaacacggagtgataccggatacggtcccatggatcagaaacatgggaggaaaggagctacggcttcgcacggggagc

SEQ ID NO: 1631 - DNA, 225 bp, unidentified
  misc_feature 1..225: note = Encodes 16S rRNA from Acetitomaculum
  source 1..225: mol_type = genomic DNA
agagtttgatcctggctcaggatgaacgctggcggcgtgcctaacacatgcaagtcgaacggggtatagacgctgaagaggtttcgactgattcttgtttatacttagtggcggacgggtgagtaacgcgtgggcaacctgccctgtactgggggatagcagctggaaacggctggtaataccgcataagcgcacgataccgcatggtatagtgtgaaaagctcc

SEQ ID NO: 1632 - DNA, 225 bp, unidentified
  misc_feature 1..225: note = Encodes 16S rRNA from Selenomonas
  source 1..225: mol_type = genomic DNA
agagtttgatcctggctcaggacgaacgctggcggcgtgcttaacacatgcaagtcgaacggggcgattagaagcttgcttttatgagcctagtggcaaacgggtgagtaacgcgtaggcaacctgcctttgggatggggacaacaggacgaaagccctgctaataccgaatgaagtagtctttccgcatggagggactatgaaagatggcctctacatgtaagc

SEQ ID NO: 1633 - DNA, 225 bp, unidentified
  misc_feature 1..225: note = Encodes 16S rRNA from Altererythrobacter
  source 1..225: mol_type = genomic DNA
agagtttgatcctggctcagaacgaacgctggcggcatgcttaacacatgcaagtcgaacggtaatgtatagtacttgtattatatattatagtggcaaacgggtgagtaacgcgtggggacgtacccttcagtaatgaataacggatggaaacgtacgctaatacattataggattgagagatgaaagagagatcgctgagggagcggcccgcgttagattagg

SEQ ID NO: 1634 - DNA, 225 bp, unidentified
  misc_feature 1..225: note = Encodes 16S rRNA from Atopobium
  source 1..225: mol_type = genomic DNA
agagtttgatcatggctcaggatgaacgctggcggcgcgcctaacacatgcaagtcgaacggttaagaccccttcgggggtgaataaagtggcgaacggctgagtaacacgtgggcaacctacctcttgctctgggatagcctcgggaaaccgtgggtaataccggatactctgtaactgtcgcatggcggatacaggaaagcgcatacggcaagagatgggccc

SEQ ID NO: 1635 - DNA, 225 bp, unidentified
  misc_feature 1..225: note = Encodes 16S rRNA from Clostridium IV
  source 1..225: mol_type = genomic DNA
agagtttgatcctggctcaggacgaacgctggcggcgtgcctaacacatgcaagtcgaacggacttagttggatgcttgcatccggcgacagttagtggcggacgggtgagtaacgcgtgaataacctgcccaacagagggggataacgtttggaaacgaacgctaataccgcataacattatggtaccgcatggtattataatcaaaggagcaatccgctgatg

SEQ ID NO: 1636 - DNA, 225 bp, unidentified
  misc_feature 1..225: note = Encodes 16S rRNA from Clostridium XlVa
  source 1..225: mol_type = genomic DNA
agagtttgatcatggctcaggatgaacgctggcggcgtgcctaacacatgcaagtcgagcggaccttagagagtgaacagcttgctgggatctttcgaaaggttagcggcggacgggtgagtaacgcgtgggtaacctgcctcatacagggggatagcagttggaaacgactggtaataccgcataagcgcacagtaccgcatggtatagtgtgaaaaactccgg

SEQ ID NO: 1637 - DNA, 225 bp, unidentified
  misc_feature 1..225: note = Encodes 16S rRNA from Clostridium XlVa
  source 1..225: mol_type = genomic DNA
agagtttgatcatggctcaggatgaacgctggcggcgtgcctaacacatgcaagtcgaacgggaacctcatagtggagacttcggtcaaagcagtgagaattctagtggcggacgggtgagtaacgcgtggataacctgcctttaagaattggataacagtgagaaatcattgctaatacaatataagcttacagtctcgcatgagacagtgagaaaagatttat

SEQ ID NO: 1638 - DNA, 225 bp, unidentified
  misc_feature 1..225: note = Encodes 16S rRNA from Clostridium IV
  source 1..225: mol_type = genomic DNA
agagtttgatcatggctcaggatgaacgctggcggcgtgcataacacattcaagtcgaacgggactaaaccgattaatccttcgggaagcgttgatttagtttagtggcggacgggtgagtaacgcgtgagcaacctgccttgaagagggggataacacagggaaacttgtgctaataccgcataacatatgacgatcgcatggtcgacatatcaaagctccgac

SEQ ID NO: 1639 - DNA, 225 bp, unidentified
  misc_feature 1..225: note = Encodes 16S rRNA from Clostridium III
  source 1..225: mol_type = genomic DNA
agagtttgatcctggctcaggacgaacgctggcggcgtgcctaacacatgcaagtcgaacgagaagtcttgaaatgatcccttcggggtgaatggatagatggacagtggcggacgggcgagtaacgcgtgagtaacctgcccataagagagggatagccgatggaaacgtcgagtaatacctcatattgtagttaattcgcatggattgattatgaaagattta

SEQ ID NO: 1640 - DNA, 225 bp, unidentified
  misc_feature 1..225: note = Encodes 16S rRNA from unidentified taxa
  source 1..225: mol_type = genomic DNA
agagtttgatcatggctcaggatgaatgctggcggcgtgcctaatacatgcaagtcgagcggtaacagggggactcaccgtgctcttgacactcttgcctatgaggaagaggtcggatcgagagtacagtgagtccctgctgacgagcggcggacggctgagtaacgcgtgggaacataccccaaactgagggataactagtcgaaagattagctaataccgcat

SEQ ID NO: 1641 - DNA, 225 bp, unidentified
  misc_feature 1..225: note = Encodes 16S rRNA from Desulfotomaculum
  source 1..225: mol_type = genomic DNA
agagtttgatcatggctcaggacgaacgctggcggcgtgcttaatacatgcaagtcgaacggagatattccgccgttcaaggtttcggctgagaacatgggatatcttagtggcgaacgggtgagtaacgcgtgaacaacctgactcaaagagggggataacaacgggaaactgttgctaataccgcataagaccacagtgtcgcatggcacaggggtcaaagat

SEQ ID NO: 1642 - DNA, 225 bp, unidentified
  misc_feature 1..225: note = Encodes 16S rRNA from Pedobacter
  source 1..225: mol_type = genomic DNA
agagtttgatcctggctcaggatgaacgctagcggcaggcctaatacatgcaagtcggacggtaagtgccccttcgggggcacgagagtggcggacgggtgcgtaacgcgtatgcaaccaacccccgtcatccggatagccggtggaaacgccggataatacggaatgaacccttcggtgggcatccaccggagggcaaggcggcgacgcggacggggacgggca

SEQ ID NO: 1643 - DNA, 162 bp, unidentified
  misc_feature 1..162: note = Encodes 16S rRNA from Bacteroides
  source 1..162: mol_type = genomic DNA
agagtttgatcatggctcaggatgaacgctagctacaggcttaacacatgcaagtcgaggggcagcatgaactcgagaaagggtgctgttcaaatagggcagtattcagatgttagaaaaagaataagtaccggcaaactccgtgccagcagccgcggtaat

SEQ ID NO: 1644 - DNA, 225 bp, unidentified
  misc_feature 1..225: note = Encodes 16S rRNA from Asaccharobacter
  source 1..225: mol_type = genomic DNA
agagtttgatcatggctcaggatgaacgctggcggcgtgcttaacacatgcaagtcgaacgggaaagcgccctcgggcgcgagtacagtggcgaacgggtgagtaacacgtgaccaacctgccccccgcaccgggatagccgggcgaaagcccgggtaataccggatgaccccgcaccgcggcatcgcggcgcgggcaaagcccagacggcgggggatggggtcg

SEQ ID NO: 1645 - DNA, 225 bp, unidentified
  misc_feature 1..225: note = Encodes 16S rRNA from Microbacterium
  source 1..225: mol_type = genomic DNA
agagtttgatcatggctcaggacgaacgctggcggcgtgcttaacacatgcaagtcgaacggtgaaggcggagcttgctctgctggatcagtggcgaacgggtgagtaacacgtgagcaatctgccccgaactctgggataagcgctggaaacggcgtctaataccggatacgacacgggagggcatcctctccgtgtggaaagatttttcggttcgggatgagc

SEQ ID NO: 1646 - DNA, 225 bp, unidentified
  misc_feature 1..225: note = Encodes 16S rRNA from Treponema
  source 1..225: mol_type = genomic DNA
agagtttgatcatggctcagaacgaacgccggcggcgcgtcttaagcatgcaagtcgggcgggatcagggtgcttgcaccctgtgagagcggcggactggcgaggaacgcgtgggcgacgtgccctccgcaccgggacagccggcagaaatgccgggtgatacgggatgagctcgtgcgatgtggtgttgtacgaggaaagctgccacggcagcggcggaggagc

SEQ ID NO: 1647 - DNA, 225 bp, unidentified
  misc_feature 1..225: note = Encodes 16S rRNA from Dethiosulfovibrio
  source 1..225: mol_type = genomic DNA
agagtttgatcatggctcaggatgaacgctggcggcgtgcataacacattcaagtcgaacgaagcactttggcggaagccttcgggtggaagctgatttgacttagtggcggacgggtgagtaacgcgtgagcaacctgcctggctgtgagggataacacagggaaacttgtgctaataccacatgacgcatggagatcgcatgttttccatgccaaagatatat

SEQ ID NO: 1648 - DNA, 225 bp, unidentified
  misc_feature 1..225: note = Encodes 16S rRNA from Oscillibacter
  source 1..225: mol_type = genomic DNA
agagtttgatcatggctcaggacgaacgctggcggcgtgcctaacacatgcaagtcgaacgaagctctttgaagggcggcttcggccaaacggatgagatgacttagtggcgaacgggtgagtaacgcgtgaggaacctgcctttcagtgggggacaacagttggaaacgactgctaataccgcataacgtacagaggtcgcatgaccattgtaccaaagattta

SEQ ID NO: 1649 - DNA, 225 bp, unidentified
  misc_feature 1..225: note = Encodes 16S rRNA from Selenomonas
  source 1..225: mol_type = genomic DNA
agagtttgatcatggctcaggacgaacgctggcggcgtgcttaacacatgcaagtcgaacgagggaattagaagcttgcttttatgacccgagtggcaaacgggtgagtaacgcgtagacaacctgcctctcagatggggacaacagcccgaaagggctgctaataccgaatgttgtatttcttccgcatggaggagatattaaagatggcctctacttgtaagc

SEQ ID NO: 1650 - DNA, 225 bp, unidentified
  misc_feature 1..225: note = Encodes 16S rRNA from Eubacterium
  source 1..225: mol_type = genomic DNA
agagtttgatcctggctcaggacgaacgctggcggcgtgcttaacacatgcaagtcgaacgaagcttgacgaatgattccttcgggatgatttctgatatgactgagtggcggacgggtgagtaacgcgtgagtaacctgcctcttggagggggatagtgtttggaaacgaacagtaataccgcataacgtgtacggatggcatcttctgtataccaaagattta

SEQ ID NO: 1651 - DNA, 225 bp, unidentified
  misc_feature 1..225: note = Encodes 16S rRNA from Ruminococcus
  source 1..225: mol_type = genomic DNA
agagtttgatcctggctcaggacgaacgctggcggcacgcttaacacatgcaagtcgaacggagatattcccttcgggggataacttagtggcggacgggtgagtaacacgtgagcaacctgccttacagagaggaataatgactggaaacggtcactaatacctcataaaatatttgaatcgcatggtttggatatcaaagaataatcgctgtaagatgggctc

SEQ ID NO: 1652 - DNA, 225 bp, unidentified; identical to SEQ ID NO: 265
  misc_feature 1..225: note = Encodes 16S rRNA from Treponema
  source 1..225: mol_type = genomic DNA

SEQ ID NO: 1653 - DNA, 225 bp, unidentified
  misc_feature 1..225: note = Encodes 16S rRNA from Spirochaeta
  source 1..225: mol_type = genomic DNA
agagtttgatcatggctcagaacgaacgctggcggcgcgtcttaagcatgcaagtcgagcggcaagacagtgcttgcactgtcctagagcggcggactggtgagtaacacgtgggttacgtaccctccggacggggatagcctgtggaaacacagggtaataccggatacggcggcacagcatggagttgtgtcgggaaaggagcttcggctccgccggaggatc

SEQ ID NO: 1654 - DNA, 225 bp, unidentified
  misc_feature 1..225: note = Encodes 16S rRNA from Roseburia
  source 1..225: mol_type = genomic DNA
agagtttgatcatggctcaggatgaacgctggcggcgtgcctaacacatgcaagtcgagcggacctgattaagtgattagcttgctaagaacttatgactggttagcggcggacgggtgagtaacgcgtgggtaacctgcctcatacagggggatagcagttggaaacgactggtaataccgcataagcgcacggtaccgcatggtacagtgtgaaaaactccgg

SEQ ID NO: 1655 - DNA, 225 bp, unidentified
  misc_feature 1..225: note = Encodes 16S rRNA from Ruminococcus
  source 1..225: mol_type = genomic DNA
agagtttgatcatggctcaggacgaacgctggcggcgcgcctaacacatgcaagtcgaacggggcacgatttagatttcttcggaatgatagattattgcttagtggcggacgggtgagtaatacgtgagtaatctgccttatagatggggataacgatcagaaatggtcgctaataccctataatgtatgttttccgcatggttagcataccaaagggattcgc

SEQ ID NO: 1656 - DNA, 225 bp, unidentified
  misc_feature 1..225: note = Encodes 16S rRNA from Butyricimonas
  source 1..225: mol_type = genomic DNA
agagtttgatcctggctcaggatgaacgctagcggcaggcttaacacatgcaagtcgaggggcagcgcgattgtagcaatacgattggcggcgaccggcgcaagggtgcgtaacgcgtgagcaacatacccgcaacagggggataagcgatggaaacgtcgtctaataccccatggagaccaagggcggcatcgtccatggcctaaacccacgggggttgcggat

SEQ ID NO: 1657 - DNA, 225 bp, unidentified
  misc_feature 1..225: note = Encodes 16S rRNA from Pedobacter
  source 1..225: mol_type = genomic DNA
agagtttgatcatggctcaggatgaacgctagcggcaggcctaatacatgcaagtcgaacgggagggggcccttcggggcctccgagagtggcgcacgggtgcgtaacgcgtatgcaaccaaccccgcactgggggacagccggtggaaacgccgggtaataccccatgccgacgggaggggacatccccatccgttgaaaggcttcggtcggtgcgggacgggc

SEQ ID NO: 1658 - DNA, 225 bp, unidentified
  misc_feature 1..225: note = Encodes 16S rRNA from Spirochaeta
  source 1..225: mol_type = genomic DNA
agagtttgatcctggctcagaacgaacgctggcggcgcgtcttaagcatgcaagtcgaacggcaagatggagcttgctccatcctagagtggcggactggtgagtaacacgtgggtgacatgcctttcagttggggatagctactagaaatagtagataataccgaatacggtggcatatcttggaagtatgccaagaaaggagctaaggctccgctgagagatt

SEQ ID NO: 1659 - DNA, 225 bp, unidentified
  misc_feature 1..225: note = Encodes 16S rRNA from Parabacteroides
  source 1..225: mol_type = genomic DNA
agagtttgatcctggctcaggatgaacgctagcgacaggcttaacacatgcaagtcgaggggcagcggggaggtagcaatacttccgccggcgaccggcgcactggtgagtaacacgtatgcaacctgcccccggttggggaataacccgcggaaacgcggactaatgccccgtatgcatggccgccgcatgacggccatgtgatagaacttcgtccggggatgg

SEQ ID NO: 1660 - DNA, 225 bp, unidentified
  misc_feature 1..225: note = Encodes 16S rRNA from Methylococcus
  source 1..225: mol_type = genomic DNA
agagtttgatcatggctcagattgaacgctggcggcatgcctaacacatgcaagtcgaacgggagtaaggggcaactcttactctagtggcggacgggtgaggaatacgtaggaatctaccttagagtgggggataactcggggaaactcgagctaataccgcatatgttctacggagtaaagggggcgcaagctctcgctttaagatgagcctacgtcggatta

SEQ ID NO: 1661 - DNA, 225 bp, unidentified
  misc_feature 1..225: note = Encodes 16S rRNA from Enterorhabdus
  source 1..225: mol_type = genomic DNA
agagtttgatcatggctcaggatgaacgctggcggcgtgcctaacacatgcaagtcgaacggtgaaaccgcctccgggcggacatgaagtggcgaacgggtgagtaacacgtgaccaacctgccccgcgcaccgggacagccccccgaaagggggattaataccggatactccggccgggccgcatggcccggccgggaaagctccggcggcgcgggatggggtc

SEQ ID NO: 1662 - DNA, 225 bp, unidentified
  misc_feature 1..225: note = Encodes 16S rRNA from Clostridium sensu stricto
  source 1..225: mol_type = genomic DNA
agagtttgatcctggctcaggacgaacgctggcggcgtgcttaatacatgcaagtcgaacggatatgtagcaatacatattagtggcggacgggtgagtaacgcgtaatcaacctgccctttacaggggaataacacttggaaacaggtgctaataccgcatatgaccacaacacggcatcgtgaaggggtaaaagttttatcggtaaaggagggggttgcgtat

SEQ ID NO: 1663 - DNA, 225 bp, unidentified
  misc_feature 1..225: note = Encodes 16S rRNA from Gelidibacter
  source 1..225: mol_type = genomic DNA
agagtttgatcctggctcaggataaacgctagcggcaggcctaacacatgcaagtcgagcggcagcgggatgtagcaatacattgccggcgagcggcggacgggtgagtaacgcgtatgcaacctgcccaccacacggagatagccgaccgaaaggacgattaaactccgatggcattgggacccggcatcgggatccaattaaatattcataggtggtggatgg

SEQ ID NO: 1664 - DNA, 225 bp, unidentified
  misc_feature 1..225: note = Encodes 16S rRNA from Sporobacter
  source 1..225: mol_type = genomic DNA
agagtttgatcatggctcaggatgaacgctggcggcgtgcctaacacatgcaagtcgaacgaagcacaatggaaggagacttcggtcaacggaagttgtgacttagtggcggacgggtgagtaacgcgtgagcaacctgcctcagagtgggggacaacagctggaaacggctgctaataccgcataatactttcggaaggcatcttctgaaagtcaaagctttat

SEQ ID NO: 1665 - DNA, 225 bp, unidentified
  misc_feature 1..225: note = Encodes 16S rRNA from Pedobacter
  source 1..225: mol_type = genomic DNA
agagtttgatcctggctcaggatgaacgctagcggcaggcctaatacatgcaagtcgtacggtaagcggtccttcgggactgcgagagtggcggacgggtgcgtaacgcgtatgcaaccaacccccctcgccgggatagccggtggaaacgccggataataccggatgcgccgcgtgggaggcatctcccgagcggcaaggcggagacgcggagggggacgggca

SEQ ID NO: 1666 - DNA, 225 bp, unidentified
  misc_feature 1..225: note = Encodes 16S rRNA from unidentified taxa
  source 1..225: mol_type = genomic DNA
agagtttgatcctggctcaggatgaacgctagctacaggcttaacacatgcaagtcgaacgagaaatacacttcggtgtatggaaagtggcggacgggtgagtaatgtgtagagaatctgccctgaagagggggacaacagagggaaacttctgctaataccccatatgcgcgtagttgagatactattcgtgaaagatttatcgcttcaggatgagtctgcatc

SEQ ID NO: 1667 - DNA, 225 bp, unidentified
  misc_feature 1..225: note = Encodes 16S rRNA from Syntrophococcus
  source 1..225: mol_type = genomic DNA
agagtttgatcatggctcaggatgaacgctggcggcgtgcttaacacatgcaagtcgaacggacttgcccaccgaagcggaaggtgcttgcattcgaagcttcaccgggcaggttagtggcggacgggtgagtaacgcgtggggaacctgccccgtaccgggggataacagttagaaatgactgctaataccgcataagcgcacactgaggcatctcagagtgtg

SEQ ID NO: 1668 - DNA, 225 bp, unidentified
  misc_feature 1..225: note = Encodes 16S rRNA from Slackia
  source 1..225: mol_type = genomic DNA
agagtttgatcctggctcaggatgaacgccggcggcgcgcctaacacatgcaagtcgagcggaggacccgccctcgggcgggcgatcagcggcgaacgggtgagtaacgcgtgggcaacctgccccccgcacgggaatagccccgggaaaccgggggtaatgcccgacggcccggcagaggggcatccctctgccggcgaagccatcgcggcgggggatgggccc

SEQ ID NO: 1669 - DNA, 225 bp, unidentified
  misc_feature 1..225: note = Encodes 16S rRNA from Mogibacterium
  source 1..225: mol_type = genomic DNA
agagtttgatcctggctcaggatgaacgctggcggcgtgcctaacacatgcaagtcgagcgagaaatctatgtgatgaaacttcggtcgaatcttttagatggaaagcggcggacgggtgagtaacgcgtaggcaacctgcccttagcagggggatagccattggaaacgatgattaaaaccccataatacggatttatcacatgttgaatccgtcaaagattta

SEQ ID NO: 1670 - DNA, 225 bp, unidentified
  misc_feature 1..225: note = Encodes 16S rRNA from Prevotella
  source 1..225: mol_type = genomic DNA
agagtttgatcatggctcaggatgaacgctagctacaggcttaacacatgcaagtcgaggggcagcacgtgggtagcaataccctgggtggcgaccggcgcacgggtgagtaacgcgtatccaacctggcccatagtagggaacagcccggcgaaagtcggattaatgccctatgttttcctcagtgagcattttatgaggaacaaagacttgtcgctatgggat

SEQ ID NO: 1671 - DNA, 225 bp, unidentified
  misc_feature 1..225: note = Encodes 16S rRNA from Pseudoflavonifractor
  source 1..225: mol_type = genomic DNA
agagtttgatcatggctcaggacgaacgctggcggcgtgcttaacacatgcaagtcgagcggagatgaattgaatgagagcttcggcaggatttcgattgatcttagcggcggacgggtgagtaacgcgtgaacaatctgtcccacacagggggataacacttcgaaagaagtgctaataccgcataagaccacggtgccgcatggcacaggggtaaaagaaatt

SEQ ID NO: 1672 - DNA, 225 bp, unidentified
  misc_feature 1..225: note = Encodes 16S rRNA from Veillonella
  source 1..225: mol_type = genomic DNA
agagtttgatcctggctcaggatgaacgctggcggcgtgcttaatacatgcaagtcgaacggatgattcggtctagcttgctagatcggagagtcagtggcgaacgggtgagtaatacgtaggcaacctgccccaaagcgggggatagcagttggaaacgactattaataccgcataggtaatctcgaggcatcttgagattattaaaggtgcgtttgcaccgct

SEQ ID NO: 1673 - DNA, 225 bp, unidentified
  misc_feature 1..225: note = Encodes 16S rRNA from Clostridium XlVa
  source 1..225: mol_type = genomic DNA
agagtttgatcctggctcaggatgaacgctggcggcgtgcttaacacatgcaagtcgaacgaagcacttttccttgattcttcggatgaaaaggaaatttgactgagtggcggacgggtgagtaacgcgtgggtaacctgccctgtacagggggataacagttagaaatgactgctaataccgcataagaccacagcatcgcatggtgcaggggtaaaaactccg

SEQ ID NO: 1674 - DNA, 225 bp, unidentified
  misc_feature 1..225: note = Encodes 16S rRNA from Bacillus
  source 1..225: mol_type = genomic DNA
agagtttgatcatggctcaggatgaacgctggcggcgtgcctaatacatgcaagtcgagcgaatggattaagagcttgctcttatgaagttagcggcggacgggtgagtaacacgtgggtaacctgcccataagactgggataactccgggaaaccggggctaataccggataacattttgaaccgcatggttcgaaattgaaaggcggcttcggctgtcactta

SEQ ID NO: 1675 - DNA, 225 bp, unidentified
  misc_feature 1..225: note = Encodes 16S rRNA from Pedobacter
  source 1..225: mol_type = genomic DNA
agagtttgatcatggctcaggatgaacgctagcggcaggcctaatacatgcaagtcgaacggtaaacgccccttcgggggcgtgagagtggcggacgggtgcgtaacgcgtatgcaaccaacccccctcaccgggatagccggtggaaacgccggataagaccggatgcgccgctggggaggcatctccccggcggcaaggcggcgacgcggagggggacgggca

SEQ ID NO: 1676 - DNA, 225 bp, unidentified
  misc_feature 1..225: note = Encodes 16S rRNA from Clostridium IV
  source 1..225: mol_type = genomic DNA
agagtttgatcatggctcaggatgaacgctggcggcgtgcctaacacattcaagtcgaacggagaagggagcttcggttcccggatcagtggcggacgggtgagtaacgcgtgagcaacctgccttcgtgtggggaataacacagggaaacttgtgctaataccgcataatgcaaagacgcagcattacgtttttgccaaagatttatcgcatgaagatgggctc

SEQ ID NO: 1677 - DNA, 225 bp, unidentified
  misc_feature 1..225: note = Encodes 16S rRNA from Fibrobacter
  source 1..225: mol_type = genomic DNA
agagtttgatcatggctcagaacgaacgctggcggcgtgccttatacatgcaagtcgagcgagggcgcagcaatgcgaaccgagcggcgaacgggtgagtaacgcgtgaacaacctgccccaaagtccgggatagcccttccaacggaggattaataccggatggcgagggtttccgcatggagacctatccaaagtcttggcgctatgggaggggttcgcgtcc

SEQ ID NO: 1678 - DNA, 225 bp, unidentified
  misc_feature 1..225: note = Encodes 16S rRNA from Paenibacillus
  source 1..225: mol_type = genomic DNA
agagtttgatcatggctcaggattaacgctggcaccatgcctaatacatgcatgtcgagcggagtttagagagcttgctttctaaacttagcggcaaatgggtgagtaacacgtaaggaacctgcctaagtgacgaggacaacggttggaaacgactgctaatactggatagtataagaaaccgcatgatttcttatttaaaggtccgtttggaccacgcttaga

SEQ ID NO: 1679 - DNA, 225 bp, unidentified
  misc_feature 1..225: note = Encodes 16S rRNA from Brevundimonas
  source 1..225: mol_type = genomic DNA
agagtttgatcatggctcaggacgaacgctggcggtgtgcctcatacatgcaagtcgaacgataaggttccttcgggaatacataagtggcggacgggtgagtacaacataggaaatctgccctaaactgggggacaacagagggaaacttctgctaataccccatacgagataagttgaaatatttatcttgaaagctccggcggtttaggatgagcctgtgcc

SEQ ID NO: 1680 - DNA, 225 bp, unidentified
  misc_feature 1..225: note = Encodes 16S rRNA from Desulfovibrio
  source 1..225: mol_type = genomic DNA
agagtttgatcctggctcagattgaacgctggcggcgtgcttaacacatgcaagtcgaacgcgaaaggggcttcggccccaagtagagtggcgcacgggtgagtaacgcgtggataatctgcccctgcaactggaatagcgactggaaacggtcgataataccggatacgcccttgttgtacaacgaggggaaaggagacctctgcttgcaagtttccgtgcagg

SEQ ID NO: 1681 - DNA, 225 bp, unidentified
  misc_feature 1..225: note = Encodes 16S rRNA from Clostridium XI
  source 1..225: mol_type = genomic DNA
agagtttgatcctggctcaggacgaacgctggcggcgtgcctaacacatgcaagtcgagcggagacataaggaacggaggcttcggccgaagggagctatgttttagcggcggacgggtgagtaacgcgtgaacgatctgtcccttacagggggataacacatggaaacaggtgctaataccgcataagaccacagagctgcatggctcaggggtcaaaggagga

SEQ ID NO: 1682 - DNA, 225 bp, unidentified
  misc_feature 1..225: note = Encodes 16S rRNA from Helicobacter
  source 1..225: mol_type = genomic DNA
agagtttgatcatggctcagagtgaacgctggcggcgtgcctaatacatgcaagtcgaacgatgaagcttttagcttgctagaagtggattagtggcgcacgggtgagtaatgcataggttatgtgccctttagtctgggatagccactggaaacggtgattaatactagatactccctacgggggaaagtttttcgctaaaggatcagcctatgtcctatcagc

SEQ ID NO: 1683 - DNA, 225 bp, unidentified
  misc_feature 1..225: note = Encodes 16S rRNA from Prevotella
  source 1..225: mol_type = genomic DNA
agagtttgatcatggctcaggatgaacgctagctacaggcttaacacatgcaagtcgaggggcagcacgtgggtagcaataccctgggtggcgaccggcgcacgggtgagtaacgcgtatccaacctggcccatagtagggaacagcccggcgaaagtcggattaatgccctatgttttcctcagggagcattttatgaggaacaaagacttgtcgctatgggat

SEQ ID NO: 1684 - DNA, 225 bp, unidentified
  misc_feature 1..225: note = Encodes 16S rRNA from Clostridium XlVa
  source 1..225: mol_type = genomic DNA
agagtttgatcctggctcaggatgaacgctggcggcgtgcctaacacatgcaagtcgaacggtgaaagaagactgaagccttcgggcggaagttttttggatcagtggcggacgggtgagtaacgcgtggataacctgcctcatacagggggataacagggagaaatcactgctaataccgcataagcgcacaggaccgcatggtctggtgtgaaaaacttcggt

SEQ ID NO: 1685 - DNA, 225 bp, unidentified
  misc_feature 1..225: note = Encodes 16S rRNA from Prevotella
  source 1..225: mol_type = genomic DNA
agagtttgatcctggctcaggatgaacgctagcggcaggcttaacacatgcaagtcgaggggcagcgggttgtagcaatacaatgccggcgaccggcgtaagggtgagtaacgcgtgagcgacgtgcccgtcacagggggacaagcgctggaaacggcgtctgataccccataggaatgctccctgcatggggggtgtttgaaagatttatcggtgacggatcgg

SEQ ID NO: 1686 - DNA, 225 bp, unidentified
  misc_feature 1..225: note = Encodes 16S rRNA from Herbiconiux
  source 1..225: mol_type = genomic DNA
agagtttgatcctggctcaggatgaacgctggcggcgtgcttaacacatgcaagtcgaacggtgaaagcgggagcttgctcctgctggatcagtggcgaacgggtgagtaacacgtgagtaacctgcccttgactctgggataagcgttggaaacgacgtctaataccggatacgaccttcggaggcatctcctggaggtggaaagaatttcggtcaaggatgga

SEQ ID NO: 1687 - DNA, 225 bp, unidentified
  misc_feature 1..225: note = Encodes 16S rRNA from Clostridium IV
  source 1..225: mol_type = genomic DNA
agagtttgatcatggctcaggacgaacgctggcggcgtgcctaacacattcaagtcgaacggtgaaggaagcttgcttccggatcagtggcggacgggtgagtaacgcgtgagcaacctgccctgcattgggggataacacagggaaacttgtgctaatacctcatgacacatacttaccgcatgataggtatgtcaaagagcaatcgatgcaggatgggctcgc

SEQ ID NO: 1688 - DNA, 225 bp, unidentified
  misc_feature 1..225: note = Encodes 16S rRNA from Rikenella
  source 1..225: mol_type = genomic DNA
agagtttgatcatggctcaggatgaacgctagcggcaggcttaacacatgcaagtcgaggggcagcgcgtggtagcaataccatggcggcgaccggcgcacgggtgcgtaacgcgtatgcaacctgcctgtaacagggggataacccggagaaatttggactaataccgcatattgccgagctgcagcattgcaattcggcgaaaggagcgatccggttacagat

SEQ ID NO: 1689 - DNA, 225 bp, unidentified
  misc_feature 1..225: note = Encodes 16S rRNA from Clostridium XlVa
  source 1..225: mol_type = genomic DNA
agagtttgatcatggctcaggatgaacgctggcggcgtgcctaacacatgcaagtcgaacggggtacagacgctgcgagaggaagtgcttgcacggaatcaaacttgtttgtacttagtggcggacgggtgagtaacgcgtggaaaacctgcctcatacagggggataacaggaagaaattcctgctaataccgcatgagcgcacattaccgcatggtagagtgt

SEQ ID NO: 1690 - DNA, 225 bp, unidentified
  misc_feature 1..225: note = Encodes 16S rRNA from Hippea
  source 1..225: mol_type = genomic DNA
agagtttgatcctggctcagagttaacgctggcggcgtgcctaacacatgcaagtcgagcgaattcttacagagcatcgtaagagttagcggcaaacgggtgagtaacacatgggaaacctcccttagaatggggaatatctccgtgaaaacggagctaataccgcataagaccacagtttggcatcaaacaggggtaaaagcagcaatgcgttctaagatggtc

SEQ ID NO: 1691 - DNA, 225 bp, unidentified
  misc_feature 1..225: note = Encodes 16S rRNA from Lactobacillus
  source 1..225: mol_type = genomic DNA
agagtttgatcctggctcaggacgaacgctggcggcatgcctaatacatgcaagtcgaacgaaccaaactgaagattgatgcttgcatcatgattcagaccttggtgagtggcggacgggtgagtaacacgtgggtaacctgcccaaaagtgggggataacatttggaaacaagtgctaataccgcataacaactactttcacatgatcgtagcttgaaagatgg

SEQ ID NO: 1692 - DNA, 225 bp, unidentified
  misc_feature 1..225: note = Encodes 16S rRNA from Eubacterium
  source 1..225: mol_type = genomic DNA
agagtttgatcatggctcaggacgaacgctggcggcgtgcttaacacatgcaagtcgaacgaagcttgattttagatttcttcggaatgataaatgatatgactgagtggcggacgggtgagtaacgcgtgagcaacctgcccttcggagggggatagcgtttggaaacgaacggtaataccgcataatgttaacggaaggcatcttctgttaaccaaaactccg

SEQ ID NO: 1693 - DNA, 225 bp, unidentified
  misc_feature 1..225: note = Encodes 16S rRNA from Clostridium IV
  source 1..225: mol_type = genomic DNA
agagtttgatcatggctcaggacgaacgctggcggcgtgcctaacacatgcaagtcgaacggggctgaagatggcacaggctcacctggggagtcaggtgggcgcgtgtcgtcttcagcttagtggcggacgggtgagtaacgcgtgagcgacctgacccatacagggggacaacagctggaaacggctgctaataccgcataagaccacgtacctgagggtatg

SEQ ID NO: 1694 - DNA, 225 bp, unidentified
  misc_feature 1..225: note = Encodes 16S rRNA from Clostridium III
  source 1..225: mol_type = genomic DNA
agagtttgatcctggctcaggacgaacgctggcggcgtgcctaacacatgcaagtcgaacgagaaatatggaaatgattccttcggggagaatggaaatatggacagtggcggacgggcgagtaacgcgtgagtaacctgcccataagcgggggatagccgatggaaacgtcgagtaataccccatgacataattgagtcgcatggcttaattatcaaagattta

SEQ ID NO: 1695 - DNA, 225 bp, unidentified
  misc_feature 1..225: note = Encodes 16S rRNA from Lactobacillus
  source 1..225: mol_type = genomic DNA
agagtttgatcatggctcaggacgaacgctggcggcatgcctaatacatgcaagtcgaacgaaccatcctgaagattgaagcttgcttcatgattcagatcttggtgagtggcggacgggtgagtaacacgtgggtaacctgcccaaaagtgggggataacatttggaaacaagtgctaataccgcataacaactactttcgcatgatcgtagtttaaaagatgg

SEQ ID NO: 1696 - DNA, 225 bp, unidentified
  misc_feature 1..225: note = Encodes 16S rRNA from Lactobacillus
  source 1..225: mol_type = genomic DNA
agagtttgatcatggctcaggacgaacgctggcggcgtgcctaatacatgcaagtcgagcgagcagaaccagcagatttacttcggtaatgacgctggggacgcgagcggcggatgggtgagtaacacgtggggaacctgccccatagtctgggataccacttggaaacaggtgctaataccggataagaaagcagatcgcatgatcagcttataaaaggcggcg

SEQ ID NO: 1697 - DNA, 225 bp, unidentified
  misc_feature 1..225: note = Encodes 16S rRNA from Desulfotomaculum
  source 1..225: mol_type = genomic DNA
agagtttgatcctggctcaggacgaacgctggcggcgtgcttaatacatgcaagtcgaacggagatattccgccgttcaaggtttcggctgagaacatgggatatcttagtggcgaacgggtgagtaacgcgtgaacaacctgactcaaagagggggataacaacgggaaactgttgctaataccgcataagaccacgccctcgcatgggggaggggtaaaagat

SEQ ID NO: 1698 - DNA, 225 bp, unidentified
  misc_feature 1..225: note = Encodes 16S rRNA from Prevotella
  source 1..225: mol_type = genomic DNA
agagtttgatcatggatggggatgcgtaggattaggcagtcggcggggtaacggcccaccgagccgacgatccttaggggttctgagaggaaggtcccccacactggtactgagacacggaccagactcctacgggaggcagcagtgaggaatattggtcaatggtcggaagactgaaccagccaagtagcgtgcaggatgacggccctacgggttgtaaactgc

SEQ ID NO: 1699 - DNA, 225 bp, unidentified
  misc_feature 1..225: note = Encodes 16S rRNA from Staphylococcus
  source 1..225: mol_type = genomic DNA
agagtttgatcatggctcaggatgaacgctggcggcgtgcctaatacatgcaagtcgagcgaacagacgaggagcttgctcctttgacgttagcggcggacgggtgagtaacacgtgggtaacctacctataagactgggataacttcgggaaaccggagctaataccggataatatttcgaaccgcatggttcgatagtgaaagatggctctgctatcacttat

SEQ ID NO: 1700 - DNA, 225 bp, unidentified
  misc_feature 1..225: note = Encodes 16S rRNA from Tenacibaculum
  source 1..225: mol_type = genomic DNA
agagtttgatcctggctcaggatgaacgctagcggcaggcttaacacatgcaagtcgaggggtaacaggcggtagcaatactgtgctgacgaccggcgcacgggtgcgtaacgcgtatgcaacctgcccgcgacagggggataacggagggaaacttccactaatatcccatggtgccggggtctcgcatggggccgcggctaaaggggcgacccggttgcggat

SEQ ID NO: 1701 - DNA, 225 bp, unidentified
  misc_feature 1..225: note = Encodes 16S rRNA from Parabacteroides
  source 1..225: mol_type = genomic DNA
agagtttgatcctggctcaggatgaacgctagcgacaggcttaacacatgcaagtcgaggggcagcggggcgtggcaacacgccgccggcgaccggcgcactggtgagtaacacgtatgcaacctgcccatcggagggggataacccgtggaaacgcggcctaataccccgtacgcctttggatcgcatgatttggaggtgaaaggaggcgactctgtcgatgga

SEQ ID NO: 1702 - DNA, 225 bp, unidentified
  misc_feature 1..225: note = Encodes 16S rRNA from Clostridium XlVa
  source 1..225: mol_type = genomic DNA
agagtttgatcatggctcaggacgaacgctggcggcgtgcctaacacatgcaagtcgaacggagacgaggcataagcttcccttcggggaagccgtttcgtcttagtggcggacgggtgagtaacgcgtggacaacctgccgtatgctgggggacaacagcgggaaactgctgctaataccgcataagccggggagggggcatccccatcccgggaaagatttat

SEQ ID NO: 1703 - DNA, 225 bp, unidentified
  misc_feature 1..225: note = Encodes 16S rRNA from Clostridium IV
  source 1..225: mol_type = genomic DNA
agagtttgatcatggctcaggatgaacgctggcggcgtgcataacacattcaagtcgaacggacttagaggggcttgctcctcgaaagttagtggcggacgggtgagtaacgcgtgagcaacctgcctttttccgggggataacatcgggaaaccggtgctaataccgcataacgtacaggaaccgcatgatttttgtaccaaagattcattgggaaaagatggg

SEQ ID NO: 1704 - DNA, 225 bp, unidentified
  misc_feature 1..225: note = Encodes 16S rRNA from Clostridium IV
  source 1..225: mol_type = genomic DNA
agagtttgatcatggctcaggacgaacgctggcggcgtgcctaacacatgcaagtcgaacggacttagctggatgcttgcatccggcgacagttagtggcggacgggtgagtaacgcgtgaataacctgcccaacagagggggataacgtttggaaacgaacgctaataccgcataatattatgatatcgcatggtattataatcaaaggagcaatccgctgatg

SEQ ID NO: 1705 - DNA, 225 bp, unidentified
  misc_feature 1..225: note = Encodes 16S rRNA from Pedobacter
  source 1..225: mol_type = genomic DNA
agagtttgatcatggctcaggatgaacgctagcggcaggcctaatacatgcaagtcggacggtaagtgccctttcgggggcacgagagtggcggacgggtgcgtaacgcgtatgcaaccaacccccgtcttccggatagccggtggaaacgccggataatacggaatgaacccgaggaggggcatcccttcgcgggcaaggcggcgacgcggacggggacgggca

SEQ ID NO: 1706 - DNA, 225 bp, unidentified
  misc_feature 1..225: note = Encodes 16S rRNA from Helicobacter
  source 1..225: mol_type = genomic DNA
agagtttgatcatggctcagagtgaacgctggcggcgtgcctaacacatgcaagtcgcgcgggactttacagagtatcgtaaagtctagcggcaaacgggtgagtaacacgtgggaaacctccctcagaatggggaatatctccgggaaaccggagtcaataccgcataagaccacagtttggcatcaaacaggggtcaaagcagtaatgcgttttgagatggtc

SEQ ID NO: 1707 - DNA, 225 bp, unidentified
  misc_feature 1..225: note = Encodes 16S rRNA from Proteiniclasticum
  source 1..225: mol_type = genomic DNA
agagtttgatcatggctcaggacgaacgctggcggcgtgcctaacacatgcaagtcgagcggggacataattggaaaggcttcggcccggaaggttatgttccagcggcggacgggtgagtaacgcgtgaacaatctgtcccagacaggggaataacagatggaaacatctgctaataccgcataagaccacgacccgacatcgggatgaggtaaaaggagcaat

SEQ ID NO: 1708 - DNA, 225 bp, unidentified
  misc_feature 1..225: note = Encodes 16S rRNA from Anaplasma
  source 1..225: mol_type = genomic DNA
agagtttgatcctggctcagaacgaacgctggcagtatgctttaaccatgcaagtcgaacgagaaagtgtagcaatatatgagtaaagtggcaaacgggtgagtaacacacaggaatctacccagtagagaggaataagcactagaaatggtgtctaatacctcataagccaatatagtaaaatatattgggaaaggattagtagtaatattaattcactattgg

SEQ ID NO: 1709 - DNA, 225 bp, unidentified
  misc_feature 1..225: note = Encodes 16S rRNA from Bacteroides
  source 1..225: mol_type = genomic DNA
agagtttgatcatggctcaggatgaacgctagctacaggcttaacacatgcaagtcgaggggcatcatggggttggtttcggccgatcctgatggcgaccggcggatgggtgagtaacgcgtatccaacctgcccctgtcccgcggacagcccttagaaatgaggattaacccgcgatgttgcccctttgccgcatggtattggggtgaaatttttaaggacggg

SEQ ID NO: 1710 - DNA, 225 bp, unidentified
  misc_feature 1..225: note = Encodes 16S rRNA from Clostridium IV
  source 1..225: mol_type = genomic DNA
agagtttgatcatggctcaggacgaacgctggcggcgtgcctaacacatgcaagtcgaacggagtattccgcccgagaccagatgtagcttgctacggatgggatcaatagggatacttagtggcggacgggtgagtaacgcgtgaataacctgcccaacagagggggataacgtttggaaacgaacgctaataccgcataacattacggtatcgcatggtacag

SEQ ID NO: 1711 - DNA, 225 bp, unidentified
  misc_feature 1..225: note = Encodes 16S rRNA from Mucilaginibacter
  source 1..225: mol_type = genomic DNA
agagtttgatcatggctcaggatgaacgctagcggcaggcctaatacatgcaagtcgaacgggattgcctccttcgggaggcatgagagtggcgcacgggtgcgcaacgcgtatgcaaccaacccccgacaggcggatagccggtggaaacgccggataatacgccatggttccggtggagggcatcctctactggataaagccgagaggcggtcggggacgggc

SEQ ID NO: 1712 - DNA, 225 bp, unidentified
  misc_feature 1..225: note = Encodes 16S rRNA from unidentified taxa
  source 1..225: mol_type = genomic DNA
agagtttgatcatggctcagaacgaacgctggtagcgtggattaggcatgcaagtcgaacgggatccgggaggtagcaatacttcctggtgagagtggcggattggggaggaacacgtgagcaacctgcccttgagttggggaaaaccgttggaaacgacggctaataccggatgcggcgccccgtgacatcgcgggagcgctaaagggggccgcaaggctcccg

SEQ ID NO: 1713 - DNA, 225 bp, unidentified
  misc_feature 1..225: note = Encodes 16S rRNA from Selenomonas
  source 1..225: mol_type = genomic DNA
agagtttgatcctggctcaggacgaacgctggcggcgtgcttaacacatgcaagtcgaacggggcgattgagagcttgctcttgaaagcctagtggcaaacgggtgagtaacgcgtaggcaacctgcctccaagatggggacaacagtccgaaaggactgctaataccgaatgttgtaccttaaccgcatggtgaaggtattaaagatggcctctatatataagc

SEQ ID NO: 1714 - DNA, 225 bp, unidentified
  misc_feature 1..225: note = Encodes 16S rRNA from Parabacteroides
  source 1..225: mol_type = genomic DNA
agagtttacatggctcaggatgaacgctagcgacaggcctaacacatgcaagtcgcggggcagcattgaggtagcaatacttcagatggcgaccggcgcacgggtgcgtaacgcgtatccaacctggcccttactcgggtatagccctgcgaaagtaggattaatccccgatgttgtcaagatggagccttttttcttgaccaaaggcattagtcggtaagggat

SEQ ID NO: 1715 - DNA, 225 bp, unidentified
  misc_feature 1..225: note = Encodes 16S rRNA from Eubacterium
  source 1..225: mol_type = genomic DNA
agagtttgatcatggctcaggatgaacgctggcggcgtgcctaacacatgcaagtcgagcgagatatccatgacgaattcttcggatgcctgaatggatggaaagcggcggacgggtgagtaacgcgtaggtaacctgccctgtacaaagggatagccactggaaacggtgattaataccttatgacaccgcagcatcccatggtgaagcggtcaaagattttat

SEQ ID NO: 1716 - DNA, 225 bp, unidentified
  misc_feature 1..225: note = Encodes 16S rRNA from Coprococcus
  source 1..225: mol_type = genomic DNA
agagtttgatcatggctcaggatgaacgctggcggcgtgcttaacacatgcaagtcgaacgaagcacctcaaccgaagaagagaccagcttgctggtattggattcacccgaggtgacttagtggcgaacgggtgagtaacgcgtgggtaacctacctcttacagggggataacaattagaaatgattgctaataccgcataacactttagagccgcatggctca

SEQ ID NO: 1717 - DNA, 225 bp, unidentified
  misc_feature 1..225: note = Encodes 16S rRNA from Weissella
  source 1..225: mol_type = genomic DNA
agagtttgatcatggctcaggatgaacgctggcggcgtgcctaatacatgcaagtcgaacgctttgtttttaattgatatgaagagcttgctctgatttgattttatctgacaaagagtggcgaacgggtgagtaacacgtgggtaacctacctcttagcaggggataacatttggaaacaagtgctaataccgtataacactaacaaccgcatggttgttagtt

SEQ ID NO: 1718 - DNA, 225 bp, unidentified
  misc_feature 1..225: note = Encodes 16S rRNA from Pedobacter
  source 1..225: mol_type = genomic DNA
agagtttgatcatggctcaggatgaacgctagcggcaggcctaatacatgcaagtcgtacggtaaaatcctcttcgggggattgagagtggcggacgggtgcgtaacgcgtatgcaaccaacccccctcgccgggatagccggtggaaacgccggataataccggatgcgccgcgtgggaggcatctcccgtgcggcaaggcggagacgcggagggggacgggca

SEQ ID NO: 1719 - DNA, 225 bp, unidentified
  misc_feature 1..225: note = Encodes 16S rRNA from Clostridium XI
  source 1..225: mol_type = genomic DNA
agagtttgatcatggctcaggacgaacgctggcggcgtgcctaacacatgcaagtcgagcggggacatacggaacgagggattcgtcccgagggaaatatgtttcagcggcggacgggtgagtaacgcgtgaacgatctgtccctgacagggggataacacatggaaacaggtgctaataccgcataagaccacagcgctgcatggcgcaggggtcaaaggagag

SEQ ID NO: 1720 - DNA, 225 bp, unidentified
  misc_feature 1..225: note = Encodes 16S rRNA from Sphingomonas
  source 1..225: mol_type = genomic DNA
agagtttgatcctggctcagaaggaacgctagctatatgcttaacacatgcaagtcgaacgttgttttcggggagctgggcagaaggaaaagaggctcctagcgtgaaggttgcttgtctcgcccaggaggtgggaacagttgaaaacaaagtggcgaacgggtgcgtaatgcgtgggaatctgccgaacagttcgggccaaatcctgaagaaagctaaaaagcg

SEQ ID NO: 1721 - DNA, 225 bp, unidentified; identical to SEQ ID NO: 789
  misc_feature 1..225: note = Encodes 16S rRNA from Treponema
  source 1..225: mol_type = genomic DNA

SEQ ID NO: 1722 - DNA, 225 bp, unidentified
  misc_feature 1..225: note = Encodes 16S rRNA from Geobacter
  source 1..225: mol_type = genomic DNA
agagtttgatcatggctcagaacgaacgctggcggcaggcctaacacatgcaagtcgaacgtgaaaggggcttcggccctgagtaaagtggcgcacgggtgagtaacacgtgaataatctgcccttatgtctgggatagcagaccgaaaggactggtaaccccggataagcttccgcaccaaccgggtgagtggagaaaaatacgggatcgcaagaccgtatgca

SEQ ID NO: 1723 - DNA, 225 bp, unidentified
  misc_feature 1..225: note = Encodes 16S rRNA from Clostridium XlVa
  source 1..225: mol_type = genomic DNA
agagtttgatcatggctcaggatgaacgctggcggcgtgcttaacacatgcaagtcgaacgaagatatatcagcagaggccttcgggcggatgcagatatatacttagtggcggacgggtgagtaacgcgtggagaacctgccgtatgcagggggacaacacctggaaacgggtgctaataccgcataagcgcacgtgatagcattatcgagtgtgaaaagctta

SEQ ID NO: 1724 - DNA, 225 bp, unidentified
  misc_feature 1..225: note = Encodes 16S rRNA from Filomicrobium
  source 1..225: mol_type = genomic DNA
agagtttgatcatggctcagagcgaacgctagcggaatgctttatacatgcaagtcgaacgaacgagtttatattgagtagcaatacgatttataaatgagttagtggcaaacgggtgagtaatagttaggaacttgccgaatagtgggggacaacagatagaaatgtctgctaataccgcatattcccgagaggggaaagatttattgctatttgagaggccta

SEQ ID NO: 1725 - DNA, 225 bp, unidentified
  misc_feature 1..225: note = Encodes 16S rRNA from Prevotella
  source 1..225: mol_type = genomic DNA
agagtttgatcatggctcaggatgaacgctagctacaggcttaacacatgcaagtcgaggggaaacgacagagagtgcttgcactttttgggcgtcgaccggcgaatgggtgagtaacgcgtatccaacctgcccttgactgagggatagcccagtgaaaactgaattaatacctcatatcctcctccgacggcatcagacgaggagtaaagatttatcggtcaa

SEQ ID NO: 1726 - DNA, 225 bp, unidentified
  misc_feature 1..225: note = Encodes 16S rRNA from Pedobacter
  source 1..225: mol_type = genomic DNA
agagtttgatcatggctcaggatgaacgctagcggcaggcctaatacatgcaagtcggacggtaagtgccctttcgggggcacgagagtggcggacgggtgcgtaacgcgtatgcaaccaacccccgtcttccggatagccggtggaaacgccggataatacggaatgaaccctttggggggcatcccctggagggcaaggcggcgacgcggacggggacgggca

SEQ ID NO: 1727 - DNA, 225 bp, unidentified
  misc_feature 1..225: note = Encodes 16S rRNA from Pedobacter
  source 1..225: mol_type = genomic DNA
agagtttgatcatggctcaggatgaacgctagcggcaggcctaatacatgcaagtcggacggtaagcgccccttcgggggcgcgagagtggcgcacgggtgcgtaacgcgtatgcaaccagccccgtccaggcggatagccggtggaaacgccggataatacgccacggtcccggaggggggcatccctttccgggtgaagcggagacgcgggacgggacgggca

SEQ ID NO: 1728 - DNA, 225 bp, unidentified
  misc_feature 1..225: note = Encodes 16S rRNA from Clostridium XlVa
  source 1..225: mol_type = genomic DNA
agagtttgatcatggctcaggatgaacgctggcggcgtgcctaacacatgcaagtcgaacgaagaccccgaggcagagatttcggtcgaagccaagggaggactgagtggcggacgggtgagtaacgcgtggataacctgccccatacagggggatagcagttggaaacgactgataataccgcataagcgcacggggagacatctcctagtgtgaaaagagata

SEQ ID NO: 1729 - DNA, 225 bp, unidentified
  misc_feature 1..225: note = Encodes 16S rRNA from Bifidobacterium
  source 1..225: mol_type = genomic DNA
agagtttgatcatggctcaggatgaacgctggcggcgtgcttaacacatgcaagtcgaacgggatcggctggagcttgctccggccgtgagagtggcgaacgggtgagtaatgcgtgaccgacctgccccatacaccggaatagctcctggaaacgggtggtaatgccggatgctccagttggatgcatgtccttctgggaaagattctatcggtatgggatggg

SEQ ID NO: 1730 - DNA, 225 bp, unidentified
  misc_feature 1..225: note = Encodes 16S rRNA from Saccharofermentans
  source 1..225: mol_type = genomic DNA
agagtttgatcatggctcaggatgaacgctggcggcgtgcctaacacatgcaagtcgaacgaaaaactttcaccgaatgaaagatgaagattcatcagattctggatttcaccgaaagtttttagtggcggacgggtgagtaatacgtagataatctgccttctagagggaaataacagagagaaatttctgctaatgtcccataagaccacactatggcatctt

SEQ ID NO: 1731 - DNA, 225 bp, unidentified
  misc_feature 1..225: note = Encodes 16S rRNA from Ruminococcus
  source 1..225: mol_type = genomic DNA
agagtttgatcctggctcaggacgaacgctggcggcacgcttaacacatgcaagtcgaacggagtataggagcttgcttttatacttagtggcggacgggtgagtaacacgtgagcaacctgcctttcggagaggaataatgattggaaacggtcactaatacctcataaaatatatttatcgcatggtgagtatatcaaagatttatcgccgagagatgggctc

SEQ ID NO: 1732 - DNA, 225 bp, unidentified
  misc_feature 1..225: note = Encodes 16S rRNA from Flavobacterium
  source 1..225: mol_type = genomic DNA
agagtttgatcatggctcaggatgaacgctagcgacaggcctaacacatgcaagtcgaggggcagcgggaggtggcaacaccttgccggcgaccggcgcacgggtgcgtaacgcgtatgcaacctgtccgggacagtgggacagccccccgaaagggggattaataccgcatggctcttcaggaccgcatggtcttgaaggtaaacattcatgggtcccggctgg

SEQ ID NO: 1733 - DNA, 225 bp, unidentified
  misc_feature 1..225: note = Encodes 16S rRNA from Rhodopirellula
  source 1..225: mol_type = genomic DNA
agagtttgatcctggctcagaatgaacgttggcggcgtggattaggcatgcaagtcgagcgggagtagcaatactccagcggcgaaagggatagtaacgcgtagttaccaacccccgggactgggatagcttttggaaacgaaaggtaataccagataacatctccggatcaaaggtgagattccgcctggggacgggactgcgtcctattagttagttggtgag

SEQ ID NO: 1734 - DNA, 225 bp, unidentified
  misc_feature 1..225: note = Encodes 16S rRNA from Roseburia
  source 1..225: mol_type = genomic DNA
agagtttgatcctggctcaggagaaacgctggcggcgcacataagacatgcaagtcgaacggaatccagccaaatgtttaccatgaggcgaagatttagtggcggacgggtgagtaacacgtgagcaacctaccttcaggagggggataacattgagaaatcagtgctaataccgcataatactatgagaagacatcttcacatagtcaaaggatttccgcctaa

SEQ ID NO: 1735 - DNA, 225 bp, unidentified
  misc_feature 1..225: note = Encodes 16S rRNA from Prevotella
  source 1..225: mol_type = genomic DNA
agagtttgatcatggctcaggacgaacgctggcggcacgcttaacacatgcaagtcgaggggcatcaggacggtagcttgctatcgttgctggcgaccggcgcacgggtgagtaacgcgtatccaaccttcccatgactccggttcagcccgccgaaaggcggattactcccggatggtttccgaagagggcatctgatttggaataaagattgatcggtcatgg

SEQ ID NO: 1736 - DNA, 225 bp, unidentified
  misc_feature 1..225: note = Encodes 16S rRNA from Limibacter
  source 1..225: mol_type = genomic DNA
agagtttgatcatggctcaggatgaacgctagcggcaggcctaatacatgcaagtcgtacggtaagcgccccttcgggggtgcgagagtggcggacgggtgcgtaacgcgtatgcaaccaacccccctcgccgggatagccggtggaaacgccggataataccggatgcgccgcaggggaggcatcttcccggcggcaaggcggagacgcggagggggacgggca

SEQ ID NO: 1737 - DNA, 225 bp, unidentified
  misc_feature 1..225: note = Encodes 16S rRNA from Saccharofermentans
  source 1..225: mol_type = genomic DNA
agagtttgatcatggctcaggacgaacgctggcggcgtgcctaacacatgcaagtcgagcgaggacaacggcttcggtcgttgttcgagcggcggacgggtgagtaacgcgtgaacaatctgtccctgacagggggataacacttggaaacaggtgctaataccgcataagaccacaggaccgcatggttcaggggtcaaaggagcaatccggtgaggggtgagt

SEQ ID NO: 1738 - DNA, 225 bp, unidentified
  misc_feature 1..225: note = Encodes 16S rRNA from Clostridium sensu stricto
  source 1..225: mol_type = genomic DNA
agagtttgatcatggctcaggacgaacgctggcggcgtgcttaacacatgcaagtcgaacgaggtgtagcaatacaccgagtggcggacgggtgagtaacgcgtgagcaacctgcccttgtcaggggaataacacagagaaatctgtgctaataccgcatgacgttgaatcaaggcatcttgaatcaaccaaagcgaataagcggacaaggatgggctcgcgtcc

SEQ ID NO: 1739 - DNA, 225 bp, unidentified
  misc_feature 1..225: note = Encodes 16S rRNA from Clostridium III
  source 1..225: mol_type = genomic DNA
agagtttgatcatggctcaggatgaacgctggcggcgcacataagacatgcaagtcgaacgaacttaggctctttcttttagttagagtacggttagtggcggactggtgagtaatgtataagcaacctgcctatcagaggggaataacagtgagaaatcattgctaataccgcatatgctaacagaatcgcatgatttagttaggaaaggagtaatccgctgat

SEQ ID NO: 1740 - DNA, 225 bp, unidentified
  misc_feature 1..225: note = Encodes 16S rRNA from Prevotella
  source 1..225: mol_type = genomic DNA
agagtttgatcatggctcaggatgaacgctagctacaggcttaacacatgcaagtcgaggggcagcgggggcttagcttgctaagcttgccggcgaccggcgcacgggtgagtaacgcgtatccaaccttcccgcaggtagggaacagcccggcgaaagtcggattaatgccctatgaattcctttgatggcatctgatgaggaataaagatttatcgcctgcgg

SEQ ID NO: 1741 - DNA, 225 bp, unidentified
  misc_feature 1..225: note = Encodes 16S rRNA from Pseudoxanthomonas
  source 1..225: mol_type = genomic DNA
agagtttgatcatggctcagagtgaacgctggcggtaggcctaacacatgcaagtcgaacggcagcacaggagagcttgctctctgggtggcgagtggcggacgggtgaggaatacatcggaatctactctgtcgtgggggataacgtagggaaacttacgctaataccgcatacgacctacgggtgaaagtgggggaccgcaaggcctcacgcgatagaatgag

SEQ ID NO: 1742 - DNA, 225 bp, unidentified
  misc_feature 1..225: note = Encodes 16S rRNA from Anaerorhabdus
  source 1..225: mol_type = genomic DNA
agagtttgatcctggctcaggatgaacgctggcggcgtgcttaatacatgcaagtcgaacggacgctctgacaagcttgcttgaaagagtagtgcgtggcgaacgggtgagtaatacataggcaacctgccccgatgagcgggataaccaatggaaacgttggataataccgcataggtaatccgaaggcatctttggattattaaagtcgcgtttgcggcactt

SEQ ID NO: 1743 - DNA, 225 bp, unidentified
  misc_feature 1..225: note = Encodes 16S rRNA from Clostridium III
  source 1..225: mol_type = genomic DNA
agagtttgatcatggctcaggacgaacgctggcggcgtgcctaacacatgcaagtcgaacgagaaatgatgatttgattccttcgggatgaaaagattcatggacagtggcggacgggcgagtaacgcgtgagtaacctgcccataagagagggatagccgatggaaacgtcgagtaatacctcatattgtaatttgatcgcatgattgaattatgaaagattta

SEQ ID NO: 1744 - DNA, 225 bp, unidentified
  misc_feature 1..225: note = Encodes 16S rRNA from Streptomyces
  source 1..225: mol_type = genomic DNA
agagtttgatcctggctcaggacgaacgctggcggcgtgcttaacacatgcaagtcgaacgatgaaccggcttcggccggggattagtggcgaacgggtgagtaacacgtgggcaatctgccctgcactctgggacaagccctggaaacggggtctaataccggatacgaccgtttgaggcatctcatggcggtggaaagctccggcggtgcaggatgagcccgc

SEQ ID NO: 1745 - DNA, 225 bp, unidentified
  misc_feature 1..225: note = Encodes 16S rRNA from Pedobacter
  source 1..225: mol_type = genomic DNA
agagtttgatcatggctcaggatgaacgctagcggcaggcctaatacatgcaagtcgaacggtaaatgtcccttcggggacatgagagtggcggacgggtgcgtaacgcgtatgcaaccaacccccctcaccgggatagccggtggaaacgccggataagaccggatgcgccggcggggaggcatctccctgtcggcaaggcggcgacgcggagggggacgggca

SEQ ID NO: 1746 - DNA, 225 bp, unidentified
  misc_feature 1..225: note = Encodes 16S rRNA from Cellulomonas
  source 1..225: mol_type = genomic DNA
agagtttgatcatggctcaggacgaacgctggcggcgtgcttaacacatgcaagtcgaacggtgaagaccagcttgctggttggatcagtggcgaacgggtgagtaacacgtgagcaacctgcccttcactctgggataagccttggaaacggggtctaataccggatatgacgtccctacgcatgtgggggtgtggaaagatttatcggtgggggatgggctcg

SEQ ID NO: 1747 - DNA, 225 bp, unidentified
  misc_feature 1..225: note = Encodes 16S rRNA from Clostridium XlVa
  source 1..225: mol_type = genomic DNA
agagtttgatcatggctcaggatgaacgctggcggcgtgcctaacacatgcaagtcgaacgaagcatgttggaaagagtccttcgggacgatggaagacatgacttagtggcggacgggtgagtaacgcgtgggcaacctgccgtacacagggggacaacagctggaaacggctgctaataccgcataagcgcacagctttgcatgaagcagtgtgaaaagcgca

SEQ ID NO: 1748 - DNA, 225 bp, unidentified
  misc_feature 1..225: note = Encodes 16S rRNA from Olivibacter
  source 1..225: mol_type = genomic DNA
agagtttgatcatggctcaggatgaacgctagcggcaggcctaatacatgcaagtcgtacggtaaacggtccttcgggaccgtgagagtggcggacgggtgcgtaacgcgtatgcaaccaacccccctcgccgggatagccggtggaaacgccggataataccggatgcgccgcgtgggaggcatctcccgtgcggcaaggcggagacgcggagggggacgggca

SEQ ID NO: 1749 - DNA, 225 bp, unidentified
  misc_feature 1..225: note = Encodes 16S rRNA from Treponema
  source 1..225: mol_type = genomic DNA
agagtttgatcctggctcagaacgaacgctggcggcgcgtcttaagcatgcaagtcgagcggcaagttggtgcttgcaccaacccagagcggcggactggtgagtaacgcgtgggtgacgcaccctccggacggggacagcccgtggaaacacggggtaataccggatacggcggcatgggctggagccatgccgggaaaggagcttcggctccgccgggggagc

SEQ ID NO: 1750 - DNA, 225 bp, unidentified
  misc_feature 1..225: note = Encodes 16S rRNA from Gelidibacter
  source 1..225: mol_type = genomic DNA
agagtttgatcatggctcaggataaacgctagcggcaggcctaacacatgcaagtcgagcggcagcgggatgtagcaatacattgccggcgagcggcggacgggtgagtaacgcgtatgcaacctgcccaccacacggagatagccgaccgaaaggacgattaaactccgatggcattgggagccggcatcggcatccaattaaatatttataggtggtggatgg

SEQ ID NO: 1751 - DNA, 225 bp, unidentified
  misc_feature 1..225: note = Encodes 16S rRNA from Ruminococcus
  source 1..225: mol_type = genomic DNA
agagtttcatcctggctcaggatgaacgctagctacaggcttaacacatgcaagtcgaacggagaatgcttagcttgctttgcgttcttagtggcggacgggtgagtaacacgtgagcaacctgccttttggcgagggatagcttctggaaacggatggtaatacctcataaatatagctgaatcgcatgatttagttatcaaagaatttcgccaaaagatgggc

SEQ ID NO: 1752 - DNA, 225 bp, unidentified
  misc_feature 1..225: note = Encodes 16S rRNA from Clostridium IV
  source 1..225: mol_type = genomic DNA
agagtttgatcatggctcaggacgaacgctggcggcgtgcttaacacatgcaagtcgaacgagaatctgtggaaggagttttcggacaacggaaacagaggaaagtggcggacgggtgagtaacgcgtgaggaacctgccttggagagggggacaacagctggaaacggctgctaataccgcatgatgcgtgagggagacatctcccacacgccaaagatttatc

SEQ ID NO: 1753 - DNA, 225 bp, unidentified
  misc_feature 1..225: note = Encodes 16S rRNA from Gemmatimonas
  source 1..225: mol_type = genomic DNA
agagtttgatcctggctcaggacgaacgctggcggcgtgcttaacacatgcaagtcacgggggcccgcaagggtaaccggcgaacgggtgcgtaacacgtgagcaatctgccgtacactgggggatagccggcccaacggccgggtaataccgcatacgttccctgtctggcatcggatggggaggaaacctccgggggtgtacgaggagctcgcggcctatcag

SEQ ID NO: 1754 - DNA, 225 bp, unidentified
  misc_feature 1..225: note = Encodes 16S rRNA from Prevotella
  source 1..225: mol_type = genomic DNA
agagtttgatcatggctcaggatgaacgctagctacaggcttaacacatgcaagtcgaggggcagcatgaaggaagcttgcttcctttgatggcgaccggcgcacgggtgagtaacgcgtatccaaccttcccttaacttgggaatagcccggtgaaaaccggattaatgcccgatgtggtccagcgagggcatctgacccggaccaaagattttttcggttaag

SEQ ID NO: 1755 - DNA, 225 bp, unidentified
  misc_feature 1..225: note = Encodes 16S rRNA from Ethanoligenens
  source 1..225: mol_type = genomic DNA
agagtttgatcatggctcaggacgaacgctggcggcatgcctaacacatgcaagtcgaacggagcaaagagggcttgccctttttgcttagtggcggacgggcgagtaacgcgtgagcaacctgcccctcagaggggaataacgtccggaaacggacgctaataccgcataacgcagcgggaccgcatggttctgctgccaaaggagcaatccgctgagggatgg

SEQ ID NO: 1756 - DNA, 225 bp, unidentified
  misc_feature 1..225: note = Encodes 16S rRNA from Leucobacter
  source 1..225: mol_type = genomic DNA
agagtttgatcatggctcaggacgaacgctggcggcgtgcttaacacatgcaagtcgaacgatgaagcccagcttgctgggtggaagagtggcgaacgggtgagtaacacgtgagtaacctgcccctgactctgggataagcgctggaaacggcgtctaatactggatatgagcaatggccgcatggtctgttgttggaaagatttatcggttggggatggactc

SEQ ID NO: 1757 - DNA, 184 bp, unidentified
  misc_feature 1..184: note = Encodes 16S rRNA from Clostridium XlVa
  source 1..184: mol_type = genomic DNA
agagtttgatcctggctcaggataaacgctggcggcgtgctttgcacaatgggggaaaccctgatgcagcgacaccgcgtgagcgatgaaatatttcggtatgtaaagctctatcagcagggaagataatgacggtacctgactaagaagcaccggctaaatacgtgccagcagccgcggtaat

SEQ ID NO: 1758 - DNA, 225 bp, unidentified
  misc_feature 1..225: note = Encodes 16S rRNA from Clostridium XlVa
  source 1..225: mol_type = genomic DNA
agagtttgatcctggctcaggatgaacgctggcggcgtgcctaatacatgcaagtcgagcgaagcgcctgcttctgatctttcgggtgaagaaacaggcgactgagcggcggacgggtgagtaacacgtagggaacctgcctcacacagggggataacagttagaaatgactgctaataccgcataagcgcacaggaccgcatggtctggtgtgaaaagctccgg

SEQ ID NO: 1759 - DNA, 225 bp, unidentified
  misc_feature 1..225: note = Encodes 16S rRNA from Eggerthella
  source 1..225: mol_type = genomic DNA
agagtttgatcctggctcaggatgaacgctggcggcgtgcttaacacatgcaagtcgaacgattaacccatcttcggatggttatagagtggcgaacgggtgagtaacacgtgatcaacctacctttcactttgggataactacgggaaactgtagctaataccaaatactcctggggttccgcatggcgccctagggaaagttccggcggtgaaagatgggatc

SEQ ID NO: 1760 - DNA, 225 bp, unidentified
  misc_feature 1..225: note = Encodes 16S rRNA from Prevotella
  source 1..225: mol_type = genomic DNA
agatttgatcatggctcaggatgaacgctagctacaggcttaacacatgcaagtcgaggggtaacggcagtgaagcttgctttactggccgacgaccggcgcacgggtgagtaacgcgtatccaacctgcccatgactcagggataaccttccgaaagggagcctaatacctgatgttgtgagacgagggcatctgagtgtcaccaaagattcatcggtcatgga

SEQ ID NO: 1761 - DNA, 225 bp, unidentified
  misc_feature 1..225: note = Encodes 16S rRNA from Prevotella
  source 1..225: mol_type = genomic DNA
agagtttgatcatggctcaggatgaacgctagctacaggcttaacacatgcaagtcgaggggcagcatgggagttgcttgcaacttctgatggcgaccggcgcacgggtgagtaacgcgtatccgaccttccctcaggtagggaacagcccggcgaaagtcggattaatgccctatagtctgcgaattgcgcatgttgtttgcagtaaagatttatcgcctgggg

SEQ ID NO: 1762 - DNA, 225 bp, unidentified
  misc_feature 1..225: note = Encodes 16S rRNA from Solobacterium
  source 1..225: mol_type = genomic DNA
agagtttgatcatggctcaggataaacgctggcggcgtgcctaatacatgcaagtcgaacgatgaagttctcaagcttgcttgagaatagattagtggcgaacgggtgagtaatacataagcaacctacccatgaagactgggataatctctggaaacggggactaataccggataggtaagcggaccgcatgatctgcttattaaaggttaaaaacactgatgg

SEQ ID NO: 1763 - DNA, 225 bp, unidentified
  misc_feature 1..225: note = Encodes 16S rRNA from Xanthobacter
  source 1..225: mol_type = genomic DNA
agagtttgatcctggctcagagcgaacgctggcggcaggcctaacacatgcaagtcgagcgcccggcaacgggagcggcagacgggtgagtaacgcgtggggatctacccattggtacggaataacccagggaaacttggactaataccgtatgtgtccttttggagaaagatttatcgccaatggatgaacccgcgtcggattagctagttggtggggtaaagg

SEQ ID NO: 1764 - DNA, 225 bp, unidentified
  misc_feature 1..225: note = Encodes 16S rRNA from unidentified taxa
  source 1..225: mol_type = genomic DNA
agagtttgatcctggctcagaacgaacgctggtagcgtggattaggcatgcaagtcgaacgggatccatgaagtagcaatacggattggtgagagtggcggaagggcgaggaacacgtgagcaacctgtccttgaggtggggaaaaccgttggaaacgacggctaataccgaatgtggcgcccggagacatctccggagcgctaaagggggcccaaaaggctctc

SEQ ID NO: 1765 - DNA, 225 bp, unidentified
  misc_feature 1..225: note = Encodes 16S rRNA from Desulfovibrio
  source 1..225: mol_type = genomic DNA
agagtttgatcctggctcagattgaacgctggcggcgtgcttaacacatgcaagtcgaacgcgaaaggggcttcggccccgagtagagtggcgcacgggtgagtaacgcgtggataatctgcccctgtgactggaatagcgactggaaacggtcgataataccggatacgcccttgttgaacgatgaggggaaaggagacctctgcttgcaagtttccgtgcagg

SEQ ID NO: 1766 - DNA, 225 bp, unidentified
  misc_feature 1..225: note = Encodes 16S rRNA from Microbacterium
  source 1..225: mol_type = genomic DNA
agagtttgatcctggctcaggatgaacgctggcggcgtgcttaacacatgcaagtcgaacggtgaaagcggagcttgctctgctggatcagtggcgaacgggtgagtaacacgtgagcaatctgcccttgactctgggataagcgctggaaacggcgtctaataccggatacgagctgcgaaggcatcttcagcagctggaaagaacttcggtcaaggatgagct

SEQ ID NO: 1767 - DNA, 225 bp, unidentified
  misc_feature 1..225: note = Encodes 16S rRNA from Oscillibacter
  source 1..225: mol_type = genomic DNA
agagtttgatcatggctcaggatgaacgctggcggcgtgcctaacacatgcaagtcgaacgaagcattctggaaggagacttcggtcaacggaagggatgacttagtggcggacgggtgagtaacgcgtgagcaacctgcctcagagtgggggacaacagctggaaacggctgctaataccgcatgatacttttggaaggcatcttctgaaagtcaaagctttat

SEQ ID NO: 1768 - DNA, 225 bp, unidentified
  misc_feature 1..225: note = Encodes 16S rRNA from Blautia
  source 1..225: mol_type = genomic DNA
agatttgatcatggctcaggatgaacgctggcggcgtgcctaacacatgcaagtcgaacggagatcttatggaaagcggcttcggccaatggatatctgatcttagtggcggacgggtgagtaacgcgtggggaacctgccctgtactgggggataacacccagaaatgagtgctaataccgcataagcgcacagtaccgcatggtacagtgtgaaaaactccgg

SEQ ID NO: 1769 - DNA, 225 bp, unidentified
  misc_feature 1..225: note = Encodes 16S rRNA from Papillibacter
  source 1..225: mol_type = genomic DNA
agagtttgatcatggctcaggacgaacgctggcggcgtgcttaacacatgcaagtcgaacggagttatttccgacacggagccactgaggaattagtggttgcgtgttggggataacttagtggcgaacgggtgagtaacgcgtaagcaatctgccttacagagggggataacgtttggaaacgaacgctaataccgcataacgtcatgaagaggcatcttttta

SEQ ID NO: 1770 - DNA, 225 bp, unidentified
  misc_feature 1..225: note = Encodes 16S rRNA from Prevotella
  source 1..225: mol_type = genomic DNA
agagtttgatcatggctcaggatgaacgctagctacaggcttaacacatgcaagtcgaggggcagcatgaagtttgcttgcaaactttgatggcgaccggcgcacgggtgagtaacgcgtatccgaccttccccctgcccaggtatagtccgctgaaaggcggtttaatccctggtgctgtcctgcgggtgcatgccatcgggacgaaaggatttccggcagggg

SEQ ID NO: 1771 - DNA, 225 bp, unidentified
  misc_feature 1..225: note = Encodes 16S rRNA from Lentisphaera
  source 1..225: mol_type = genomic DNA
agagtttgatcatggctcagaatgaacgctggcggcatggattaggcatgcaagtcgaacgccccgggctttgcccggggagtggcgaaagggtgcgcaacgcgtggggaacccgcccccgggcccgggacaagcgctggaaacggcgtctgatacgggatgtcgagccgggccgcatggcccggcgtcgaaagattcatcgcccggggagggccccgcgtccca

SEQ ID NO: 1772 - DNA, 225 bp, unidentified
  misc_feature 1..225: note = Encodes 16S rRNA from Ruminococcus
  source 1..225: mol_type = genomic DNA
agagtttgatcatggctcagattgaacgctggcggcacgcttaacacatgcaagtcgaacgggactaagagagaagcttgcttcacttttagtttagtggcggacgggtgagtaacacgtgagtaacctgcccttatcaggggaatagcctccggaaacggagagtaataccgcataagatgacgatgtggcatcacatagtcataaaagattttatcggataag

SEQ ID NO: 1773 - DNA, 225 bp, unidentified
  misc_feature 1..225: note = Encodes 16S rRNA from Bacteroides
  source 1..225: mol_type = genomic DNA
agagtttgatcctggctcaggatgaacgctagcggcaggcttaacacatgcaagtcgaggggcagcgtgggggtagcaatactcccgacggcgaccggcgcacgggtgagtaacgcgtatgcaacctttcccagacagggggatagcccagggaaacttggattaataccccgtaggccagaagagggcatcctcatctggttaaagttccggcggtctggggtg

SEQ ID NO: 1774 - DNA, 225 bp, unidentified
  misc_feature 1..225: note = Encodes 16S rRNA from Catonella
  source 1..225: mol_type = genomic DNA
agagtttgatcatggctcaggatgaacgctggcggcgtgcctaacacatgcaagtcgaacggggacgtcccgccgttgaagcttcggcagagacatgggacatcctagtggcggacgggtgagtaacgcgtgggcaacctgccctgtactgggggatagcagctggaaacggctggtaataccgcataagcgcacagtgtcgcatgacacagtgtgaaaagctcc

SEQ ID NO: 1775 - DNA, 225 bp, unidentified
  misc_feature 1..225: note = Encodes 16S rRNA from Clostridium XlVa
  source 1..225: mol_type = genomic DNA
agagtttgatcctggctcaggatgaacgctggcggcgtgcttaatacatgcaagtcgaacggaagttattgggagcttgctcttgatgactttagtggcggacgggtgagtaacgcgtgggtaacctgcctcatacagggggataacagttagaaatgactgctaaaaccgcataacatgatggaaccgcatgatttcatcatcaaatatttataggtatgagat

SEQ ID NO: 1776 - DNA, 225 bp, unidentified
  misc_feature 1..225: note = Encodes 16S rRNA from Clostridium IV
  source 1..225: mol_type = genomic DNA
agagtttgatcatggctcaggacgaacgctggcggcgtgcctaacacatgcaagtcgaacggagttaacaatggaagttccttcggggacggaagctgttaacttagtggcggacgggtgagtaacgcgtgagtaacctgcctttcagagggggataacgttcggaaacgaacgctaataccgcataacatagcgataccgcatggtaatgctatcaaaggagca

SEQ ID NO: 1777 - DNA, 225 bp, unidentified
  misc_feature 1..225: note = Encodes 16S rRNA from unidentified taxa
  source 1..225: mol_type = genomic DNA
agagtttgatcatggctcagaacgaacgctggtcgcgtggattaggcatgcaagtcgaacgggatccatgaagtagcaatacggattggtgagagtggcggaagggcgaggaacacgtgggcaacctgtctttgaggtggggaaaacctcgggaaactgaggctaataccgaatgtggcgcggaagggcatccttcctgcgctaaagggggcgaaagctccccct

SEQ ID NO: 1778 - DNA, 225 bp, unidentified
  misc_feature 1..225: note = Encodes 16S rRNA from Clostridium XI
  source 1..225: mol_type = genomic DNA
agagtttgatcatggctcaggatgaacgctggcggcgtgcttaacacatgcaagtcgaacggagatacgtaaaagaagttttcggatggaatttacatatcttagtggcggacgggtgagtaacacgtaaacaatctgcctttgagagcgggataacagatagaaatatttgctaataccgcataagaccacaacatcgcatgatgaaggggtaaaaggggagca

SEQ ID NO: 1779 - DNA, 225 bp, unidentified
  misc_feature 1..225: note = Encodes 16S rRNA from Prevotella
  source 1..225: mol_type = genomic DNA
agagtttgatcatggctcaggatgaacgctagctacaggcttaacacatgcaagtcgaggggtaacgggcagcagtgcttgcactgctgtgctgacgaccggcgcacgggtgagtaacgcgtatccaaccttcccatgagtagtgcatagcccggcgaaagtcggattaattcactatatgtggcatttcggcatctttatgtcacgaaagattcatcgctcatg

SEQ ID NO: 1780 - DNA, 225 bp, unidentified
  misc_feature 1..225: note = Encodes 16S rRNA from unidentified taxa
  source 1..225: mol_type = genomic DNA
agagtttgatcatggctcaggatgaatgctggcggcgtgcctaatacatgcaagtcgagcggtaacagggggactcaccgtactcttgacactcttgcccagagaggaagaggtcggatcgagggtacagtgagtccccgctgacgagcggcggacggctgagtaacgcgtgggaacataccccaaactgagggataactagtcgaaagattagctaataccgca

SEQ ID NO: 1781 - DNA, 225 bp, unidentified
  misc_feature 1..225: note = Encodes 16S rRNA from Mogibacterium
  source 1..225: mol_type = genomic DNA
agagtttgatcctggctcaggatgaacgctggcggcgtgcctaatacatgcaagtcgagcgagaagccaatttgaagcgttttcggacaattctgtttggtggaaagcggcggacgggtgagtaacgcgtaggcaacctgcccttagcagagggatagccattggaaacgatgattaaaacctcataatgccgattcaacacatgttgaaccggccaaagattta

SEQ ID NO: 1782 - DNA, 225 bp, unidentified
  misc_feature 1..225: note = Encodes 16S rRNA from Clostridium XlVa
  source 1..225: mol_type = genomic DNA
agagtttgatcctggctcaggatgaacgctggcggcgtgcctaacacatgcaagtcgaacggggtttagatgaaacctagtgattctaaacctagtggcggacgggtgagtaacgcgtgggtaacctgccgtatgcagggggacaacagttggaaacgactgctaataccgcataagcgcacagcttcacatggagcagtgtgaaaagatttatcggcatacgat

SEQ ID NO: 1783 - DNA, 225 bp, unidentified
  misc_feature 1..225: note = Encodes 16S rRNA from Ruminococcus
  source 1..225: mol_type = genomic DNA
agatttgatcctggctcaggacgaacgctggcggcacgcttaacacatgcaagtcgaacgggactaagagagaagcttgcttcacttttagtttagtggcggacgggtgagtaacacgtgagtaacctgcccttatcaggggaatagcctctggaaacggagagtaataccgcataagatggcaatgtggcatcacatagtcataaaagattttatcggataagg

SEQ ID NO: 1784 - DNA, 225 bp, unidentified
  misc_feature 1..225: note = Encodes 16S rRNA from Eubacterium
  source 1..225: mol_type = genomic DNA
agagtttgatcatggctcaggattaacgctggcggcgtgcctaacacatgcaagtcgagcgagaaatagtgatatgaaacttcggtagattggatctatggacagcggcggacgggtgagtaacgcgtgggcaacctgcccctttctggaggatagccaagggaaactttgaataatactccataacgcaagagcatcgcatggtgcacttgccaaagatttatc

SEQ ID NO: 1785 - DNA, 225 bp, unidentified
  misc_feature 1..225: note = Encodes 16S rRNA from Clostridium IV
  source 1..225: mol_type = genomic DNA
agagtttgatcctggctcaggacgaacgctggcggcgtgcctaacacatgcaagtcgagcggagacataccacgaagtgaaagttttcggacggaagcggagagatatgttttagcggcggacgggtgagtaacgcgtgagcaacctgtccctcacagggggataacacatcgaaaggtgtactaataccgcatgagaccacggcgggacatctcgcaggggtca

SEQ ID NO: 1786 - DNA, 225 bp, unidentified
  misc_feature 1..225: note = Encodes 16S rRNA from Rhodomicrobium
  source 1..225: mol_type = genomic DNA
agagtttgatcctggctcagaacgaacgctggcggcaggcttaacacatgcaagtcgaacgcgtgcagcaatgcacgagtggcgcacgggtgagtaacgcgtggatatctgccttttggttcggaataaccccgggaaactggggctaataccggatggttcctacgggataaagatttatcgccaaaagatgagtccgcgtccgattagctagttggtggggta

SEQ ID NO: 1787 - DNA, 225 bp, unidentified
  misc_feature 1..225: note = Encodes 16S rRNA from Butyricicoccus
  source 1..225: mol_type = genomic DNA
agagtttgatcatggctcaggacgaacgctggcggcgtgcctaacacatgcaagtcgaacggagaacccacgaacgagttttcggacaagtaagtggaattcttagtggcggacgggtgagtaacgcgtgagcaacctgcctttcagagggggataacagtgggaaaccactgctaataccgcataacgtatatataaggcatcttagatataccaaaggagcaa

SEQ ID NO: 1788 - DNA, 225 bp, unidentified
  misc_feature 1..225: note = Encodes 16S rRNA from Saccharofermentans
  source 1..225: mol_type = genomic DNA
agagtttgtcctggctcaggatgaacgctggcggcgtgcttaacacatgcaagtcgaacggagatatatgtatgaagttttcggatggaatgtatatatcttagtggcggacgggtgagtaacgcgtaaacaatctgccttagagagggggataacagatagaaatatctgctaataccgcataagaccacgtacaggcatctagacggggtaaaaggagcaatc

SEQ ID NO: 1789 - DNA, 225 bp, unidentified
  misc_feature 1..225: note = Encodes 16S rRNA from Prevotella
  source 1..225: mol_type = genomic DNA
agagtttgatcatggctcaggatgaacgctagctacaggcttaacacatgcaagtcgaggggcagcatgggagttgcttgcaattcccgatggcgaccggcggatgggtgagtaacgcgtatccaacctgtcccgcgcgcggggacagcccttggaaatgaggattaacccccgataggccatggggccgcatggtttcatggtgaacctttgcgcgggttgggg

SEQ ID NO: 1790 - DNA, 225 bp, unidentified
  misc_feature 1..225: note = Encodes 16S rRNA from Mannheimia
  source 1..225: mol_type = genomic DNA
agagtttgatcatggctcaggacgaacgctggcggcgtgcttaacacatgcaagtcgaacggggaatattgcacaatgggggaaaccctgatgcagccatgccgcgtgtgtgaagaaggccttcgggttgtaaagcacttttgcattcgaggaagacggcgtataaataaatgcgctatttgacgttagagtgtgaataagcaccggcaaactccgtgccagcag

SEQ ID NO: 1791 - DNA, 225 bp, unidentified
  misc_feature 1..225: note = Encodes 16S rRNA from Lactobacillus
  source 1..225: mol_type = genomic DNA
agagtttgatcatggctcaggacgaacgctggcggcgtgcctaatacatgcaagtcgaacgagactttttatttgatgcttgcatcttttaaaaagttgagtggcgaacgggtgagtaacacgtgggtaacctgccttaaagtgggggataacacttggaaacaggtgctaataccgcataaccatcaaaaccgcctggttttgatgttaaagatggttctgcta

SEQ ID NO: 1792 - DNA, 225 bp, unidentified
  misc_feature 1..225: note = Encodes 16S rRNA from Clostridium IV
  source 1..225: mol_type = genomic DNA
agagtttgatcctggctcaggagaaacgctggcggcgcacataagacatgcaagtcgaacggaacttagttgaatgtttacatgagacgaaagtttagtggcggacgggtgagtaacacgtgagcaacctgcctttaagagggggataacattgagaaatcagtgctaataccgcataaagcatagcattcgcatgtaagctatgccaaaggagaaatccgctta

SEQ ID NO: 1793 - DNA, 225 bp, unidentified
  misc_feature 1..225: note = Encodes 16S rRNA from Clostridium IV
  source 1..225: mol_type = genomic DNA
agagtttgatcatggctcaggataaacgctggcggcgtgcataacacattcaagtcgaacggactgattggggagcttgctctccatgaaagttagtggcggacgggtgagtaacgcgtgagcaacctgcctttgcgagggggataacacagagaaatttgtgctaataccgcatgacgcaccgaggtcacatggccatggtgtcaaaggagcaatccgcgcaaa

SEQ ID NO: 1794 - DNA, 225 bp, unidentified
  misc_feature 1..225: note = Encodes 16S rRNA from Adlercreutzia
  source 1..225: mol_type = genomic DNA
agagtttgatcctggctcaggatgaacgctggcggcgtgcctaacacatgcaagtcgaacggttaaaccggcttcggccggatatagagtggcgaacgggtgagtaacacgtgaccaacctgccccccgctccgggataacccagggaaacctgcgctaataccggacgatgccgcaagggcgcatgccctcgcggccgaagcccaggcggcgggggatggggtc

SEQ ID NO: 1795 - DNA, 225 bp, unidentified
  misc_feature 1..225: note = Encodes 16S rRNA from Selenomonas
  source 1..225: mol_type = genomic DNA
agagtttgatcatggctcaggacgaacgctggcggcgtgcttaacacatgcaagtcgaacgggactgattgaaagcttgcttttgaaaagtctagtggcaaacgggtgagtaacgcgtaggcaacctgcctctaagatggggacaacagtccgaaaggactgctaataccgaatgttgtgagtttttcgcatgaaagactcattaaagatggcctctacttgtaa

SEQ ID NO: 1796 - DNA, 225 bp, unidentified
  misc_feature 1..225: note = Encodes 16S rRNA from Paenibacillus
  source 1..225: mol_type = genomic DNA
agagtttgatcatggctcaggatgaacgctggcggcatgcctaagacatgcaagtcgtacgcgagggcccaatgaagacattgaaactgaagaagcttgcttctgatgtggatttgttggatttggattttccctcgagtggcaaacgggtgagtaacacgtgggttacctgcctctatgttggggataacagttggaaacgattgctaataccgaatatgctct

SEQ ID NO: 1797 - DNA, 225 bp, unidentified
  misc_feature 1..225: note = Encodes 16S rRNA from Clostridium IV
  source 1..225: mol_type = genomic DNA
agagtttgatcctggctcaggacgaacgctggcggcgcgcctaacacatgcaagtcgaacggagagtgtgttttgaattcttcggaaggaaaggcacatttcttagtggcggacgggtgagtaacacgtgagcaacctgccttgtagagggggataacgattggaaacgatcgctaataccacatgatatatgggtatcgcatggtaaccatatcaaagatttat

SEQ ID NO: 1798 - DNA, 225 bp, unidentified
  misc_feature 1..225: note = Encodes 16S rRNA from Paenibacillus
  source 1..225: mol_type = genomic DNA
agagtttgatcatggctcaggatgaacgctggcggcatgcctaagacatgcaagtcgaacgaggtggcccaatgaaggtggagtgcttgcacaatactggatttggattcccgcctagtggcagacgggtgagtaacacgtgggttacctacctctttgttggggataacagttggaaacgattgctaataccgaataagatactcgtattgaaaggagctttca

SEQ ID NO: 1799 - DNA, 225 bp, unidentified
  misc_feature 1..225: note = Encodes 16S rRNA from Butyricimonas
  source 1..225: mol_type = genomic DNA
agagtttgatcctggctcaggatgaacgctagcggcaggcttaacacatgcaagtcgaggggcagcgcggggtagcaatactctggcggcgaccggcggaagggtgcgtaacgcgtgagcaacttgcccgtcactgggggataggcactggaaacggtgtgtaatactccataacatatggattcacatggatttatattgaaagattcgttggtgacggatggg

SEQ ID NO: 1800 - DNA, 225 bp, unidentified
  misc_feature 1..225: note = Encodes 16S rRNA from Wandonia
  source 1..225: mol_type = genomic DNA
agagtttgatcatggctcaggatgaacgctagcggcaggcctaacacatgcaagtcgaggggcagcaggaggtagcaataccttgctggcgaccggcgcacgggtgcgtaacgcgtatgcaacctacccatgacagggggataacggagagaaatttccactaataccccgtattgttcaggaatcgcatggtttttggacgaaagcctttgggcggtcatggac

SEQ ID NO: 1801 - DNA, 225 bp, unidentified
  misc_feature 1..225: note = Encodes 16S rRNA from Puniceicoccus
  source 1..225: mol_type = genomic DNA
agagtttgatcatggctcagagtgaacgctggcgacgtggctaagacatgcaagtcgagcgagaaggtgccttcgggtatcggaaagcggcaaacgggtgcgtaacacgtaagtaacctgcccttaagacgggaatagcttgatgaaaattgagataatgcccgatatcaaattcttccgcatggaagaagtttgaaaggtttgtgatgacgcttaaggagggac

SEQ ID NO: 1802 - DNA, 225 bp, unidentified
  misc_feature 1..225: note = Encodes 16S rRNA from Lactonifactor
  source 1..225: mol_type = genomic DNA
agagtttgatcatggctcaggatgaacgctagctacaggcttaacacatgcaagtcgaggggcagcatcgggcagtgggggatattgcacaatgggcgcaagcctgatgcagcgacgccgcgtgaaggaagacgtatttcggtatgtaaacttctatcagcggggaagaagatgacggtacccgactaagaagccccggctaattacgtgccagcagccgcggta

SEQ ID NO: 1803 - DNA, 225 bp, unidentified
  misc_feature 1..225: note = Encodes 16S rRNA from Selenomonas
  source 1..225: mol_type = genomic DNA
agagtttgatcatggctcaggacgaacgctggcggcgtgcttaacacatgcaagtcgaacgagacggattgaaagcttgcttttgaaatgtcgagtggcaaacgggtgagtaacgcgtagacaacctgccgcaaagatggggacaacagtccgaaaggactgctaataccgaatgttgtcaagtttccgcatgggagcttgattaaagatggcctctacttgtaa

SEQ ID NO: 1804 - DNA, 225 bp, unidentified
  misc_feature 1..225: note = Encodes 16S rRNA from Brevundimonas
  source 1..225: mol_type = genomic DNA
agagtttgatcatggctcaggacgaacgctggcggtgtgcctcatacatgcaagtcgaacgataaggttccttcgggaatacataagtggcggacgggtgagtacaacataggaaatctgccctaaagcgggggacaacagagggaaactcctgctaataccccatatgagcttggttgaaataccaatcttgaaagatttatcactttaggatgagcctgtgcc

SEQ ID NO: 1805 - DNA, 225 bp, unidentified
  misc_feature 1..225: note = Encodes 16S rRNA from Prevotella
  source 1..225: mol_type = genomic DNA
agatttgatcctggctcaggatgaacgctagctacaggcttaacacatgcaagtcgaggggcagcgggaagtttgcttgcaagcttcgccggcgaccggcgcacgggtgagtaacgcgtatccaacctgccccacggtcggggacagcccggcgaaagtcggattaacccccgatggtcccgcaagacggcatcagattgcgggtaaaggctcgtccgccgtggg

SEQ ID NO: 1806 - DNA, 225 bp, unidentified
  misc_feature 1..225: note = Encodes 16S rRNA from Gelidibacter
  source 1..225: mol_type = genomic DNA
agagtttgatcctggctcaggataaacgctagcggcaggcctaacacatgcaagtcgagcggcaacgggagtagcaatacttgccggcgagcggcggacgggtgagtaacgcgtatgcaacctgcccatcacacggagatagccgaccgaaaggacgattaaactccgatggcatcaagagggggcatccccatttgattaaatattcataggtgatggatgggc

SEQ ID NO: 1807 - DNA, 225 bp, unidentified
  misc_feature 1..225: note = Encodes 16S rRNA from Mogibacterium
  source 1..225: mol_type = genomic DNA
agagtttgatcctggctcaggatgaacgctggcggcgtgcctaatacatgcaagtcgagcgagaagctccattgaagcgttttcggacaattcaaaggagtggaaagcggcggacgggtgagtaacgcgtaggcaacctgcccttagcagagggatagccattggaaacgatgattaaaacctcataacgccaactcaacacatgttgagctggccaaagattta

SEQ ID NO: 1808 - DNA, 225 bp, unidentified
  misc_feature 1..225: note = Encodes 16S rRNA from Clostridium XlVa
  source 1..225: mol_type = genomic DNA
agagtttgatcatggctcaggatgaacgctggcggcgtgcctaacacatgcaagtcgaacgaagttgtttccatccgacagaatatcttcggatatgaagtcaccggaaacgcttagtggcggacgggtgagtaacgcgtgggcaacctgccctacacagggggatagcggttggaaacgaccggtaataccgcatacctttattgaaccgcatgatttaataaa

SEQ ID NO: 1809 - DNA, 225 bp, unidentified
  misc_feature 1..225: note = Encodes 16S rRNA from Coprococcus
  source 1..225: mol_type = genomic DNA
agagtttgatcatggctcagattgaacgctggcggcgtgcttaacacatgcaagtcgaacggactgatgagagagcttgctctttctgaaagttagtggcggacgggtgagtaacgcgtgggaaacctgccttacactgggggataacagatggaaacgcctgttaataccgcataagcgcacggtgctgcatggtaccgtgtgaaaaactctggtggtgtaaga

SEQ ID NO: 1810 - DNA, 225 bp, unidentified
  misc_feature 1..225: note = Encodes 16S rRNA from unidentified taxa
  source 1..225: mol_type = genomic DNA
agagtttgatcatggctcagaacgaacgctggcagcgtggattaggcatgcaagtcgaacgggatccggaaggtagcaatatcggccggtgagagtggcggaagggcgaggagcacgtggacaacctgtccagaggacggggaaaacctcgggaaactgaggctaatacccgatgcgccgggagctgggcatccatcttccggcaaagggggcgaaagctcccgc

SEQ ID NO: 1811 - DNA, 225 bp, unidentified
  misc_feature 1..225: note = Encodes 16S rRNA from Barnesiella
  source 1..225: mol_type = genomic DNA
agagtttgatcatggctcaggatgaacgctagcgacaggcctaacacatgcaagtcgaggggcagcattatcgaagcttgctttgatagatggcgaccggcgcacgggtgagtaacgcgtatgcaacctgtccgtcatagtgggataatcccgagaaattgggtctaataccacgtatgccgtatatgggcatccatgtacggtgaaagagattcgttgacggtt

SEQ ID NO: 1812 - DNA, 225 bp, unidentified
  misc_feature 1..225: note = Encodes 16S rRNA from unidentified taxa
  source 1..225: mol_type = genomic DNA
agagtttgatcatggctcagaacgaacgctggcagcgtggatgaggcatgcaagtcgaacggtcgtgtgctggtagcaatattggtgcacgatagtggcggaagggcgagtaatgcgagagcaagctacccctcgattcggaacaacggctggaaacggccgctaatgccggatacgaacgcgaagccgcatggctttgcgttgaaaggccgggacccgcaaggg

SEQ ID NO: 1813 - DNA, 225 bp, unidentified
  misc_feature 1..225: note = Encodes 16S rRNA from Clostridium XlVa
  source 1..225: mol_type = genomic DNA
agagtttgatcctggctcaggatgaacgctggcggcgtgcctaacacatgcaagtcgaacggagatgtgacaccggaagaggattcgtctgattccaccgttgcatcttagtggcggatgggtgagtaacgcgtggataacctgcccttcactgggggataacaaccggaaacgggtgctaataccgcataggcgcacggggccgcatggccttgagcgtaaaga

SEQ ID NO: 1814 - DNA, 225 bp, unidentified
  misc_feature 1..225: note = Encodes 16S rRNA from Anaerovorax
  source 1..225: mol_type = genomic DNA
agagtttgatcatggctcaggatgaacgctggcggcgtgcttaacacatgcaagtcgagcgagaaacctaaaaatgacgcttcggtagattttttaggcggaaagcggcggacgggtgagtaacgcgtaggcaacctgcccttagcagagggatagcctcgggaaaccgggattaaaacctcataatactgtacattcacatgtatgtatagtcaaagatttatc

SEQ ID NO: 1815 - DNA, 225 bp, unidentified
  misc_feature 1..225: note = Encodes 16S rRNA from Bacteroides
  source 1..225: mol_type = genomic DNA
agagtttgatcctggctcaggatgaacgctagcggcaggcttaacacatgcaagtcgaggggcagcgtgttggtagcaataccgacgacggcgaccggcgcacgggtgagtaacgcgtatgcaacctttcccagacagggggatagcccagggaaacttggattaataccccgtaggccacggatgggcatccgtctgtggttaaagttccggcggtctggggtg

SEQ ID NO: 1816 - DNA, 225 bp, unidentified
  misc_feature 1..225: note = Encodes 16S rRNA from Parasporobacterium
  source 1..225: mol_type = genomic DNA
agagtttgatcatggctcaggatgaacgctggcggcacgcttaacacatgcaagtcgaacgaggttatggacttcggttaataacctagtggcggacgggtgcgtaacgcgtgggtaatctgcccttgacagggggataacgtatagaaatgtacgctaataccgcataagcccacgagaccgcatggtcttgagggaaaagggatactggtcaaggatgagccc

SEQ ID NO: 1817 - DNA, 225 bp, unidentified
  misc_feature 1..225: note = Encodes 16S rRNA from Prevotella
  source 1..225: mol_type = genomic DNA
agagtttgatcatggctcaggatgaacgctagctacaggcttaacacatgcaagtcgcggggcagcatgaagccagcttgctggctttgatggcgaccggcgcacgggtgagtaacgcgtatccaacctgcccatgggcgaggcacagcccggcgaaagccggattaatgccttgcggtctccttgaaggccatccgccgaggagtaaaggcttttagccgccca

SEQ ID NO: 1818 - DNA, 225 bp, unidentified
  misc_feature 1..225: note = Encodes 16S rRNA from Parapedobacter
  source 1..225: mol_type = genomic DNA
agagtttgatcctggctcaggatgaacgctagcggcaggcctaacacatgcaagtcgaggggcagcgcggtgtggcaacacactggcggcgaccggcggatgggtgcgtaacgcgtatgcaacctgcctccgagagggggataacccgtggaaacgcggactaataccccgtatgcgcacgacgccgcatgacgttgtgcggaaagattcattgctcggagatgg

SEQ ID NO: 1819 - DNA, 225 bp, unidentified
  misc_feature 1..225: note = Encodes 16S rRNA from Streptomyces
  source 1..225: mol_type = genomic DNA
agagtttgatcatggctcaggacgaacgctggcggcgtgcttaacacatgcaagtcgaacggtgaaccagggcttgccctggggatcagtggcgaacgggtgagtaacacgtgggcaacctgccccagactctgggataactccgggaaaccggggctaataccggatacgacctccttgggcatcctcggaggtggaaagtttttcggtctgggatgggcccgc

SEQ ID NO: 1820 - DNA, 225 bp, unidentified
  misc_feature 1..225: note = Encodes 16S rRNA from unidentified taxa
  source 1..225: mol_type = genomic DNA
agagtttgatcctggctcaggatgaatgctggcggcgtgcctaacacatgcaagtcgagcggcagcgcgagtagtttactacttggcggcgagcggcggacggctgagtaacgcgtgggaatctgccctaaagtgagggataacgcaccgaaaggtgtgctaataccgcatatggtcttcggattaaagaatttattcgctttaggaggagcccgcgtcggatta

SEQ ID NO: 1821 - DNA, 225 bp, unidentified
  misc_feature 1..225: note = Encodes 16S rRNA from Thermotalea
  source 1..225: mol_type = genomic DNA
agagtttgatcctggctcaggatgaacgctggcggcgtgcctaacacatgcaagtcgagcgagaaacctttcagaagattcttcggatgattcagagaggtggacagcggcggacgggtgagtaacgcgtgggcaacctgcccctatccggaggatagccaagggaaactttgaataatactccataaagcatggacatcacatggtgaccatgccaaagattta

SEQ ID NO: 1822 - DNA, 225 bp, unidentified
  misc_feature 1..225: note = Encodes 16S rRNA from Alkaliflexus
  source 1..225: mol_type = genomic DNA
agagtttgatcctggctcaggatgaacgctagcggcaggcttaacacatgcaagtcgaggggcagcgcgggtagcaatacctggcggcgaccggcggaagggtgcgtaacgcgtgagcgacatacccgtgacagggggataacagatggaaacgtctcctaataccccataagatcatatatcgcatggtatgtgattgaaaggtgagaaccggtcacggattgg

SEQ ID NO: 1823 - DNA, 225 bp, unidentified
  misc_feature 1..225: note = Encodes 16S rRNA from Oscillibacter
  source 1..225: mol_type = genomic DNA
agagtttgatcctggctcaggacgaacgctggcggcgtgcctaacacatgcaagtcgaacgagaatctatggacggaggcttcggccaactgaaatagaggaaagtggcgaacgggtgagtaacgcgtgagaaacctgccttggagtgggggacaacagttggaaacgactgctaataccgcataatatgcctgaggggcatccctccgggcatcaaagctttat

SEQ ID NO: 1824 - DNA, 225 bp, unidentified
  misc_feature 1..225: note = Encodes 16S rRNA from Anaerotruncus
  source 1..225: mol_type = genomic DNA
agagtttgatcatggctcaggagaaacgctggcggcgcacataagacatgcaagtcgaacggaacttagtcgaatgttaaccaggagacgaaagtttagtggcggacgggtgagtaacacgtgagcaacctaccttagagagggggataacattgagaaatcagtgctaataccgcataaagctattagttcgcatggacaagatagccaaaggagaaatccgct

SEQ ID NO: 1825 - DNA, 225 bp, unidentified
  misc_feature 1..225: note = Encodes 16S rRNA from Spirochaeta
  source 1..225: mol_type = genomic DNA
agagtttgatcatggctcagaacgaacgctggcggcgcgtcttaagcatgcaagtcgagcgggagtaagggagcttgcttccttatgagagcggcggactggtgagtaacacgtgggtaacgcaccctcctgacggggacagcctgtggaaacacagggtaataccggatgagatggacttctggaagggagttcatgaaaggagctacggctccgcagggggaa

SEQ ID NO: 1826 - DNA, 225 bp, unidentified
  misc_feature 1..225: note = Encodes 16S rRNA from Clostridium XI
  source 1..225: mol_type = genomic DNA
agagtttgatcctggctcaggatgaacgctggcggcgtgcttaacacatgcaagtcgaacggagacatatgacggaagttttcggatggaagatatatgtcttagtggcggacgggtgagtaacacgtaaacaatctgcctttgagagcgggacaacagatagaaatatttgctaataccgcataagaccacaggttcgcatgaactaggggtaaaaggggagca

SEQ ID NO: 1827 - DNA, 225 bp, unidentified
  misc_feature 1..225: note = Encodes 16S rRNA from Sporotomaculum
  source 1..225: mol_type = genomic DNA
agagtttgatcatggctcaggacgaacgctggcggcgtgcttaacacatgcaagtcgaacgaggaatgtttgaaagcttgcttttggacatttcgagtggcggacgggtgagtaacgcgtgaggaacctgtcttctacagggggataacgtcccgaaagggacgctaataccgcataagaccacagtgccgcatggcagaggggtcaaaggagagatccggtaga

SEQ ID NO: 1828 - DNA, 225 bp, unidentified
  misc_feature 1..225: note = Encodes 16S rRNA from Sporacetigenium
  source 1..225: mol_type = genomic DNA
agagtttgatcctggctcaggacgaacgctggcggcgtgcctaacacatgcaagtcgagcgaggggaggggcttcggccccgaaccgagcggcggacgggtgagtaacgcgtgaatgatctgtcccttacaggggaataacacttggaaacaggtgctaataccgcataagaccacggtgctgcatggcactgaggtaaaaggagcgatccggtgaggggtgagt

SEQ ID NO: 1829 - DNA, 225 bp, unidentified
  misc_feature 1..225: note = Encodes 16S rRNA from Bulleidia
  source 1..225: mol_type = genomic DNA
agagtttgatcatggctcaggataaacgctggcggcgtgcctaatacatgcaagtcgaacgaagggaaccagtttactggtgaacttagtggcgaacgggtgagtaatacgtaagcaacctgcccacggagaccgggataatccctggaaacggggactaagaccggataggcagcggaggggcatcccactgctgttaaagatggaaaacactggtggatgggc

SEQ ID NO: 1830 - DNA, 225 bp, unidentified
  misc_feature 1..225: note = Encodes 16S rRNA from Clostridium IV
  source 1..225: mol_type = genomic DNA
agagtttgatcctggctcaggacgaacgctggcggcacgcttaacacatgcaagtcgaacggagttttgagagcttgctcttaaaacttagtggcggacgggtgagtaacacgtgagcaacctgccttcgggtgtggaataatggctggaaacgaccactaataccgcataacacgatcggaccgcatgatctgatcgtcaaaggtttaccgcctgaagatgggc

SEQ ID NO: 1831 - DNA, 225 bp, unidentified
  misc_feature 1..225: note = Encodes 16S rRNA from Syntrophomonas
  source 1..225: mol_type = genomic DNA
agagtttgatcatggctcaggacgaacgctggcggcgtgcctaacacatgcaagtcgaacgggaattaaacgagaatttcggttcatgtttaattttagtggcggacgggtgagtaacgcgtgagaatctgcctttaagtggggaataacagttggaaacgactgctaataccgcataacatgggaaaccatcaaagggggtgcaagccctcgcttagagatgag

SEQ ID NO: 1832 - DNA, 225 bp, unidentified
  misc_feature 1..225: note = Encodes 16S rRNA from Desulfatiferula
  source 1..225: mol_type = genomic DNA
agagtttgatcctggctcaggatgaacgctggcggcgtgcatcatacatgcaagtcgaacgagaatctatagcttgctatagaggaaagtggcggacgggtgagtaaaatatagggaatctgcccgtaagagggggacaacaaggggaaacctttgctaataccgcatatgagatattctgaaatggatatcttgaaagaatttatcgcttacggatgagcctgt

SEQ ID NO: 1833 - DNA, 225 bp, unidentified
  misc_feature 1..225: note = Encodes 16S rRNA from Hydrogenoanaerobacterium
  source 1..225: mol_type = genomic DNA
agagtttgatcatggctcaggacgaacgctggcggcgcgcctaacacatgcaagtcgaacggagaaagttcttcggagctttcttagtggcgaacgggtgagtaacacgtgagcaacctgcctttctgagggggataacgtttggaaacgaacgctaataccgcatgacaccgtagagtcacatggctcagcggtcaaaggagtaatccgcagaaagatgggctc

SEQ ID NO: 1834 - DNA, 225 bp, unidentified
  misc_feature 1..225: note = Encodes 16S rRNA from Clostridium XlVa
  source 1..225: mol_type = genomic DNA
agagtttgatcctggctcaggatgaacgctggcggcgtgcctaacacatgcaagtcgaacggaactttaatgaagcctagcgatttaaagtttagtggcggacgggtgagtaacgcgtgggtaacctgccgtatgcagggggacaacagttggaaacgactgctaataccgcataagcgcacagcttcgcatggagcagtgtgaaaagatttatcggcatacgat

SEQ ID NO: 1835 - DNA, 225 bp, unidentified
  misc_feature 1..225: note = Encodes 16S rRNA from Mogibacterium
  source 1..225: mol_type = genomic DNA
agagtttgatcctggctcaggatgaacgctggcggcgtgcctaatacatgcaagtcgagcgagaaattgatcagacgcgttttcggacaagtcaggtcaatggaaagcggcggacgggtgagtaacgcgtaggcaacctgcccttagcagagggatagccattggaaacgatgattaaaacctcataatgccggaggagcacatgctccatcggccaaagattta

SEQ ID NO: 1836 - DNA, 225 bp, unidentified
  misc_feature 1..225: note = Encodes 16S rRNA from Spirochaeta
  source 1..225: mol_type = genomic DNA
agagtttgatcatggctcagaacgaacgctggcggcgcgtcttaagcatgcaagtcgagcggtaagattggtgcttgcaccgatcctagagcggcggactggtgagtaacgcgtgggtgacctaccccgtggatgggaatagccggtagaaataccgggtaatgccgaatacggtccctgacgtcagaggtcagggaggaaaggagctccggctccgccacggga

SEQ ID NO: 1837 - DNA, 225 bp, unidentified
  misc_feature 1..225: note = Encodes 16S rRNA from Prevotella
  source 1..225: mol_type = genomic DNA
agagtttgatcctggctcaggatgaacgctagctacaggcttaacacatgcaagtcgaggggcagcatgtcgtgtgcttgcacgcgatgatggcgaccggcgcacgggtgagtaacgcgtatccaacctgcccatgaccccgggatagcccgctgaaaagcggattaacaccggatgcggtcgaaagaggacatctgatttcgaccaaagcttcggcggtcatgg

SEQ ID NO: 1838 - DNA, 225 bp, unidentified
  misc_feature 1..225: note = Encodes 16S rRNA from Treponema
  source 1..225: mol_type = genomic DNA
agagtttgatcctggctcagaacgaacgctggcggcgcgtcttaagcatgcaagtcgagcgggattcggtagcttgctaccgatgagagcggcggactggtgagtaacacgtaggtgacgtaccttgaggacggggacagccggcagaaatgccgggtaataccggataagctcgcgcgagccggaatcgcgcgaggaaaggagctaaggctccgcctccagagc

SEQ ID NO: 1839 - DNA, 225 bp, unidentified
  misc_feature 1..225: note = Encodes 16S rRNA from Spiroplasma
  source 1..225: mol_type = genomic DNA
agagtttgatcatggctcaggatgaacgctggcggcatgcctaagacatgcaagtcgaacgaagtggcccaacaaaaactgcgtacttgtacaaagttggcgatggaatttccacttagtggcagacgggtgagtaatacataagtaatctgccctcaagactggaataatgtctggaaacggacactaataccggataattcatttatagataactatttatgc

SEQ ID NO: 1840 - DNA, 225 bp, unidentified
  misc_feature 1..225: note = Encodes 16S rRNA from Clostridium XlVa
  source 1..225: mol_type = genomic DNA
agagtttgatcctggctcaggatgaacgctggcggcgtgcctaacacatgcaagtcgagcggagtaagccaccggatgaagattcgtcggattccaccggtttacttagcggcggatgggtgagtaacgcgtggacaacctgcccttcactgggggataacaaccggaaacgggtgctaataccgcatgggcgcgacgggccgcatgacctgtagcgtaaagatt

SEQ ID NO: 1841 - DNA, 225 bp, unidentified; identical to SEQ ID NO: 1526
  misc_feature 1..225: note = Encodes 16S rRNA from Bacteroides
  source 1..225: mol_type = genomic DNA

SEQ ID NO: 1842 - DNA, 225 bp, unidentified
  misc_feature 1..225: note = Encodes 16S rRNA from Treponema
  source 1..225: mol_type = genomic DNA
agagtttgatcatggctcagaacgaacgctggcggcgcgtcttaagcatgcaagtcgagcgggaatgtggtgcttgcaccacaggagagcggcggactggtgagtaacgcgtggatgacgcacccccctgacggggacagcctgcagaaatgcagggtgataccggatacgatcttgggtattggaagcccgagaggaaagcacctgcgggtgcgcagggggagc

SEQ ID NO: 1843 - DNA, 225 bp, unidentified
  misc_feature 1..225: note = Encodes 16S rRNA from Selenomonas
  source 1..225: mol_type = genomic DNA
agagtttgatcctggctcaggacgaacgctggcggcgtgcttaacacatgcaagtcgaacggggcaattgaaagcttgcttttgagagcctagtggcaaacgggtgagtaacgcgtaggcaacctgccttcgggatggggacaacaggacgaaagccctgctaataccgaatgaagcatccttcctgcatgggaagggtatgaaagatggcctctgaatatgcta

SEQ ID NO: 1844 - DNA, 225 bp, unidentified
  misc_feature 1..225: note = Encodes 16S rRNA from Butyricicoccus
  source 1..225: mol_type = genomic DNA
agagtttgatcctggctcaggacgaacgctggcggcgtgcctaacacatgcaagtcgaacggggtaccctctacggaagcttcggccgaagaagaggactacctagtggcggacgggtgagtaacgcgtgagcaacctgcctttaagagggggataacataccgaaaggtatgctaataccgcataagatattagtaccgcatgatacagatatcaaagatttca

SEQ ID NO: 1845 - DNA, 225 bp, unidentified
  misc_feature 1..225: note = Encodes 16S rRNA from Gelidibacter
  source 1..225: mol_type = genomic DNA
agagtttgatcatggctcaggataaacgctagcggcaggcctaacacatgcaagtcgagcggcagcacggtgtagcaatacattggtggcgagcggcggacgggtgagtaacgcgtatgcaacctacctgtaacacggggatagccaaccgaaaggatgattaacacccgatagtacttttaaactgcatggtttaaaagttaaatatttataggttacagatgg

SEQ ID NO: 1846 - DNA, 225 bp, unidentified
  misc_feature 1..225: note = Encodes 16S rRNA from Acetitomaculum
  source 1..225: mol_type = genomic DNA
agagtttgatcctggctcaggatgaacgctggcggcgtgcctaacacatgcaagtcgaacggagccggatggaaggagccttcgggtgacagaaatccatgcttagtggcggacgggtgagtaacgcgtgggcaacctgccctgtggagggggatacctgttggaaacggcagttaataccccatgagcgcacgcctgtgcatgcaggcgtgtgaaaaggagcaa

SEQ ID NO: 1847 - DNA, 225 bp, unidentified
  misc_feature 1..225: note = Encodes 16S rRNA from Proteiniclasticum
  source 1..225: mol_type = genomic DNA
agagtttgatcatggctcaggacgaacgctggcggcgtgcttaacacatgcaagtcgagcggggataatgagacggaaggcttcggccggaagacttattattctagcggcggacgggtgagtaacgcgtgaatgatctgtctcttacagggggataacacttggaaacaggtgctaataccgcataagaccacggggctgcatggctttggggtaaaaggagca

SEQ ID NO: 1848 - DNA, 225 bp, unidentified
  misc_feature 1..225: note = Encodes 16S rRNA from Papillibacter
  source 1..225: mol_type = genomic DNA
agagtttgatcatggctcaggatgaacgctggcggcgtgcataacacattcaagtcgaacgaagcactgtcgaggaagtcttcggacggaattgactttgacttagtggcggacgggtgagtaacgcgtgagcaaccttcctgcctgtgagggataacacagggaaacttgtgctaataccgcatgaagcatgattatcgcatggtagacatgccaaagattaat

SEQ ID NO: 1849 - DNA, 225 bp, unidentified
  misc_feature 1..225: note = Encodes 16S rRNA from Prevotella
  source 1..225: mol_type = genomic DNA
agagtttgatcctggctcaggatgaacgctagcggcaggcttaacacatgcaagtcgaggggcagcgcggtagtagcaatactactggcggcgaccggcgaaagggtgcgtaacgcgtgagcgacatgcccgcgaccgggggataacagatggaaacgtctactaataccccataacaacagggttcgcatggatcttgtttgaaagatttatcgtttgcggatt

SEQ ID NO: 1850 - DNA, 225 bp, unidentified
  misc_feature 1..225: note = Encodes 16S rRNA from Elusimicrobium
  source 1..225: mol_type = genomic DNA
agagtttgatcctggctcagagttaacgctggcagcgtgcataacacatgcaagtcgaacggggattattcgatgtagcaatacattggataattctagtggcagacgagtgagtaatacataagaaatctacccgaaagtggggaataacgggccgaaaggttcgctaataccccataatatttgaaagcggcatcgctttcttcttaaaggtttttcgctttc

SEQ ID NO: 1851 - DNA, 225 bp, unidentified
  misc_feature 1..225: note = Encodes 16S rRNA from Lachnospiracea incertae sedis
  source 1..225: mol_type = genomic DNA
agagtttgatcatggctcaggatgaacgctggcggcgcgcttaacacatgcaagtcgaacggaatttatagcttcggttgtaaattcagtggcggacgggtgagtaacgcgtggataacttgccttttagtgggggatagctgagagaaatctcaattaataccgcataaagtaatttattcgcatgaatagattaataaagatgaaaatcgctaaaagataggt

SEQ ID NO: 1852 - DNA, 225 bp, unidentified
  misc_feature 1..225: note = Encodes 16S rRNA from Devosia
  source 1..225: mol_type = genomic DNA
agagtttgatcatggctcagaacgaacgctgtcgacatgcttaacacatgcaagtcggacgggtataacttgttataccagtggcaaacgggtgagtaatacgtagaaatgtacccagtagttccgaataacaactggaaacggttggtaatacgggataagatagagatatgaaagatctgaaaggatcgctattggagcagtctacgatggattagatagttg

SEQ ID NO: 1853 - DNA, 225 bp, unidentified
  misc_feature 1..225: note = Encodes 16S rRNA from Roseburia
  source 1..225: mol_type = genomic DNA
agagtttgatcctggctcaggatgaacgctggcggcgtgcctaacacatgcaagtcgagcggacctgacggagtgaatagcttgctaggaactccagactggttagcggcggacgggtgagtaacgcgtgggtaacctgcctcatacagggggatagcagttggaaacgactggtaataccgcataagcgcacagtaccgcatggtacggtgtgaaaaactccgg

SEQ ID NO: 1854 - DNA, 225 bp, unidentified
  misc_feature 1..225: note = Encodes 16S rRNA from Mucilaginibacter
  source 1..225: mol_type = genomic DNA
agagtttgatcatggctcaggatgaacgctagcggcaggcctaatacatgcaagtcggacgggaactccccttcgggggagcgagagtggcgcacgggtgcgtaacgcgtatgcaaccaaccccgcactgggggacagccggtggaaacgccgggtaataccccatgccgaccctgtggggcatcccatggggtcgaaagcagcgatgcggtgcgggacgggcat

SEQ ID NO: 1855 - DNA, 225 bp, unidentified
  misc_feature 1..225: note = Encodes 16S rRNA from Mogibacterium
  source 1..225: mol_type = genomic DNA
agagtttgatcatggctcaggatgaacgctggcggcgtgcctaatacatgcaagtcgagcgagaatcttcagaaacaattcttcggatgcgtttcaggagaggaaagcggcggacgggtgagtaacgcgtaggcaacctgcccctggcagagggatagccattggaaacgatgattaaaacctcataacgcttcaagagcacatgctgttgaagccaaagattta

SEQ ID NO: 1856 - DNA, 225 bp, unidentified
  misc_feature 1..225: note = Encodes 16S rRNA from Saccharofermentans
  source 1..225: mol_type = genomic DNA
agagtttgatcctggctcaggacgaacgctggcggcgtgcctaacacatgcaagtcgagcggagatattttccggaaagcttcggccggaaggggaatattttagcggcggacgggtgagtaacgcgtgagcaacctttccttcacagggggataaagcaccgaaaggtgccctaataccgcatgagaccacggcatcacatgaagcaggggtcaaaggagcaat

SEQ ID NO: 1857 - DNA, 225 bp, unidentified
  misc_feature 1..225: note = Encodes 16S rRNA from Paenibacillus
  source 1..225: mol_type = genomic DNA
agagtttgatcatggctcaggattaacgctggcggcatgcctaagacatgcaagtcgaacgagagggcccattgacatttatcgaaagttgaagtgcttgcactgatgctggacttatttagatttggattttccctctagtggcaaacgggtgagtaacacgtgggttacctgcctcttagactgggataccgattggaaacgatcgttaataccggatgttct

SEQ ID NO: 1858 - DNA, 225 bp, unidentified
  misc_feature 1..225: note = Encodes 16S rRNA from Anaerotruncus
  source 1..225: mol_type = genomic DNA
agagtttgatcatggctcaggacgaacgctggcggcgcgcttaacacatgcaagtcgaacggagttgatttttaacacccgagtctgcgaggcaggagctttgcagattgggggttaagaatcaacttagtggcggacgggtgagtaacacgtgagcaacctgcctttcagagggggataacgtctggaaacggacgctaataccgcatgaagtatatttttcgc

SEQ ID NO: 1859 - DNA, 225 bp, unidentified
  misc_feature 1..225: note = Encodes 16S rRNA from Leucobacter
  source 1..225: mol_type = genomic DNA
agagtttgatcctggctcaggacgaacgctggcggcgtgcttaacacatgcaagtcgaacgctgaagcccggagcttgctctgggtggatgagtggcgaacgggtgagtaacacgtgagtaacctgcccctcactctgggataagcgctggaaacggcgtctaatactggatatgacccataccggcatcggtagtgggtggaaagatttatcggtgggggatgg

SEQ ID NO: 1860 - DNA, 225 bp, unidentified
  misc_feature 1..225: note = Encodes 16S rRNA from Clostridium XlVa
  source 1..225: mol_type = genomic DNA
agagtttgatcatggctcaggatgaacgctggcggcgtgcctaacacatgcaagtcgagcggagaggctgcggagattcaatagatgatctgcatcttcttagcggcggatgggtgagtaacacgtgggtaacctgccctgcactggggaataacagttggaaacgactgttaataccgcatatgcgcacggggtcgcatgaccccgggcggaaagatttatcgg

SEQ ID NO: 1861 - DNA, 225 bp, unidentified
  misc_feature 1..225: note = Encodes 16S rRNA from Eubacterium
  source 1..225: mol_type = genomic DNA
agagtttgatcatggctcaggatgaacgctagcggcaggcttaacacatgcaagtcgaggggcatcgcggggtagcaataccctggcggcgaccggcgaaagggtgcgtaacgcgtgagcgacatgcccgtcacagggggataaccggcggaaacgccgcctaataccccatatgaggccaggccacatggctgggtcttgaaagtcaaggcggtgacggattgg

SEQ ID NO: 1862 - DNA, 225 bp, unidentified
  misc_feature 1..225: note = Encodes 16S rRNA from Beijerinckia
  source 1..225: mol_type = genomic DNA
agagtttgatcctggctcagaacgaacgctggcggcaggcttaacacatgcaagtcgaacggaacatagggagcttgctccttatgtcagtggcgcacgggtgagtaacgcgtaggaatctgtccttttgcctgggatagcctctggaaacggagggtaaaaccggatgagccctaagggggaaatgagcaatcagctggaggaggagcctgcgttagattaggc

SEQ ID NO: 1863 - DNA, 225 bp, unidentified
  misc_feature 1..225: note = Encodes 16S rRNA from Prevotella
  source 1..225: mol_type = genomic DNA
agagtttgatcctggctcaggatgaacgctagctacaggcttaacacatgcaagtcgaggggcagcgggagagtagcttgctactcttgccggcgaccggcgcacgggtgagtaacacgtatccaacctgccctgaaccccgggatagccctctgaaaggaggattaataccggatgtggccgctgggggacatcccccggcgtctaaagattcatcggttgagg

SEQ ID NO: 1864 - DNA, 225 bp, unidentified
  misc_feature 1..225: note = Encodes 16S rRNA from Clostridium III
  source 1..225: mol_type = genomic DNA
agagtttgatcatggctcaggacgaacgctggcggcgtgcctaacacatgcaagtcgagcggaggaaatcgaaagaagccttcgggtgaattttggtggacttagcggcggacgggtgagtaacgcgtgagtaacctgcccataagagggggataatccttggaaacggggactaataccgcatatagagtatttgttgcatgattgatacttgaaagatttatc

SEQ ID NO: 1865 - DNA, 225 bp, unidentified
  misc_feature 1..225: note = Encodes 16S rRNA from unidentified taxa
  source 1..225: mol_type = genomic DNA
agagtttgatcctggctcaggacgaacgctggcggcgtgcttcatacatgcaagtcgaacgagaaattaccttcgggtaatggacagtggcggacgggtgagtaatgtgtagagaatctgccctttagtgggggatagcagttggaaacgactattaataccccatatgcgcgtagttgggatactattcgtgaaagattaatcgctaaaggatgagtctgcatc

SEQ ID NO: 1866 - DNA, 225 bp, unidentified
  misc_feature 1..225: note = Encodes 16S rRNA from Pseudoflavonifractor
  source 1..225: mol_type = genomic DNA
agagtttgatcctggctcaggacgaacgctggcggcgtgcttaacacatgcaagtcgaacgagggtattagtcagcttgctgattgatacccgagtggcggacgggtgagtaacgcgtgaggaacctgtcttcatcagggggataacttcccgaaagggatgctaataccgcataagaccacgataccgcatggtattgaggtcaaaggagcaatccggatgaag

SEQ ID NO: 1867 - DNA, 225 bp, unidentified
  misc_feature 1..225: note = Encodes 16S rRNA from Butyrivibrio
  source 1..225: mol_type = genomic DNA
agatttgatcatggctcaggatgaacgctggcggcgtgcctaacacatgcaagtcgaacggacgctttgaggagagtcttcggatgattcttaaagttgttagtggcggacgggtgagtaacgcgtggggaacctgcctttgtccgggggatagcagctggaaacggctggtaataccgcataagaccacgaagccgcatggctttgcggtaaaagatttatcgg

SEQ ID NO: 1868 - DNA, 225 bp, unidentified
  misc_feature 1..225: note = Encodes 16S rRNA from Acholeplasma
  source 1..225: mol_type = genomic DNA
agagtttgatcctggctcaggatgaacgctggcggcgtgcctaatacatgcaagtcgaacggatcacttcggtgatcagtggcgaacgggtgagtaacacataaacaatctaccctgaagactgggataacggttggaaacgaccgctaataccggataggtgatcataaggcatcttgagatcattaaagttgggctgcaacactgcaggatgagtttatgtcg

SEQ ID NO: 1869 - DNA, 225 bp, unidentified
  misc_feature 1..225: note = Encodes 16S rRNA from Filomicrobium
  source 1..225: mol_type = genomic DNA
agagtttgatcctggctcagaacgaacgctggcggcaggccttagatatgcaagttgaacggtctaaggtggagcttgctctactttagatagtagcggacgggtgagtaatacatgggaacgtaccctcttgtggggaatagcttttggaaacgaaaggtaataccgcataagccctacgggggaaaggagtaattcgcgagaggatcggcccatgccagatta

SEQ ID NO: 1870 - DNA, 225 bp, unidentified
  misc_feature 1..225: note = Encodes 16S rRNA from Clostridium III
  source 1..225: mol_type = genomic DNA
agagtttgatcctggctcaggacgaacgctggcggcgtgcctaacacatgcaagtcgaacgagaagtgatgaaaagattccttcgggatgattagattcatggacagtggcggacgggcgagtaacgcgtgagtaacctgcccataagcgggggatagccgatggaaacgtcgagtaataccccatgacgtatatatatcgcatggtatatatatcaaagattta

SEQ ID NO: 1871 - DNA, 225 bp, unidentified
  misc_feature 1..225: note = Encodes 16S rRNA from Pseudoflavonifractor
  source 1..225: mol_type = genomic DNA
agagtttgatcatggctcaggatgaacgctggcggcgtgcataacacattcaagtcgaacgaagcactttggacggatcccttcggggtgaagactgatttgacttagtggcggacgggtgagtaacgcgtgagcaacctgccttgaagagggggataacacagggaaacttgtgctaataccgcataacatacgtgaatcgcatggttcgtgtatcaaagctcc

SEQ ID NO: 1872 - DNA, 225 bp, unidentified
  misc_feature 1..225: note = Encodes 16S rRNA from Anaerophaga
  source 1..225: mol_type = genomic DNA
agagtttgatcatggctcaggatgaacgctagcgacaggcttaacacatgcaagtcgaggggcagcgagtggcgttgttcgcaacgccatgtcggcgaccggcgcactggtgagtaacacgtatgcaacctgccctttaccggggcataacccttggaaacgaggcctaattccccatatacagcgcttgggcatccgggtgctgtgaaaggtttattccggtga

SEQ ID NO: 1873 - DNA, 225 bp, unidentified
  misc_feature 1..225: note = Encodes 16S rRNA from Lachnospiracea incertae sedis
  source 1..225: mol_type = genomic DNA
agagtttgatcctggctcaggatgaacgctggcggcgtgcctaacacatgcaagtcgaacgaagctcctttgcggatctcttcggagtgaaggaaaggatgactgagtggcggacgggtgagtaacgcgtgggtaatctgccctgtacagggggacaacagttagaaatgactgctaataccgcatgagcgtacagcatcgcatgatgcagtgcgaaaaactgag

SEQ ID NO: 1874 - DNA, 225 bp, unidentified
  misc_feature 1..225: note = Encodes 16S rRNA from Asaccharobacter
  source 1..225: mol_type = genomic DNA
agagtttgatcctggctcaggatgaacgctggcggcgtgcttaacacatgcaagtcgaacggttaagccgacttcggtcgggaatacagtggcgaacgggtgagtaacacgtgaccaacctgccccccgcaccgggacaacctccggaaacggaggctaataccggatatgcccgggcgcccgcatgggcggccggggaaagcccaggcggcgggggatggggtc

SEQ ID NO: 1875 - DNA, 225 bp, unidentified
  misc_feature 1..225: note = Encodes 16S rRNA from Kordia
  source 1..225: mol_type = genomic DNA
agagtttgatcatggctcaggataaacgctagcggcaggcctaacacatgcaagtcgagcggcagcgtggatagcaatatctgacggcgagcggcggacgggtgagtaacgcgtatgcaacctacccactacacaaggatagccttccgaaaggaggattaatacttgatagtactctaagatggcatcaaaacagagttaaagatttatcggtagtggatgggc

SEQ ID NO: 1876 - DNA, 225 bp, unidentified
  misc_feature 1..225: note = Encodes 16S rRNA from Ruminococcus
  source 1..225: mol_type = genomic DNA
agatttgatcatggctcaggacgaacgctggcggcacgcttaacacatgcaagtcgaacgggactaagagagaagcttgcttcacttttagtttagtggcggacgggtgagtaacacgtgagtaacctgcccttatcaggggaatagcctccggaaacggagagtaataccgcataagatgacagtacggcatcgtacagtcataaaagattttatcggataagg

SEQ ID NO: 1877 - DNA, 225 bp, unidentified
  misc_feature 1..225: note = Encodes 16S rRNA from Clostridium III
  source 1..225: mol_type = genomic DNA
agagtttgatcctggctcaggacgaacgctggcggcgtgcctaacacatgcaagtcgaacgagaaatgatgatttgattccttcgggatgaaaagaatcatggacagtggcggacgggcgagtaacgcgtgagtaacctgcccataagagagggatagccgatggaaacgtcgagtaatacctcatattgtaattaattcgcatggattgattatgaaagattta

SEQ ID NO: 1878 - DNA, 225 bp, unidentified
  misc_feature 1..225: note = Encodes 16S rRNA from Ethanoligenens
  source 1..225: mol_type = genomic DNA
agagtttgatcatggctcaggataaacgctggcggcgtgcataacacattcaagtcgaacggaactgtacggattaatccttcgggaagcgtttgtacagtttagtggcggacgggtgagtaacgcgtgagcaacctgcctacgagaggggaataacgtctggaaacggacgctaataccgcataaaccgcggggttcgcatggactccggggcaaagatttatc

SEQ ID NO: 1879 - DNA, 225 bp, unidentified
  misc_feature 1..225: note = Encodes 16S rRNA from Clostridium XlVa
  source 1..225: mol_type = genomic DNA
agagtttgatcctggctcaggatgaacgctggcggcgtgcctaacacatgcaagtcgaacggagatgtccaatgggctgcttcggcagtccgggcatcttagtggcggacgggtgagtaacgcgtggagaacctggcccatgcagggggataacagcgggaaaccgctgctaataccgcataagcgccgaggggggcatcccttttggtggaaagcgtaagcggc

SEQ ID NO: 1880 - DNA, 225 bp, unidentified
  misc_feature 1..225: note = Encodes 16S rRNA from Barnesiella
  source 1..225: mol_type = genomic DNA
agagtttgatcatggctcaggatgaacgctagcgacaggcctaacacatgcaagtcgaggggcagcacggtgtagcaatacactggtggcgaccggcgcacgggtgcgtaacaggtatgcaatctgtcccataccggggcatagcccgctgaaaggcggattaattctccatgtgtcatgagagggcatccttttatgatgaaacgtaagggtatgggatgagca

SEQ ID NO: 1881 - DNA, 225 bp, unidentified
  misc_feature 1..225: note = Encodes 16S rRNA from Eubacterium
  source 1..225: mol_type = genomic DNA
agagtttgatcatggctcaggatgaacgctggcggcgtgcctaacacatgcaagtcgagcgagaatcttcggaaggaatcttcggaggacggaaggagaggaaagcggcggacgggtgagtaacgcgtaggtaacctgccctgtacagagggatagccactggaaacggtgattaataccttataaaactgagtattcacatggagattcagtcaaagatttatc

SEQ ID NO: 1882 - DNA, 225 bp, unidentified
  misc_feature 1..225: note = Encodes 16S rRNA from Prevotella
  source 1..225: mol_type = genomic DNA
agagtttgatcctggctcaggatgaacgctagctacaggcttaacacatgcaagtcgaggggcagcatggaggttgcttgcaacttctgatggcgaccggcgcacgggtgagtaacgcgtatccgaccttcccccaggtagggaacagcccggcgaaagtcggattaatgccctatagtctgcgaattgcgcatgttgtttgcagtaaagattgatcgccttggg

SEQ ID NO: 1883 - DNA, 225 bp, unidentified
  misc_feature 1..225: note = Encodes 16S rRNA from Anaerophaga
  source 1..225: mol_type = genomic DNA
agagtttgatcatggctcaggatgaacgctggcggcgtgcttaacacatgcaagtcgaggggcagcatgggaggtggcaacaccacccgatggcgaccggcgcactggtgagtaacacgtatgcaacctgccccctacagggggataatccagagaaatttggtctaataccccgtagtcagcgagagggcatcctcttgctgggagagctccggcggtagggga

SEQ ID NO: 1884 - DNA, 225 bp, unidentified
  misc_feature 1..225: note = Encodes 16S rRNA from Acetitomaculum
  source 1..225: mol_type = genomic DNA
agagtttgatcctggctcaggatgaacgctggcggcgtgcctaacacatgcaagtcgaacggggatgcctcgccgttgaagcttcggcagagacatgagacatcctagtggcggacgggtgagtaacgcgtgggcaacctgccctgtactgggggatagcagctggaaacggctggtaataccgcataagcgcgcggcatcgcatggtgctgcgtgaaaagccga

SEQ ID NO: 1885 - DNA, 225 bp, unidentified
  misc_feature 1..225: note = Encodes 16S rRNA from Prevotella
  source 1..225: mol_type = genomic DNA
agagtttgatcctggctcaggatgaacgctggcggcgtgcctaacacatgcaagtcgaggggcagcatgaaggttgcttgcaacctttgatggcgaccggcggatgggtgcgtaacgcgtatccaacctgcctgtgtcccgggcatagcccgtggaaacgcggattaactcccgatggtgcagcggtgccgcatggcgttgctgccaaatgtaaaggacacagat

SEQ ID NO: 1886 - DNA, 225 bp, unidentified
  misc_feature 1..225: note = Encodes 16S rRNA from Clostridium III
  source 1..225: mol_type = genomic DNA
agagtttgatcctggctcaggacgaacgctggcggcgtgcctaacacatgcaagtcgaacgagaaatgatgatttgattctttcgggatgaaatgattcatggacagtggcggacgggcgagtaacgcgtgagtaacctgcccataagagagggatagccgatggaaacgtcgagtaataccacatattgtagtaagatcgcatggttttgctatgaaagattta

SEQ ID NO: 1887 - DNA, 225 bp, unidentified
  misc_feature 1..225: note = Encodes 16S rRNA from Marinoscillum
  source 1..225: mol_type = genomic DNA
agagtttgatcatggctcaggatgaacgctggcggcaggcttaatacatgcaagtcgaacggtaaggcctgatgtagcaatacagagggtacacgagtggcgcacgggtgcgtaacgcgtatgtaatctgcctgcaaccgggacaaaacagttggaaacggctgctaatatcccatggtcaatttttcaggcatctgggagattgtaaagatttattggttgcag

SEQ ID NO: 1888 - DNA, 225 bp, unidentified
  misc_feature 1..225: note = Encodes 16S rRNA from Pedobacter
  source 1..225: mol_type = genomic DNA
agagtttgatcctggctcaggatgaacgctagcggcaggcctaatacatgcaagtcgaacggtaaagtccccttcgggggattgagagtggcggacgggtgcgtaacgcgtatgcaaccaacccccctcaccgggatagccggtggaaacgccggataagaccggatgcgccggcggggaggcatctccctgtcggcaaggcggcgacgcggagggggacgggca

SEQ ID NO: 1889 - DNA, 225 bp, unidentified
  misc_feature 1..225: note = Encodes 16S rRNA from Prevotella
  source 1..225: mol_type = genomic DNA
agagtttgatcctggctcaggatgaacgctagctacaggcttaacacatgcaagtcgaggggcagcatgaatcaagcttgcttgatttgatggcgaccggcgcacgggtgcgtaacgcgtatccaacctacccgtcactcagggatagccttgcgaaagtaagattaatacctgatggtctccttccggggcatcccggttggagtaaagattcatcggtggcgg

SEQ ID NO: 1890 - DNA, 225 bp, unidentified
  misc_feature 1..225: note = Encodes 16S rRNA from Prevotella
  source 1..225: mol_type = genomic DNA
agagtttgatcatggctcaggatgaacgctagctacaggcttaacacatgcaagtcgaggggcatcatgggggttgtttacaatccctgatggcgaccggcgcacgggtgagtaacgcgtatccaacctgccttcgagtcagggataaccttccgaaagggagcctaatacctgatgcagtgcgaagatggcatcagatttgcactaaagcttttgcgctcgggg

SEQ ID NO: 1891 - DNA, 225 bp, unidentified
  misc_feature 1..225: note = Encodes 16S rRNA from Anaerovorax
  source 1..225: mol_type = genomic DNA
agagtttgatcctggctcaggatgaacgctggcggcgtgcctaacacatgcaagtcgagcgagaagcttttcagtcgattcttcggaaaagacagagaagtggaaagcggcggacgggtgagtaacgcgtaggcaacctgccccttgcagagggatagcctcgggaaaccgggattaaaacctcataatgcatccacatgacatcttgaggatgccaaagattta

SEQ ID NO: 1892 - DNA, 225 bp, unidentified
  misc_feature 1..225: note = Encodes 16S rRNA from Clostridium XlVa
  source 1..225: mol_type = genomic DNA
agagtttgatcatggctcaggatgaacgctggcggcgtgcttaatacatgcaagtcgaacgaagcgccctgtacagatttcttcggaatgaagttttgggtgacttagtggcggacgggtgagtaacgcgtgggtaacctgcctcatgcagggggacaacagctggaaacggctgctaataccgcataagcgcacgagatcgcatgatcaagtgtgaaaagattt

SEQ ID NO: 1893 - DNA, 225 bp, unidentified
  misc_feature 1..225: note = Encodes 16S rRNA from Clostridium IV
  source 1..225: mol_type = genomic DNA
agagtttgatcctggctcaggatgaacgctggcggcgtgcataacacattcaagtcgaacgaagcactggcgaggaagtcttcggatggaattgcctttgacttagtggcggacgggtgagtaacgcgtgagcaaccttcctggtagtgagggataacacagggaaacttgtgctaataccgcatgacgcactgaggtcgcatggttttagtgccaaagatttat

SEQ ID NO: 1894 - DNA, 225 bp, unidentified
  misc_feature 1..225: note = Encodes 16S rRNA from Lachnospiracea incertae sedis
  source 1..225: mol_type = genomic DNA
agagtttgatcctggctcaggatgaacgctggcggcgcgcttaacacatgcaagtcgaacggaatgattggcttcggtcatgaattcagtggcgaacgggtgagtaacacgtggataacttgccttttagtgggggatagctgagagaaatctcaattaataccgcataatgtaatctattcgcatgaatagattaataaagatgaaaatcgctaaaagataggt

SEQ ID NO: 1895 - DNA, 225 bp, unidentified
  misc_feature 1..225: note = Encodes 16S rRNA from Clostridium sensu stricto
  source 1..225: mol_type = genomic DNA
agagtttgatcctggctcaggacgaacgctggcggcatgcctaacacatgcaagtcgaacgggataagtttggttgtagcgatacttttgaacttattcagtggcgaacgggtgagtaacacgtgagcaacctgccttttacacagggataacagttggaaacgactgctaataccggataagaccacactgaggcatctcagaggggtcaaagcgattcagcgg

SEQ ID NO: 1896 - DNA, 225 bp, unidentified
  misc_feature 1..225: note = Encodes 16S rRNA from Lishizhenia
  source 1..225: mol_type = genomic DNA
agagtttgatcctggctcaggatgaacgctagcggcaggcctaacacatgcaagtcgaggggcagcgcgaggtagcaataccttggcggcgaccggcggacgggtgcgtaacgcgtatggaaccaacccgtcacagggggacaagccagggaaacttggtctaataccccatactactgttaaatcgcatggtatgacagtgaaagcttacgggcggtgacggac

SEQ ID NO: 1897 - DNA, 225 bp, unidentified
  misc_feature 1..225: note = Encodes 16S rRNA from Pedobacter
  source 1..225: mol_type = genomic DNA
agagtttgatcctggctcaggatgaacgctagcggcaggcctaatacatgcaagtcgtacgggatctccccttcgggggagtgagagtggcgcacgggtgcgtaacgcgtatgcaaccaaccctcatccgggggacagccggtggaaacgccgggtaataccccatatccactttgggaggcatcttctgaggtggaaaggctttggtcggaggaggacgggcat

SEQ ID NO: 1898 - DNA, 225 bp, unidentified
  misc_feature 1..225: note = Encodes 16S rRNA from Howardella
  source 1..225: mol_type = genomic DNA
agagtttgatcatggctcaggagaaacgctggcggcgcacataagacatgcaagtcgaacggaacttagattgatgtttacattgaactaagtttagtggcggactggtgagtaacacgtgagcaacctgccctttagagggggataacattgagaaatcagtgctaataccgcataacgcaattcttccgcatgaaagaattgccaaaggagaaatccgcttaa

SEQ ID NO: 1899 - DNA, 225 bp, unidentified
  misc_feature 1..225: note = Encodes 16S rRNA from Roseburia
  source 1..225: mol_type = genomic DNA
agagtttgatcctggctcaggatgaacgctggcggcgtgcttaacacatgcaagtcgaacggactttactgaaaagagggcttgcccaatggaaggtaaagttagtggcggacgggtgagtaacgcgtgggcaacctgccttacacagggggacaacagttggaaacgactgctaataccgcataagccggtagtgccgcatggcacatccggaaaagattgtat

SEQ ID NO: 1900 - DNA, 225 bp, unidentified
  misc_feature 1..225: note = Encodes 16S rRNA from Clostridium XlVa
  source 1..225: mol_type = genomic DNA
agagtttgatcatggctcaggatgaacgctggcggcgtgcttaatacatgcaagtcgaacggggatgtccacccgatgaagccagagtgcttgcacaaaggccgattcaaccgggcatcctagtggcggacgggtgagtaacgcgtgggtaacctgcctcatactggggaataacagtcagaaatgactgctaataccgcataagcgcacagtgccgcatggcac

SEQ ID NO: 1901 - DNA, 225 bp, unidentified
  misc_feature 1..225: note = Encodes 16S rRNA from Anaerovorax
  source 1..225: mol_type = genomic DNA
agagtttgatcatggctcaggatgaacgctggcggcgtgcctaacacatgcaagtcgagcgggaaatattgaaatgaaacttcggtagattttcgatatggagagcggcggacgggtgagtaacgcgtaggcaacctgcccctggcagagggatagccactggaaacggtgattaaaacctcataacgcgcagatgctgcatagcaactgcgccaaagatttatc

SEQ ID NO: 1902 - DNA, 225 bp, unidentified
  misc_feature 1..225: note = Encodes 16S rRNA from Lentisphaera
  source 1..225: mol_type = genomic DNA
agagtttgatcatggctcagaatgaacgctggcggcatggattaggcatgcaagtcgaacggcagggcagcgatgcccgagagtggcgaaagggtgagcaacgcgtggggaacctgcccccgggaccggaacaagcctgtgaaaacgggtctgaaaccggatgaagccccgcaccgcatggtgcggcggcgaaatattcatagcccggggagggccccgcgtccc

SEQ ID NO: 1903 - DNA, 225 bp, unidentified
  misc_feature 1..225: note = Encodes 16S rRNA from Prevotella
  source 1..225: mol_type = genomic DNA
agagtttgatcatggctcagattgaacgctggcggcaggcttaacacatgcaagtcgaggggcagcatgggaggtggcaacaccacccgatggcgaccggcgcactggtgagtaacacgtatgcaacctgccccctacagggggataatccagagaaatttggtctaataccccgtagtcagcgagagggcatcctcttgctgggagagctccggcggtagggga

SEQ ID NO: 1904 - DNA, 225 bp, unidentified
  misc_feature 1..225: note = Encodes 16S rRNA from Saccharofermentans
  source 1..225: mol_type = genomic DNA
agagtttgatcctggctcagaacgaacgctggcggcgcgtcttaagcatgcaagtcgagcgggaataagggagcttgcttccttatgagagcggcggactggtgaggtaacggcccaccaaacctacgatcggtagccgaactgagaggttgatcggccacattgggactgagacacggcccagactcctacgggaggcagcagtggggaatattgggcaatggg

SEQ ID NO: 1905 - DNA, 225 bp, unidentified
  misc_feature 1..225: note = Encodes 16S rRNA from unidentified taxa
  source 1..225: mol_type = genomic DNA
agagtttgatcctggctcaggacgaacgctggcggtgtgcctcatacatgcaagtcgaacgagaagctgacttcggttagtggaaagtggcggacgggtgagtacaacataggaaatctgccccaaagcgggggacaacagagggaaacttctgctaataccccatacgagcttagttgaaatactaatcttgaaagatttatcactttgggatgagcctgtgcc

SEQ ID NO: 1906 - DNA, 225 bp, unidentified
  misc_feature 1..225: note = Encodes 16S rRNA from Proteiniphilum
  source 1..225: mol_type = genomic DNA
agagtttgatcatggctcaggatgaacgctagcgacaggcttaacacatgcaagtcgaggggcagcatgggcgtggcaacacgcctgatggcgaccggcgcactggtgagtaacacgtatgcgacctgcctccttcagggggataacccagagaaatttggcctaataccccatagtccgcgcggctgcatggccgtgcggggaaagcctcggcggaaggagatg

SEQ ID NO: 1907 - DNA, 225 bp, unidentified
  misc_feature 1..225: note = Encodes 16S rRNA from Schwartzia
  source 1..225: mol_type = genomic DNA
agagtttgatcctggctcaggacgaacgctggcggcgtgcttaacacatgcaagtcgaacgaggcgatttgaaagcttgcttttgatgagcctagtggcaaacgggtgagtaacgcgtaggcaacctgccctcaggatggggacaacggcccgaaaggaccgctaataccgaatgacgtatcgggaccgcatgatcctgataccaaaggcggagcaatccgtcac

SEQ ID NO: 1908 - DNA, 225 bp, unidentified
  misc_feature 1..225: note = Encodes 16S rRNA from Anaerorhabdus
  source 1..225: mol_type = genomic DNA
agagtttgatcatggctcaggatgaacgctggcggcgtgcttaatacatgcaagtcgaacgaacaaaatcagaaagcttgctttttgatctagttagtggcgaacgggtgagtaatacgtaggcaacctacctcaaagagggggatagcagttggaaacgactattaataccgcataggtaatgaaggggcatccctacattattaaaggtgcgtttgcaccgct

SEQ ID NO: 1909 - DNA, 225 bp, unidentified
  misc_feature 1..225: note = Encodes 16S rRNA from Robinsoniella
  source 1..225: mol_type = genomic DNA
agagtttgatcctggctcaggatgaacgctggcggcgtgcctaacacatgcaagtcgagcgatgaataaaccgacaaggtttcggccaaggaagtttattcagagcggcggatgggtgaggaacgcgtggggaacctgcctttcaccgggggataccagctggaaacggctgttaataccgcatatgctcacagtgccgcatggcacagggaggaaaactccggg

SEQ ID NO: 1910 - DNA, 225 bp, unidentified
  misc_feature 1..225: note = Encodes 16S rRNA from Clostridium IV
  source 1..225: mol_type = genomic DNA
agagtttgatcatggctcaggacgaacgctggcggcgtgcctaacacatgcaagtcgaacggagtgttgcgctgaaattgagattagcttgctaaaggatatttcttgtaacacttagtggcggacgggtgagtaacgcgtgagtaacctgccttacagagggggacaacagttggaaacgactgctaataccgcataaagttttttgtaggcatctataagaaa

SEQ ID NO: 1911 - DNA, 225 bp, unidentified
  misc_feature 1..225: note = Encodes 16S rRNA from Erysipelotrichaceae incertae sedis
  source 1..225: mol_type = genomic DNA
agagtttgatcatggctcaggatgaacgctggcggcatgcctaagacatgcaagtcgaacgaagtgtcccgttgaagtttggagtgcttgcacaaaaaatggatacggattcgcacttagtggcagacgggtgagtaacacgtgggtaatctacctcggagactgggataactattagaaatgatagctaataccggataattcgtaatcggataactgattatg

SEQ ID NO: 1912 - DNA, 225 bp, unidentified
  misc_feature 1..225: note = Encodes 16S rRNA from Flavobacterium
  source 1..225: mol_type = genomic DNA
agagtttgatcatggctcaggatgaacgctagcggcaggcttaacacatgcaagtcgaggggcagcggggcgtagcaatacgccgccggcgaccggcgcacgggtgcgtaacgcgtatgcaacccacccgcaacaggggtataacggagtgaaaattccactaatcccccatatggtttggggaccgcatggtttcctaacgaaagcttatttgtggttgcggac

SEQ ID NO: 1913 - DNA, 225 bp, unidentified
  misc_feature 1..225: note = Encodes 16S rRNA from Pedobacter
  source 1..225: mol_type = genomic DNA
agagtttgatcatggctcaggatgaacgctagcggcaggcctaatacatgcaagtcgaacgggaagggtccttcggggccctgagagtggcgcacgggtgcgtaacgcgtatgcaaccaacccctttccgggggacagccggtggaaacgccgggtaataccccatgtcgacgaaggaggacatcctctttcgttgaaagacttcggtcggagagggacgggcat

SEQ ID NO: 1914 - DNA, 225 bp, unidentified
  misc_feature 1..225: note = Encodes 16S rRNA from Clostridium III
  source 1..225: mol_type = genomic DNA
agagtttgatcatggctcaggacgaacgctggcggcgtgcctaacacatgcaagtcgaacgagaaatatgacaatgaatccttcgggatgatttggattatggacagtggcggacgggcgagtaacgcgtgagtaacctgcccataagagagggatagccgatggaaacgtcgagtaataccacatattgtagttaattcgcatggattgattatgaaagattta

SEQ ID NO: 1915 - DNA, 225 bp, unidentified
  misc_feature 1..225: note = Encodes 16S rRNA from Selenomonas
  source 1..225: mol_type = genomic DNA
agagtttgatcatggctcaggacgaacgctggcggcgtgcttaacacatgcaagtcgaacgagacgattgaaagcttgcttttgaaagtcgagtggcaaacgggtgagtaacgcgtagacaacctgccgcaaagatggggacaacagtccgaaaggactgctaataccgaatgttgtatcgtttccgcatggagatgatattaaagatggcctctacttgtaagc

SEQ ID NO: 1916 - DNA, 225 bp, unidentified
  misc_feature 1..225: note = Encodes 16S rRNA from Rhizobium
  source 1..225: mol_type = genomic DNA
agagtttgatcctggctcagaacgaacgctggcggcaggcttaacacatgcaagtcgagcgccccgcaaggggagcggcagacgggtgagtaacgcgtgggaatctaccgtaccctacggaataacgcatggaaacgtgtgctaataccgtatacgccctttgggggaaagatttatcggggtatgatgagcccgcgttggattagctagttggtggggtaaagg

SEQ ID NO: 1917 - DNA, 225 bp, unidentified
  misc_feature 1..225: note = Encodes 16S rRNA from Victivallis
  source 1..225: mol_type = genomic DNA
agagtttgatcatggctcagaacgaacgctggcggcatggattaggcatgcaagtcgaacgaagcagcaatgcttagtggcggaagggtgaggaacgcgtgagtaatctgccctcaagttgggaataacaactggaaacggttgctaataccgaatgtggctgcaagaccgcatgattttgcagttaaagatttattgcttgaggatgagctcgcgtcccattag

SEQ ID NO: 1918 - DNA, 225 bp, unidentified
  misc_feature 1..225: note = Encodes 16S rRNA from Butyricimonas
  source 1..225: mol_type = genomic DNA
agagtttgatcatggctcaggatgaacgctagcggcaggcttaacacatgcaagtcgaggggcagcgggtctagcaatagatgccggcgaccggcgaaagggtgagtaacgcgtgagcaacatacccttgacagggggataggcactggaaacggtgtgtaataccccgtaacacattccaccgcatgatgggatattgaaagattcattggtcaaggattggct

SEQ ID NO: 1919 - DNA, 225 bp, unidentified
  misc_feature 1..225: note = Encodes 16S rRNA from Parabacteroides
  source 1..225: mol_type = genomic DNA
agagtttgatcctggctcaggatgaacgctagcgacaggcttaacacatgcaagtcgaggggcagcgggcgagtggcaacacttgctgtcggcgaccggcgcactggtgagtaacacgtatgcaacctgcccccttctgggagataacccatagaaatgtggcctaatatcccatagtcggcccagccgcatggccgggccgggaaaggcgagccggaaggggat

SEQ ID NO: 1920 - DNA, 225 bp, unidentified
  misc_feature 1..225: note = Encodes 16S rRNA from Adhaeribacter
  source 1..225: mol_type = genomic DNA
agagtttgatcatggctcaggatgaacgctagcggcaggcctaatacatgcaagtcgaacggtaaacggtccttcgggactgtgagagtggcggacgggtgcgtaacgcgtatgcaaccaacccccgacgggcggacagccggtggaaacgccggataatacgccatggggcccagggagggcatcctttccgggccaaagcctcggcggtcggggacgggcatg

SEQ ID NO: 1921 - DNA, 225 bp, unidentified
  misc_feature 1..225: note = Encodes 16S rRNA from Eubacterium
  source 1..225: mol_type = genomic DNA
agagtttgatcatggctcaggattaacgctggcggcgtgcctaacacatgcaagtcgagcgagaaacagtgaagagattcttcggatgaacagatctgtggacagcggcggacgggtgagtaacgcgtgggcaacctgcccctttccggaggatagccaagggaaactttgaataatactccataaagcatcattgccgcatgacagagatgccaaagatttatc

SEQ ID NO: 1922 - DNA, 225 bp, unidentified
  misc_feature 1..225: note = Encodes 16S rRNA from unidentified taxa
  source 1..225: mol_type = genomic DNA
agagtttgatcatggctcaggattaacgctggcggcgtgcctaatgcatgcaagtcgaacgtggtctcttcggagattaacgtggcggacgggtgaggaacacgtggggaacctgcccatcggtggggggtagcccgcggaaacgcggggtaattccgcatacggtctcctgggggtagctcaggagaggaaagggtcttcggactcgccgatggaggggcctgc

SEQ ID NO: 1923 - DNA, 225 bp, unidentified
  misc_feature 1..225: note = Encodes 16S rRNA from Treponema
  source 1..225: mol_type = genomic DNA
agagtttgatcctggctcagaacgaacgctggcggcgcgttttaagcatgcaagtcgagcgggaatcgggggcaactccgaggagagcggcggacgggtgagtaacacgtggataatctatcttttagactgggatagcctggtgaaagtcaggataataccggataatacgtaatccgcacaagcggagaacgggaaaggagctaaggcttcgcttgaaggtga

SEQ ID NO: 1924 - DNA, 225 bp, unidentified
  misc_feature 1..225: note = Encodes 16S rRNA from Clostridium XlVa
  source 1..225: mol_type = genomic DNA
agagtttgatcatggctcaggatgaacgctggcggcgtgcttaatacatgcaagtcgaacggaagatatcgggagcttgctcttgatatctttagtggcggacgggtgagtaacgcgtgggtaacctgcctcatacagggggataacagttagaaatgactgctaaaaccgcatgacatagtcaaaccgcatgatttgactatcaaatatttataggtatgagat

SEQ ID NO: 1925 - DNA, 225 bp, unidentified
  misc_feature 1..225: note = Encodes 16S rRNA from Clostridium XlVa
  source 1..225: mol_type = genomic DNA
agagtttgatcctggctcaggacgaacgctggcggcgtgcctaacacatgcaagtcgaacgaggcgaggagtgcttgcacaccgaacctagtggcggacgggtgcgtaacgcgtgggtaacctgccctaaacagggggataacgtatagaaatgtacgctaataccgcataagctcacggaaccgcatggttttgagggaaaaggatttccggtttaggatgggc

SEQ ID NO: 1926 - DNA, 225 bp, unidentified
  misc_feature 1..225: note = Encodes 16S rRNA from Schwartzia
  source 1..225: mol_type = genomic DNA
agagtttgatcatggctcaggacgaacgctggcggcgtgcttaacacatgcaagtcgaacggggcgatttgaaagcttgcttttgatgagcctagtggcaaacgggtgagtaacgcgtaggcaacctgccctcaggatggggacaacggcccgaaaggaccgctaataccgaatgacgtatcgggatcgcatgatactgataccaaaggcggagcaatccgtcac

SEQ ID NO: 1927 - DNA, 225 bp, unidentified
  misc_feature 1..225: note = Encodes 16S rRNA from Prevotella
  source 1..225: mol_type = genomic DNA
agagtttgatcctggctcaggatgaacgctagctacaggcttaacacatgcaagtcgaggggcagcatgggagttgcttgcaattcccgatggcgaccggcggatgggtgagtaacgcgtatccaacctgtcccgcgcgcggggacagcccttggaaatgaggattaacccccgatacgccatggggccgcatggtcccctggtgaacctttgcgcgggttgggg

SEQ ID NO: 1928 - DNA, 225 bp, unidentified
  misc_feature 1..225: note = Encodes 16S rRNA from Selenomonas
  source 1..225: mol_type = genomic DNA
agagtttgatcatggctcagattgaacgctggcggcgtgcttaacacatgcaagtcgaacgagacgatttagaagcttgcttttattgagtcgagtggcaaacgggtgagtaacgcgtagacaacctgccgcaaagatggggacaacagtccgaaaggactgctaataccgaatgttgtatctcctccgcatggaagagatattaaagatggcctctacttgtaa

SEQ ID NO: 1929 - DNA, 225 bp, unidentified
  misc_feature 1..225: note = Encodes 16S rRNA from Beijerinckia
  source 1..225: mol_type = genomic DNA
agagtttgatcatggctcagaacgaacgctggcggcaggcttaacacatgcaagttgaacgggatccttaagatagcttgctatattaaggtgagagtagcgcacgggtgagtaacacgtgggaacataccttatagtgtgggataacaattggaaacgattgataataccgcataagccctgagggggaaaggaggaattcgctataagattggcccgcggaag

SEQ ID NO: 1930 - DNA, 225 bp, unidentified
  misc_feature 1..225: note = Encodes 16S rRNA from Eubacterium
  source 1..225: mol_type = genomic DNA
agagtttgatcctggctcaggacgaacgctggcggcgtgcttaacacatgcaagtcgaacgaagcttgattgatgattacttcggtatgatttatgatatgactgagtggcggacgggtgagtaacgcgtgagtaacctgcctcttggagggggatagtgtttggaaacgaacagtaataccgcataacgtgcagagaaggcatcttttttgtaccaaagattta

SEQ ID NO: 1931 - DNA, 225 bp, unidentified
  misc_feature 1..225: note = Encodes 16S rRNA from Adhaeribacter
  source 1..225: mol_type = genomic DNA
agagtttgatcatggctcaggatgaacgctggcggcaggcttaatacatgcaagtcgaacggtaacgaccggtagcaatactggggcgacgagtggcgcacgggtgcgtaacgcgtatgcaacctgccctcaaccgggacataacgtcgagaaattggcgctaatatcccatgtgtatgcgaggcggcatcgtcttacatataaagattcattggttgaggatgg

SEQ ID NO: 1932 - DNA, 225 bp, unidentified
  misc_feature 1..225: note = Encodes 16S rRNA from unidentified taxa
  source 1..225: mol_type = genomic DNA
agagtttgatcatggctcagaacgaacgctggtagcgtggattaggcatgcaagtcgaacgggatccgggagatagcaatatttcctggtgagagtggcggaagggcgaggaacacgtgaacaacctgtccatcaggtggggaaaaccgttggaaacgacggctaataccgaatgtggcgtcgtgacacatgtcatgaacgctaaagggggcccgcaagggctct

SEQ ID NO: 1933 - DNA, 225 bp, unidentified
  misc_feature 1..225: note = Encodes 16S rRNA from Desulfobulbus
  source 1..225: mol_type = genomic DNA
agagtttgatcctggctcagaacgaacgctggcggcgtgcttaacacatgcaagtcgaacgcgaaagcggcttcggtcgtgagtagagtggcgcacgggtgagtaacgcgtagataacctgtcttcatatctgggataacacgccgaaaggggtactaataccggatatactcgcatttcaataggtgaggcgagaaaaggtggcctctggttcaagctactgta

SEQ ID NO: 1934 - DNA, 225 bp, unidentified
  misc_feature 1..225: note = Encodes 16S rRNA from Bacteroides
  source 1..225: mol_type = genomic DNA
agagtttgatcctggctcaggatgaacactagctacaggcttaacacatgcaagtcgaggggcagcattaagtcagcttgctgatttagatggcgaccggcgcacgggtgagtaacgcgtatccaacctgccccctacccggggatagccttgcgaaagtaagattaatacccggtgcagttatgattccgcatgggaatataacgaaagattcatcggtggggg

SEQ ID NO: 1935 - DNA, 225 bp, unidentified; identical to SEQ ID NO: 742
  misc_feature 1..225: note = Encodes 16S rRNA from Rummeliibacillus
  source 1..225: mol_type = genomic DNA

SEQ ID NO: 1936 - DNA, 224 bp, unidentified
  misc_feature 1..224: note = Encodes 16S rRNA from Agarivorans
  source 1..224: mol_type = genomic DNA
agagtttgatcatggctcagattgaacgctggcggcaggcttaacacatgcaagtcattgcacaatgggggaaaccctgatgcagccatgccgcgtgtgtgaagaaggccttcgggttgtaaagcacttttgcattcgaggaagacagcgtataaataaatgcgctatttgacgttagagtgtgaataagcaccggcaaactccgtgccagcagccgcggtaat

SEQ ID NO: 1937 - DNA, 225 bp, unidentified
  misc_feature 1..225: note = Encodes 16S rRNA from Clostridium XlVa
  source 1..225: mol_type = genomic DNA
agagtttgatcctggctcaggatgaacgctggcggcgtgcctaacacatgcaagtcgaacggagatttggcgctgacgagtgaagtagcttgctatggaacaaatcttgccaaagcttagtggcggacgggtgagtaacgcgtggacaacctggcccatacagggggacagcagctggaaacggctgataataccgcataagcgcacagtatcacatggtacagt

SEQ ID NO: 1938 - DNA, 225 bp, unidentified
  misc_feature 1..225: note = Encodes 16S rRNA from Selenomonas
  source 1..225: mol_type = genomic DNA
agagtttgatcctggctcaggacgaacgctggcggcgtgcttaacacatgcaagtcgaacggggctattagaagcttgcttttaagagcctagtggcaaacgggtgagtaacgcgtaggcaacctgcctctaagatggggacaacagtccgaaaggactgctaataccgaatgacgtaagtatctcgcatgggaaacttaccaaagatggcctctgcttgtaagc

SEQ ID NO: 1939 - DNA, 225 bp, unidentified
  misc_feature 1..225: note = Encodes 16S rRNA from unidentified taxa
  source 1..225: mol_type = genomic DNA
agagtttgatcctggctcagaacgaacgctggtagcgtggattaggcatgcaagtcgaacgggatcaggaaggcagcaatgtcggcctgtgagagtggcggaagggcgaggaacacgtgagcaacctgtccttgaggtggggaaaactccgggaaactggagctaataccgaatgtggcgccgggagacatcttccgagcgctaaagggggccgaaaggctctcc

SEQ ID NO: 1940 - DNA, 225 bp, unidentified
  misc_feature 1..225: note = Encodes 16S rRNA from Prevotella
  source 1..225: mol_type = genomic DNA
agagtttgatcctggctcaggatgaacgctagcggcaggcttaacacatgcaagtcgaggggcagcgggtccagcaatggatgccggcgaccggcgaaagggtgagtaacgcgtgagcaacgtgcccgtctgagggggatagtcattggaaacgatgcgtaataccccgtaacaacatttaccgcatggtgggtgtttgaaagatttattgcagacggatcggct

SEQ ID NO: 1941 - DNA, 225 bp, unidentified
  misc_feature 1..225: note = Encodes 16S rRNA from Spirochaeta
  source 1..225: mol_type = genomic DNA
agagtttgatcctggctcagaacgaacgctggcggcgcgttttaagcatgcaagtcgagcggtaagccggagcaatccggtgtagagcggcggacgggtgagtaacacgtggataatctggcctttagttcgggatagcctggtgaaagtcaggataataccggatacgacgcttatggcacaagcgataagcgggaaaggagccaaggctttgctgaaggatga

SEQ ID NO: 1942 - DNA, 225 bp, unidentified
  misc_feature 1..225: note = Encodes 16S rRNA from Selenomonas
  source 1..225: mol_type = genomic DNA
agagtttgatcatggctcaggacgaacgctggcggcgtgcttaacacatgcaagtcgaacggggcgattagaagcttgcttttatgagcctagtggcaaacgggtgagtaacgcgtaggcaacctgcctctaagatggggacaacagtccgaaaggactgctaataccgaatgttgtaagtaactcgcatgagagacttaccaaagatggcctctacttgtaagc

SEQ ID NO: 1943 - DNA, 225 bp, unidentified
  misc_feature 1..225: note = Encodes 16S rRNA from Spiroplasma
  source 1..225: mol_type = genomic DNA
agagtttgatcctggctcaggatgaacgctggcggcatgcctaagacatgcaagtcgaacgaggtggcccattgaaggtggagtgcttgcacgaagctggatatggattcccacctagtggcagacgggtgagtaacacgtgggttacctacctctttgttggggataacagttggaaacgattgctaataccgaataagatactcgtattgaaaggagctttca

SEQ ID NO: 1944 - DNA, 225 bp, unidentified
  misc_feature 1..225: note = Encodes 16S rRNA from Pedobacter
  source 1..225: mol_type = genomic DNA
agagtttgatcatggctcaggatgaacgctagcggcaggcctaatacatgcaagtcgtacgggagtcccccttcggggggatgagagtggcggacgggtgcgtaacgcgtatgcaacccacccctgtcagccggatagccttgggaaaccgggggtaacacggcatgttcccgcgtgggggcatccccatacgggcaaagcggcgacgcggacggggacgggcat

SEQ ID NO: 1945 - DNA, 225 bp, unidentified
  misc_feature 1..225: note = Encodes 16S rRNA from Clostridium XlVa
  source 1..225: mol_type = genomic DNA
agagtttgatcctggctcaggatgaacgctggcggcgtgcttaatacatgcaagtcgaacgaagcactttccccggactttttcggaacgaagggggttgtgacttagtggcggacgggtgagtaacgcgtggataacctgccccatgcagggggacaacagctggaaacggctgctaataccgcataagcgcacagtgaggcatctcacggtgtgaaaagattt

SEQ ID NO: 1946 - DNA, 225 bp, unidentified
  misc_feature 1..225: note = Encodes 16S rRNA from unidentified taxa
  source 1..225: mol_type = genomic DNA
agagtttgatcatggctcaggacgaacgctggcggcgtgcttcatacatgcaagtcgaacgagaaattgccttcgggcaatggacagtggcggacgggtgagtaatgtgtagagaatctgccctatagtgggggatagcagttggaaacgactattaataccccatatgcgcgtagttgcgatactattcgtgaaagatttatcgctataggatgagtctgcatc

SEQ ID NO: 1947 - DNA, 225 bp, unidentified
  misc_feature 1..225: note = Encodes 16S rRNA from Lactobacillus
  source 1..225: mol_type = genomic DNA
agagtttgatcctggctcaggacgaacgctggcggcgtgcctaatacatgcaagtcgaacgcaatcttttaacaatgagtgcttgcactcagcgttttaagtgcgagtggcgaacgggtgagtaacacgtgggcaatctgcccaaaagagggggataacacttggaaacaggtgctaataccgcataaaccaactgatcgcatgatcggttgggcaaagatggtg

SEQ ID NO: 1948 - DNA, 225 bp, unidentified
  misc_feature 1..225: note = Encodes 16S rRNA from Clostridium XlVa
  source 1..225: mol_type = genomic DNA
agagtttgatcatggctcaggatgaacgctggcggcgtgcctaacacatgcaagtcgaacggggtacagacgctgtgcggagaagtgcttgcacggaaccaaacttgtttgtacttagtggcggacgggtgagtaacgcgtggagaacctgcctcacacagggggataacagggagaaattcctgctaataccgcataagcgcacgacatggcatcatgaagtgt

SEQ ID NO: 1949 - DNA, 225 bp, unidentified
  misc_feature 1..225: note = Encodes 16S rRNA from Prevotella
  source 1..225: mol_type = genomic DNA
agagtttgatcatggctcaggatgaacgctggcggcgtgcctaacacatgcaagtcgaggggcagcatgtaggttgcttgcaacctatgatggcgaccggcgcacgggtgcgtaacgcgtatccaaccttccccgcagtagggtgcagcccgttgaaagacggattaatcccctatgttgtccattgacggcatccgatttggacgaaagatttcatcgctgcgg

SEQ ID NO: 1950 - DNA, 225 bp, unidentified
  misc_feature 1..225: note = Encodes 16S rRNA from Prevotella
  source 1..225: mol_type = genomic DNA
agagtttgatcctggctcaggatgaacgctagcgacaggcttaacacatgcaagtcgaggggtaacatgaagaaagcttgctttctttgatgacgaccggcgcacgggtgagtatcgcgtatccaacctgcccataagtagggaatagccttgcgaaagtaagattaatgccctatggtttccgccaaagacatctgagatggaataaagatttatcgcttatgg

SEQ ID NO: 1951 - DNA, 154 bp, unidentified
  misc_feature 1..154: note = Encodes 16S rRNA from Marinobacter
  source 1..154: mol_type = genomic DNA
agagtttgatcctggctcagattgaacgctggcggcaggcttaacacatgcaagtcgtacggtaacagaggaagacagcgtataaataaatgcgctatttgacgttagagtgtgaataagcaccggcaaactccgtgccagcagccgcggtaat

SEQ ID NO: 1952 - DNA, 225 bp, unidentified
  misc_feature 1..225: note = Encodes 16S rRNA from Butyricimonas
  source 1..225: mol_type = genomic DNA
agagtttgatcctggctcaggatgaacgctagcggcaggcttaacacatgcaagtcgaggggcatcgcggagtagcaatactctggcggcgaccggcggaagggtgcgtaacgcgtgagcaacttgcccgtcactgtgggataggcactggaaacggtgtgtaataccacgtaacacagcggtccgcatggacggttgttgaaagatccgttggtgacggatagg

SEQ ID NO: 1953 - DNA, 225 bp, unidentified
  misc_feature 1..225: note = Encodes 16S rRNA from Prevotella
  source 1..225: mol_type = genomic DNA
agagtttgatcatggctcaggatgaacgctagcggcaggcctaacacatgcaagtcgaggggcagcggggtagcaataccgccggcgaccggcgcacgggtgagtaacgcgtatgtaacctagttcacaaagagggatagccttccgaaagggagattaataccacatatgatgatagcttcgcatggagcagtcatgaaaaatttattgatgtgaaatggacat

SEQ ID NO: 1954 - DNA, 225 bp, unidentified
  misc_feature 1..225: note = Encodes 16S rRNA from Dongia
  source 1..225: mol_type = genomic DNA
agagtttgatcctggctcagaacgaacgctggcggcacgcttaacacatgcaagtcggacgggtggaagttagtttactgatggaagctagtggcggactggtgagtataatacaggaatatgcccttaggtatgggatagctttgggaaactggaggtaataccgtatgaggtcgagagaggaaagcaggaatgcgcctgaggattagcctgtatctgattagg

SEQ ID NO: 1955 - DNA, 225 bp, unidentified
  misc_feature 1..225: note = Encodes 16S rRNA from Anaerovorax
  source 1..225: mol_type = genomic DNA
agagtttgatcatggctcaggatgaacgctggcggcgtgcctaacacatgcaagtcgagcgggattcttacgaatggagattcgtcgaagtaagtaagatgatagcggcggacgggtgagtaacgcgtaggtaacctacccccggctgcgggatagcctagggaaacctggattaataccgcatgatgcgttgaagtcacatggctttaacgccaaagatttatc

SEQ ID NO: 1956 - DNA, 225 bp, unidentified
  misc_feature 1..225: note = Encodes 16S rRNA from Butyricimonas
  source 1..225: mol_type = genomic DNA
agagtttgatcctggctcaggatgaacgctagcggcaggcttaacacatgcaagtcgaggggcagcgcggagtagcaatactctggcggcgaccggcggaagggtgcgtaacgcgtgagcaacttgcccgtcactgtgggataggcactggaaacggtgtgtaataccacgtaacacatttgctcgcatgggtagatgttgaaaggtttaccggtgacggatggg

SEQ ID NO: 1957 - DNA, 225 bp, unidentified
  misc_feature 1..225: note = Encodes 16S rRNA from Cryptanaerobacter
  source 1..225: mol_type = genomic DNA
agagtttgatcatggctcaggacgaacgctggcggcatgcctaacacatgcaagtcgaacggaataagaatggctgtagcgatactttcgttcttatttagtggcgaacgggtgagtaacacgtgagcaacctgccttctacacagggataacagttggaaacgactgctaataccggataagaccacactgaggcatctcagaggggtcaaagcgcttagcggt

SEQ ID NO: 1958 - DNA, 225 bp, unidentified
  misc_feature 1..225: note = Encodes 16S rRNA from Papillibacter
  source 1..225: mol_type = genomic DNA
agagtttgatcatggctcaggatgaacgctggcggcgtgcataacacattcaagtcgaacgaagcacagttgatgaagtcttcggatggaattggctatgacttagtggcggacgggtgagtaacgcgtgagcaaccttcctggtagtgagggataacacagggaaacttgtgctaataccgcatgacgcatagacatcgcatggtgactatgccaaagacaagt

SEQ ID NO: 1959 - DNA, 225 bp, unidentified
  misc_feature 1..225: note = Encodes 16S rRNA from Clostridium sensu stricto
  source 1..225: mol_type = genomic DNA
agagtttgatcatggctcaggacgaacgctggcggtgtgcttaatacatgcaagtcgagcggacttgcgggggcttgctcccgcaagttagcggcggacgggtgagtaacgcgcgagcaacctgcctatatctggggaataacacagagaaatttgtgctaataccgcataagaccacagtggggcatcccacaggggtaaaagatttatcggatatagatgggc

SEQ ID NO: 1960 - DNA, 225 bp, unidentified
  misc_feature 1..225: note = Encodes 16S rRNA from Escherichia/Shigella
  source 1..225: mol_type = genomic DNA
agagtttgatcctggctcagattgaacgctggcggcaggcctaacacatgcaagtcgaacggtaacaggaaacagcttgctgtttcgctgacgagtggcggacgggtgagtaatgtctgggaaactgcctgatggagggggataactactggaaacggtagctaataccgcataacgtcgcaagaccaaagagggggaccctcgggcctcttgccatcggatgtg

SEQ ID NO: 1961 - DNA, 225 bp, unidentified
  misc_feature 1..225: note = Encodes 16S rRNA from Butyricicoccus
  source 1..225: mol_type = genomic DNA
agagtttgatcatggctcaggataaacgctggcggcgcacataagacatgcaagtcgaacggaagccgtgcgagagacaattgaagatttatctgattgagtctcacgcacaatgactttagtggcggactggtgagtaacacgtaagcaatctgcctatcagaggggaataacagtgagaaatcattgctaataccgcatatgctcacagcatcgcatgatgca

SEQ ID NO: 1962 - DNA, 225 bp, unidentified
  misc_feature 1..225: note = Encodes 16S rRNA from Prevotella
  source 1..225: mol_type = genomic DNA
agagtttgatcatggctcaggatgaacgctagctacaggcttaacacatgcaagtcgaggggcagcatggttgttgcttgcaacaactgatggcgaccggcgcacgggtgagtaacgcgtatccaaccttcccccaagtagggaatagcccggcgaaagtcggattaatgccctatgttttccttggatggcatctgatgaggaacaaagacttgtcgcttgggg

SEQ ID NO: 1963 - DNA, 225 bp, unidentified
  misc_feature 1..225: note = Encodes 16S rRNA from Lachnospiracea incertae sedis
  source 1..225: mol_type = genomic DNA
agagtttgatcctggctcaggatgaacgctggcggcgtgcttaacacatgcaagtcgaacggggaaacatatttgaagatttcggttggaagatatgttttctagtggcggacgggtgagtaacgcgtaaacaatctgccttagagagggggataacagatagaaatatttgctaataccgcataagaccacagctaggcatctagcaggggtaaaaggaggaat

SEQ ID NO: 1964 - DNA, 225 bp, unidentified
  misc_feature 1..225: note = Encodes 16S rRNA from Thermotalea
  source 1..225: mol_type = genomic DNA
agagtttgatcctggctcaggatgaacgctggcggcgtgcctaacacatgcaagtcgagcgagaagcttcggagtagattcttcggatgacacactgaagtggacagcggcggacgggtgagtaacgcgtgggcaacctgcccctttccggaggatagccaagggaaactttgaataatactccataaagcagtgacatcacatggtgatactgccaaagattta

SEQ ID NO: 1965 - DNA, 225 bp, unidentified
  misc_feature 1..225: note = Encodes 16S rRNA from Cohaesibacter
  source 1..225: mol_type = genomic DNA
agagtttgatcatggctcagaacgaacgctggcggcaggcttaacacatgcaagtcgaacggaacataggtagcttgctatctatgtcagtggcgcacgggtgagtaacgcgtaggaacctgtcttttagcctgggatagcctctggaaacggagggtaaaaccggatgagccctgagggggaaatgagtaatcagctggaagaggggcctgcgttagattaggc

SEQ ID NO: 1966 - DNA, 225 bp, unidentified
  misc_feature 1..225: note = Encodes 16S rRNA from Clostridium XVIII
  source 1..225: mol_type = genomic DNA
agagtttgatcatggctcaggatgaacgctggcggcgtgcctaatacatgcaagtcgaacgaggattcattgatggagcttgctccggatttgaattcgagtggcgaacgggtgagtaatacatgaataatctaccccttagtctgggataccaatctgaaaagattgctaataccggataggcaattctggggcatctcggaattattaaagatgggtttccat

SEQ ID NO: 1967 - DNA, 225 bp, unidentified
  misc_feature 1..225: note = Encodes 16S rRNA from Lachnospiracea incertae sedis
  source 1..225: mol_type = genomic DNA
agagtttgatcctggctcaggatgaacgctggcggcgtgcttaacacatgcaagtcgaacggacttttctcgctgaaaaaggaaggtgcttgcaccggagagtttcttgagggaagttagtggcggacgggtgagtaacgcgtgggtaacctgcctatcacagggggataacagttggaaacgactgctaataccgcataagcgcacggtatcgcatgatacagt

SEQ ID NO: 1968 - DNA, 225 bp, unidentified
  misc_feature 1..225: note = Encodes 16S rRNA from Spirochaeta
  source 1..225: mol_type = genomic DNA
agagtttgatcatggctcagaacgaacgctggcggcgcgtcttaagcatgcaagtcgggcggcaagctgccttcgggcagcctagagcggcggactggtgagtaacgcgtgggtgacgcacccccttgacggggacagcccgcagaaatgcggggtaataccggataaggtcctcggggttggagcccggggaggaaaggagctattgctccgcgaggggagcgg

SEQ ID NO: 1969 - DNA, 225 bp, unidentified
  misc_feature 1..225: note = Encodes 16S rRNA from Clostridium XlVa
  source 1..225: mol_type = genomic DNA
agagtttgatcctggctcaggatgaacgctggcggcgtgcttaacacatgcaagtcgaacgaagcactaaggatgagaccttcgggtggaattcttagtgacttagtggcggacgggtgagtaacgcgtgggtaacctgccccatacagggggataacagttggaaacgactgctaagaccgcataacaagggagtaccgcatgacacttccttcaaagatttat

SEQ ID NO: 1970 - DNA, 225 bp, unidentified
  misc_feature 1..225: note = Encodes 16S rRNA from Hydrogenoanaerobacterium
  source 1..225: mol_type = genomic DNA
agagtttgatcatggctcaggagaaacgctggcggcgcacataagacatgcaagtcgaacggaatttagccgaatgtttacatgaggcgaagatttagtggcggacgggtgagtaacacgtgagcaacctgcctttaggagggggataacattgagaaatcagtgctaataccgcataatgcataagcttcgcatgaagcctatgccaaaggagtaatccaccta

SEQ ID NO: 1971 - DNA, 225 bp, unidentified
  misc_feature 1..225: note = Encodes 16S rRNA from Clostridium IV
  source 1..225: mol_type = genomic DNA
agagtttgatcctggctcaggacgaacgctggcggcgtgcctaacacatgcaagtcgaacggagatattttgaatgaagacttcggttggatttcgatttatcttagtggcggacgggtgagtaacgcgtgagtaacctgcctttttgagggggataacatcgggaaatcgatgctaataccgcataatattcaagattcgcatggattttgaatcaaaggagca

SEQ ID NO: 1972 - DNA, 225 bp, unidentified
  misc_feature 1..225: note = Encodes 16S rRNA from Papillibacter
  source 1..225: mol_type = genomic DNA
agagtttgatcctggctcaggatgaacgctggcggcgtgcataacacattcaagtcgaacgaagcactttgacggaagtcttcggacggaagttgatttgacttagtggcggacgggtgagtaacgcgtgagcaaccttcctggtagtgagggataacacagggaaacttgtgctaataccgcatgacgcatggatatcgcatggtatatatgccaaagacttgt

SEQ ID NO: 1973 - DNA, 225 bp, unidentified
  misc_feature 1..225: note = Encodes 16S rRNA from Sporosarcina
  source 1..225: mol_type = genomic DNA
agagtttgatcatggctcaggatgaacgctggcggcatgcctaagacatgcaagtcgtacgaagcggcccactgacttatattgatacattgagagcttgctcgatttgaggatttataatgacgtggattttccgcttagtggcaaacgggtgagtaacacgtgggttacctgcctctatgttggggataccaattggaaacgattgttaataccgaatatgat

SEQ ID NO: 1974 - DNA, 225 bp, unidentified
  misc_feature 1..225: note = Encodes 16S rRNA from Selenomonas
  source 1..225: mol_type = genomic DNA
agagtttgatcctggctcaggacgaacgctggcggcgtgcttaacacatgcaagtcgaacgagacgattgaaagcttgcttttgaaagtcgagtggcaaacgggtgagtaacgcgtagacaacctgccgcaaagatggggacaacagtccgaaaggactgctaataccgaatgttgtcatttctcccgcatgggagactgattaaagatggcctctacttgtaag

SEQ ID NO: 1975 - DNA, 225 bp, unidentified
  misc_feature 1..225: note = Encodes 16S rRNA from Papillibacter
  source 1..225: mol_type = genomic DNA
agagtttgatcatggctcaggataaacgctggcggcgcacataagacatgcaagtcgaacggaccaaattagtttgtttacaaattgaagaggttagtggcggactggtgagtaatatgtaagcaatctgcctgttagagtggaacaacagtgagaaatcactgctaataccgcatatgccatagatgtcacatgacaacagtgggaaaggagcaatccgctaac

SEQ ID NO: 1976 - DNA, 187 bp, unidentified
  misc_feature 1..187: note = Encodes 16S rRNA from Lachnospiracea incertae sedis
  source 1..187: mol_type = genomic DNA
agagtttgatcatggctcaggataaacgctggcggcgtgcttaattggacaatgggggaaaccctgatccagcgacgccgcgtgaacgaagaagtatctcggtatgtaaagttctatcagcagggaagataatgacggtacctgactaagaagcaccggctaaatacgtgccagcagccgcggtaat

SEQ ID NO: 1977 - DNA, 225 bp, unidentified
  misc_feature 1..225: note = Encodes 16S rRNA from Clostridium XlVa
  source 1..225: mol_type = genomic DNA
agagtttgatcctggctcaggatgaacgctggcggcgtgcttaacacatgcaagtcgaacgaggtatagaagagaagttttcggatggatcttttataccgagtggcggacgggtgagtaacgcgtggagaacctgccccatacagggggataccaattagaaatgattgttaataccgcataagcgcacactgaggcatctcagagtgtgaaaagctccggcgg

SEQ ID NO: 1978 - DNA, 225 bp, unidentified
  misc_feature 1..225: note = Encodes 16S rRNA from Saccharofermentans
  source 1..225: mol_type = genomic DNA
agagtttgatcatggctcaggacgaacgctggcggcgtgcctaacacatgcaagtcgagcgaggacaacggcttcggctgttgttcgagcggcggacgggtgagtaacgcgtgaacaatctgtccctgacagggggataacacttggaaacaggtgctaataccgcataagaccacgtgaccgcatggtcgaggggtcaaaggagcaatccggtgaggggtgagt

SEQ ID NO: 1979 - DNA, 225 bp, unidentified
  misc_feature 1..225: note = Encodes 16S rRNA from Clostridium IV
  source 1..225: mol_type = genomic DNA
agagtttgatcatggctcaggacgaacgctggcggcgtgcctaacacatgcaagtcgaacggagttaaacgctgaatggatggtagcttgctactggaaattcttgtttaacttagtggcggacgggtgagtaacgcgtgagcaacctgcctttcagagggggataacggctggaaacggtcgctaataccgcataacgtatatttaaggcatcttagatatacc

SEQ ID NO: 1980 - DNA, 225 bp, unidentified
  misc_feature 1..225: note = Encodes 16S rRNA from Lachnospiracea incertae sedis
  source 1..225: mol_type = genomic DNA
agagtttgatcctggctcaggatgaacgctggcggcgtgcttaatacatgcaagtcgaacgaagcatgttgacggaatcccctcggggaggaagatgacatgacttagtggcggacgggtgagtaacgcgtgggcaatctgccctgtacagggggacaacagttggaaacgactgctaataccgcataagcgcacgatgaccgcatggtcaggtgtgaaaaggag

SEQ ID NO: 1981 - DNA, 225 bp, unidentified
  misc_feature 1..225: note = Encodes 16S rRNA from Clostridium IV
  source 1..225: mol_type = genomic DNA
agagtttgatcctggctcaggagaaacgctggcggcgcacataagacatgcaagtcgaacggaacttagtcgaatgtttacatgagacaaaagtttagtggcggacgggtgagtaacacgtgagcaacctgcctttaagagggggataacattgagaaatcagtgctaataccgcataacgcatttctaccgcatgatagaaatagccaaaggagaaatccgctt

SEQ ID NO: 1982 - DNA, 225 bp, unidentified
  misc_feature 1..225: note = Encodes 16S rRNA from Lachnospiracea incertae sedis
  source 1..225: mol_type = genomic DNA
agagtttgatcatggctcaggatgaacgctggcggcgtgcctaacacatgcaagtcgaacggggtgtcagctcttcggaacggacacttagtggcggacgggtgagtaacgcgtgggtaacctgcctcatacagggggatagcagttggaaacgactgataataccgcataagcgcacagtatcgcatggtacagtgtgaaaaactccggtggtatgagatggac

SEQ ID NO: 1983 - DNA, 225 bp, unidentified
  misc_feature 1..225: note = Encodes 16S rRNA from Desulfotomaculum
  source 1..225: mol_type = genomic DNA
agagtttgatcatggctcaggactaacgctggcggcgtgcctaacacatgcaagtcgaacgattcattttttgtagcaatatagaagatggagagtggcgcacgggtgagtaacacatagatgatctgcctttcagactgggacaactcagggaaacttgagctaataccagataagaccccatgaagggattcacgtgatcaaagggggagcaatctcctgctg

SEQ ID NO: 1984 - DNA, 225 bp, unidentified
  misc_feature 1..225: note = Encodes 16S rRNA from Pedobacter
  source 1..225: mol_type = genomic DNA
agagtttgatcatggctcaggatgaacgctagcggcaggcctaatacatgcaagtcgaacgggaagggtccttcggggccctgagagtggcgcacgggtgcgtaacgcgtatgcaaccaacccctttccgggggacagccggtggaaacgccgggtaataccccatgtcgatccatttgggcatccaagaggattgaaagatttcggtcggagagggacgggcat

SEQ ID NO: 1985 - DNA, 225 bp, unidentified
  misc_feature 1..225: note = Encodes 16S rRNA from Anaeroplasma
  source 1..225: mol_type = genomic DNA
agagtttgatcatggctcaggattaacgctggcggcgtgcctaatacatgcaagtcgaatggttagcttgctaaccatggcgaacgggtgagtaacacgtaggcaacctgacgtaaagccgaggataaccattggaaacgatggataatactggataggacatttggaggcatctttggatgtttaaagatttatcactttacgaggggcctgcggcgcattagc

SEQ ID NO: 1986 - DNA, 225 bp, unidentified
  misc_feature 1..225: note = Encodes 16S rRNA from Clostridium IV
  source 1..225: mol_type = genomic DNA
agagtttgatcctggctcaggacgaacgctggcggcgtgcttaacacatgcaagtcgaacgagaatccgtggaaagagatttcggtcaatggaagcggaggaaagtggcggacgggtgagtaacgcgtgaggaacctgccttggagagggggacaacagccggaaacggctgctaataccgcatgacgcacagaggggacatccccattgtgccaaagatttatc

SEQ ID NO: 1987 - DNA, 225 bp, unidentified
  misc_feature 1..225: note = Encodes 16S rRNA from Treponema
  source 1..225: mol_type = genomic DNA
agagtttgatcatggctcagaacgaacgctggcggcgcgtcttaagcatgcaagtcgggcgggattcatgtgcttgcacatgatgagagcggcggactggcgaggagcgcgtgggtgacgcacccctcggacggggacagccggcagaaatgccgggtgataccggatgaggtcccccttgtcggaggagggggaggaaaggggcttcggccccgccgggggagc

SEQ ID NO: 1988 - DNA, 225 bp, unidentified
  misc_feature 1..225: note = Encodes 16S rRNA from Mogibacterium
  source 1..225: mol_type = genomic DNA
agagtttgatcctggctcaggatgaacgctggcggcgtgcctaatacatgcaagtcgagcgagatactttcaaatgagacttcggtggattttggaggttgaaagcggcggacgggtgagtaacgcgtaggcaacctgccctttgcacagggatagccattggaaacgatgattaatacctgataacgcgggagcgatgcatatcgcttccgtcaaagattcatc

SEQ ID NO: 1989 - DNA, 225 bp, unidentified
  misc_feature 1..225: note = ITS sequence of Candida pararugos
  source 1..225: mol_type = genomic DNA
tcctccgcttattgatatgcttaagttcagcgggtgatcttacttgatatgaggtcaaaatttgataattttccacagcttgtgtctaacaactgtgtataatctttttcagtccatatagtgaaccattacccactaatatatatgtggagaaaaaatgacgctcacacaagtatacctccaaagaggtgcaatgtgcgttcaaaaactcaatgattcacgtct

SEQ ID NO: 1990 - DNA, 225 bp, unidentified
  misc_feature 1..225: note = ITS sequence of Dipodascaceae s
  source 1..225: mol_type = genomic DNA
tcctccgcttattgatatgcttaagttcagcgggtaatcctacttgatctgaggttgaatagtgttgtttttcaaacgaatttgattcgaaattttagaagagcaaagcaattccaagagagaaacaacgctcaaacaagtatactttgggggataccccaaagtgcaatgtgcgttcaaaaactgatgattcacttctgcaattcacaagaaatatcgcgtttc

SEQ ID NO: 1991 - DNA, 225 bp, unidentified
  misc_feature 1..225: note = ITS sequence of Orpinomyces sp AF CTS CHO
  source 1..225: mol_type = genomic DNA
tcctccgcttattgatatgcttaagttcagcgggtactcttatctgatttgagatcaagttatttttaaattaaattttccttttaaattaagcaacaattaatattttaatttttaccctttaaaactgaaaagtttattcctttttacgggaaaattttatccaattttattagataaaaaccaaaaaaaattggcttttaaaaatcaatttaaagtgaaaca

SEQ ID NO: 1992 - DNA, 225 bp, unidentified
  misc_feature 1..225: note = ITS sequence of Candida catenulat
  source 1..225: mol_type = genomic DNA
tcctccgcttattgatatgcttaagttcagcgggtagtcttacgtgtgtgagggaaaaagtatggttgtgagtaaactgtaatactacaccaatcactttttggaggaacagctgacgccgtatgtccattacctgcgagggagataaccgctcacacacgcatgcccgcgggaatacccacgggcgcaatgtgcgttcaaagattcgatgattcacaaaatctg

SEQ ID NO: 1993 - DNA, 225 bp, unidentified
  misc_feature 1..225: note = ITS sequence of Aspergillus cibariu
  source 1..225: mol_type = genomic DNA
tcctccgcttattgatatgcttaagttcagcgggtatccctacctgatccgaggtcaacctggttaaaaagattggttgcgaggctagctgccagctggacctacgggagcgggtgacaaagccccatacgctcgaggaccagacatggtgccgccactgccttttgggcccgtccccgttgccagggacggaagcccaacacacaagccgtgcttgagggcagc

SEQ ID NO: 1994 - DNA, 225 bp, unidentified
  misc_feature 1..225: note = ITS sequence of Candida etchellsi
  source 1..225: mol_type = genomic DNA
tcctccgcttattgatatgcttaagttcggcgggtaatcttgcttgattgggggccataaaaaatattactgcacagagttattaacgtgtgctgttccatttctttgactccaataaggagcaacacctcgtaatccacaagaagtagattagagagaaagttcggcgctccaacaagcatgctactaggagatcctagaagcgcaatgtgcgttcaaagattc

SEQ ID NO: 1995 - DNA, 225 bp, unidentified
  misc_feature 1..225: note = ITS sequence of Anaeromyces sp K
  source 1..225: mol_type = genomic DNA
tcctccgcttattgatatgcttaagttcagcgggtactcttatctgatttgagatcaagttgttttaaaaaatttcctttttgttttgaatatgaaaaggtatttttaaaattgtctaggttattccttggaaaaggaaaattttatccaattttaaaaattgaaattttcaaatccaatttaaaaattcaatttaaagtgaaacaacttgtatcgttgtaaaac

SEQ ID NO: 1996 - DNA, 225 bp, unidentified
  misc_feature 1..225: note = ITS sequence of Cladosporium sp 4 MU 201
  source 1..225: mol_type = genomic DNA
tcctccgcttattgatatgcttaagttcagcgggtatccctacctgatccgaggtcaaccttagaaatggggttgttttacggcgtagcctcccgaacaccctttagcgaatagtttccacaacgcttaggggacagaagacccagccggtcgatttgaggcacgcggcggaccgcgttgcccaataccaagcgaggcttgagtggtgaaatgacgctcgaacag

SEQ ID NO: 1997 - DNA, 225 bp, unidentified
  misc_feature 1..225: note = ITS sequence of Wallemia seb
  source 1..225: mol_type = genomic DNA
tcctccgcttattgatatgcttaagttcagcgggtaatcccatctgatttgaggtcgatttgatcaggttgtttgccaaaaattggcagttagaagcaatcactacaaattactaaggcgagattactctctgactggtgatggatgtaatccattataacacacagtattaacccattcataaggtcatcactaatcattttaaagggagtcattatacatgac

SEQ ID NO: 1998 - DNA, 225 bp, unidentified
  misc_feature 1..225: note = ITS sequence of Orpinomyces sp AF CTS CHO
  source 1..225: mol_type = genomic DNA
tcctccgcttattgatatgcttaagttcagcgggtactcttatctgatttgagatcaagttatttgaaataaatttccttttgctattgaatttttaatttcagattaaaaaattgtcaagtttattccttttttacgggaaaattttatccaattttttaaaaattgaaaataaaaaaacaattttaaaattcaatttaaagtgaaacaacttgtatcgttgta

SEQ ID NO: 1999 - DNA, 225 bp, unidentified
  misc_feature 1..225: note = ITS sequence of Orpinomyces sp AF CTS CHO
  source 1..225: mol_type = genomic DNA
tcctccgcttattgatatgcttaagttcagcgggtactcttatctgatttgagatcaagttatttaaaataaatttccttttcttgaaaaatttattttcgctttttaaaactgtcaaggttattcctttttacgggaaaattttatccaattttaaaaaattgaaaataaaattttacaatttaaaaattcaatttaaagtgaaacaacttgtatcgttgtaaa

SEQ ID NO: 2000 - DNA, 225 bp, unidentified
  misc_feature 1..225: note = ITS sequence of Kodamaea ohmer
  source 1..225: mol_type = genomic DNA
tcctccgcttattgatatgcttaagttcagcgggtagtcctacttgatttgaggaaaaaaaatgagtgtactgacggtaccgttttgtagagtactgtcgtcattattttcgtgcaaacacaatacaatccgtgaggattagggaagtattcgctcaaacaagcataccattgggaatacccaatggtgcaatgtgcgttcaaagattcgatgattccgagagct

SEQ ID NO: 2001 - DNA, 225 bp, unidentified
  misc_feature 1..225: note = ITS sequence of Pichia burtoni
  source 1..225: mol_type = genomic DNA
tcctccgcttattgatatgcttaagttcagcgggtagtcctacctgatttgaggaaaatgtgtttttagtgtggttgtcactactaaattagaaaataacaacacaagaaaaatacttttcgaatggactgactaagagctcgtgccattcaacgccaacccgcgggggttgagggagaaatgacgctcaaacaggcataccttgtggaataccacaaggtgcaa

SEQ ID NO: 2002 - DNA, 225 bp, unidentified
  misc_feature 1..225: note = ITS sequence of Pachyphloeus carneu
  source 1..225: mol_type = genomic DNA
tcctccgcttattgatatgcttaagttaagggagtcctcttacaagtttcaagtctttcttaaaatacagtttataatattttccttttataatttaaaaatgttactttttaatttattaaagtacttatattactttctgttttttggattttacttttgtaaaatctttctttttattttatattattttttaagggacgttgaaacttatatacatcgatc

SEQ ID NO: 2003 - DNA, 225 bp, unidentified
  misc_feature 1..225: note = ITS sequence of Anaeromyces sp FFEX
  source 1..225: mol_type = genomic DNA
tcctccgcttattgatatgcttaagttcagcgggtactcttatctgatttgagatcaagttatttgaaataaatttccttttgctattggattttattctctttcaaaaaattgtcaaggttattccttttttacgggaaaattttatccaattttttaaaaattgaaaataaaaaacaattttaaaattcaatttaaagtgaaacaacttgtatcgttgtaaaa

SEQ ID NO: 2004 - DNA, 225 bp, unidentified
  misc_feature 1..225: note = ITS sequence of Trichosporon asteroide
  source 1..225: mol_type = genomic DNA
tcctccgcttattgatatgcttaagttcagcgggtagtcctacctgatttcaggccagagtcaaagtaattgtccttgcggacgattagaagcacgcttcaacacaatggacccagtgaaacttattacaccagacattaatgtcaaacttgctaactcttttaaggcgagcgatcagagatcgcagacgcccaaatccaatccattaggaaaccctagtggttg

SEQ ID NO: 2005 - DNA, 225 bp, unidentified
  misc_feature 1..225: note = ITS sequence of Rhizophydium sp MP 00
  source 1..225: mol_type = genomic DNA
tcctccgcttattgatatgcttaagttaagagagtcatcttaaaaatttcaaatctttttttaacttttgaatttacttttgattttactcttaataaattcttttttataatcaattgttttaattgatttattataatttattttattttaaaaagaggatattgaaacttttatatttaattaaagctaattaaatactttcatgcattcaaatatttactt

SEQ ID NO: 2006 - DNA, 225 bp, unidentified
  misc_feature 1..225: note = ITS sequence of Vrystaatia aloeicol
  source 1..225: mol_type = genomic DNA
tcctccgcttattgatatgcttaagttaagagagtcatcttgaaaatttcaaatcttttttaaatcgtttgaccttttcattttttacgtgattagatcaattcttattcaattaatcaattgctttaattgatttattaaatatgttattttaaaattgggatgttgaaactttcatatttaattgaagttcaattaaatactttcatgcattcaaatatttac

SEQ ID NO: 2007 - DNA, 225 bp, unidentified
  misc_feature 1..225: note = ITS sequence of Rhizophydium sp MP 00
  source 1..225: mol_type = genomic DNA
tcctccgcttattgatatgcttaagttaagagagtcatcttaaaaatttcaaatctttttttaacttttgaatttacttttttgattttactcttaaaaaataaattcttttattttataatcaattgttttaattgatttattataatttattttattttaaaaagaggatattgaaacttttatatttaattaaagctaattaaatactttcatgcattcaaa

SEQ ID NO: 2008 - DNA, 225 bp, unidentified
  misc_feature 1..225: note = ITS sequence of Ascomycota s
  source 1..225: mol_type = genomic DNA
tcctccgcttattgatatgcttaagttcagcgggtatccctacctgatccgaggtcaacctggaaaaaatggttggaaaacgtcggcaggcgccggccaatcctacagagcatgtgacaaagccccatacgctcgaggatcggacgcggtgccgccgctgcctttcgggcccgtccccccggagagggggacggcgacccaacacacaagccgggcttgagggca

SEQ ID NO: 2009 - DNA, 225 bp, unidentified
  misc_feature 1..225: note = ITS sequence of Wallemia seb
  source 1..225: mol_type = genomic DNA
tcctccgcttattgatatgcttaagttcagcgggtaatcccatctgatttgaggtcgatttgatcagtttgtttgccaatggcagttagaagcaatcactacaaattactaaggcgagattactctctgactggtgatggatgtaatccattataacacacagtattaacccattcataaggtcatcactaattattttaaagggagtcattgtttatatgacaa

SEQ ID NO: 2010 - DNA, 225 bp, unidentified
  misc_feature 1..225: note = ITS sequence of Vrystaatia aloeicol
  source 1..225: mol_type = genomic DNA
tcctccgcttattgatatgctcctctaccttgacatccgctaccttgataattttgctgttgttgtcttcttctatcttcttcttgtctacgtctatcttcttctcttctacgtctatcttcttcttctcttcttcgtctttcatcctcttgtcttcttctatcttgttcttgtctacgtctatcttcttcttgatgtcttctatcttcttctcggtgtcttcta

SEQ ID NO: 2011 - DNA, 225 bp, unidentified
  misc_feature 1..225: note = ITS sequence of Trichoderma virid
  source 1..225: mol_type = genomic DNA
tcctccgcttattgatatgcttaaattcagcgggttcaacttattggaatcagagtaaatcgaggctgtcgttgatcttaattaggttccacgaaccgcttgcaccacaagattatcttgagcacttcatttattgtgtaattacatctactgaaatcaataacacgctcattgaggtgttttacatgtgttcagatgtgttcaaatgtcaatctaatgattgac

SEQ ID NO: 2012 - DNA, 225 bp, unidentified
  misc_feature 1..225: note = ITS sequence of Anaeromyces sp FFEX
  source 1..225: mol_type = genomic DNA
tcctccgcttattgatatgcttaagttcagcgggtactcttatctgatttgagatcaagttatttaaataaatttccttttaataattggaattttttaatttcaattaatttaaaattgtcaaggttattcctttttacgggaaaattttatccaattttaaaaattgaattaaaaaaatacaatttaaaaattcaatttaaagtgaaacaacttgtatcgttg

SEQ ID NO: 2013 - DNA, 225 bp, unidentified
  misc_feature 1..225: note = ITS sequence of Anaeromyces sp FFEX
  source 1..225: mol_type = genomic DNA
tcctccgcttattgatatgcttaagttcagcgggtactcttatctgatttgagatcaagttatttttaaataaatttccttttgctattgaattcttaatttcagcttaaaaaattgtcaaggttattcctttttacaggaaaattttatccaattttttaaaaattgaaaataaaaaaacaattttaaaattcaatttaaagtgaaacaacttgtatcgttgta

SEQ ID NO: 2014 - DNA, 225 bp, unidentified
  misc_feature 1..225: note = ITS sequence of Vrystaatia aloeicol
  source 1..225: mol_type = genomic DNA
tcctccgcttattgatatgctcatgatattcctctttggaaatgctgccgttgcatggagcgtaacataagtcaatctggctgttcaagcatggaccatccattcttttgcaggttcttattctaaacaattgctttaggaacttaacggtttggcgaacagcagtaacatctgtaaaaggaccatagtatgaaccttttttgcctatatcccttgttacgactt

SEQ ID NO: 2015 - DNA, 225 bp, unidentified
  misc_feature 1..225: note = ITS sequence of Orpinomyces sp AF CTS CHO
  source 1..225: mol_type = genomic DNA
tcctccgcttattgatatgcttaagttaagagagtcatcttaaaaatttcaaatcaaatttaaatatattaagttaatttttaaaaaatgttattttaaaattaactcgtttattatttaattaattgttttaattaattaattatatattttatttaatttttaaattgatgttgaaatttttatatttaattcaagatgaattaaatactttcatgcattcaa

SEQ ID NO: 2016 - DNA, 225 bp, unidentified
  misc_feature 1..225: note = ITS sequence of Candida glabrat
  source 1..225: mol_type = genomic DNA
tcctccgcttattgatatgcttaagttcggcgggtaatcttatctggcttgatgttttatatattgttgatattgaaaatatgtttttctttaatatcaaaatcgttaaaacccacaagtgtatttgatgggtcaagcaacaaacaatcaaacagatataaagccgagtctcctttggctttgcaaaatgcgttcaaagattcgatgattcacagaataatgcac

SEQ ID NO: 2017 - DNA, 225 bp, unidentified
  misc_feature 1..225: note = ITS sequence of Neocallimastix s
  source 1..225: mol_type = genomic DNA
tcctccgcttattgatatgcttaagttcagcgggtactcttatctgatttgagatcaagttatttaaataaatttccttttaaaatcgttcccaaccgacgatttcaattaaaatccatttaaagtgaaacaacttgtttatcgttgtaaaacactcataaccataaaatcaaatgattttatgagaatattttactgatactcaaacagacatacttttttagt

SEQ ID NO: 2018 - DNA, 225 bp, unidentified
  misc_feature 1..225: note = ITS sequence of Anaeromyces sp SSD BRL
  source 1..225: mol_type = genomic DNA
tcctccgcttattgatatgcttaagttcagcgggtactcttatctgatttgagatcaagttgtttaaaaaatttcctttttgttttgaataagaaaactatttttaaaattgtctaggttattccttggaaaaggaaaattttatccaattttaaaaattgaaattttcaaatccaatttaaaaattcaatttaaagtgaaacaacttgtatcgttgtaaaacac

SEQ ID NO: 2019 - DNA, 225 bp, unidentified
  misc_feature 1..225: note = ITS sequence of Trichoderma virid
  source 1..225: mol_type = genomic DNA
tcctccgcttattgatatgcaattttcaaggttcaacccgttcagcttcgctgaccggggcaagaatctcgatacttcgtatcttcgattcttgaaggtttccatcctgaccggtttcccagtctctttgaaaacccaacagtataacatctgagaggctgtcttgtgacaacccgcaagaattcaaactctgtttggattcttgcttcgaagctctgcttcgaa

SEQ ID NO: 2020 - DNA, 225 bp, unidentified
  misc_feature 1..225: note = ITS sequence of Candida glabrat
  source 1..225: mol_type = genomic DNA
tcctccgcttattgatatgcttaagttcagcgggtagtcttacgggggggagaaacaaagtagtcgagaacgtgttttctgactgttgattctaaggcccggaggagaaaatgtatgctccaccccgcatgcgccggagcgcgccatgtgcgttcaaagattaatgattcacgtttgcagatcatgatacgtatcgcaatttgctgcgttcttcatcggtacgag

SEQ ID NO: 2021 - DNA, 225 bp, unidentified
  misc_feature 1..225: note = ITS sequence of Candida glabrat
  source 1..225: mol_type = genomic DNA
tcctccgcttattgatatgcttaagttcagcgggtactcccatctgatttgagataagtttatagataggccagcgtaattatgtaattcacagtcccacttggattcaaacccactaaataaaaagataggtcaagttgtgttatgctcaaacagatgtacgacaaacgtcgtgcaagatgcgttcaaagattcgatgattcacagaataatgcaattcacatt

SEQ ID NO: 2022 - DNA, 225 bp, unidentified
  misc_feature 1..225: note = ITS sequence of Anaeromyces mucronatu
  source 1..225: mol_type = genomic DNA
tcctccgcttattgatatgcttaagttcagcgggtactcttatctgatttgagatcaagttgtttaaaaaatttcctttttgttttgaataagaaaactatttttaaaattgtctaggttattccttgcttaaaggaaaattttatccaattttaaaaattgaaattttcaaatccaattaaaaattcaatttaaagtgaaacaacttgtatcgttgtaaaacac

SEQ ID NO: 2023 - DNA, 225 bp, unidentified
  misc_feature 1..225: note = ITS sequence of Phyllosticta capitalensi
  source 1..225: mol_type = genomic DNA
tcctccgcttattgatatgccccttaccgcttcagctgctttaagctcccttaaaacaaactcaagcttttttatgtcaagaaaggccctttcgttacttccctgcgccgaacagaaggggcaatgccccgggcaatacattgtcgggcagattgaaagctgaagctttaaaggtcttttcttttccctgttcggagcaccgtttacggagcagtgataattctt

SEQ ID NO: 2024 - DNA, 225 bp, unidentified
  misc_feature 1..225: note = ITS sequence of Schizangiella serpenti
  source 1..225: mol_type = genomic DNA
tcctccgcttattgatattcatatatcctatttgatgagatcaaagaacttaataattacttattttttctttctgtgatcttcttaatattattttattaaaaaataatacccaaatacattatctagttttcaaagaactatttctgagagaacaatctctcaaaactaagcaaaacgttatagctagatcttcttttctacaaatatactccatagaaagga

SEQ ID NO: 2025 - DNA, 225 bp, unidentified
  misc_feature 1..225: note = ITS sequence of Pleosporaceae s
  source 1..225: mol_type = genomic DNA
tcctccgcttattgatatgcttaagttcagcgggtatccctacctgatccgaggtcaaaagttgaaaaaaggctttgtggatgctgaccttggctggaagagagcgcgacttgtgctgcgctccgaaaccagtaggccggctgccaattactttaaggcgagtctccagcgaactggagacaagacgcccaacaccaagcaaagcttgagggtacaaatgacgct

SEQ ID NO: 2026 - DNA, 225 bp, unidentified
  misc_feature 1..225: note = ITS sequence of Alternaria sp 3 MU 201
  source 1..225: mol_type = genomic DNA
tcctccgcttattgatatgcttaagttcagcgggtatccctacctgatccgaggtcaaaagttgaaaaaaaggcttaatggatgctagacctttgctgatagagagtgcgacttgtgctgcgctccgaaaccagtaggccggctgccaattactttaaggcgagtctccagcaaagctagagacaagacgcccaacaccaagcaaagcttgagggtacaaatgac

SEQ ID NO: 2027 - DNA, 225 bp, unidentified
  misc_feature 1..225: note = ITS sequence of Penicillium brevicompactu
  source 1..225: mol_type = genomic DNA
tcctccgcttattgatatgcttaagttcagcgggtatccctacctgatccgaggtcaacctggaaaaaagtttggttgatcggcaggcgccggccagtcctacaaagcgggtgacaaagccccatacgcttgaggaccggacgcggtgccgccgctgcctttcgggcccgtcccccggaaggaggacggagcccaacacacaagccgtgcttgagggcagcaatg

SEQ ID NO: 2028 - DNA, 225 bp, unidentified
  misc_feature 1..225: note = ITS sequence of Cryptococcus terrestri
  source 1..225: mol_type = genomic DNA
tcctccgcttattgatatgcttaagttcagcgggtagccctacctgatttcaggtcaaagtcaaaagtgcgcgatggcaggttctgagcagtcatcaccacaaggagagacgaaacttattacgtctaacactgatgtgggatgttccactaagtcatttgaggcgagccatcactggcagacgcccaagtccaagtctaacatgttcagaaaacatattagatt

SEQ ID NO: 2029 - DNA, 225 bp, unidentified
  misc_feature 1..225: note = ITS sequence of Rhizophydium sp MP 00
  source 1..225: mol_type = genomic DNA
tcctccgcttattgatatgcttaagttaagagagtcatcttaaaaatttcaaatcaaaataacatttttattgaatttttttatttattaaattcaattttaaatttttttcaattaattattttaattaatttattataatttgtgttatttttttttttaattgatgttgaaatttttatatttaattcaagttgaattaaatactttcatgcattcaaatat

SEQ ID NO: 2030 - DNA, 225 bp, unidentified
  misc_feature 1..225: note = ITS sequence of Monascus purpureu
  source 1..225: mol_type = genomic DNA
tcctccgcttattgatatgcttaagttcagcgggtatccctacctgatccgaggtcaacctaaggaaaaaaaggttggagagggcaaaggccccggcccgacctactgagcgggtgacaaagccccatacgctcgaggaccggacgcggcgccgccactgcctttcgggcccgtcccccttgcccggaggcgcaggggacggcggcccaacacacaagccgcgct

SEQ ID NO: 2031 - DNA, 225 bp, unidentified
  misc_feature 1..225: note = ITS sequence of Saccharomycetales s
  source 1..225: mol_type = genomic DNA
tcctccgcttattgatatgcttaagttcagcgggtattcctacctgatttgaggtcgagcttatgtattaagttcggcggccaagcgtcctactcatagttcgcttcgcccgcaacgtttcttttcagagcggccccaatgccagggcccccccatttctgctcgcaagcaagaaggaaacgacgctcaaacaggcatgccctccggaataccagagggcgcaat

SEQ ID NO: 2032 - DNA, 225 bp, unidentified
  misc_feature 1..225: note = ITS sequence of Cyllamyces aberensi
  source 1..225: mol_type = genomic DNA
tcctccgcttattgatatgcttacgttcagcgggtactcttatctgatttgagatcaagttaatttttacttttttttcctttgtaagtacttttaaaaaatcaaactaattcattcttaaaattgtttaggttattccttttttacgggaaaattttatccaattttaaaaaaaatcagtttttaaatgattttttacaagacaaagaatttaaagtgaaacaa

SEQ ID NO: 2033 - DNA, 225 bp, unidentified
  misc_feature 1..225: note = ITS sequence of Microascaceae s
  source 1..225: mol_type = genomic DNA
tcctccgcttattgatatgcttaagttcagcgggtaaccctacctgatccgaggtcaaaccatcaggagttgaggttcgacggctggccttcgccgggacccgatgcgaggtgagctaacttactacgcagggggcgccgcggcgggaccgccacttcatttcagggcctgcgggcaacggtggcccgcagcgccccaacaccgggcggcggcgcggcccacggt

SEQ ID NO: 2034 - DNA, 198 bp, unidentified
  misc_feature 1..198: note = ITS sequence of Orpinomyces sp AF CTS CHO
  source 1..198: mol_type = genomic DNA
tcctccgcttattgatatgcttaagttcagcgggtactcttatctgatttgagatcaagttatttataaataaatttcctttaactgtacggtatggaaactattaaaatttctaaaaaactgaaatagctttattccttgttacgacttttacttcccctccgcttattgatatgccttgttacgacttttacttcc

SEQ ID NO: 2035 - DNA, 225 bp, unidentified
  misc_feature 1..225: note = ITS sequence of Trichoderma virid
  source 1..225: mol_type = genomic DNA
tcctccgcttattgatatgcttaagttcagcaggtactcccatccgattcgatatgaaatatatttttcgatagagtcataaattcataagactcaatccttcctcatttcagatcaacattacatgagtgatcaaagtttggtcatactcgatcggatgtggaaagcttgcgctccccagcgtgtgcgttcaaaaattggatgattcacagtgtaattgtcatt

SEQ ID NO: 2036 - DNA, 225 bp, unidentified
  misc_feature 1..225: note = ITS sequence of Orpinomyces sp AF CTS CHO
  source 1..225: mol_type = genomic DNA
tcctccgcttattgatatgcttaagttaagagagtcatcttaaaaatttcaaatcaaatttaaatatattaagttaatttttaaaaatgttattttaaaattaactcgtttatttatttaattaattgttttaattaattaattatatttattttttttatttttaaattgatgttgaaatttttatatttaattcaagatgaattaaatactttcatgcattca

SEQ ID NO: 2037 - DNA, 225 bp, unidentified
  misc_feature 1..225: note = ITS sequence of Rhizophydium sp MP 00
  source 1..225: mol_type = genomic DNA
tcctccgcttattgatatgcttaagttaagagagtcatcttaaaaatttcaaatcaaaaattaaatatttatttgttttaaattaattttttaaataatttaaacaaattcatttatttcaattaattatattaattaatttattataattttatttttaattttttaattgatgttgaaatttttatatttaattctagtagaattaaatactttcatgcattc

SEQ ID NO: 2038 - DNA, 225 bp, unidentified
  misc_feature 1..225: note = ITS sequence of Piromyces sp I GRL 1
  source 1..225: mol_type = genomic DNA
tcctccgcttattgatatgcttaagttcagcgggtactcttatctgatttgagatcaagttatttagttaaattttccttttaatgaaaaaatctaatcaaaaaattaaaattgtttaggttattccttttttacgggaaaattttatccaattttattttaaaattagaaaaattcaaattttaaaaaaaatttaaagtgaaacaacttgtatagttgtaaaac

SEQ ID NO: 2039 - DNA, 225 bp, unidentified
  misc_feature 1..225: note = ITS sequence of Paracoccidioides brasiliensi
  source 1..225: mol_type = genomic DNA
tcctccgcttattgatatgcttaagttcagcgggtatccctacctgatccgaggtcgatttctagaatatgttaatattcaagtaaaaaaatcagaccggcgacggccgggccgcgtgagcgtactatgttgaaaaaaccccatatgctcgggcaccggagtcgcgacgccgccaatgcatttcaggcaaatccctacatatcaggatgagcccaacacacaagc

SEQ ID NO: 2040 - DNA, 225 bp, unidentified
  misc_feature 1..225: note = ITS sequence of Millerozyma farinos
  source 1..225: mol_type = genomic DNA
tcctccgcttattgatatgcttaagttcagcgggtattcctacctgatttgaggtcaaactttgtagattgttgtaaggccgagcctcttttacacagatactaccgctaactgtttcaacgagttggttagacctaatacattgaagagtcaaacggcatttatctactgtaaatactcatgccaatccatttcaagcaaatagatactgaatatctatatcgc

SEQ ID NO: 2041 - DNA, 225 bp, unidentified
  misc_feature 1..225: note = ITS sequence of Trichoderma virid
  source 1..225: mol_type = genomic DNA
tcctccgcttattgatatgcttaaattcagctggttcaaattattggaatcagagtaaatcgagactgtcgttgatcttaattagattccacgaaccgcttgcaccacaagactatcttgagtacttcatttcatgtgtaattaagactactgaaatcaataacacgctcattgaggtgttttacatgtgttcagagataaaagttcgaaagatcatagttcgct

SEQ ID NO: 2042 - DNA, 225 bp, unidentified
  misc_feature 1..225: note = ITS sequence of Debaryomyces prosopidi
  source 1..225: mol_type = genomic DNA
tcctccgcttattgatatgcttaagttcagcgggtagtcctacctgatttgaggtcaaacttgtttgttatattgtaaggccgagcctagaataccgagaaatatacctttaaactattcaacgagttggataaacctaatacattgaaagtcatatagcactatccagtaccactcatgccaatacatttcaagcaaacgcctagttcgactaagagtatcact

SEQ ID NO: 2043 - DNA, 225 bp, unidentified
  misc_feature 1..225: note = ITS sequence of Vrystaatia aloeicol
  source 1..225: mol_type = genomic DNA
tcctcgcttattgatatgcttaagttaagagagtcatcttgaaaatttcaaatcttttttaaattcttttgaccttttcagtttttacgtgattagatcaattcttattcaattaatcaattgctttaattgatttattaaatatgttattttaaaattgtgatgttgaaactttcatatttaattgaagttcaattaaatactttcatgcattcaaatatttac

SEQ ID NO: 2044 - DNA, 225 bp, unidentified
  misc_feature 1..225: note = ITS sequence of Cryptococcus albidu
  source 1..225: mol_type = genomic DNA
tcctccgcttattgatatgcttaagttcagcgggtagtcctacctgatttgaggccagatgtcaagagtattaatccgaagatcaatggattagaaagcggtctttagtcctgcaacgcggccatccgaagatgtccttagcgaaatacttattacgccaagtcaaaccatgtcgcgagacagatccagctattacttttaagacgagccgacttatcatcggca

SEQ ID NO: 2045 - DNA, 225 bp, unidentified
  misc_feature 1..225: note = Encodes 16S rRNA from Succinivibrio
  source 1..225: mol_type = genomic DNA
agagtttgatcatggctcagattgaacgctggcggcaggcctaatacatgcaagtcgaacggtaacagtagaaaagcttgcttttctagctgacgagtggcggacgggtgagtaacatttgggaaactacctgatagagggggacaacagttggaaacgactgctaataccgcataaagcctgagggtgaaagcagcaatgcgctatcagatgtgcccaaacggg

SEQ ID NO: 2046 - DNA, 225 bp, unidentified
  misc_feature 1..225: note = Encodes 16S rRNA from Prevotella
  source 1..225: mol_type = genomic DNA
agagtttgatcatggctcaggatgaacgctagctacaggcttaacacatgcaagtcgaggggcagcatgaagtttgcttgcaaactttgatggcgaccggcgcacgggtgagtaacgcgtatccaaccttccctatactagaggatagcccggcgaaagtcggattaatactctatgttcttcgtagaagacatctgaaatgaagcaaaggtttaccggtatagg

SEQ ID NO: 2047 - DNA, 225 bp, unidentified
  misc_feature 1..225: note = Encodes 16S rRNA from Prevotella
  source 1..225: mol_type = genomic DNA
agagtttgatcatggctcaggatgaacgctagctacaggcttaacacatgcaagtcgaggggcagcatgatcgaagcttgctttgattgatggcgaccggcgcacgggtgagtaacgcgtatccaaccttccctatagtagagaatagcccggcgaaagtcggattaatgctctatgttgtatttagaagacatctgaagaataccaaaggtttaccgctatagg

SEQ ID NO: 2048 - DNA, 225 bp, unidentified
  misc_feature 1..225: note = Encodes 16S rRNA from Prevotella
  source 1..225: mol_type = genomic DNA
agagtttgatcctggctcaggatgaacgctagctacaggcttaacacatgcaagtcgaggggtaacgatattgaaagcttgctttcgataggcgacgaccggcgcacgggtgagtaacgcgtatccaacctgcccataactaagggataatccgtagaaatgcggtctaataccttatgtgttccgacgaggacatctgaattggaataaagatttatcggttat

SEQ ID NO: 2049 - DNA, 225 bp, unidentified
  misc_feature 1..225: note = Encodes 16S rRNA from Ruminobacter
  source 1..225: mol_type = genomic DNA
agagtttgatcatggctcagattgaacgctggcggcaggcttaatacatgcaagtcgaacggtaacatgagaaagcttgctttcttgatgacgagtggcggacgggtgagtaatgcctgggaagctgcctgaatgagggggacaacacctggaaacgggtgctaataccgcgtataccctgagggggaaagaccggatacggtcacattcagatgcgcccaggtg

SEQ ID NO: 2050 - DNA, 225 bp, unidentified
  misc_feature 1..225: note = Encodes 16S rRNA from Syntrophococcus
  source 1..225: mol_type = genomic DNA
agagtttgatcctggctcaggatgaacgctggcggcgtgcttaacacatgcaagtcgagcgaagcacagaaacggatttcttcggattgaaggttctgtgactgagcggcggacgggtgagtaacgcgtggggaacctgccctgtaccgggggataacagacagaaatgtctgctaataccgcataagcgcacgagaaggcatcttcttgtgtgaaaaactccgg

SEQ ID NO: 2051 - DNA, 225 bp, unidentified
  misc_feature 1..225: note = Encodes 16S rRNA from Succinivibrio
  source 1..225: mol_type = genomic DNA
agagtttgatcatggctcagattgaacgctggcggcaggcctaatacatgcaagtcgaacggtaacataagaaagcttgctttcttgatgacgagtggcggacgggtgagtaatatttgggaagctacctgatagagggggacaacagttggaaacgactgctaataccgcatacagcctgagggtgaaagcagcaatgcgctatcagatgcgcccaaacgggat

SEQ ID NO: 2052 - DNA, 225 bp, unidentified
  misc_feature 1..225: note = Encodes 16S rRNA from Pseudobutyrivibrio
  source 1..225: mol_type = genomic DNA
agagtttgatcatggctcaggatgaacgctggcggcgtgcttaacacatgcaagtcgaacgaagcaattttctacgatcccttcggggtgacggattattgactgagtggcggacgggtgagtaacgcgtgggtaacctaccttgtacagggggacaacagttggaaacgactgctaataccgcataagcgcacagcatcgcatgatgcagtgtgaaaagttttt

SEQ ID NO: 2053 - DNA, 225 bp, unidentified
  misc_feature 1..225: note = Encodes 16S rRNA from Prevotella
  source 1..225: mol_type = genomic DNA
agagtttgatcatggctcaggatgaacgctagctacaggcttaacacatgcaagtcgaggggcagcataacgaaagcttgcttttgttgatggcgaccggcgcacgggtgagtaacgcgtatccaaccttccccatagtagagaatagcccggcgaaagtcggattaatgctctatgttgtatcatgaggacatctgaataataccaaaggttcaccgctatggg

SEQ ID NO: 2054 - DNA, 225 bp, unidentified
  misc_feature 1..225: note = Encodes 16S rRNA from Prevotella
  source 1..225: mol_type = genomic DNA
agagtttgatcatggctcaggatgaacgctagctacaggcttaacacatgcaagtcgaggggcagcatgatcgaagcttgctttgattgatggcgaccggcgcacgggtgagtaacgcgtatccaaccttccctatagtagagaatagcccggtgaaaatcggattaatgctctatgttattcaatgcggacatctaagttgaatcaaaggtttaccgctatagg

SEQ ID NO: 2055 - DNA, 225 bp, unidentified
  misc_feature 1..225: note = Encodes 16S rRNA from Prevotella
  source 1..225: mol_type = genomic DNA
agagtttgatcatggctcaggatgaacgctagctacaggcttaacacatgcaagtcgaggggtaacgacagcgaaagcttgcttttgctgggcgacgaccggcgcacgggtgagtaacgcgtatccaacctgcccataactaagggataatccgtagaaatgcggtctaataccttatgtgttccgacgaagacatctgaattggaataaagatttatcggttat

SEQ ID NO: 2056 - DNA, 225 bp, unidentified
  misc_feature 1..225: note = Encodes 16S rRNA from Prevotella
  source 1..225: mol_type = genomic DNA
agagtttgatcatggctcaggatgaacgctagctacaggcttaacacatgcaagtcgaggggaaacgatattgaaagcttgctttctttaggcgtcgaccggcgaatgggtgagtaacgcgtatccaacctgcccctgagtaagggatagcccatcgaaagatggattaataccttatggtttcctttgaaggcatcagattaggaataaagatttatcgctgag

SEQ ID NO: 2057 - DNA, 225 bp, unidentified
  misc_feature 1..225: note = Encodes 16S rRNA from Lachnospiracea_incertae_sedis
  source 1..225: mol_type = genomic DNA
agagtttgatcatggctcaggatgaacgctggcggcgtgcttaacacatgcaagtcgaacgaagtcttctagacagattccttcgggatgacgactagatgtacttagtggcggacgggtgagtaacgcgtgggtaacctgcctcatacagggggataacagttggaaacagctgctaataccccataagcgcacaatgtcgcatgacaaagtgtgaaaaactcc

SEQ ID NO: 2058 - DNA, 225 bp, unidentified
  misc_feature 1..225: note = Encodes 16S rRNA from Syntrophococcus
  source 1..225: mol_type = genomic DNA
agagtttgatcatggctcaggatgaacgctggcggcgtgcttaacacatgcaagtcgagcgaagcacttgaatggatttcttcggattgaagttcttgtgacttagcggcggacgggtgagtaacgcgtgggaaacctgcctcatatcgggggataacagttggaaacgactgctaataccgcataagcgcacagtaccgcatggtacggtgtgaaaaactccgg

SEQ ID NO: 2059 - DNA, 225 bp, unidentified
  misc_feature 1..225: note = Encodes 16S rRNA from Ruminobacter
  source 1..225: mol_type = genomic DNA
agagtttgatcatggctcagattgaacgctggcggcaggcttaatacatgcaagtcgaacggtaacagcaggaagcttgcttcctggctgacgagtggcggacgggtgagtaatacctggggagctgcctgaatgagggggacaacacctggaaacgggtgctaataccgcgtaagccctgagggggaaaggctgggcaaccagtcgcattcagatgcgcccagg

SEQ ID NO: 2060 - DNA, 225 bp, unidentified
  misc_feature 1..225: note = Encodes 16S rRNA from Butyrivibrio
  source 1..225: mol_type = genomic DNA
agagtttgatcatggctcaggatgaacgctggcggcgtgcctaacacatgcaagtcgaacggagaatttacgctgatgaagcttcggcagattcttgtaaattcttagtggcggacgggtgagtaacgcgtgggcaacctgcctcatactgggggataacagctggaaacgactgttaataccgcataagcgcacggtatcgcatgatacagtgtgaaaaactcc

SEQ ID NO: 2061 - DNA, 225 bp, unidentified
  misc_feature 1..225: note = Encodes 16S rRNA from Clostridium_XlVa
  source 1..225: mol_type = genomic DNA
agagtttgatcatggctcaggatgaacgctggcggcgtgcttaacacatgcaagtcgaacgaagcatttacttacgatctcttcggagtgacgagtttatgactgagtggcggacgggtgagtaacgcgtgggtaacctgccttgtacagggggataacagttagaaatgactgctaataccgcataagcgcacagtattgcatgatacagtgtgaaaaactccg

SEQ ID NO: 2062 - DNA, 225 bp, unidentified
  misc_feature 1..225: note = Encodes 16S rRNA from Prevotella
  source 1..225: mol_type = genomic DNA
agagtttgatcctggctcaggatgaacgctagctacaggcttaacacatgcaagtcgaggggcagcataatcgaagcttgctttgattgatggcgaccggcgcacgggtgagtaacgcgtatccaaccttccccttagtagggcatagcccggcgaaagtcggattaataccctatgttatccgtcgaggacatctgaaatggattaaagatttatcgctaaggg

SEQ ID NO: 2063 - DNA, 225 bp, unidentified
  misc_feature 1..225: note = Encodes 16S rRNA from Prevotella
  source 1..225: mol_type = genomic DNA
agagtttgatcatggctcaggatgaacgctagctacaggcttaacacatgcaagtcgaggggaaacgatattggaagcttgcttccgataggcgtcgaccggcgcacgggtgagtaacgcgtatccaacctgcccatcacttgggaataaccttgcgaaagtaagactaatgcccaatgacatttatagaaggcatctgaaatgaattaaagatttatcggtgat

SEQ ID NO: 2064 - DNA, 225 bp, unidentified
  misc_feature 1..225: note = Encodes 16S rRNA from Lachnospiracea_incertae_sedis
  source 1..225: mol_type = genomic DNA
agagtttgatcatggctcaggatgaacgctggcggcgtgcttaacacatgcaagtcgaacggagtacttctcccgagactgaggaagcttgcttctgaagaatcatttgaagtacttagtggcggacgggtgagtaacgcgtgggtaacctgcctcacacagggggataacagttggaaacgactgttaataccgcataagcgcacagtatcgcatgatacagtg

SEQ ID NO: 2065 - DNA, 225 bp, unidentified
  misc_feature 1..225: note = Encodes 16S rRNA from Roseburia
  source 1..225: mol_type = genomic DNA
agagtttgatcatggctcaggatgaacgctggcggcgtgcttaacacatgcaagtcgaacggacttatattgaaagtttcggccggatatataagttagtggcggacgggtgagtaacgcgtgggtaacctgccttacaccgggggataacagttggaaacgactgctaataccgcataagcccacagtaccgcatggtacagggggaaaagttgaggcgatgta

SEQ ID NO: 2066 - DNA, 225 bp, unidentified
  misc_feature 1..225: note = Encodes 16S rRNA from Lachnospiracea_incertae_sedis
  source 1..225: mol_type = genomic DNA
agagtttgatcatggctcaggatgaacgctggcggcgtgcttaacacatgcaagtcgaacgaagcaacttatcacgattccttcgggatgacgatttgttgactgagtggcggacgggtgagtaacgcgtgggtaacctgccttatacagggggatagcagctggaaacggctgataataccgcataagcgcacagcatcgcatgatgcagtgtgaaaaactccg

SEQ ID NO: 2067 - DNA, 225 bp, unidentified
  misc_feature 1..225: note = Encodes 16S rRNA from Butyrivibrio
  source 1..225: mol_type = genomic DNA
agagtttgatcctggctcaggatgaacgctggcggcgtgcctaacacatgcaagtcgaacggagtttaacgctgatgaagcttcggcagattcttgttaaacttagtggcggacgggtgagtaacgcgtgggtaacctgcctcatacagggggatagcagttggaaacgactgataacaccgcataagcgcacggtatcgcatgatacagtgtgaaaatatttat

SEQ ID NO: 2068 - DNA, 225 bp, unidentified
  misc_feature 1..225: note = Encodes 16S rRNA from Pseudobutyrivibrio
  source 1..225: mol_type = genomic DNA
agagtttgatcatggctcaggatgaacgctggcggcgtgcttaacacatgcaagtcgaacgaagcagtttattacgatcccttcggggtgacgatttactgactgagtggcggacgggtgagtaacgcgtgggtaacctgccttgtacagggggacaacagttggaaacgactgctaataccgcataagcgcacagcttcgcatgaagcagtgtgaaaagtattt

SEQ ID NO: 2069 - DNA, 225 bp, unidentified
  misc_feature 1..225: note = Encodes 16S rRNA from Turicibacter
  source 1..225: mol_type = genomic DNA
agagtttgatcatggctcaggatgaacgctggcggcgtgcctaatacatgcaagtcgaacgaggtgtagcaatacaccgagtggcgaacgggtgagtaacacgtaggtaacctgcccctaagtctgggatacccaggggaaaccttggctaataccggatagcggcggaggggacatcccttccgcacgaaagtcgcgtttgcgacgctttcggatggacctgcg

SEQ ID NO: 2070 - DNA, 225 bp, unidentified
  misc_feature 1..225: note = Encodes 16S rRNA from Lachnospiracea_incertae_sedis
  source 1..225: mol_type = genomic DNA
agagtttgatcctggctcaggatgaacgctggcggcgtgcttaacacatgcaagtcgaacggagatttaccacctgcttgcaggaggtaaatcttagtggcggacgggtgagtaacgcgtgggtaacctgcctcacacagggggataacagttggaaacgactgttaataccgcataagcgcacggtatcgcatgatacagtgtgaaaaactccggtggtgtgag

SEQ ID NO: 2071 - DNA, 225 bp, unidentified
  misc_feature 1..225: note = Encodes 16S rRNA from Pseudobutyrivibrio
  source 1..225: mol_type = genomic DNA
agagtttgatcctggctcaggatgaacgctggcggcgtgcttaacacatgcaagtcgaacgaagcaatttcttacgatcccttcggggtgacgagttattgactgagtggcggacgggtgagtaacgcgtgggtaacctaccttgtacagggggacaacagttggaaacgactgctaataccgcataagcgcacggtgttgcatgacacagtgtgaaaagttttt

SEQ ID NO: 2072 - DNA, 225 bp, unidentified
  misc_feature 1..225: note = Encodes 16S rRNA from Anaerolinea
  source 1..225: mol_type = genomic DNA
agagtttgatcatggctcaggatgaacgctggcggcgtgcctaatacatgcaagtcggacggcagtagcaatactgtagtggcgaacgggtgagtaacacgttggtgacctgccccaaagatgggaatatcacctggaaacgggtggcaaaaccgaataagctcgtgtgagttagagaagcatgagtaaaagagcgatctactttgggaggggcctgcggcccat

SEQ ID NO: 2073 - DNA, 225 bp, unidentified
  misc_feature 1..225: note = Encodes 16S rRNA from Roseburia
  source 1..225: mol_type = genomic DNA
agagtttgatcctggctcaggatgaacgctggcggcgtgcttaacacatgcaagtcgaacgaagcactttacttgatctcttcggagtgattgttctgtgactgagtggcggacgggtgagtaacgcgtgggtaacctgccttgtacaggggggataacagttggaaacgactgctaataccgcataagcgcacaggaccgcatggtccggtgtgaaaaactccg

SEQ ID NO: 2074 - DNA, 225 bp, unidentified
  misc_feature 1..225: note = Encodes 16S rRNA from Propionibacterium
  source 1..225: mol_type = genomic DNA
agagtttgatcatggctcaggacgaacgctggcggcgtgcttaacacatgcaagtcgaacggaaaggccctgcttttgtggggtgctcgagtggcgaacgggtgagtaacacgtgagtaacctgcccttgactttgggataacttcaggaaactggggctaataccggataggagctcctgctgcatggtgggggttggaaagtttcggcggttggggatggact

SEQ ID NO: 2075 - DNA, 225 bp, unidentified
  misc_feature 1..225: note = Encodes 16S rRNA from Clostridium_XIVa
  source 1..225: mol_type = genomic DNA
agagtttgatcatggctcaggatgaacgctggcggcgtgcttaacacatgcaagtcgaacgagccttgtcggacggatcccttcggggtgaagaccggcgctggcgagtggcggacgggtgagtaacgcgtggggaacctgcctcattccgggggataccagtcggaaacggctgttaataccgcataagcgcacggtgtggcatcacacagtgtgaaaaactcc

SEQ ID NO: 2076 - DNA, 225 bp, unidentified
  misc_feature 1..225: note = Encodes 16S rRNA from Olsenella
  source 1..225: mol_type = genomic DNA
agagtttgatcatggctcaggatgaacgctggcggcgcgcctaacacatgcaagtcgaacggttaaagcacctccgggtgtgcataaagtggcgaacggctgagtaacacgtgggcaacctgcccctcgcaccgggacagcctcgggaaaccgtggataataccggatactccggcacccccgcatgggggagccgggaaagcccagacggcgagggatgggccc

SEQ ID NO: 2077 - DNA, 225 bp, unidentified
  misc_feature 1..225: note = Encodes 16S rRNA from Streptococcus
  source 1..225: mol_type = genomic DNA
agagtttgatcctggctcaggacgaacgctggcggcgtgcctaatacatgcaagtggaacgcagtagtgatcaccggagcttgctccaccgattagtactgagtcgcgaacgggtgagtaacgcgtaggtaacctgccttgaagagggggataactattggaaacgatagctaataccgcataaaatagcgagttgcatgactggctattgaaaggtgcaatcgc

SEQ ID NO: 2078 - DNA, 225 bp, unidentified
  misc_feature 1..225: note = Encodes 16S rRNA from Clostridium_XlVa
  source 1..225: mol_type = genomic DNA
agagtttgatcatggctcaggatgaacgctggcggcgtgcctaacacatgcaagtcgaacggagattagacgctgacgagacttcggtcaaatcttgtttaatcttagtggcggacgggtgagtaacgcgtgggcaacctgcctcatactgggggatagcagttggaaacgactgataataccgcataagcgcacgagatcgcatgatctagtgtgaaaaactcc

SEQ ID NO: 2079 - DNA, 225 bp, unidentified
  misc_feature 1..225: note = Encodes 16S rRNA from Clostridium_XlVa
  source 1..225: mol_type = genomic DNA
agagtttgatcatggctcaggatgaacgctggcggcgtgcctaacacatgcaagtcgaacggagatttaacgctgatgaagcttcggcagaatcttgttaaatcttagtggcggacgggtgagtaacgcgtgggcaacctgcctcatactgggggatagcagttggaaacgactgataataccgcataagcgcacggagtcgcatgactctgtgtgaaaaactcc

SEQ ID NO: 2080 - DNA, 225 bp, unidentified
  misc_feature 1..225: note = Encodes 16S rRNA from Roseburia
  source 1..225: mol_type = genomic DNA
agagtttgatcctggctcaggatgaacgctggcggcgtgcttaacacatgcaagtcgaacgggaattactttttagcttgctaagttgtaattctagtggcggacgggtgagtaacgcgtgggtaacctgccttataccgggggacaacagttggaaacgactgctaataccgcataagcgcacagtctcgcatgagacggtgtgaaaaactccggtggtataag

SEQ ID NO: 2081 - DNA, 225 bp, unidentified
  misc_feature 1..225: note = Encodes 16S rRNA from Clostridium_IV
  source 1..225: mol_type = genomic DNA
agagtttgatcatggctcaggacgaacgctggcggcgtgcctaacacatgcaagtcgaacggagatatgtcgaatgaagatttcggttggaatttgatatatcttagtggcggacgggtgagtaacgcgtgagtaacctgccgatgagagtggaataacgttctgaaaagaacgctaataccgcataacgtatcgaagccgcatgacattgataccaaagatttt

SEQ ID NO: 2082 - DNA, 225 bp, unidentified
  misc_feature 1..225: note = Encodes 16S rRNA from Clostridium_XICa
  source 1..225: mol_type = genomic DNA
agagtttgatcctggctcaggatgaacgctggcggcgtgcctaacacatgcaagtcgagcggagagccgtaacggaagccttcgggtggaagatacggttacttagcggcggacgggtgagtaacgcgtggataacctggctcatacagggggataacagagagaaatttctgctaataccgcataagcgcacgtaaccgcatggttatgtgtgaaaagccgaga

SEQ ID NO: 2083 - DNA, 225 bp, unidentified
  misc_feature 1..225: note = Encodes 16S rRNA from Lachnospiracea_incertae_sedis
  source 1..225: mol_type = genomic DNA
agagtttgatcatggctcaggataaacgctggcggcgtgcttaacacatgcaagtcgaacggagtattccttcggaagatcgaagagcttgctcggagagattctttggaatacttagtggcggacgggtgagtaacgcgtgggtaacctgcctcacacagggggataacagttggaaacgactgttaataccgcataagcgcacagtaccgcatggtacagtgt

SEQ ID NO: 2084 - DNA, 225 bp, unidentified
  misc_feature 1..225: note = Encodes 16S rRNA from Erysipelotrichaceae_incertae_sedis
  source 1..225: mol_type = genomic DNA
agagtttgatcctggctcaggatgaacgctggcggcatgcctaatacatgcaagtcgaacggagaaggaaggtgcttgcatcttccggatcagtggcgaacgggtgagtaacacgtaggtaacctgcccatgtacccgggacaacggttggaaacgactgctaaaaccggataggcatatggaaggcatcttcgatatgttaaaggggccacggccctggacatg

SEQ ID NO: 2085 - DNA, 225 bp, unidentified
  misc_feature 1..225: note = Encodes 16S rRNA from Solobacterium
  source 1..225: mol_type = genomic DNA
agagtttgatcctggctcaggataaacgctggcggcgtgcctaatacatgcaagtcgatcgctggaattcaagcttgcttgaatgaaggagaggcgaacgggtgagtaatacataagcaacctgcccacgaagactgggataatctctggaaacggggactaataccggataggtaacgaaggcgcatgcctctgttattaaagatgagaagcactggtggatgg

SEQ ID NO: 2086 - DNA, 225 bp, unidentified
  misc_feature 1..225: note = Encodes 16S rRNA from Lachnospiracea_incertae_sedis
  source 1..225: mol_type = genomic DNA
agagtttgatcatggctcaggatgaacgctggcggcgtgcttaacacatgcaagtcgaacggagtatctctcccgagaccaaagaagcttgcttctgaggaatcaattgagatacttagtggcggacgggtgagtaacgcgtgggtaacctgcctcacacagggggataacagttggaaacgactgttaataccgcataagcgcacagtaccgcatggtacagtg

SEQ ID NO: 2087 - DNA, 225 bp, unidentified
  misc_feature 1..225: note = Encodes 16S rRNA from Clostridium_XlVa
  source 1..225: mol_type = genomic DNA
agagtttgatcctggctcaggatgaacgctggcggcgtgcctaacacatgcaagtcgaacggagatataacgctgcagagacttcggtcaaagcttgttgtatcttagtggcggacgggtgagtaacgcgtgggcaacctgcctcatactgggggataacagttggaaacggctgttaataccgcataagcgcacagagtcgcatgactcagtgtgaaaaactcc

SEQ ID NO: 2088 - DNA, 225 bp, unidentified
  misc_feature 1..225: note = Encodes 16S rRNA from Ralstonia
  source 1..225: mol_type = genomic DNA
agagtttgatcatggctcagattgaacgctggcggcatgccttacacatgcaagtcgaacggcagcatgatctagcttgctagattgatggcgagtggcgaacgggtgagtaatacatcggaacgtgccctgtagtgggggataactagtcgaaagattagctaataccgcatacgacctgagggtgaaagtgggggaccgcaaggcctcatgctataggagcgg

SEQ ID NO: 2089 - DNA, 225 bp, unidentified
  misc_feature 1..225: note = Encodes 16S rRNA from Clostridium_XlVa
  source 1..225: mol_type = genomic DNA
agagtttgatcctggctcaggatgaacgctggcggcgtgcctaacacatgcaagtcgaacggaagcttaacgctgacgagacttcggtcaaatcttgttaagctttagtggcggacgggtgagtaacgcgtgggcaacctgcctcatactgggggataacagttggaaacgactgttaataccgcataagcgcacagagtcgcatgactcagtgtgaaaaactcc

SEQ ID NO: 2090 - DNA, 225 bp, unidentified
  misc_feature 1..225: note = Encodes 16S rRNA from Eubacterium
  source 1..225: mol_type = genomic DNA
agagtttgatcatggctcaggatgaacgctggcggcgtgcctaacacatgcaagtcgagcgggaagctcacaaatgattcttcggatgaatgcgtgagtgaacagcggcggacgggtgagtaacgcgtgggcaacctgccccttactgaaggatagccgagggaaacttcgagtaatacttcataatgcatttttttcacatggagggaatgccaaagatttatc

SEQ ID NO: 2091 - DNA, 225 bp, unidentified
  misc_feature 1..225: note = Encodes 16S rRNA from Lachnobacterium
  source 1..225: mol_type = genomic DNA
agagtttgatcatggctcaggatgaacgctggcggcgtgcttaacacatgcaagtcgaacgaagcacctctaatcgaagattgagaaagcttgcttttgattgattcaccttgaggtgactgagtggcggacgggtgagtaacgcgtgggtaacctaccctatacagggggataacagttggaaacgactgctaataccgcataagcgcacaggaccgcatggtc

SEQ ID NO: 2092 - DNA, 225 bp, unidentified
  misc_feature 1..225: note = Encodes 16S rRNA from Acholeplasma
  source 1..225: mol_type = genomic DNA
agagtttgatcatggctcaggataaacgctggcggcatgcctaatacatgcaagtcgaacggagttaccttcgggtaacttagtggcgaacgggtgagtaacacgtaggtaatccatcccaaggacgaggatagcttctggaaacggaaggtaaaactggatagttaattaaagggcatcctttagttattaaaagagcaatctaccctgggaagagcctgcggc

SEQ ID NO: 2093 - DNA, 225 bp, unidentified
  misc_feature 1..225: note = Encodes 16S rRNA from Selenomonas
  source 1..225: mol_type = genomic DNA
agagtttgatcctggctcaggacgaacgctggcggcgtgcttaacacatgcaagtcgaacgaggtcgaatgagaagcttgctttttatgaagccgagtggcaaacgggtgagtaacgcgtagacaacctgccgtgaagatggggacaacagatcgaaaggtctgctaataccgaatgttgtagatcctccgcatgaaggattcactaaaggtgccctctgtatat

SEQ ID NO: 2094 - DNA, 225 bp, unidentified
  misc_feature 1..225: note = Encodes 16S rRNA from Prevotella
  source 1..225: mol_type = genomic DNA
agagtttgatcatggctcaggatgaacgctagctacaggcttaacacatgcaagtcgaggggcagcataacgaaagcttgcttttgttgatggcgaccggcgcacgggtgagtaacgcgtatccaaccttccctatagtagagaatagcccggcgaaagtcggattaatgctctatgttgtatttagaagacatctgaagaataccaaaggtttaccgctatagg

SEQ ID NO: 2095 - DNA, 225 bp, unidentified
  misc_feature 1..225: note = Encodes 16S rRNA from Clostridium_XlVa
  source 1..225: mol_type = genomic DNA
agagtttgatcatggctcaggatgaacgctggcggcgtgcctaacacatgcaagtcgaacggagatttaacgctgatgaggcttcggcggaatcttgttaaatcttagtggcggacgggtgagtaacgcgtgggcaacctgcctcatactgggggataacagttggaaacgactgttaataccgcataagcgcacagtgtcgcatgacacagtgtgaaaaactcc

SEQ ID NO: 2096 - DNA, 225 bp, unidentified
  misc_feature 1..225: note = Encodes 16S rRNA from Succinivibrio
  source 1..225: mol_type = genomic DNA
agagtttgatcatggctcagattgaacgctggcggcaggcctaatacatgcaagtcgaacggtaacatggaagtagcaatacttttgatgacgagtggcggacgggtgagtaatatttgggaatctacctatcagagggggatagcaactggaaacggttgataagaccgcgtacgctctgaggaggaaagtaatgggatcgcaagaccattagctgatagatga

SEQ ID NO: 2097 - DNA, 225 bp, unidentified; identical to SEQ ID NO: 2059
  misc_feature 1..225: note = Encodes 16S rRNA from Ruminobacter
  source 1..225: mol_type = genomic DNA

SEQ ID NO: 2098 - DNA, 225 bp, unidentified
  misc_feature 1..225: note = Encodes 16S rRNA from Sharpea
  source 1..225: mol_type = genomic DNA
agagtttgatcctggctcaggatgaacgctggcggcgtgcctaatacatgcaagtcggacggagcgcttcggcgctcagtggcgaacgggtgagtagcacatgggcaacctgcccttcagagggggacaacagctggaaacggctgctaagaccgcataggcgcggacgggacatcccgtccacgttaaacgtccttacggggacggctgaaggatgggcctgtg

SEQ ID NO: 2099 - DNA, 225 bp, unidentified
  misc_feature 1..225: note = Encodes 16S rRNA from Prevotella
  source 1..225: mol_type = genomic DNA
agagtttgatcctggctcaggatgaacgctagctacaggcttaacacatgcaagtcgaggggaaacggcattttagcttgctaagatggacgtcgaccggcgaatgggtgagtaacgcgtatccaaccttccgttaagtagggaatagccttgcgaaagtaagattaatgccctatgtggtgttttgaggacatctgaagatcaccaaaggtttaccgcttaacg

SEQ ID NO: 2100 - DNA, 225 bp, unidentified
  misc_feature 1..225: note = Encodes 16S rRNA from Prevotella
  source 1..225: mol_type = genomic DNA
agagtttgatcatggctcaggatgaacgctagctacaggcttaacacatgcaagtcgaggggtaacgacagcgaaagcttgcttttgctggtcgacgaccggcgaatgggtgagtaacgcgtatccaacctgccgcaaagtagggcacagccttgcgaaagtaagattaatgccctatgtgctgtgatgaggacatctgaattgcagtaaaggttcaccgctttg

SEQ ID NO: 2101 - DNA, 225 bp, unidentified; identical to SEQ ID NO: 2046
  misc_feature 1..225: note = Encodes 16S rRNA from Prevotella
  source 1..225: mol_type = genomic DNA

SEQ ID NO: 2102 - DNA, 225 bp, unidentified
  misc_feature 1..225: note = Encodes 16S rRNA from Prevotella
  source 1..225: mol_type = genomic DNA
agagtttgatcctggctcaggatgaacgctagctacaggcttaacacatgcaagtcgaggggcagcattatcgaagcttgctttgatagatggcgaccggcgcacgggtgagtaacgcgtatccaaccttccccttagtagggcatagcccgtagaaatgcggattaataccctatgttgtattatgaggacatctgaataataccaaaggttcaccgctaaggg

SEQ ID NO: 2103 - DNA, 225 bp, unidentified
  misc_feature 1..225: note = Encodes 16S rRNA from Prevotella
  source 1..225: mol_type = genomic DNA
agagtttgatcatggctcaggatgaacgctagctacaggcttaacacatgcaagtcgaggggcatcagatcgaaagcttgcttttgatgctggcgaccggcgcacgggtgagtaacgcgtatccaaccttccctatagtagagaatagcccggcgaaagtcggattaatgctctatgttgtatttagaagacatctgaagaataccaaaggtttaccgctatagg

SEQ ID NO: 2104 - DNA, 225 bp, unidentified
  misc_feature 1..225: note = ITS sequence of Orpinomyces
  source 1..225: mol_type = genomic DNA
tcctccgcttattgatatgcttaagttcagcgggtactcttatctgatttgagatcaagttattttgttaaatttccttttaattaggctcaactaaagttttaccttttaaaactgaaaagttattcctttttacgggaaaattttatccaattttattagataaaaccaaaattggcttttaaaaatcaatttaaagtgaaacaacttgtttatcgttgtaaa

SEQ ID NO: 2105 - DNA, 225 bp, unidentified
  misc_feature 1..225: note = ITS sequence of Piromyces
  source 1..225: mol_type = genomic DNA
tcctccgcttattgatatgcttaagttcagcgggtactcttatctgatttgagatcaagttatttagttaaattttccttttagtttggattttctaatcaaaaattaaaattgtttaggttattcctttttacgggaaaattttatccaattttattttaaaattagaaaaattcaaattttaaaaaaatttaaagtgaaacaacttgtatcgttgtaaaacac

SEQ ID NO: 2106 - DNA, 225 bp, unidentified
  misc_feature 1..225: note = ITS sequence of Piromyces
  source 1..225: mol_type = genomic DNA
tcctccgcttattgatatgcttaagttcagcgggtactcttatctgatttgagatcaagttatttagttaaattttcctttataattgaaaagaattctaatcaaaaattaaaattgtttaggttattccttttttacgggaaaattttatccaattttattttaaaattagaaaaattcaaattttaaaaaaaatttaaagtgaaacaacttgtatcgttgtaa

SEQ ID NO: 2107 - DNA, 225 bp, unidentified
  misc_feature 1..225: note = ITS sequence of Piromyces
  source 1..225: mol_type = genomic DNA
tcctcgcttattgatatgcttaagttcagcgggtactcttatctgatttgagatcaagttatttattaaattttcctttataatgaaaaattctaatcaaaaaactaaaattgtttaggttattccttttttacgggaaaattttatccaattttattttaaaattagaaaaattcaaattttaaaaaaatttaaagtgaaacaacttgtatcgttgtaaaacac

SEQ ID NO: 2108 - DNA, 1525 bp, unidentified
  misc_feature 1..1525: note = Encodes 16S rRNA from Ruminococcus bovis sp. nov.
  source 1..1525: mol_type = genomic DNA
aaattattagagagtttgatcctggctcaggatgaacgctggcggcgtgcctaacacatgcaagtcgaacggaacttctttgacagaattcttcggaaggaagttgattaagtttagtggcggacgggtgagtaacgcgtgagtaacctgcctttgagaggggaataacttcccgaaagggatgctaataccgcatgatgcatagaagtcgcatggcttttatgccaaagatttatcgctcaaagatggactcgcgtccgattagccagttggcggggtaacggcccaccaaagcgacgatcggtagccggactgagaggttgaacggccacattgggactgagacacggcccagactcctacgggaggcagcagtgggggatattgcgcaatgggggcaaccctgacgcagcaacgccgcgtgaaggatgaaggttttcggattgtaaacttcttttatttaggacgaacaatgacggtactaaatgaataagctccggctaactacgtgccagcagccgcggtaatacgtagggagcaagcgttatccggtttactgggtgtaaagggtgcgtaggcggcttggtaagtcagatgtgaaatgtatgggctcaacccatgaactgcatttgaaactattgagcttgagtgaagtagaggtaggcggaattcctgtgtagcggtgaaatgcgtagagatagggaggaacaccagtggcgaaggcggcctactgggctttaactgacgctgaggcacgaaagcgtgggtagcaaacaggattagataccctggtagtccacgctgtaaacgatgattactaggtgtggggggtctgaccccttccgtgccggagttaacacaataagtaatccacctggggagtacgaccgcaaggttgaaactcaaaggaattgacgggggcccgcacaagcagtggagtatgtggtttaattcgaagcaacgcgaagaaccttaccaggtcttgacatcgagtgacgaatctagagatagatttttccttcgggacacgaagacaggtggtgcatggttgtcgtcagctcgtgtcgtgagatgttgggttaagtcccgcaacgagcgcaacccttgctattagttgctacgcaagagcactctaataggactgccgttgacaaaacggaggaaggtggggacgacgtcaaatcatcatgccccttatgacctgggctacacacgtactacaatggatgttaacagagggaagcaaaatagcgatatggagcaaaccctaaaagcattcccagttcagattgcaggctgcaactcgcctgtatgaagttggaattgctagtaatcgcggatcagcatgccgcggtgaatacgttcgggccttgtacacaccgcccgtcacaccatggggagcggtaatacccgaagccagtagtttaaccttaggagagcgctgtcgaaggtaggattggcgactggggtgaagtcgtaacaaggtagccgtatcggaaggtgcggctggatcacctcctttcta

SEQ ID NO: 2109 - DNA, 297 bp, Ruminococcus bovis
  source 1..297: mol_type = genomic DNA
gcaccaaatgcaaaggtatatttgattcttgcaggaatcttgccgtcaagtctgcgttcagaactgcgtttcataaaaaatcctccttaaatataaaaaatgaaactaaccgtacaaaatgcataaaagaaattaatattattaattattaatatgctttttgcttatctgttaactaaattatatgttttgtttcataaaaagtcaatatatttagtaaacaaaattaaagtttatctatttttcactaaacaacccttgcgtatttagtaaatattcactataataagggtagag

SEQ ID NO: 2110 - DNA, 297 bp, Ruminococcus bovis
  source 1..297: mol_type = genomic DNA
gcaccaaatgcaaaggtatatttgattcttgcaggaatcttgccgtcaagtctgcgttcagaactgcgtttcataaaaaatcctccttaaatataaaaaatgaaactaaccgtacaaaatgcataaaagaaattaatattattaattattaatatgctttttgcttatctgttaactaaattatatgttttgtttcataaaaagtcaatatatttagtaaacaaaattaaagtttatctatttttcactaaacaacccttgcgtatttagtaaatattcactataataagggtagat

SEQ ID NO: 2111 - DNA, 307 bp, Ruminococcus bovis
  source 1..307: mol_type = genomic DNA
tttcactcaataactgcattggacttttgtattcaagtgttctcattgtcttgttattactccattctaaatgtccttttaactttgtatttaattcttcaatatttttgaatgtttcccaatcatagaaatatctttggtcgtttctatgacttctttctaccttcccattgtgccaaggtgttcgtggtggtattaatttatgatttatacctaatttgttcaattctatttcaaaaggacttttcacttcactgctttgatatttatatgtgaactctcttccgttatctgtttgaaccgtctt

SEQ ID NO: 2112 - DNA, 307 bp, Ruminococcus bovis
  source 1..307: mol_type = genomic DNA
tttcactcaataactgcattggacttttgtattcaagtgttctcattgtcttgttattactccattctaaatgtccttttaactttgtatttaattcttcaatatttttgaatgtttcccaatcatagaaatatctttggtcgtttctatgacttctttctaccttcccattgtgccaaggtgttcgtggtggtattaatttatgatttatacctaatttgttcaattctatttcaaaaggacttttcacttcactgctttgatatttatatgtgaactctcttccgttatctgtttgaatagtctg

SEQ ID NO: 2113 - DNA, 301 bp, Ruminococcus bovis
  source 1..301: mol_type = genomic DNA
tattctctaaaagaaaataaatttgaacaatcatacaaattacaaaaatgaaattttctgttctggaataaaaagaccataaaagcaccgaaaaagcccatcagaatgggcttttctttatgttataaccgactaaaaataagtaaaaataaaatcaaaaaattttaaaaaaaactctttacaatactaaaaataggtgaaattatatacttatttttattgtattgaactttgttatattgtataatagttttagaaaattaatttaaggggtatattttatgcttgataatttttataa

SEQ ID NO: 2114 - DNA, 300 bp, Ruminococcus bovis
  source 1..300: mol_type = genomic DNA
tattctctaaaagaaaataaatttgaacaatcatacaaattacaaaaatgaaattttctgttctggaataaaaagaccataaaagcaccgaaaaagcccatcagaatgggcttttctttatgttataaccgactaaaaataagtaaaaataaaatcaaaaaattttaaaaaaaactctttacaatactaaaaataggtgaaattatatacttatttttattgtattgaactttgttatattgtataatagttttagaaaattaatttaaggggtatattttatgcttgataatttttata

SEQ ID NO: 2115 - DNA, 118 bp, Ruminococcus bovis
  source 1..118: mol_type = genomic DNA
cgccccaagaatgatagtgtttgcgttttttactaaaattccgttttaattctctgctgattgtagaaggacttcgttcaagtatttttgcaatttttcttatgctatatcctttcca

SEQ ID NO: 2116 - DNA, 118 bp, Ruminococcus bovis
  source 1..118: mol_type = genomic DNA
cgccccaagaatgatagtgtttgcgttttttactaaaattccgttttaattctctgctgattgtagaaggacttcgttcaagtatttttgcaatttttcttatgctatatcctttttc

SEQ ID NO: 2117 - DNA, 106 bp, Ruminococcus bovis
  source 1..106: mol_type = genomic DNA
ttactaaatattttacatgtgcgccccaagaatgatagtgtttgcgttttttactaaaattccgttttaattctctgctgattgtagaaggacttcgttcaagtat

SEQ ID NO: 2118 - DNA, 107 bp, Ruminococcus bovis
  source 1..107: mol_type = genomic DNA
ttactaaatattttacatgtgcgccccaagaatgatagtgtttgcgttttttactaaaattccgttttaattctctgctgattgtagaaggacttcgttcaagtatt

SEQ ID NO: 2119 - DNA, 298 bp, Ruminococcus bovis
  source 1..298: mol_type = genomic DNA
taatcagattgaacgcgatatcaattccgaaaatgccccgaatgttgttaaggattacacaagcaacgcgaaaatcaaaatctctccgctgggtatctctcttacgggcgagtgtgatgagaaatatgacaagcaaatgccggattggggcagtcgctgctttgagattcccgacacagacggcaaatcaaaggtaacaatggatgacggaacagtttattatatccttgtaaacgagggcggcgagcgcaggacagacgacagcggcgttttccatgagaatgcacagcttcaatac

SEQ ID NO: 2120 - DNA, 298 bp, Ruminococcus bovis
  source 1..298: mol_type = genomic DNA
taatcagattgaacgcgatatcaattccgaaaatgccccgaatgttgttaaggattacacaagcaacgcgaaaatcaaaatctctccgctgggtatctctcttacgggcgagtgtgatgagaaatatgacaagcaaatgccggattggggcagtcgctgctttgagattcccgacacagacggcaaatcaaaggtaacaatggatgacggaacagtttattatatccttgtaaacgagggcggcgagcgcaggacagacgacagcggcgttttccatgagaatgcacagcttcaatat

SEQ ID NO: 2121 - DNA, 298 bp, Ruminococcus bovis
  source 1..298: mol_type = genomic DNA
aaaaggtactgcaccatttactttgttagattattttccaaaggactttctgctttttgttgatgaaagccatgttactttacctcaggttagaggtatgtatggtggtaacctttcaagaaagaaaagtcttattgattatggctttagattaccgtcagcatatgacaaccgtcctttaaattttgatgaattttatgatagaataaatcaagtctgctttgtttcagcaacaccgggcgacttagaacttgaaaagagcagtgttgttgcagaacaaattatccgtccaacaggc

SEQ ID NO: 2122 - DNA, 298 bp, Ruminococcus bovis
  source 1..298: mol_type = genomic DNA
aaaaggtactgcaccatttactttgttagattattttccaaaggactttctgctttttgttgatgaaagccatgttactttacctcaggttagaggtatgtatggtggtaacctttcaagaaagaaaagtcttattgattatggctttagattaccgtcagcatatgacaaccgtcctttaaattttgatgaattttatgatagaataaatcaagtctgctttgtttcagcaacaccgggcgacttagaacttgaaaagagcagtgttgttgcagaacaaattatccgtccaacagga

SEQ ID NO: 2123 - DNA, 202 bp, Ruminococcus bovis
  source 1..202: mol_type = genomic DNA
tgccacaaaaaatataaatatataggggcaaaattacaactaaacacacccaaataatcaagacttgctctacttgtaaaatcagttggaaataaaaagtcaaaggactttttaaattctaaatcggtatttaccccaaaatatatacccagaataaaacctactaaaattgaaataagaaacatagtaaagataccgtatc

SEQ ID NO: 2124 - DNA, 204 bp, Ruminococcus bovis
  source 1..204: mol_type = genomic DNA
tgccacaaaaaatataaatatataggggcaaaattacaactaaacacacacccaaataatcaagacttgctctacttgtaaaatcagttggaaataaaaagtcaaaggactttttaaattctaaatcggtatttaccccaaaatatatacccagaataaaacctactaaaattgaaataagaaacatagtaaagataccgtatc

SEQ ID NO: 2125 - DNA, 225 bp, unidentified
  misc_feature 1..225: note = bacterial strain Ascusb_126 encodes 16S rRNA
  source 1..225: mol_type = genomic DNA
agagtttgatcatggctcaggatgaacgctggcggcgtgcctaacacatgcaagtcgaacggagttactagagcttgctttggtaacttagtggcggacgggtgagtaatgtatgagcaacctgcctttcagagggggacaacagttggaaacgactgctaataccgcataatgtacgaggggggcatcccttttgtaccaaaggagcaatccgctgaaagatgg

SEQ ID NO: 2126 - DNA, 225 bp, unidentified
  misc_feature 1..225: note = bacterial strain Ascusb_51 encodes 16S rRNA
  source 1..225: mol_type = genomic DNA
agagtttgatcctggctcaggatgaacgctagctacaggcttaacacatgcaagtcgaggggaaacggcagtctagcttgctagagtggacgtcgaccggcgaatgggtgagtaacgcgtatccaaccttccgcgaagtacggaatagccttgcgaaagtaagattaatgccgtatgtggtgtttggaagacatctgaagaacactaaagatttatcgcttcgcg

SEQ ID NO: 2127 - DNA, 225 bp, unidentified
  misc_feature 1..225: note = bacterial strain Ascusb_1366 encodes 16S rRNA
  source 1..225: mol_type = genomic DNA
agagtttgatcatggctcaggatgaatgctggcggcgtgcctaatacatgcaagtcgagcggtaacagggagttccaccgtttccttgacacacctagcgctttatcgtaggttgttgacttcgagggaaccgtggaattctgctgacgagcggcggacggctgagtaacgcgtgggaacggaccccaaactgagggataacgcaccgaaaggtgtgctaatacc

SEQ ID NO: 2128 - DNA, 225 bp, unidentified
  misc_feature 1..225: note = bacterial strain Ascusb_64 encodes 16S rRNA
  source 1..225: mol_type = genomic DNA
agagtttgatcatggctcaggacgaacgctggcggcgtgcctaacacatgcaagtcgaacggagttgaggagcttgctcctcaacttagtggcggacgggtgagtaacgcgtgagtaacctgcctctgagaggggaataacgttctgaaaagaacgctaataccgcataacacatatttgccgcatgacagatatgtcaaagattttatcgctcagagatggact

SEQ ID NO: 2129 - DNA, 225 bp, unidentified
  misc_feature 1..225: note = bacterial strain Ascusb_299 encodes 16S rRNA
  source 1..225: mol_type = genomic DNA
agagtttgatcatggctcaggatgaatgctggcggcgtgcctaatacatgcaagtcgagcggcagcgagggtctcatcctattctggaagctttcgagaatagaatgagatctgtcggcgagcggcggacggctgagtaacgcatgggaacgcaccccaaactgagggataactagtcgaaagattagctaataccgcatgtgatcttcggattaaagctttcgg

SEQ ID NO: 2130 - DNA, 225 bp, unidentified
  misc_feature 1..225: note = bacterial strain Ascusb_341 encodes 16S rRNA
  source 1..225: mol_type = genomic DNA
agagtttgatcatggctcaggatgaatgctggcggcatgcctaatacatgcaagtcgagcggcagcgagggtctcatcctgttcttgaagttttcgagaatagaatgagatctgtcggcgagcggcggacggctgagtaacgcgtgggaacggaccccaaactgagggataactagtcgaaagattagctaataccgcatgtgatcttcggattaaagctttcga

SEQ ID NO: 2131 - DNA, 225 bp, unidentified
  misc_feature 1..225: note = bacterial strain Ascusb_295 encodes 16S rRNA
  source 1..225: mol_type = genomic DNA
agagtttgatcatggctcaggatgaacgctagcgaaatgcctaacacatgcaagtcgaacggaccttgcgtcgtagcaatacgtagtaaggttagtggcaaacgagcgagtaacgcgtgcttaacctgccccgaagttgggtataactacagagatgtagctaattcccaatatgctcacgatggtgaaatcccaatgggaggaaagatttatcgcttcgggagg

SEQ ID NO: 2132 - DNA, 225 bp, unidentified
  misc_feature 1..225: note = bacterial strain Ascusb_288 encodes 16S rRNA
  source 1..225: mol_type = genomic DNA
agagtttgatcatggctcaggatgaacgctagcggcaggcttaacacatgcaagtcgaggggcatcgcgggtagcaatacctggcggcgaccggcgaaagggtgagtaacgcgtgagcaacgtgcccgtatgtgggggatagtcgatggaaacgtcgcgtaataccccgtaacacatttggccgcatggccatatgttgaaagatttattgcatacggatcggct

SEQ ID NO: 2133 - DNA, 225 bp, unidentified
  misc_feature 1..225: note = bacterial strain Ascusb_127 encodes 16S rRNA
  source 1..225: mol_type = genomic DNA
agagtttgatcatggctcaggatgaatgctggcggcatgcctaatacatgcaagtcgagcggtaacaggactagcttgctagttgctgacgagcggcggacggctgagtaacgcatgggaacgcaccccaaactgagggataactagtcgaaagattagctaataccgcatgtgatcttcggattaaagccttcgggcggtttgggagcggcctgtgtacgatta

SEQ ID NO: 2134 - DNA, 225 bp, unidentified
  misc_feature 1..225: note = bacterial strain Ascusb_1139 encodes 16S rRNA
  source 1..225: mol_type = genomic DNA
agagtttgatcatggctcaggatgaatgctggcggcgtgcctaatacatgcaagtcgagcggtaacagggtttcaccgtgttcttgacactccgggctttaagcgggaggttagatttcgaggacaccgtgaagctgctgacgagcggcggacggctgagtaacgcgtgggaacataccccaaactgagggataacgcaccgaaaggtgtgctaataccgcatat

SEQ ID NO: 2135 - DNA, 225 bp, unidentified
  misc_feature 1..225: note = bacterial strain Ascusb_328 encodes 16S rRNA
  source 1..225: mol_type = genomic DNA
agagtttgatcatggctcaggatgaatgctggcggcatgcctaatacatgcaagtcgagcggtaacaggactagcttgctagttgctgacgagcggcggacggctgagtaacgcgtgggaacggaccccaaactgagggataacgcaccgaaaggtgtgctaataccgcatgtgatcttcggattaaagctttcgagcggtttgggactggcctgcgtacgatta

SEQ ID NO: 2136 - DNA, 225 bp, unidentified
  misc_feature 1..225: note = bacterial strain Ascusb_13271 encodes 16S rRNA
  source 1..225: mol_type = genomic DNA
agagtttgatcctggctcaggacgaacgctggcggcgtgcctaacacatgcaagtcgaacgaagcactggaattgatttcttcggaatgatttttctttgactgagtggcggacgggtgagtaacacgtgagcaacctgcctttcagagcgggatagcagttggaaacgactgataataccgcatgacatgtctcttccgcatgagagagacatcaaatgatttt

SEQ ID NO: 2137 - DNA, 225 bp, unidentified; identical to SEQ ID NO: 2129
  misc_feature 1..225: note = bacterial strain Ascusb_299 encodes 16S rRNA
  source 1..225: mol_type = genomic DNA

SEQ ID NO: 2138 - DNA, 225 bp, unidentified
  misc_feature 1..225: note = bacterial strain Ascusb_10845 encodes 16S rRNA
  source 1..225: mol_type = genomic DNA
agagtttgatcctggctcaggatgaacgctggcggcgtgcctaacacatgcaagtcgaacgaagctcgatcctcggagatttcggtcaaagaggaaagatgacttagtggcggacgggtgagtaatgcgtgagcaacctgccttggagtgggggacaacagttggaaacgactgctaataccgcataatgtattcggggggcatcctctggataccaaagattta

SEQ ID NO: 2139 - DNA, 225 bp, unidentified
  misc_feature 1..225: note = bacterial strain Ascusb_1785 encodes 16S rRNA
  source 1..225: mol_type = genomic DNA
agagtttgatcatggctcaggatgaacgctagcggcaggcttaacacatgcaagtcgaggggcagcgtggagtagcaatactctgacggcgaccggcgaaagggtgagtaacgcgtgagcaacatgcccggtactgggggatagtcgatggaaacgtcgcgtaataccccgtaacaacagaggccgcatgacctttgtttaagagattcattgataccggattgg

SEQ ID NO: 2140 - DNA, 225 bp, unidentified
  misc_feature 1..225: note = bacterial strain Ascusb_464 encodes 16S rRNA
  source 1..225: mol_type = genomic DNA
agagtttgatcatggctcaggatgaacgctggcggcgtgcctaacacatgcaagtcgaacgaagcacttccggtttgagattcgtcaagaactggatttgacttagtggcggacgggtgagtaatgtatgagcaacctgcctttcagagggggacaacagttggaaacgactgctaataccgcataatgttttgagagggcatccttttgaaaccaaaggagcaa

SEQ ID NO: 2141 - DNA, 225 bp, unidentified
  misc_feature 1..225: note = bacterial strain Ascusb_651 encodes 16S rRNA
  source 1..225: mol_type = genomic DNA
agagtttgatcatggctcaggacgaacgctggcggcacgcttaacacatgcaagtcgaacggagttggaggagcttgctctttcaacttagtggcggacgggtgagtaacacgtgagcaacctaccttcaagcggggaataatggagggaaacttccactaataccccataagatagtatttccgcatggagaagctatcaaagatttattgtttgaagatgggc

SEQ ID NO: 2142 - DNA, 225 bp, unidentified
  misc_feature 1..225: note = bacterial strain Ascusb_17652 encodes 16S rRNA
  source 1..225: mol_type = genomic DNA
agagtttgatcatggctcaggacgaacgctggcggcgtgcttaacacatgcaagtcgaacgaagcactgaaattgatttcttcggaatgatttttctttgactgagtggcggacgggtgagtaacacgtgagcaacctgcctttcagagcgggatagcagttggaaacgactgataataccgcatgacatgttttctccgcatgaggaaaacatcaaatgatttt

SEQ ID NO: 2143 - DNA, 225 bp, unidentified
  misc_feature 1..225: note = bacterial strain Ascusb_18 encodes 16S rRNA
  source 1..225: mol_type = genomic DNA
agagtttgatcctggctcaggataaacgctggcggcgtgcctaatacatgcaagtcgaacgagggaaggcaagcttgcttgccggaacgagtggcgaacgggtgagtaatacataagcaacctgcctgtaaggaccgggataatgcctggaaacgggtactaaaaccggataggcatagatggggcatcccatttatgttaaaggtgagagacacaaacagatgg

SEQ ID NO: 2144 - DNA, 225 bp, unidentified
  misc_feature 1..225: note = bacterial strain Ascusb_5387 encodes 16S rRNA
  source 1..225: mol_type = genomic DNA
agagtttgatcctggctcaggacgaacgctggcggcgtgcctaacacatgcaagtcgaacggagttattttgattgatcccttcggggtgattgatttttaacttagtggcggacgggtgagtaacgcgtgagtaacctgcctttgagagggggataacgttctgaaaagaacgctaataccgcatgacatatcgaagccgcatggctttgatatcaaagattta

SEQ ID NO: 2145 - DNA, 225 bp, unidentified
  misc_feature 1..225: note = bacterial strain Ascusb_1702 encodes 16S rRNA
  source 1..225: mol_type = genomic DNA
agagtttgatcatggctcaggatgaacgctagcggcaggcttaacacatgcaagtcgaggggcagcgggtgtagcaatacatgccggcgaccggcgaaagggtgagtaacgcgtgagcaacgtgcccgtatgtgggggatagtcgatggaaacgtcgcgtaataccccgtaacacagatcctcgcatggggatttgttgaaagatttattgcatacggatcggct

SEQ ID NO: 2146 - DNA, 225 bp, unidentified
  misc_feature 1..225: note = bacterial strain Ascusb_2137 encodes 16S rRNA
  source 1..225: mol_type = genomic DNA
agagtttgatcatggctcaggatgaacgctagcggcaggcttaacacatgcaagtcgaggggcagcgcgaggtagcaatactttggcggcgaccggcgaaagggtgagtaacgcgtgagcaacatgcccgatagtggaggatagtcgatggaaacgtcgtgtaatactccgtaacaacagaggccgcatgacctttgtttaatagatttatcgctatcggattgg

SEQ ID NO: 2147 - DNA, 225 bp, unidentified
  misc_feature 1..225: note = bacterial strain Ascusb_479 encodes 16S rRNA
  source 1..225: mol_type = genomic DNA
agagtttgatcatggctcaggatgaacgctggcggcgtgcttaacacatgcaagtcgaacggggttacgatgtgtgaggaaagaagcttgctttggactaaacttttcgtaacctagtggcggacgggtgagtaacgcgtgggtaacctgccgtatgccgggggacaacagttggaaacgactgctaataccgcataagcgcacagacaggcatctgtcagtgtg

SEQ ID NO: 2148 - DNA, 225 bp, unidentified
  misc_feature 1..225: note = bacterial strain Ascusb_325 encodes 16S rRNA
  source 1..225: mol_type = genomic DNA
agagtttgatcatggctcaggatgaatgctggcggcatgcctaatacatgcaagtcgagcggtaacatgaatagcttgctatttgatgacgagcggcggacggctgagtaacgcgtgggaacataccccagactgagggataactactcgaaagagtagctaataccgcatacgatctacggattaaagctttcgggcggtttgggaatggcctgcgtacgatta

SEQ ID NO: 2149 - DNA, 225 bp, unidentified
  misc_feature 1..225: note = bacterial strain Ascusb_5213 encodes 16S rRNA
  source 1..225: mol_type = genomic DNA
agagtttgatcctggctcaggatgaacgctggcggcatgcctaagacatgcaagtcgaacgaagtagcctaatgaagaccgagtgcttgcacaaagtcggatttagatttctacttagtggcagacgggtgagtaacacgtgggtaacctacctcagagactgggataacagttagaaatgattgctaataccggatgattcatagttagataactaattatgct

SEQ ID NO: 2150 - DNA, 225 bp, unidentified
  misc_feature 1..225: note = bacterial strain Ascusb_372 encodes 16S rRNA
  source 1..225: mol_type = genomic DNA
agagtttgatcatggctcagaacgaacgctggcggcgcgtcttaagcatgcaagtcgagcggtaagttgtagcttgctacaacctagagcggcggactggtgagtaacgcgtgggtgacgtacccttttgacggggatagcctgtggaaacacagggtaataccggataagctggcttgtgtcagaggcaagacaggaaaggttcttttgaaccgcgaaaggagc

SEQ ID NO: 2151 - DNA, 225 bp, unidentified
  misc_feature 1..225: note = bacterial strain Ascusb_1104 encodes 16S rRNA
  source 1..225: mol_type = genomic DNA
agagtttgatcatggctcagaacgaacgctggcggcgcgtcttaagcatgcaagtcgaacggcaagaagagagcttgctctcttcctagagtggcggactggtgagtaacacgtgggtgacgtaccctttggacggggatagccgatagaaatatcgggtaataccggataaggacacacaggttggagctgtgtgtggaaagtagctacggctacgccgaagga

SEQ ID NO: 2152 - DNA, 225 bp, unidentified
  misc_feature 1..225: note = bacterial strain Ascusb_2837 encodes 16S rRNA
  source 1..225: mol_type = genomic DNA
agagtttgatcatggctcaggatgaacgctagcggcaggcttaacacatgcaagtcgaggggcagcggggtgtagcaatacaccgccggcgaccggcgcacgggtgcgtaacgcgtatgcaacctgcccgtaacagggggataacggggagaaattcccactaataccccgtatagcggaggggccgcatggttcttccgcgaaagcttcggcggttacggatgg

SEQ ID NO: 2153 - DNA, 225 bp, unidentified
  misc_feature 1..225: note = bacterial strain Ascusb_466 encodes 16S rRNA
  source 1..225: mol_type = genomic DNA
agagtttgatcatggctcaggatgaatgctggcggcatgcctaatacatgcaagtcgagcggcaacgagggtttcatcctattctggaagttttcgagaatagaatgaaacctgtcggcgagcggcggacggctgagtaacgcgtgggaacgtaccccaaactgagggataactagtcgaaagattagctaataccgcatgtgatcttcggattaaagctttcgg

SEQ ID NO: 2154 - DNA, 225 bp, unidentified
  misc_feature 1..225: note = bacterial strain Ascusb_3733 encodes 16S rRNA
  source 1..225: mol_type = genomic DNA
agagtttgatcctggctcaggataaacgctggcggcgcacataagacatgcaagtcgaacggaagtcgttatactgattttgataagaacggagaacttgttcaaagggacttgatgaagatttataacaatggctttagtggcggactggtgagtaacgcgtgagcaacctgcctatcagaggggaacaacagttagaaatgactgctaataccgcatatgcct

SEQ ID NO: 2155 - DNA, 225 bp, unidentified
  misc_feature 1..225: note = bacterial strain Ascusb_191 encodes 16S rRNA
  source 1..225: mol_type = genomic DNA
agagtttgatcctggctcaggacgaacgctggcggcgtgcctaacacatgcaagtcgaacgaagctgctgagactgatttcttcggattgacgattcagcagacttagtggcggacgggtgagtaacacgtgagcaacctgcctctcagagagggataacagttggaaacgattgataatacctcatgatatgtttttgccgcatgacgaaaacatcaaagattt

SEQ ID NO: 2156 - DNA, 225 bp, unidentified
  misc_feature 1..225: note = bacterial strain Ascusb_8129 encodes 16S rRNA
  source 1..225: mol_type = genomic DNA
agagtttgatcatggctcaggatgaacgctggcggcatgcctaagacatgcaagtcgaacgaggtgccccgatgaagatgaagtgcttgcacagatttggattcggatcagcacctagtggcggacgggtgagtaacacgtgggtgacctacctttgagactgggatacctattggaaacgatagttaataccggataacacattaattcgttttaatgttaaaa

SEQ ID NO: 2157 - DNA, 225 bp, unidentified
  misc_feature 1..225: note = bacterial strain Ascusb_20150 encodes 16S rRNA
  source 1..225: mol_type = genomic DNA
agagtttgatcctggctcaggatgaacgctggcggcatgcctaagacatgcaagtcgaacgagaaggcccactgacatttattgaaactctgcgagcttgctcaaagagcggatttaaattgacgtggattttccttctagtggcaaacgggtgagtaacacgtgggttacctgcctcaaagatcgggatacctattggaaacgatagttaataccgaatgtgat

SEQ ID NO: 2158 - DNA, 225 bp, unidentified
  misc_feature 1..225: note = bacterial strain Ascusb_346 encodes 16S rRNA
  source 1..225: mol_type = genomic DNA
agagtttgatcatggctcaggatgaatgctggcggcatgcctaatacatgcaagtcgagcggcagcgaggatctcatcctattctggattcattcgagaatagaatgagatctgtcggcgagcggcggacggctgagtaacgcatgggaacgcaccccaaactgagggataactagtcgaaagattagctaataccgcatgtgatcttcggattaaagctttcgg

SEQ ID NO: 2159 - DNA, 225 bp, unidentified
  misc_feature 1..225: note = bacterial strain Ascusb_3204 encodes 16S rRNA
  source 1..225: mol_type = genomic DNA
agagtttgatcctggctcaggatgaacgctggcggcatgcctaagacatgcaagtcgaacgagacgaccttaagaagactgagtgcttgcacgaagttggaagaagatcatcgtctagtggcagacgggtgagtaacacgtgggtaacctaccttcaagttggggataacagttggaaacgattgctaataccgaataagatattcgtattgaaaggagccttta

SEQ ID NO: 2160 - DNA, 225 bp, unidentified
  misc_feature 1..225: note = bacterial strain Ascusb_20912 encodes 16S rRNA
  source 1..225: mol_type = genomic DNA
agagtttgatcctggctcaggacgaacgctggcggcgtgcctaacacatgcaagtcgaacggaactattttgactgattccttcgggatgaagaatttttagtttagtggcggacgggtgagtaacgcgtgagtaacctgcctctgagaggggaataacgttctgaaaagaacgctaataccgcataacacatatttgccgcatgacagatatgtcaaagatttt

SEQ ID NO: 2161 - DNA, 225 bp, unidentified
  misc_feature 1..225: note = bacterial strain Ascusb_248 encodes 16S rRNA
  source 1..225: mol_type = genomic DNA
agagtttgatcatggctcaggacgaacgctggcggcgtgcctaacacatgcaagtcgaacggaactattttgacagatttcttcggaatgatggatttttagtttagtggcggacgggtgagtaacgcgtgagtaacctgcctctaagaggggaataacgttctgaaaagatcgctaataccgcataacatattgaagtcgcatgactttgatatcaaagattta

SEQ ID NO: 2162 - DNA, 225 bp, unidentified
  misc_feature 1..225: note = bacterial strain Ascusb_1794 encodes 16S rRNA
  source 1..225: mol_type = genomic DNA
agagtttgatcatggctcaggatgaacgctagcggcaggcttaacacatgcaagtcgaggggcagcgcgggtagcaatacctggcggcgaccggcgaaagggtgcgtaacgcgtgagcaacattcccgtatttgggggataagcagtggaaacgctgtctaataccccataacaacagagtccgcatgaactcagtttaaaagattcgtcgaatacggattggct

SEQ ID NO: 2163 - DNA, 225 bp, unidentified
  misc_feature 1..225: note = bacterial strain Ascusb_1929 encodes 16S rRNA
  source 1..225: mol_type = genomic DNA
agagtttgatcatggctcaggataaacgctggcggcgcacataagacatgcaagtcgaacggaagtcgttatactgattttgataagaacggagaacttgttcaaagggacttgatgaagatttataacaatggctttagtggcggactggtgagtaatacgtaagcaacctgcctatcagaggggaacaacagttagaaatgactgctaataccgcatatgcca

SEQ ID NO: 2164 - DNA, 225 bp, unidentified
  misc_feature 1..225: note = bacterial strain Ascusb_1406 encodes 16S rRNA
  source 1..225: mol_type = genomic DNA
agagtttgatcatggctcaggacgaacgctggcggcgtgcctaacacatgcaagtcgaacggagttacttgtttagatcccttcggggtgacgaacttttaacttagtggcggacgggtgagtaacgcgtgagtaacctgcctctgagaggggaataacgttctgaaaagatcgctaataccgcataacatatcgaagtcgcatggctttgatatcaaagatttt

SEQ ID NO: 2165 - DNA, 225 bp, unidentified
  misc_feature 1..225: note = bacterial strain Ascusb_726 encodes 16S rRNA
  source 1..225: mol_type = genomic DNA
agagtttgatcatggctcaggatgaacgctggcggcgtgcttaacacattcaagtcgaacgatgaagttccttcgggaacggattagtggcggacgggtgagtaacgcgtgagcaacctgccttgcagagggggataacacagggaaacttgtgctaataccgcatgatgcatactgatcgcatgttcggtatgccaaaggagcaatccgctgtaagatgggctc

SEQ ID NO: 2166 - DNA, 225 bp, unidentified
  misc_feature 1..225: note = bacterial strain Ascusb_685 encodes 16S rRNA
  source 1..225: mol_type = genomic DNA
agagtttgatcatggctcaggacgaacgctggcggcgtgcctaacacatgcaagtcgagcggagacatgcgacggaactgaagttttcggatggaagtgaagatgtatgttttagcggcggacgggtgagtaacgcgtgaacaatctgtccttcacagggggataacacagcgaaagttgtactaataccgcatgagaccacagtaccgcatggtacaggggtca

SEQ ID NO: 2167 - DNA, 225 bp, unidentified
  misc_feature 1..225: note = bacterial strain Ascusb_265 encodes 16S rRNA
  source 1..225: mol_type = genomic DNA
agagtttgatcatggctcaggattaacgctggcggcgtgcctaatacatgcaagtcgaatggtagcaataccatggcgaacgggtgagtaacacgtaggtaacctgtctttaagacgaggataaccgttggaaacgacggataatactcgataggtgattttagggcatcctaggatcattaaagatttatcacttagagaggggcctgcggcgcattagctaga

SEQ ID NO: 2168 - DNA, 225 bp, unidentified
  misc_feature 1..225: note = bacterial strain Ascusb_1790 encodes 16S rRNA
  source 1..225: mol_type = genomic DNA
agagtttgatcatggctcaggatgaacgctagcggcaggcctaacacatgcaagtcgaggggcagcgcggggtagcaataccctggcggcgaccggcgcacgggtgcgtaacgcgtatgcaacctgcccgcaacagggggataacggggtgaaaaccccactaataccccgtatggtcatgatttcgcatgggattgtgacgaaagccttggtggttgcggatgg

SEQ ID NO: 2169 - DNA, 225 bp, unidentified
  misc_feature 1..225: note = bacterial strain Ascusb_1253 encodes 16S rRNA
  source 1..225: mol_type = genomic DNA
agagtttgatcatggctcaggatgaacgctagcggcaggcttaacacatgcaagtcgaggggtaacagggagtagcaatactctgctgacgaccggcgcacgggtgcgtaacgcgtatgcaacctacctgtaacaggggtataacggagtgaaaattccactaatcccccatattgttagagattcgcatgtttctctaacgaaagcttcggtggttacggatgg

SEQ ID NO: 2170 - DNA, 225 bp, unidentified
  misc_feature 1..225: note = bacterial strain Ascusb_1241 encodes 16S rRNA
  source 1..225: mol_type = genomic DNA
agagtttgatcatggctcaggatgaacgctagcggcaggcttaacacatgcaagtcgaggggcagcgcgttgtagcaatacgatggcggcgaccggcggaagggtgcgtaacacgtgagcaacttgcccgcatctggaggaaaagcgatggaaacgtcgtctaatactccataacaacagggaccgcatgatccttgtttgaaagaatttcggatgcggatgggc

SEQ ID NO: 2171 - DNA, 225 bp, unidentified
  misc_feature 1..225: note = bacterial strain Ascusb_2092 encodes 16S rRNA
  source 1..225: mol_type = genomic DNA
agagtttgatcatggctcaggatgaacgctggcggcgtgcctaacacatgcaagtcgaacgaagcacttttcccgacaaagaggcgtgcttgcacaaatcggagtcatttaaagtgacttagtggcggacgggtgagtaacgcgtgggtaacctgcctcacacagggggataacagttagaaatgactgctaataccgcataagcgcacggtatcgcatggtaca

SEQ ID NO: 2172 - DNA, 225 bp, unidentified
  misc_feature 1..225: note = bacterial strain Ascusb_18705 encodes 16S rRNA
  source 1..225: mol_type = genomic DNA
agagtttgatcctggctcaggatgaacgctggcggcgtgcctaacacatgcaagtcgaacggaacttctttgatagaattcttcggaaggaaattgattaagtttagtggcggacgggtgagtaacgcgtgagtaacctgcctttgagaggggaataacttcccgaaagggatgctaataccgcataacgcatagaagtcgcatggcttatatgccaaagattta

SEQ ID NO: 2173 - DNA, 225 bp, unidentified
  misc_feature 1..225: note = bacterial strain Ascusb_382 encodes 16S rRNA
  source 1..225: mol_type = genomic DNA
agagtttgatcatggctcaggatgaacgctagcggcaggcttaacacatgcaagtcgaggggcagcgcgaggtagcaataccttggcggcgaccggcgcaagggtgcgtaacgcgtgagcaatctgcccgtatcagggggataagcgatggaaacgtcgtctaataccgcataacacgttgggaggcatctcccgatgttgaaagcttcggtggatacggatgag

SEQ ID NO: 2174 - DNA, 225 bp, unidentified
  misc_feature 1..225: note = bacterial strain Ascusb_1264 encodes 16S rRNA
  source 1..225: mol_type = genomic DNA
agagtttgatcatggctcaggacgaacgctggcggcgtgcctaacacatgcaagtcgaacggaactattttgaaggatctcttcggagtgacggatttttagtttagtggcggacgggtgagtaacgcgtgagtaacctgcctctgagaggggaataacgttctgaaaagaacgctaataccgcataacatatatttgccgcatgacagatatatcaaagatttt

SEQ ID NO: 2175 - DNA, 225 bp, unidentified
  misc_feature 1..225: note = bacterial strain Ascusb_905 encodes 16S rRNA
  source 1..225: mol_type = genomic DNA
agagtttgatcatggctcaggatgaacgctggcggcgtgcctaacacattcaagtcgaacggacgcgttcccttcgggggacaagttagtggcggacgggtgagtaatgcatgagcaacctgcctcgaagaggggaataacacagagaaatttgtgctaataccgcataatgtatccgggaggcatcttccggataagaaaggagcaatccgctttgagatgggc

SEQ ID NO: 2176 - DNA, 225 bp, unidentified
  misc_feature 1..225: note = bacterial strain Ascusb_7480 encodes 16S rRNA
  source 1..225: mol_type = genomic DNA
agagtttgatcatggctcaggatgaacgctggcggcatgcctaagacatgcaagtcgtacgaggaggcccattgaaatggagtgcttgcacaaagtggatttggattccctcctagtggcggaagggtgagtaatacgtaggttatttgcctcagagactgggataacatgcagaaatgcttgctaataccggatgataaatagaatgatacgttgttctatttt

SEQ ID NO: 2177 - DNA, 225 bp, unidentified
  misc_feature 1..225: note = bacterial strain Ascusb_352 encodes 16S rRNA
  source 1..225: mol_type = genomic DNA
agagtttgatcatggctcaggatgaacgctggcggcgcacataagacatgcaagtcgaacgaacttaatcgaaagtttacttttgaagcggttagtggcggactggtgagtaacacgtaagcaacctgcctatcagaggggaataacagtgagaaatcattgctaataccgcatatgctcacagtatcacatgatacagtgaggaaaggagcaatccgctgatag

SEQ ID NO: 2178 - DNA, 225 bp, unidentified
  misc_feature 1..225: note = bacterial strain Ascusb_238 encodes 16S rRNA
  source 1..225: mol_type = genomic DNA
agagtttgatcatggctcaggacgaacgctggcggcatgcctaacacatgcaagtcgaacggagctttcgagagcttgcttttgaaagcttagtggcggacgggtgagtaacgcgtgagcaacctgcctttcagtggggaataatattctgaaaagagtactaataccgcataacgtacagaaaccgcatgatttttgtaccaaagatttatcgctgagagatgg

SEQ ID NO: 2179 - DNA, 225 bp, unidentified
  misc_feature 1..225: note = bacterial strain Ascusb_3326 encodes 16S rRNA
  source 1..225: mol_type = genomic DNA
agagtttgatcatggctcaggatgaacgctggcggcatgcctaagacatgcaagtcgaacgggatggcccattgaagagtgcgagcttgctcaatctcggatttggattcccatctagtggcgcaagggtgagtaacacgtgggtaacctgccttcgagtctggaataacagttagaaatgattgctaatgccggatgatatgtagaatgatacgtctttctata

SEQ ID NO: 2180 - DNA, 225 bp, unidentified
  misc_feature 1..225: note = bacterial strain Ascusb_10663 encodes 16S rRNA
  source 1..225: mol_type = genomic DNA
agagtttgatcatggctcaggatgaacgctagctacaggcttaacacatgcaagtcgaggggcagcataatcgaagcttgctttgattgatggcgaccggcgcacgggtgagtaacgcgtatccaaccttccccatagtagggcatagcccgtagaaatgcggattaataccctatgttttcctttgcaggcatctaacgaggaataaaggttcaccgctatggg

SEQ ID NO: 2181 - DNA, 225 bp, unidentified
  misc_feature 1..225: note = bacterial strain Ascusb_1428 encodes 16S rRNA
  source 1..225: mol_type = genomic DNA
agagtttgatcatggctcaggacgaacgctggcggcatgcctaacacatgcaagtcgaacggagttgagagagcttgctttttcaacttagtggcggacgggtgagtaacgcgtgagtaacctgcctttcagtggggaataatattctgaaaagagtactaataccgcataatgtatagaaaccgcatgatttttataccaaagatttatcgctgagagatggac

SEQ ID NO: 2182 - DNA, 225 bp, unidentified
  misc_feature 1..225: note = bacterial strain Ascusb_1720 encodes 16S rRNA
  source 1..225: mol_type = genomic DNA
agagtttgatcctggctcaggattaacgctggcggcgtgcctaatacatgcaagtcgaatggtagcaataccatggcgaacgggtgagtaacacgtaggtaacctgtctttaagacgaggataaccgttggaaacgacggataatactcgataggtaattttagggcatcctaggattattaaagatttatcacttagagaggggcctgcggcgcattagctaga

SEQ ID NO: 2183 - DNA, 225 bp, unidentified
  misc_feature 1..225: note = bacterial strain Ascusb_739 encodes 16S rRNA
  source 1..225: mol_type = genomic DNA
agagtttgatcatggctcaggacgaacgctggcggcgtgcctaacacatgcaagtcgaacggagttgaggagcttgctccttaacttagtggcggacgggtgagtaacgcgtgagtaacctgcctctgagagtggaataacgttctgaaaagaacgctaataccgcataacatataactgccgcatgacagatatatcaaagattttatcgctcggagatggact

SEQ ID NO: 2184 - DNA, 225 bp, unidentified
  misc_feature 1..225: note = bacterial strain Ascusb_233 encodes 16S rRNA
  source 1..225: mol_type = genomic DNA
agagtttgatcatggctcaggacgaacgctggcggcgtgcctaacacatgcaagtcgaacggagttattttgattgattccttcgggatgattgatttttaacttagtggcggacgggtgagtaacgcgtgagtaacctgcctttgagagggggataacgttctgaaaagaacgctaataccgcatgacatatcgaagccgcatgactttgatatcaaagattta

SEQ ID NO: 2185 - DNA, 225 bp, unidentified
  misc_feature 1..225: note = bacterial strain Ascusb_170 encodes 16S rRNA
  source 1..225: mol_type = genomic DNA
agagtttgatcatggctcaggacgaacgctggcggcatgcctaacacatgcaagtcgaacggagcttaagaagcttgctttttaagcttagtggcggacgggtgagtaacgcgtgagtaacctgcctcttagtggggaataatgtactgaaaaggacactaataccgcataatgtattgagatcgcatggttttgataccaaagatttatcgctgagagatggac

SEQ ID NO: 2186 - DNA, 225 bp, unidentified
  misc_feature 1..225: note = bacterial strain Ascusb_654 encodes 16S rRNA
  source 1..225: mol_type = genomic DNA
agagtttgatcatggctcaggatgaacgctggcggcgtgcctaacacatgcaagtcgaacggaactgcttttgaagattccttcgggatgattcagttgtagtttagtggcggacgggtgagtaacgcgtgagtaacctgcccttcagagggggataacgatctgaaaagaccgctaataccgcataacattacgaagtcgcatggctttgtaatcaaaactcag

SEQ ID NO: 2187 - DNA, 225 bp, unidentified
  misc_feature 1..225: note = bacterial strain Ascusb_318 encodes 16S rRNA
  source 1..225: mol_type = genomic DNA
agagtttgatcatggctcaggattaacgctggcggcatgcctaatacatgcaagtcgaatggggagcttgcttcccatggcgaacgggtgagtaatacgtaggtaacctacctttaggacgaggataacctttggaaacgaaggataatactggatagtatagatttccgcatggagatatatttaaagatttatcacctagagaggggcctgcggtgcattagc

SEQ ID NO: 2188 - DNA, 225 bp, unidentified
  misc_feature 1..225: note = bacterial strain Ascusb_3189 encodes 16S rRNA
  source 1..225: mol_type = genomic DNA
agagtttgatcatggctcaggataaacgctggcggcgcacataagacatgcaagtcgaacggaagtcgtatgatttgaagttgattgaagatttatcggaaagatgcagattttcatacaatggctttagtggcggactggtgagtaacgcgtgagcaacctgcctattagaggggaataacagtgagaaatcattgctaataccgcatatgctgtgaatatcgc

SEQ ID NO: 2189 - DNA, 225 bp, unidentified
  misc_feature 1..225: note = bacterial strain Ascusb_107 encodes 16S rRNA
  source 1..225: mol_type = genomic DNA
agagtttgatcatggctcaggatgaacgctggcggcgtgcctaacacatgcaagtcgaacgaagcatgattgaaggagacttcggtcaatggatatcatgacttagtggcggacgggtgagtaatacatgagcaacctgcctttcagagggggacaacagctggaaacggctgctaataccgcataacgtgcgagaggggcatcccttttgtaccaaaggagcaa

SEQ ID NO: 2190 - DNA, 225 bp, unidentified
  misc_feature 1..225: note = bacterial strain Ascusb_2335 encodes 16S rRNA
  source 1..225: mol_type = genomic DNA
agagtttgatcatggctcaggatgaacgctagcggcaggcttaacacatgcaagtcgaggggcagcgcgggtagcaatacctggcggcgaccggcgaaagggtgagtaacgcgtgagcaacgtgcccgtatgtgggggatagtcgatggaaacgtcgcgtaataccccgtaacacatttgaccgcatggtcttatgttgaaagattttattgcatacggatcggc

SEQ ID NO: 2191 - DNA, 225 bp, unidentified
  misc_feature 1..225: note = bacterial strain Ascusb_1495 encodes 16S rRNA
  source 1..225: mol_type = genomic DNA
agagtttgatcatggctcaggatgaacgctagcggcaggcttaacacatgcaagtcgaggggtaacaggcggtagcaatactgtgctgacgaccggcgcacgggtgcgtaacgcgtatgcaacctgcctcgcacagggggataacggagtgaaaattccactaatatcccatggtgttggagaatcgcatggttcttcaactaaagcttcggtggtgcgagatgg

SEQ ID NO: 2192 - DNA, 225 bp, unidentified
  misc_feature 1..225: note = bacterial strain Ascusb_408 encodes 16S rRNA
  source 1..225: mol_type = genomic DNA
agagtttgatcatggctcaggataaacgctggcggcgcacataagacatgcaagtcgaacggacttaaccgaaagtttacttttggagcggttagtggcggactggtgagtaacgcgtaagcaatctgcctattagaggggaataacagtgagaaatcattgctaataccgcataagctgtgagtatcgcatgatacaaatagaaaaggagtaatccgctaatag

SEQ ID NO: 2193 - DNA, 225 bp, unidentified
  misc_feature 1..225: note = bacterial strain Ascusb_835 encodes 16S rRNA
  source 1..225: mol_type = genomic DNA
agagtttgatcatggctcaggacgaacgctggcggcgtgcttaacacatgcaagtcgagcggagttataatgaaagcttgctggatttatgacttagcggcggacgggtgagtaacgcgtgagcaatctgtcccatacagggggataataccgcgaaagaggttctaataccgcatgagaccacggtgaggcatctcgcaggggtcaaaggagcaatccggtatg

SEQ ID NO: 2194 - DNA, 225 bp, unidentified
  misc_feature 1..225: note = bacterial strain Ascusb_147 encodes 16S rRNA
  source 1..225: mol_type = genomic DNA
agagtttgatcatggctcaggatgaacgctagcggcaggcctaacacatgcaagtcgaggggcagcggggtgtagcaatacactgccggcgaccggcgcacgggtgcgtaacgcgtatgcaacctacccatgggagggggataacccggagaaatccggactaataccccgtaacacacacattcgcatggaagtgtgttgaaagatacgtcgtccatggacggg

SEQ ID NO: 2195 - DNA, 225 bp, unidentified
  misc_feature 1..225: note = bacterial strain Ascusb_512 encodes 16S rRNA
  source 1..225: mol_type = genomic DNA
agagtttgatcctggctcaggacgaacgctggcggcgtgcttaacacatgcaagtcgaacggagttaagcgctggtttgatgctagcttgctagtggatttccttgcttaacttagtggcggacgggtgagtaacgcgtgagtaacctgcctctcagtggggaataacgccctgaaaagagcgctaataccgcataacacatattgaccgcatgatcggtatgtc

SEQ ID NO: 2196 - DNA, 225 bp, unidentified
  misc_feature 1..225: note = bacterial strain Ascusb_3705 encodes 16S rRNA
  source 1..225: mol_type = genomic DNA
agagtttgatcatggctcaggatgaacgctggcggcatgcctaagacatgcaagtcgaacgagacgaccttaagaagactgagtgcttgcacgaagttggaagaagatcatcgtctagtggcagacgggtgagtaacacgtgggtaacctacctttaagctggggataacagttggaaacgattgctaataccgaataagatattcgtattgaaagaagccctta

SEQ ID NO: 2197 - DNA, 225 bp, unidentified
  misc_feature 1..225: note = bacterial strain Ascusb_1259 encodes 16S rRNA
  source 1..225: mol_type = genomic DNA
agagtttgatcatggctcaggatgaacgctggcggcgtgcctaacacatgcaagtcgaacgaagcatttttcatcggagattcgtcgaagatgagatttgacttagtggcggacgggtgagtaatgtgtgagcaacctgcctttcagagggggacaacagttggaaacgactgctaataccgcataatgtattatggaggcatctcctaaataccaaaggagcaa

SEQ ID NO: 2198 - DNA, 225 bp, unidentified
  misc_feature 1..225: note = bacterial strain Ascusb_607 encodes 16S rRNA
  source 1..225: mol_type = genomic DNA
agagtttgatcatggctcaggatgaacgctggcggcgtgcctaacacatgcaagtcgaacggagttacgagagcttgcttttgtaacttagtggcggacgggtgagtaatgcgtgagcaacctgcctttcagagggggacaacagttggaaacgactgctaataccgcataatgtatccgggcggcatcgcctggataccaaaggagcaatccgctgaaagatgg

SEQ ID NO: 2199 - DNA, 225 bp, unidentified
  misc_feature 1..225: note = bacterial strain Ascusb_300 encodes 16S rRNA
  source 1..225: mol_type = genomic DNA
agagtttgatcatggctcagaacgaacgctggtggcgtgtcttatacatgcaagtcgagcgaggcagcaatgccgagcggcgaacgggtgagtaacgcgtaagcaatctgccccatatcaggaaatacccgtgccaacgcgcggttaatgtccaggagagtggccttccgcatggagggttgactagagatttatcggtatgggatgagcttgcgtccgattagc

SEQ ID NO: 2200 - DNA, 225 bp, unidentified
  misc_feature 1..225: note = bacterial strain Ascusb_275 encodes 16S rRNA
  source 1..225: mol_type = genomic DNA
agagtttgatcctggctcaggataaacgctggcggcgcacataagacatgcaagtcgaacgaacttaacctttagtttactaatggagcggttagtggcggactggtgagtaacacgtaagcaacctgcctatcagaggggaacaacagttagaaatgactgctaataccgcatatgccttgaatatcacatgatataaaagggaaaggagcaatccgctgatag

SEQ ID NO: 2201 - DNA, 225 bp, unidentified
  misc_feature 1..225: note = bacterial strain Ascusb_236 encodes 16S rRNA
  source 1..225: mol_type = genomic DNA
agagtttgatcatggctcaggatgaacgctggcggcgtgcttaacacatgcaagtcgaacgagcgtcttcggacgcgagtggcggacgggtgagtaacgcgtgggtaacctaccttatacagggggataacagcgggaaactgctgttaataccgcataagcgcacggaatcgcatgattcagtgtgaaaagctccgacggtataagatggacccgcgtctgatt

SEQ ID NO: 2202 - DNA, 225 bp, unidentified
  misc_feature 1..225: note = bacterial strain Ascusb_3964 encodes 16S rRNA
  source 1..225: mol_type = genomic DNA
agagtttgatcatggctcaggatgaacgctggcggcatgcctaagacatgcaagtcgaacgagatggccttttgaaaactgcgtgcttgcacaaagtttgatagagattttccatctagtggcagacgggtgagtaatacataagtaatctaccttaaagactgggataacgtttggaaacgaacgctaataccggatgattcttcttacacaagtaagaaagct

SEQ ID NO: 2203 - DNA, 225 bp, unidentified
  misc_feature 1..225: note = bacterial strain Ascusb_180 encodes 16S rRNA
  source 1..225: mol_type = genomic DNA
agagtttgatcatggctcagaacgaacgctggcggcgcgtcttaagcatgcaagtcgagcggtaagatggaagcttgcttctatcctagagcggcggactggtgagtaacgcgtgggtgacgtacccttgtgacggggacagctcctagaaataggagataataccggatacgctgagtgttgtcagaggacattcaggaaaggaacttttgttccgcacgagga

SEQ ID NO: 2204 - DNA, 225 bp, unidentified
  misc_feature 1..225: note = bacterial strain Ascusb_8872 encodes 16S rRNA
  source 1..225: mol_type = genomic DNA
agagtttgatcatggctcaggatgaacgctggcggcatgcctaagacatgcaagtcgaacgaagtggcccaatgaagatgaagtgcttgcactgatttggaaatggattcccacttagtggcagacgggtgagtaacacgtgggtaacctaccccttagtctgggacaactattggaaacgatagctaataccggatgattcacagatggataaccatttgtgct

SEQ ID NO: 2205 - DNA, 225 bp, unidentified
  misc_feature 1..225: note = bacterial strain Ascusb_689 encodes 16S rRNA
  source 1..225: mol_type = genomic DNA
agagtttgatcctggctcaggatgaacgctagcggcaggcttaacacatgcaagtcgaggggtaacgcgaggtagcaatactttggcgacgaccggcgcacgggtgcgtaacgcgtatgcaacctacctgtaacagggggataacggagggaaacttccactaataccccatattgtcattctttcgcatgttgggatgacgaaagcttcggtggttacggatgg

SEQ ID NO: 2206 - DNA, 225 bp, unidentified
  misc_feature 1..225: note = bacterial strain Ascusb_380 encodes 16S rRNA
  source 1..225: mol_type = genomic DNA
agagtttgatcatggctcaggatgaacgctggcggcgtgcttaacacatgcaagtcgaacggagatatttgagagcttgcttttagatatcttagtggcggacgggtgagtaacgcgtgggtaacctaccctgtacagggggatagcagttggaaacgactgataaaaccgcataaaacggcagtaccgcatggtacaaccgtcaaatattcataggtacaggat

SEQ ID NO: 2207 - DNA, 225 bp, unidentified
  misc_feature 1..225: note = bacterial strain Ascusb_19296 encodes 16S rRNA
  source 1..225: mol_type = genomic DNA
agagtttgatcctggctcaggatgaacgctagctacaggcttaacacatgcaagtcgaggggaaacggcattttagcttgctaagatggacgtcgaccggcgaatgggtgagtaacgcgtatccaaccttccgttaagtagggaatagccttgcgaaagtaagattaatgccctatgtggtgttttgaggacatctgaagagcaccaaaggttcaccgcttaacg

SEQ ID NO: 2208 - DNA, 225 bp, unidentified
  misc_feature 1..225: note = bacterial strain Ascusb_81 encodes 16S rRNA
  source 1..225: mol_type = genomic DNA
agagtttgatcatggctcaggacgaacgctggcggcatgcctaacacatgcaagtcgaacggagttaagagagcttgcttttttaacttagtggcggacgggtgagtaacgcgtgagcaacctgcctttcagtggggaataatgttctgaaaagagcactaataccgcatgaagtatactgatcgcatggtcggaataccaaagatttatcgctgaaagatgggc

SEQ ID NO: 2209 - DNA, 225 bp, unidentified
  misc_feature 1..225: note = bacterial strain Ascusb_1472 encodes 16S rRNA
  source 1..225: mol_type = genomic DNA
agagtttgatcatggctcaggatgaacgctggcggcgtgcttaacacatgcaagtcgaacggagctttttttgaaggagacttcggtcaacggaagctaaagcttagtggcggacgggtgagtaacgcgtgagtaacctgcctttcagagggggataacgtttggaaacgaacgctaataccgcatgaaacagcaatactgcatggtataactgtcaaagattat

SEQ ID NO: 2210 - DNA, 225 bp, unidentified
  misc_feature 1..225: note = bacterial strain Ascusb_813 encodes 16S rRNA
  source 1..225: mol_type = genomic DNA
agagtttgatcctggctcagaacgaacgctggtggcgtgtcttatacatgcaagtcgagcgaggcagcaatgccgagcggcgaacgggtgagtaacgcgtaagcaatctgccccatatcaggaaatacccgtgccaacgcgcggttaatgtccaggagagtggccttctgcatggaaggttgactagagatttatcggtatgggatgagcttgcgtccgattagc

SEQ ID NO: 2211 - DNA, 225 bp, unidentified
  misc_feature 1..225: note = bacterial strain Ascusb_1395 encodes 16S rRNA
  source 1..225: mol_type = genomic DNA
agagtttgatcatggctcaggacgaacgctggcggcgtgcctaacacatgcaagtcgaacggaactgacgccggttcttcggaaccattgtcagtttagtggcggacgggtgagtaacgcgtgagtaacctgcctctgagaggggaataacgttctgaaaagaacgctaataccgcataacatatagaagtcgcatggcttttatatcaaagattttatcgctcg

SEQ ID NO: 2212 - DNA, 225 bp, unidentified
  misc_feature 1..225: note = bacterial strain Ascusb_711 encodes 16S rRNA
  source 1..225: mol_type = genomic DNA
agagtttgatcatggctcaggacgaacgctggcggcgcgcctaacacatgcaagtcgaacggagttaaaggagcttgctcttttaacttagtggcggacgggtgagtaacacgtgagcaacctgccttttagtgggggacaacagttggaaacgactgctaataccgcataacgttgcgaggaggcatctccatgcaaccaaagatttatcgctgaaagatgggc

SEQ ID NO: 2213 - DNA, 225 bp, unidentified
  misc_feature 1..225: note = bacterial strain Ascusb_4081 encodes 16S rRNA
  source 1..225: mol_type = genomic DNA
agagtttgatcatggctcaggatgaacgctggcggcatgcctaagacatgcaagtcgaacgagatggcccaatgaagatggagtgcttgcacaaagttggatttggattcccgtctagtggcgcaagggtgagtaacacgtgggtaatctaccttcgagtctggaataacagttagaaatgattgctaatgccggatgatatggaaaacgatacgtcattttgta

SEQ ID NO: 2214 - DNA, 225 bp, unidentified
  misc_feature 1..225: note = bacterial strain Ascusb_5136 encodes 16S rRNA
  source 1..225: mol_type = genomic DNA
agagtttgatcctggctcaggatgaacgctagcgacaggcctaacacatgcaagtcgaggggcagcgcgagggtagcaatatctttggcggcgaccggcgcacgggtgcgtaacaggtgtgcaatctgtccataatcggggaataacccggcgaaagccgaactaatgctccatgtgagtgagagccgcatgactttcatttgaaacgtaaggattatgggtgag

SEQ ID NO: 2215 - DNA, 225 bp, unidentified
  misc_feature 1..225: note = bacterial strain Ascusb_2961 encodes 16S rRNA
  source 1..225: mol_type = genomic DNA
agagtttgatcctggctcaggatgaacgctagctacaggcttaacacatgcaagtcgaggggcagcgggaagttagcttgctaactttgccggcgaccggcgcacgggtgagtaacgcgtatccaaccttccccttagtagggcatagcccgtagaaatgcggattaataccctatgttattcgtcgatgacatctgaagtgaatcaaaggtttaccgctaaggg

SEQ ID NO: 2216 - DNA, 225 bp, unidentified
  misc_feature 1..225: note = bacterial strain Ascusb_537 encodes 16S rRNA
  source 1..225: mol_type = genomic DNA
agagtttgatcatggctcaggatgaacgctggcggcgtgcttaatacatgcaagtcgaacggagtttagatgaaacctagtgattctaaacttagtggcggacgggtgagtaacgcgtgggtaacctgccctgtacagggggataacggttggaaacgaccgctaaaaccgcataacatcggaataccgcatgatgttccggtcaaatatttataggtacaggat

SEQ ID NO: 2217 - DNA, 225 bp, unidentified
  misc_feature 1..225: note = bacterial strain Ascusb_543 encodes 16S rRNA
  source 1..225: mol_type = genomic DNA
agagtttgatcatggctcaggacgaacgctggcggcatgcctaacacatgcaagtcgaacggagcttaagaagcttgctttttaagcttagtggcggacgggtgagtaacgcgtgagcaacctgcctttcagtggggaataatattctgaaaagagtactaataccgcatgacgtatgacagtcgcatgactgacataccaaagatttatcgctgagagatgggc

SEQ ID NO: 2218 - DNA, 225 bp, unidentified
  misc_feature 1..225: note = bacterial strain Ascusb_441 encodes 16S rRNA
  source 1..225: mol_type = genomic DNA
agagtttgatcatggctcaggacgaacgctggcggcatgcctaacacatgcaagtcgaacggagcttaaagagcttgctttttaagcttagtggcggacgggtgagtaacgcgtgagtaacctgcctttcagtggggaataataccttgaaaagggtactaataccgcataatgtacagagatcgcatggtttttgtaccaaagatttatcgctgagagatggac

SEQ ID NO: 2219 - DNA, 225 bp, unidentified
  misc_feature 1..225: note = bacterial strain Ascusb_2606 encodes 16S rRNA
  source 1..225: mol_type = genomic DNA
agagtttgatcatggctcagaacgaacgctggcggcgcgtcttaagcatgcaagtcgaacggcaagattggtgcttgcaccgatcctagagtggcggactggtgagtaacgcgtgggtgacttaccctgaagatggggatagccgatagaaatatcggataataccgaataatcttgctggagttagagaccagtaaggaaaggagcttcggctccgcttgagga

SEQ ID NO: 2220 - DNA, 225 bp, unidentified
  misc_feature 1..225: note = bacterial strain Ascusb_560 encodes 16S rRNA
  source 1..225: mol_type = genomic DNA
agagtttgatcatggctcaggatgaacgctggcggcgtgcctaatacatgcaagtcgaacgaggtagcaataccgagtggcgaacgggtgagtaacacgtaggtaacctgcccttaagcttgggatacccagaggaaactttggctaataccggataacaacagagaaggcatcttctttgcttgaaaggccccttcaagggtcacttaaggatggacctgcggc

SEQ ID NO: 2221 - DNA, 225 bp, unidentified
  misc_feature 1..225: note = bacterial strain Ascusb_9658 encodes 16S rRNA
  source 1..225: mol_type = genomic DNA
agagtttgatcctggctcaggatgaacgctggcggcatgcctaagacatgcaagtcgaacgaagtggcccaatgaagaatgcgagcttgctcaaatttggatttggattcccacttagtggcgcaagggtgagtaacacatgggtaatctaccttcgagtttggaataacagttagaaatgattgctaatgccgaataacattgagaacgatacttcattcttta

SEQ ID NO: 2222 - DNA, 225 bp, unidentified
  misc_feature 1..225: note = bacterial strain Ascusb_3358 encodes 16S rRNA
  source 1..225: mol_type = genomic DNA
agagtttgatcatggctcaggatgaacgctggcggcgtgcctaatacatgcaagtcgaacgagggtgcttgcaccctagtggcgaacgggtgagtaacacgtaggtaacctgcccttaagcttgggatacccagaggaaactttggctaataccggataacaacagagaaggcatcttctttgcttgaaaggccctttacggggtcacttaaggatggacctgcg

SEQ ID NO: 2223 - DNA, 225 bp, unidentified
  misc_feature 1..225: note = bacterial strain Ascusb_273 encodes 16S rRNA
  source 1..225: mol_type = genomic DNA
agagtttgatcatggctcaggatgaacgctggcggcgtgcttaacacatgcaagtcgaacgggcttagatcggaagcttgcttttgatttaagttagtggcggacgggtgagtaacgcgtgggtaacctaccctgtgcagggggatagcagctggaaacggctgataaaaccgcataacacggcgatgccgcatggcaatgccgtcaaatatttataggcacagg

SEQ ID NO: 2224 - DNA, 225 bp, unidentified
  misc_feature 1..225: note = bacterial strain Ascusb_103 encodes 16S rRNA
  source 1..225: mol_type = genomic DNA
agagtttgatcatggctcaggatgaacgctggcggcgtgcttaacacatgcaagtcgaacggaacttaatgaaacctagtgatttaagtttagtggcggacgggtgagtaacgcgtgggtaacctgccgcatgcagggggacaacagagggaaacttctgctaataccgcataagcgcacggggccgcatggccttgtgtgaaaagatttatcggcatgcgatgg

SEQ ID NO: 2225 - DNA, 225 bp, unidentified
  misc_feature 1..225: note = bacterial strain Ascusb_2581 encodes 16S rRNA
  source 1..225: mol_type = genomic DNA
agagtttgatcatggctcagaacgaacgctggcggcgcgtcttaagcatgcaagtcgagcggtaagttggaagcttgcttctaacctagagcggcggactggtgagtaacgcgtgggtgacgtacctctgtgacggggacagctcctagaaataggagataataccggatacgctgcatgttgtcagaggacatgcaggaaaggatcttttgattcgcacagaga

SEQ ID NO: 2226 - DNA, 225 bp, unidentified
  misc_feature 1..225: note = bacterial strain Ascusb_1759 encodes 16S rRNA
  source 1..225: mol_type = genomic DNA
agagtttgatcatggctcaggacgaacgctggcggcgtgcttaacacatgcaagtcgagcggggacatgagggaataagcttcggcagaaagaatcatgttctagcggcggacgggtgagtaacgcgtgagcaatctgtcccagacagggggataacacttggaaacaggtgctaataccgcataagaccacgaggcggcatcgtcttggggtaaaaggagcaat

SEQ ID NO: 2227 - DNA, 225 bp, unidentified
  misc_feature 1..225: note = bacterial strain Ascusb_823 encodes 16S rRNA
  source 1..225: mol_type = genomic DNA
agagtttgatcatggctcaggatgaacgctggcggcgtgcctaatacatgcaagtcgaacgggtgcagcaatgtactagtggcgaacgggtgagtaacacgttggtgacctgccccaaagatgggaatatcacctggaaacgggtggcaaaaccgaataagcttaccccctttagaaaagggtaagtaaaagtgcaaactactttgggaggggcctgcggcccat

SEQ ID NO: 2228 - DNA, 225 bp, unidentified
  misc_feature 1..225: note = bacterial strain Ascusb_1657 encodes 16S rRNA
  source 1..225: mol_type = genomic DNA
agagtttgatcatggctcaggatgaacgctggcggcgtgcttaacacatgcaagtcgaacggaactgctttaaatgatttccttcggggatgaatttgttgtagtttagtggcggacgggtgagtaacgcgtgagtaacctgcccttgagagggggataacgttctgaaaagaacgctaataccgcataacattatcgagtcgcatggcttgataatcaaaactg

SEQ ID NO: 2229 - DNA, 225 bp, unidentified
  misc_feature 1..225: note = bacterial strain Ascusb_1018 encodes 16S rRNA
  source 1..225: mol_type = genomic DNA
agagtttgatcatggctcaggatgaacgctggcggcgtgcttaacacatgcaagtcgaacgggaattacattttagcttgctaagttgtaattctagtggcggacgggtgagtaacgcgtgggtaacctgccttatacagggggacaacagttggaaacggctgctaataccgcataagcgcacagataggcatctatcagtgtgaaaaactccggtggtataag

SEQ ID NO: 2230 - DNA, 225 bp, unidentified
  misc_feature 1..225: note = bacterial strain Ascusb_6138 encodes 16S rRNA
  source 1..225: mol_type = genomic DNA
agagtttgatcatggctcagaacgaacgctggcggcaggcctaacacatgcaagtcgagcgtgaaaggagacttcggtctccgagtaaagcggcgcacgggtgagtaacacgtgaataatctgcccttgtgaccgggataacagatcgaaagaactgctaataccggataagcttccacatcaaccgggtgcgggggaaaagtgcgggaccttcgggccgcacgc

SEQ ID NO: 2231 - DNA, 225 bp, unidentified
  misc_feature 1..225: note = bacterial strain Ascusb_2866 encodes 16S rRNA
  source 1..225: mol_type = genomic DNA
agagtttgatcatggctcaggacgaacgctggcggcgtgcttaacacatgcaagtcgaacgaagcttgatgattgatttcttcggaatgatttctgatatgactgagtggcggacgggtgagtaacgcgtgaggaacctgcctttcagagggggacaacgtttggaaacgaacgctaataccgcataacattaccgagtggcatcgcttggtaatcaaagattta

SEQ ID NO: 2232 - DNA, 225 bp, unidentified
  misc_feature 1..225: note = bacterial strain Ascusb_2833 encodes 16S rRNA
  source 1..225: mol_type = genomic DNA
agagtttgatcatggctcaggatgaacgctagcggcaggcttaacacatgcaagtcgaggggtaacgcgaggtagcaatactttggcgacgaccggcgcacgggtgcgtaacgcgtatgcaacctacctgtaacagggggataacggagagaaatttccactaataccccatattgtcagagattcgcatgtttctctgacgaaagcttcggtggttacggatgg

SEQ ID NO: 2233 - DNA, 225 bp, unidentified
  misc_feature 1..225: note = bacterial strain Ascusb_35 encodes 16S rRNA
  source 1..225: mol_type = genomic DNA
agagtttgatcatggctcagagcgaacgctggcggcaggcttaacacatgcaagtcgagcgggcatagcaatatgtcagcggcagacgggtgagtaacgcgtgggaacgtaccttttggttcggaacaacacagggaaacttgtgctaataccggataagcccttacggggaaagatttatcgccgaaagatcggcccgcgtctgattagctagttggtgaggta

SEQ ID NO: 2234 - DNA, 225 bp, unidentified
  misc_feature 1..225: note = bacterial strain Ascusb_1332 encodes 16S rRNA
  source 1..225: mol_type = genomic DNA
agagtttgatcatggctcaggatgaacgctagctacaggcttaacacatgcaagtcgaggggcagcatgatctaagcttgcttagattgatggcgaccggcgcacgggtgagtaacgcgtatccaaccttccctatagtagaggatagcccggcgaaagtcggattaatactctatgttttccaatgcagacatctaagttggaacaaaggttcaccgctatagg

SEQ ID NO: 2235 - DNA, 225 bp, unidentified
  misc_feature 1..225: note = bacterial strain Ascusb_1198 encodes 16S rRNA
  source 1..225: mol_type = genomic DNA
agagtttgatcatggctcaggacgaacgctggcggcgtgcttaacacatgcaagtcgaacgaggttataggagagcttgctcgaatataaccgagtggcggacgggtgagtaacgcgtgagcaacctgtctcacacaggggaataacgcatcgaaagatgtgctaataccgcataggaccacggtttcgcatgggactgaggtgaaaggagcaatccggtgtgag

SEQ ID NO: 2236 - DNA, 225 bp, unidentified
  misc_feature 1..225: note = bacterial strain Ascusb_1446 encodes 16S rRNA
  source 1..225: mol_type = genomic DNA
agagtttgatcctggctcaggacgaacgctggcggcgtgcctaacacatgcaagtcgaacggaactgttatgattgattcttcggatgaaagagtttcagtttagtggcggacgggtgagtaacgcgtgagtaacctgcctctgagaggggaataacgttctgaaaagaacgctaataccgcataacatagcggagtcgcatggctctgctatcaaagatttatc

SEQ ID NO: 2237 - DNA, 225 bp, unidentified
  misc_feature 1..225: note = bacterial strain Ascusb_5891 encodes 16S rRNA
  source 1..225: mol_type = genomic DNA
agagtttgatcatggctcaggatgaacgctggcggcatgcctaagacatgcaagtcgaacgagacgaccttaagaaagctgcgtgcttgcacaaggctggaagaagatcatcgtctagtggcagacgggtgagtaacacgtgggtaacctacctttaagctggggataacagttggaaacgattgctaataccgaataagatattcgtattgaaagaagccctta

SEQ ID NO: 2238 - DNA, 225 bp, unidentified
  misc_feature 1..225: note = bacterial strain Ascusb_1760 encodes 16S rRNA
  source 1..225: mol_type = genomic DNA
agagtttgatcatggctcaggacgaacgctggcggcgtgcctaacacatgcaagtcgaacggacgagaggagcttgctcctcaagttagtggcgaacgggtgagtaacgcgtgagcaacctgcctttcagagggggacaacggttggaaacgaccgctaataccgcatgaagcagttggatcgcatgatctggctgccaaagatttatcgctgaaagatgggctc

SEQ ID NO: 2239 - DNA, 225 bp, unidentified
  misc_feature 1..225: note = bacterial strain Ascusb_748 encodes 16S rRNA
  source 1..225: mol_type = genomic DNA
agagtttgatcatggctcaggacgaacgctggcggcacgcttaacacatgcaagtcgaacggtgaagtaacttcggttatggaacagtggcggacgggtgagtaacacgtgagcaatctgcctttaagtggggaataacgattggaaacgatcggtaataccgcataatatacataagccgcatgacctatgtatcaaagatttatcgcttaaagatgagctcgc

SEQ ID NO: 2240 - DNA, 225 bp, unidentified
  misc_feature 1..225: note = bacterial strain Ascusb_625 encodes 16S rRNA
  source 1..225: mol_type = genomic DNA
agagtttgatcatggctcagagcgaacgctggcggcaggcttaacacatgcaagtcgaacgctcgtcttcggacgggagtggcagacgggtgagtaacacgtgggaacgtaccctttggttcggaataacgcagggaaacttgcgctaataccggatacgcccttttggggaaaggtttactgccgaaggatcggcccgcgtctgattagctagttggtggggta

SEQ ID NO: 2241 - DNA, 225 bp, unidentified
  misc_feature 1..225: note = bacterial strain Ascusb_1210 encodes 16S rRNA
  source 1..225: mol_type = genomic DNA
agagtttgatcatggctcaggatgaacgctggcggcgtgcctaacacattcaagtcgaacgaactgtagaaatacagtgagtggcggacgggtgagtaacgcgtaagcaatctgcctttgtgtgtggaataacaaccggaaacagttgctaataccgcataacgcagagggatcgcatggtctttctgccaaagatttatcgcacgaagatgagcttgcgtccga

SEQ ID NO: 2242 - DNA, 225 bp, unidentified
  misc_feature 1..225: note = bacterial strain Ascusb_785 encodes 16S rRNA
  source 1..225: mol_type = genomic DNA
agagtttgatcatggctcaggacgaacgctggcggcgtgcctaacacatgcaagtcgagcggacttttattgaaagcttgctggatataagagttagcggcggacgggtgagtaacgcgtgagcaatctgtccctcacagggggataataccgcgaaagtggttctaataccgcatgagaccacggattggcatcgatctggggtcaaaggagcaatccggtgag

SEQ ID NO: 2243 - DNA, 225 bp, unidentified
  misc_feature 1..225: note = bacterial strain Ascusb_5175 encodes 16S rRNA
  source 1..225: mol_type = genomic DNA
agagtttgatcctggctcaggatgaacgctagctacaggcttaacacatgcaagtcgaggggtaacgagtgggaagcttgcttcccatgtcgacgaccggcgcacgggtgagtaacgcgtatccaacctgccacatactcggggatagcccggtgaaaaccgaattaatacccgatggcgtcctttgcggacatctaacgaggactaaagattacggtatgtgat

SEQ ID NO: 2244 - DNA, 225 bp, unidentified
  misc_feature 1..225: note = bacterial strain Ascusb_1020 encodes 16S rRNA
  source 1..225: mol_type = genomic DNA
agagtttgatcatggctcaggatgaacgctagcggcaggcttaacacatgcaagtcgaggggcagcgtggagtagcaatactctgacggcgaccggcggaagggtgagtaacgcgtgagcaacgtgccgccatctgggggataatcgctggaaacggcgtctaatatcgcgtaacacattgatgggcatccattgatgttgaaagatttatcggatggcgatcgg

SEQ ID NO: 2245 - DNA, 225 bp, unidentified
  misc_feature 1..225: note = bacterial strain Ascusb_11859 encodes 16S rRNA
  source 1..225: mol_type = genomic DNA
agagtttgatcatggctcaggatgaacgctggcggcatgcctaagacatgcaagtcgaacgaagtggcccattgataattgagtgcttgcacaagatttgatttggattttccacttagtggcgcaagggtgagtaacacgtaggttatctgccttcgagtctggaataacagttagaaatgattgctaatgccggattatatataaagcaatacgttactttat

SEQ ID NO: 2246 - DNA, 225 bp, unidentified
  misc_feature 1..225: note = bacterial strain Ascusb_885 encodes 16S rRNA
  source 1..225: mol_type = genomic DNA
agagtttgatcatggctcaggacgaacgctggcggcatgcctaacacatgcaagtcgaacggagcttaagaggcttgccttttaagcttagtggcggacgggtgagtaacgcgtgagcaacctgcctctcagtggggaataatgtactgaaaaggacactaataccgcatgatgtatttgagtcgcatgatttgaataccaaagatttatcgctgagagatgggc

SEQ ID NO: 2247 - DNA, 225 bp, unidentified
  misc_feature 1..225: note = bacterial strain Ascusb_227 encodes 16S rRNA
  source 1..225: mol_type = genomic DNA
agagtttgatcatggctcaggatgaacgctggcggcgtgcctaacacatgcaagtcgaacgaagcatagaagacggagattcgtcaaagccttctatgacttagtggcggacgggtgagtaatgtatgagcaacctgcctttcagagggggacaacagttggaaacgactgctaataccgcataatgtatcgggaggacatcctcctgataccaaaggagcaatc

SEQ ID NO: 2248 - DNA, 225 bp, unidentified
  misc_feature 1..225: note = bacterial strain Ascusb_2296 encodes 16S rRNA
  source 1..225: mol_type = genomic DNA
agagtttgatcatggctcaggatgaacgctggcggcgtgcttaacacatgcaagtcgaacgaagcactgggaatgaagttttcggatggatttctctttgacttagtggcggacgggtgagtaacgcgtgggcaacctgccgtatgcagggggacaacagttggaaacggctgctaataccgcataagcgcacggtatcgcatgatacagtgtgaaaagatttat

SEQ ID NO: 2249 - DNA, 225 bp, unidentified
  misc_feature 1..225: note = bacterial strain Ascusb_1458 encodes 16S rRNA
  source 1..225: mol_type = genomic DNA
agagtttgatcatggctcaggatgaacgctggcggcgtgcttaacacatgcaagtcgaacggagctttttttgaaggagacttcggtcaacggaagctaaagcttagtggcggacgggtgagtaacgcgtgagtaacctgcctttcagagggggataacatccggaaacggatgctaataccgcataaaacagcagcaccgcatgatgcaactgtcaaagatttt

SEQ ID NO: 2250 - DNA, 225 bp, unidentified
  misc_feature 1..225: note = bacterial strain Ascusb_251 encodes 16S rRNA
  source 1..225: mol_type = genomic DNA
agagtttgatcatggctcaggatgaacgctggcggtgtgcctaatacatgcaagtcgatcgggcgtagcaatacgtcagaggcgtacgggtgagtaacacgtaggtaacctacctttaagactgggatacccagacgaaagtttggctaataccggataacaacatttgagacatctcttttgtttgaaaggcgctgcaaggcgccacttttagatggacctgcg

SEQ ID NO: 2251 - DNA, 225 bp, unidentified
  misc_feature 1..225: note = bacterial strain Ascusb_3356 encodes 16S rRNA
  source 1..225: mol_type = genomic DNA
agagtttgatcatggctcaggatgaacgctggcggcgtgcctaacacatgcaagtcgaacgaagcatcttatccgacgaagtggagtgcttgcacaaagcagagtcaaccaagatgacttagtggcggacgggtgagtaacgcgtgggtaacctgccgtatacagggggataacagttagaaatgactgctaataccgcataagcgcacggtatcgcatgataca

SEQ ID NO: 2252 - DNA, 225 bp, unidentified
  misc_feature 1..225: note = bacterial strain Ascusb_363 encodes 16S rRNA
  source 1..225: mol_type = genomic DNA
agagtttgatcatggctcaggattaacgctggcggcgtgcctaatacatgcaagtcgaatggtagcaataccatggcgaacgggtgagtaacacgtaggtaacctgtctttaagacgaggataaccgttggaaacgacggataatactcgataggtgatttgagggcatccttagatcattaaagatttatcacttagagaggggcctgcggcgcattagctaga

SEQ ID NO: 2253 - DNA, 225 bp, unidentified
  misc_feature 1..225: note = bacterial strain Ascusb_212 encodes 16S rRNA
  source 1..225: mol_type = genomic DNA
agagtttgatcatggctcaggatgaacgctggcggcgtgcttaatacatgcaagtcgaacgaagttatctcgctgaggcgagcttgctcaattcttgagataacttagtggcggacgggtgagtaacgcgtgggtaacctgccttacacagggggataacagttagaaatgactgctaataccgcataagcgcacagtatcgcatgatacagtgtgaaaaactcc

SEQ ID NO: 2254 - DNA, 225 bp, unidentified
  misc_feature 1..225: note = bacterial strain Ascusb_630 encodes 16S rRNA
  source 1..225: mol_type = genomic DNA
agagtttgatcatggctcaggatgaacgctggcggcatgcctaacacatgcaagtcgaacggagctattatggaagcttgcttttgttttagcttagtggcggacgggtgagtaacgcgtgagaaacctgcccttgagtggggaataacaccgagaaatcggtgctaataccgcataatgtcggaaattcgcatgtttttccgaccaaaggatttattcgcttaa

SEQ ID NO: 2255 - DNA, 225 bp, unidentified
  misc_feature 1..225: note = bacterial strain Ascusb_6714 encodes 16S rRNA
  source 1..225: mol_type = genomic DNA
agagtttgatcatggctcaggataaacgctggcggcgcacataagacatgcaagtcgaacggaagtcgttgtaatgatgttgacatgaacagagaacttgttcaacgggatttgatattgacttacaacaatggctttagtggcggactggtgagtaacacgtaagcaacctgcctattagaggggaataacaacgagaaatcgttgctaataccgcatatgcca

SEQ ID NO: 2256 - DNA, 225 bp, unidentified; identical to SEQ ID NO: 2220
  misc_feature 1..225: note = bacterial strain Ascusb_678 encodes 16S rRNA
  source 1..225: mol_type = genomic DNA

SEQ ID NO: 2257 - DNA, 225 bp, unidentified
  misc_feature 1..225: note = bacterial strain Ascusb_2067 encodes 16S rRNA
  source 1..225: mol_type = genomic DNA
agagtttgatcatggctcaggatgaacgctagcggcaggcttaacacatgcaagtcgaggggcagcgcgggtagcaatacctggcggcgaccggcggaagggtgcgtaacgcgtgagcaacttgcccgtatcagggggataagcattggaaacgatgtctaataccccataacaacagaggctgcatgacctttgtttgaaagtttcggcggatacggataggct

SEQ ID NO: 2258 - DNA, 225 bp, unidentified; identical to SEQ ID NO: 2220
  misc_feature 1..225: note = bacterial strain Ascusb_799 encodes 16S rRNA
  source 1..225: mol_type = genomic DNA

SEQ ID NO: 2259 - DNA, 225 bp, unidentified
  misc_feature 1..225: note = bacterial strain Ascusb_3859 encodes 16S rRNA
  source 1..225: mol_type = genomic DNA
agagtttgatcatggctcaggataaacgctggcggcgcacataagacatgcaagtcgaacggaagccgtttaaattcaaatgaagtgatttgaggatttatccaatttgaaacgattttgtttttagacatatgactttagtggcggactggtgagtaacgcgtaagcaatctgcctatcagaggggaataacagtgagaaatcattgctaataccgcatatgct

SEQ ID NO: 2260 - DNA, 225 bp, unidentified
  misc_feature 1..225: note = bacterial strain Ascusb_2220 encodes 16S rRNA
  source 1..225: mol_type = genomic DNA
agagtttgatcctggctcaggatgaacgctggcggcgtgcctaacacatgcaagtcgaacggagatttaacgctgatgaggcttcggcggaatcttgttaaatcttagtggcggacgggtgagtaacgcgtgggcaacctgcctcgtactgggggataacagttggaaacgactgttaataccgcataagcgcacggtaccgcatggtacagtgtgaaaaactcc

SEQ ID NO: 2261 - DNA, 225 bp, unidentified
  misc_feature 1..225: note = bacterial strain Ascusb_2311 encodes 16S rRNA
  source 1..225: mol_type = genomic DNA
agagtttgatcatggctcaggacgaacgctggcggcgtgcctaacacatgcaagtcgaacggactgattcccttcggggatgaaagttagtggcggacgggtgagtaacgcgtgagcaacctgcctttcagaggggaataacgtttggaaacagacgctaataccgcataacgcataggtgtcgcatggcatttatgccaaaggagcaatccgctgaaagatggg

SEQ ID NO: 2262 - DNA, 225 bp, unidentified
  misc_feature 1..225: note = bacterial strain Ascusb_1456 encodes 16S rRNA
  source 1..225: mol_type = genomic DNA
agagtttgatcatggctcaggatgaacgctagcggcaggcttaacacatgcaagtcgaggggtaacagggagtagcaatactctgctgacgaccggcgcacgggtgcgtaacgcgtatgcaacctacctgtaacagggggataacggagagaaatttccactaataccccatattgttattctttcgcatgttaggataacgaaagcttcggtggttacggatgg

SEQ ID NO: 2263 - DNA, 225 bp, unidentified
  misc_feature 1..225: note = bacterial strain Ascusb_440 encodes 16S rRNA
  source 1..225: mol_type = genomic DNA
agagtttgatcatggctcaggacgaacgctggcggcgtgcctaacacatgcaagtcgaacgaagcatatttctcagagattcgtcgaagagggatatgacttagtggcggacgggtgagtaatgcgtgagcaacctgcccttcggagggggacaacagttggaaacgactgctaataccgcatgatgtgtctgggaggcatctcccggataccaaagattttatc

SEQ ID NO: 2264 - DNA, 225 bp, unidentified
  misc_feature 1..225: note = bacterial strain Ascusb_676 encodes 16S rRNA
  source 1..225: mol_type = genomic DNA
agagtttgatcatggctcaggacgaacgctggcggcatgcctaacacatgcaagtcgaacggagtttaagaagcttgctttttaaacttagtggcggacgggtgagtaacgcgtgagcaacctgcctctcagtggggaataatgtactgaaaaggacactaataccgcataaagtaccggagtcgcatggcactggtaccaaagatttatcgctgagagatgggc

SEQ ID NO: 2265 - DNA, 225 bp, unidentified
  misc_feature 1..225: note = bacterial strain Ascusb_3154 encodes 16S rRNA
  source 1..225: mol_type = genomic DNA
agagtttgatcctggctcaggatgaacgctagctacaggcttaacacatgcaagtcgaggggcagcgagaagaaagcttgctttctttgtcggcgaccggcgcacgggtgagtaacgcgtatccaaccttccccatagtagggcatagcccgtagaaatgcggattaataccctatgttttccaaagatggcatcagacatggaataaaggtttaccgctatggg

SEQ ID NO: 2266 - DNA, 225 bp, unidentified
  misc_feature 1..225: note = bacterial strain Ascusb_21 encodes 16S rRNA
  source 1..225: mol_type = genomic DNA
agagtttgatcctggctcaggatgaacgctagctacaggcttaacacatgcaagtcgaggggtaacgacagcgaaagcttgcttttgctgggcgacgaccggcgcacgggtgagtaacgcgtatccaacctgcccataactaagggataatccgtagaaatgcggtctaataccttatgtgttccgacgaggacatctgaattggaataaagatttatcggttat

SEQ ID NO: 2267 - DNA, 225 bp, unidentified
  misc_feature 1..225: note = bacterial strain Ascusb_1513 encodes 16S rRNA
  source 1..225: mol_type = genomic DNA
agagtttgatcctggctcaggatgaacgctggcggcgtgcctaacacatgcaagtcgaacgaagcacttttaccggagattcgtcgaaggtgaatttgacttagtggcggacgggtgagtaatgtatgagcaacctgcctttcagtgggggacaacagttggaaacgactgctaataccgcataacgtatcgagggggcatccccatgataccaaaggagcaatt

SEQ ID NO: 2268 - DNA, 225 bp, unidentified
  misc_feature 1..225: note = bacterial strain Ascusb_12328 encodes 16S rRNA
  source 1..225: mol_type = genomic DNA
agagtttgatcatggctcaggatgaacgctggcggcgtgcctaacacatgcaagtcgaacgaagcatatctgacggagattcgtcgaagttgggtatgacttagtggcggacgggtgagtaatgtatgagcaacctgcctttcagagggggacaacagttggaaacgactgctaataccgcataatgtatttgggtggcatcacttggataccaaaggagcaatc

SEQ ID NO: 2269 - DNA, 225 bp, unidentified
  misc_feature 1..225: note = bacterial strain Ascusb_4926 encodes 16S rRNA
  source 1..225: mol_type = genomic DNA
agagtttgatcctggctcagaacgaacgctggcggcgcgtcttaagcatgcaagtcgagcggtaagttagtagcttgctactagcctagagcggcggactggtgagtaacgcgtgggtgacgtacctttgtgacggggacagctcctagaaataggagataataccggatacgctgcatgttgtcagaggacatgcaggaaaggatcttttgattcgcacagaga

SEQ ID NO: 2270 - DNA, 225 bp, unidentified
  misc_feature 1..225: note = bacterial strain Ascusb_688 encodes 16S rRNA
  source 1..225: mol_type = genomic DNA
agagtttgatcatggctcaggatgaacgctagctacaggcttaacacatgcaagtcgaggggcagcaggaagatgtgcttgcacaactttgctggcgaccggcgcacgggtgagtaacgcgtatccaaccttccctatagtagagaatagcccggcgaaagtcggattaatgctctatgttttccattgatggcatcagatttggaacaaaggttttccgctata

SEQ ID NO: 2271 - DNA, 225 bp, unidentified
  misc_feature 1..225: note = bacterial strain Ascusb_1475 encodes 16S rRNA
  source 1..225: mol_type = genomic DNA
agagtttgatcatggctcaggatgaacgctggcggcgtgcctaacacatgcaagtcgaacgaagcgtcccgcccgaagagaaggagtgcttgcacaaatttaattcaattggggcgacttagtggcggacgggtgagtaacgcgtgggtaacctgccttatacagggggataacagttagaaatgactgctaataccgcataagcgcacagaatcgcatgataca

SEQ ID NO: 2272 - DNA, 225 bp, unidentified
  misc_feature 1..225: note = bacterial strain Ascusb_8248 encodes 16S rRNA
  source 1..225: mol_type = genomic DNA
agagtttgatcatggctcaggatgaacgctagcgacaggcctaacacatgcaagtcgaggggcagcacgaaggaagcttgctttctttggtggcgaccggcgcacgggtgcgtaacaggtgtgcaatctgtccatagtcggggaatagcccagcgaaagttggattaatgctccatgtgaatcgagaccgcatgattttgatttgaaacgcaaggactatgggtg

SEQ ID NO: 2273 - DNA, 225 bp, unidentified
  misc_feature 1..225: note = bacterial strain Ascusb_2970 encodes 16S rRNA
  source 1..225: mol_type = genomic DNA
agagtttgatcatggctcagaacgaacgctggcggcgcgtcttaagcatgcaagtcgagcgggaaatggtagcttgctaccattgagagcggcggactggtgagtaacgcgtgggtgacgtaccctccggacggggatagctcctagaaataggagataataccggatacggtgtcatgtgtcagaggcatgacaggaaagcagcctttgctgcgccggaggagc

SEQ ID NO: 2274 - DNA, 225 bp, unidentified
  misc_feature 1..225: note = bacterial strain Ascusb_3390 encodes 16S rRNA
  source 1..225: mol_type = genomic DNA
agagtttgatcatggctcaggataaacgctggcggcgcacataagacatgcaagtcgaacggaagtcgttgtaatgatgttgacatgaacggagaacttgttcaaagagagtgaagattgacttacaacaatggctttagtggcggactggtgagtaatgtataagtaacctgcctatcagaggggaacaacagttggaaacgactgctaataccgcatatgcca

SEQ ID NO: 2275 - DNA, 225 bp, unidentified
  misc_feature 1..225: note = bacterial strain Ascusb_4175 encodes 16S rRNA
  source 1..225: mol_type = genomic DNA
agagtttgatcctggctcaggacgaacgctggcggcgtgcttaacacatgcaagtcgagcggggataagctgaatgagagcttcggcaggattatggtttattccagcggcggacgggtgagtaacgcgtgaacaatctgtcccagacagggggataacacttggaaacaggtgctaataccgcataagaccacggcatcgcatggtgcaggggtaaaaggagcg

SEQ ID NO: 2276 - DNA, 225 bp, unidentified
  misc_feature 1..225: note = bacterial strain Ascusb_1268 encodes 16S rRNA
  source 1..225: mol_type = genomic DNA
agagtttgatcatggctcagaacgaacgctggcggcgcgtcttaagcatgcaagtcgagcggtaagattggtgcttgcactaatcctagagcggcggactggtgagtaacgcgtgggtgacgtacctctgtgacggggacagctcctagaaataggagataataccggatacgctgtgtgctgtcagagggcacacaggaaaggatcttttgattcgcacagaga

SEQ ID NO: 2277 - DNA, 225 bp, unidentified
  misc_feature 1..225: note = bacterial strain Ascusb_1748 encodes 16S rRNA
  source 1..225: mol_type = genomic DNA
agagtttgatcatggctcaggatgaacgctggcggcgtgcctaacacatgcaagtcgaacgaagcatggggatcggagattcgtcgaagggaaccatgacttagtggcggacgggtgagtaatgtatgagcaacctgcctttcagagggggacaacagttggaaacgactgctaataccgcataatgtacggagatggcatcatttttgtaccaaaggagcaatc

SEQ ID NO: 2278 - DNA, 225 bp, unidentified
  misc_feature 1..225: note = bacterial strain Ascusb_1711 encodes 16S rRNA
  source 1..225: mol_type = genomic DNA
agagtttgatcatggctcagaacgaacgctggcggcgcgtcttaagcatgcaagtcgagcggtaagttgtagcttgctacaacctagagcggcggactggtgagtaacgcgtgggtgacgtacccttttgacggggatagctcctagaaataggaggtaataccggataagctggcttgtgtcagaggcaagtcaggaaaggttcttttgaaccgcagaaggaac

SEQ ID NO: 2279 - DNA, 225 bp, unidentified
  misc_feature 1..225: note = bacterial strain Ascusb_1942 encodes 16S rRNA
  source 1..225: mol_type = genomic DNA
agagtttgatcatggctcaggacgaacgctggcggcgtgcctaacacatgcaagtcgaacggactgattcgcttcggtgatgaaagttagtggcggacgggtgagtaacgcgtgagtaacctgcctttcagagggggataacgtttggaaacgaacgctaataccgcataacatatatttgtcgcatggcagatatatcaaaggagcaatccgctgaaagatgga

SEQ ID NO: 2280 - DNA, 225 bp, unidentified
  misc_feature 1..225: note = bacterial strain Ascusb_1614 encodes 16S rRNA
  source 1..225: mol_type = genomic DNA
agagtttgatcatggctcaggatgaacgctagcggcaggcttaacacatgcaagtcgaggggtaacgcggggtagcaatactctggcgacgaccggcgcacgggtgcgtaacgcgtatgcaacctacctgtaacagggggataacggagggaaacttccactaataccccatattgtcattgattcgcatgtttcgatgacgaaagcttcggtggttacggatgg

SEQ ID NO: 2281 - DNA, 225 bp, unidentified
  misc_feature 1..225: note = bacterial strain Ascusb_116 encodes 16S rRNA
  source 1..225: mol_type = genomic DNA
agagtttgatcatggctcagattgaacgctggcggcaggcctaatacatgcaagtcgaacggtaacatggaagtagcaatacttttgatgacgagtggcggacgggtgagtaatatttgggaatctacctatcagagggggatagcaactggaaacggttgataagaccgcgtacgctctgaggaggaaagtaatgggatcgaaagaccattagctgatagatga

SEQ ID NO: 2282 - DNA, 225 bp, unidentified
  misc_feature 1..225: note = bacterial strain Ascusb_1690 encodes 16S rRNA
  source 1..225: mol_type = genomic DNA
agagtttgatcatggctcaggatgaacgctagcggcaggcttaacacatgcaagtcgaggggcagcgggttgtagcaatacgatgccggcgaccggcgaaagggtgagtaacgcgtgagcaacgtgccttcatcagggggatagtcgatggaaacgtcgtgtaataccccgtaacactgtttatcgcatggtaggcagttgaaagatttattggatggagatcgg

SEQ ID NO: 2283 - DNA, 225 bp, unidentified
  misc_feature 1..225: note = bacterial strain Ascusb_494 encodes 16S rRNA
  source 1..225: mol_type = genomic DNA
agagtttgatcatggctcaggatgaacgctagctacaggcttaacacatgcaagtcgtggggcagcatgaaggaagcttgcttcctttgatggcgaccggcgcacgggtgagtaacgcgtatccaacctgcctgatactcgggtatagcccagtgaaaactggattaacccccgatgtggtcctttgcagacatctaattaggattaaagtttacggtatcggat

SEQ ID NO: 2284 - DNA, 225 bp, unidentified
  misc_feature 1..225: note = bacterial strain Ascusb_1959 encodes 16S rRNA
  source 1..225: mol_type = genomic DNA
agagtttgatcatggctcaggacgaacgctggcggcgtgcctaacacatgcaagtcgaacggacgaggggagcttgctccctgagttagtggcgaacgggtgagtaacgcgtgagcaacctgcctttcagagggggacaacggttggaaacgaccgctaataccgcatgaaacattctgaccgcatgattggaatgtcaaagattttatcgctgaaagatgggct

SEQ ID NO: 2285 - DNA, 225 bp, unidentified
  misc_feature 1..225: note = bacterial strain Ascusb_778 encodes 16S rRNA
  source 1..225: mol_type = genomic DNA
agagtttgatcatggctcaggatgaacgctggcggcgtgcctaacacatgcaagtcgaacggaactgattttgaagattccttcgggatgattcagttttagtttagtggcggacgggtgagtaacgcgtgagtaacctgcccttgagagggggataacgttctgaaaaggacgctaataccgcataacattacggaatcgcatggttcagtaatcaaaactccg

SEQ ID NO: 2286 - DNA, 225 bp, unidentified
  misc_feature 1..225: note = bacterial strain Ascusb_418 encodes 16S rRNA
  source 1..225: mol_type = genomic DNA
agagtttgatcatggctcaggataaacgctggcggcgcacataagacatgcaagtcgaacgaacttaatcttttagtttactattagaagcggttagtggcggactggtgagtaacgcgtaagcaatctgcctatcagaggggaacaacagtgagaaatcactgctaataccgcatatgctgtgagtacggcatcgtacaaacaggaaaggagcaatccgctgat

SEQ ID NO: 2287 - DNA, 225 bp, unidentified
  misc_feature 1..225: note = bacterial strain Ascusb_482 encodes 16S rRNA
  source 1..225: mol_type = genomic DNA
agagtttgatcatggctcaggacgaacgctggcggcgtgcctaacacatgcaagtcgaacggagttgttttgaatgaagttttcggatggattttaaaataacttagtggcggacgggtgagtaacgcgtgagtaacctgccgataagagggggataacgtcttgaaaaggacgctaataccgcatgacgtattgaagccgcatgactttaataccaaaggagca

SEQ ID NO: 2288 - DNA, 225 bp, unidentified
  misc_feature 1..225: note = bacterial strain Ascusb_1511 encodes 16S rRNA
  source 1..225: mol_type = genomic DNA
agagtttgatcatggctcagaacgaacgctggcggcgcgtcttaagcatgcaagtcgaacggcaagattggtgcttgcaccgatcctagagtggcggactggtgagtaacgcgtgggtgatttaccctgaagatggggatagccgatagaaatatcggataataccgaatacgcttggtgaggttagagtgcatcaaggaaaggagcttcggctccgcttcagga

SEQ ID NO: 2289 - DNA, 225 bp, unidentified
  misc_feature 1..225: note = bacterial strain Ascusb_2723 encodes 16S rRNA
  source 1..225: mol_type = genomic DNA
agagtttgatcatggctcaggatgaacgctagcggcaggcttaacacatgcaagtcgaggggcagcgcgaggtagcaatactttggcggcgaccggcgaaagggtgcgtaacgcgtgagcaacttgcccgtatctgggacataagcggtggaaacgccgtctaatttcccataacaacagaggccgcatgacatctgtttgaaagatccgtcggatacggatggg

SEQ ID NO: 2290 - DNA, 225 bp, unidentified
  misc_feature 1..225: note = bacterial strain Ascusb_3918 encodes 16S rRNA
  source 1..225: mol_type = genomic DNA
agagtttgatcctggctcaggacgaacgctggcggcgtgcttaacacatgcaagtcgaacggagttatattggatgagagcttcggcaggattgcgatataacttagtggcggacgggtgagtaacgcgtgagcaacctgtcccagacagggggataacacttggaaacaggtgctaataccgcataagaccacggcatcacatggtgcaggggtaaaaggtgta

SEQ ID NO: 2291 - DNA, 225 bp, unidentified
  misc_feature 1..225: note = bacterial strain Ascusb_841 encodes 16S rRNA
  source 1..225: mol_type = genomic DNA
agagtttgatcatggctcaggacgaacgctggcggcacgcttaacacatgcaagtcgaacggagttttggagcttgctccaaaacttagtggcggacgggtgagtaacacgtgagcaacctacctctgagagcggaatagcttctggaaacggatggtaataccgcatgacattgtgaagccgcatgactttacaatcaaatgaatttcgctcagagatgggctc

SEQ ID NO: 2292 - DNA, 225 bp, unidentified
  misc_feature 1..225: note = bacterial strain Ascusb_1024 encodes 16S rRNA
  source 1..225: mol_type = genomic DNA
agagtttgatcatggctcaggattaacgctggcggcgtgcctaatacatgcaagtcgaatggtagcaataccatggcgaacgggtgagtaacacgtaggtaacctgtccttaagacgaggataaccattggaaacgatggataatactggataggagtggttgaggcatcttgatcactttaaagatttatcacttgaggaggggcctgcggcgcattagctaga

SEQ ID NO: 2293 - DNA, 225 bp, unidentified
  misc_feature 1..225: note = bacterial strain Ascusb_1212 encodes 16S rRNA
  source 1..225: mol_type = genomic DNA
agagtttgatcatggctcaggatgaacgctagcggcaggcttaacacatgcaagtcgaggggcagcggggagtagcaatactctgccggcgaccggcggaagggtgcgtaacgcgtgagcaacttgcccgtatccgggacataagcggtggaaacgccgtctaatttcccataacaacgaggatcgcatggtccatgtttgaaagacacgtcggatacggatggg

SEQ ID NO: 2294 - DNA, 225 bp, unidentified
  misc_feature 1..225: note = bacterial strain Ascusb_1558 encodes 16S rRNA
  source 1..225: mol_type = genomic DNA
agagtttgatcatggctcaggatgaacgctggcggcgtgcctaacacatgcaagtcgaacgaagcacctcgcccgatgaagaggagagcttgctcaaatcggaatcaattgaggtgacttagtggcggacgggtgagtaacgcgtgggtaacctgccgtatacagggggataacagttagaaatgactgctaataccgcataagcgcacggtatcgcatgataca

SEQ ID NO: 2295 - DNA, 225 bp, unidentified
  misc_feature 1..225: note = bacterial strain Ascusb_206 encodes 16S rRNA
  source 1..225: mol_type = genomic DNA
agagtttgatcatggctcaggatgaacgctggcggcgtgcttaacacatgcaagtcgaacggagttttgatgtgagcgagaggtagcttgctattaatcaatcttttcaaaacttagtggcggacgggtgagtaacgcgtgggtaacctgccctgtacagggggataacagttggaaacgactgctaacaccgcataacatcgcgagggcgcatgaccttgcgat

SEQ ID NO: 2296 - DNA, 225 bp, unidentified
  misc_feature 1..225: note = bacterial strain Ascusb_2341 encodes 16S rRNA
  source 1..225: mol_type = genomic DNA
agagtttgatcatggctcaggatgaacgctagctacaggcttaacacatgcaagtcgaggggcatcgggaagttagcttgctaactttgccggcgaccggcgcacgggtgagtaacgcgtatccaaccttccccttagtagggcatagcccggcgaaagtcggattaataccctatgttcttcgtcgaggacatctgaagtgaagcaaagacttgtcgctaaggg

SEQ ID NO: 2297 - DNA, 225 bp, unidentified
  misc_feature 1..225: note = bacterial strain Ascusb_649 encodes 16S rRNA
  source 1..225: mol_type = genomic DNA
agagtttgatcatggctcaggacgaacgctggcggcgtgcttaacacatgcaagtcgaacgaggttagattgagagcttgctcttgagataaccgagtggcggacgggtgagtaacgcgtgagcaacctgtctcacacagggggataacgcatcgaaaggtgtgctaataccgcataagaccacagggggacatcctccaggggtcaaaggagcaatccggtgtg

SEQ ID NO: 2298 - DNA, 225 bp, unidentified
  misc_feature 1..225: note = bacterial strain Ascusb_1931 encodes 16S rRNA
  source 1..225: mol_type = genomic DNA
agagtttgatcatggctcagaacgaacgctggcggcgcgtcttaagcatgcaagtcgagcggtaagatagtagcttgctattatcctagagcggcggactggtgagtaacgcgtgggtgacgtaccctttggacggggatagcctgtggaaacacagggtaataccggatacggtcgcatatgtcagaggtatgcgaggaaaggttcttttgaaccgccgaagga

SEQ ID NO: 2299 - DNA, 225 bp, unidentified
  misc_feature 1..225: note = bacterial strain Ascusb_964 encodes 16S rRNA
  source 1..225: mol_type = genomic DNA
agagtttgatcatggctcaggatgaacgctggcggcgtgcctaacacatgcaagtcgaacgaagcatacggactggagattcgtcgaaggactgtatgacttagtggcggacgggtgagtaatgtatgagcaacctgcctttcagagggggacaacagttggaaacgactgctaataccgcgtaacgtatcgtgagggcatcctcgtgataccaaaggagcaatc

SEQ ID NO: 2300 - DNA, 225 bp, unidentified
  misc_feature 1..225: note = bacterial strain Ascusb_419 encodes 16S rRNA
  source 1..225: mol_type = genomic DNA
agagtttgatcctggctcagaataaacgctggcggcgtgcctaacacatgcaagtcgaacggatgaagggagcaatccccgattcagtggcggacgggttagtaacgcgtgaggaacctgcctttcagagggggatagcagttggaaacgactgataataccgcataagaccacagcgccgcatgacgcaggggtcaaaggagcaatccgctgaaagatggactc

SEQ ID NO: 2301 - DNA, 225 bp, unidentified
  misc_feature 1..225: note = bacterial strain Ascusb_2947 encodes 16S rRNA
  source 1..225: mol_type = genomic DNA
agagtttgatcctggctcaggatgaacgctggcggcgtgcctaacacatgcaagtcgaacggaactgcgataatatgaactcttcggagggacttgttcgtagtttagtggcggacgggtgagtaacgcgtgagtaacctgcccttgagagggggataacgttctgaaaagaacgctaataccgcataatattatcgagtcgcatggcttgataatcaaaactcc

SEQ ID NO: 2302 - DNA, 225 bp, unidentified
  misc_feature 1..225: note = bacterial strain Ascusb_2594 encodes 16S rRNA
  source 1..225: mol_type = genomic DNA
agagtttgatcatggctcagaacgaacgctggcggcgcgtcttaagcatgcaagtcgaatggcaagataagagcttgctcttatcctagaatggcggactggtgagtaacgcgtgggtgacgtaccctttagacggggatagctcctagaaataggagataataccggataagctccacattgttagagggtgtggaggaaaggttcttttgaaccgctgaagga

SEQ ID NO: 2303 - DNA, 225 bp, unidentified
  misc_feature 1..225: note = bacterial strain Ascusb_821 encodes 16S rRNA
  source 1..225: mol_type = genomic DNA
agagtttgatcatggctcaggacgaacgctggcggcgtgcctaatacatgcaagtcgaacggagttagagacttcggtttttaacttagtggcgaacgggtgagtaacgcgtgagcaacctgactcaaagagggggacaacagctggaaacggctgctaataccgcataagaccacagggaggcatcttctaggggtcaaagaaattcgctttgagaggggctcg

SEQ ID NO: 2304 - DNA, 225 bp, unidentified
  misc_feature 1..225: note = bacterial strain Ascusb_533 encodes 16S rRNA
  source 1..225: mol_type = genomic DNA
agagtttgatcatggctcaggatgaacgctggcggcgtgcctaacacatgcaagtcgaacggaaagctaccgcttcggagacttcggtcaatgtttggtagtttttagtggcggacgggtgagtaacgcgtggataacctgccatatacagggggataacagttagaaatgactgctaataccgcataagcgcacggaaacgcatgtttcagtgtgaaaaactcc

SEQ ID NO: 2305 - DNA, 225 bp, unidentified
  misc_feature 1..225: note = bacterial strain Ascusb_447 encodes 16S rRNA
  source 1..225: mol_type = genomic DNA
agagtttgatcatggctcaggacgaacgctggcggcgtgcctaacacatgcaagtcgaacggagttatgtcacgaagttcttcggagcggacgacatagcttagtggcggacgggtgagtaacgcgtgagcaacctgcctttcagagggggacaacggttggaaacgaccgctaataccgcatgaaatgactggaccgcatgatccggtcatcaaagattttatc

SEQ ID NO: 2306 - DNA, 225 bp, unidentified
  misc_feature 1..225: note = bacterial strain Ascusb_412 encodes 16S rRNA
  source 1..225: mol_type = genomic DNA
agagtttgatcatggctcaggatgaacgctggcggcgtgcttaacacatgcaagtcgaacgaagctctttgaactgaggattcgtctgaagtgatgagaagacttagtggcggacgggtgagtaacgcgtgggtaacctgccgtatgcagggggacaacagttggaaacgactgctaataccgcataagcgcacggtattgcatgatacagtgtgaaaagattta

SEQ ID NO: 2307 - DNA, 225 bp, unidentified
  misc_feature 1..225: note = bacterial strain Ascusb_1588 encodes 16S rRNA
  source 1..225: mol_type = genomic DNA
agagtttgatcatggctcaggatgaacgctagcggcaggcttaacacatgcaagtcgaggggcagcgcgaggtagcaataccttggcggcgaccggcgcacgggtgcgtaacgcgtatgcaacctacccactacagggggataacggagggaaacttccactaatatcccatggtgtcaccgaatcgcatggtttggtgactaaagcttcggtggtagtggatgg

SEQ ID NO: 2308 - DNA, 225 bp, unidentified
  misc_feature 1..225: note = bacterial strain Ascusb_14763 encodes 16S rRNA
  source 1..225: mol_type = genomic DNA
agagtttgatcctggctcaggatgaacgctagctacaggcttaacacatgcaagtcgaggggtaacgacagcgaaagcttgcttttgctgggcgacgaccggcgaatgggtgagtaacgcgtatccaacctgccgcaaagtagggcacagccttgcgaaagtaagattaatgccctatgtgctgtgatgatgacatcagaattgcagtaaaggttcaccgctttg

SEQ ID NO: 2309 - DNA, 225 bp, unidentified
  misc_feature 1..225: note = bacterial strain Ascusb_431 encodes 16S rRNA
  source 1..225: mol_type = genomic DNA
agagtttgatcctggctcaggacgaacgctggcggcgtgcctaacacatgcaagtcgaacggacgaggggagcttgctccccgagttagtggcgaacgggtgagtaacgcgtgagcaacctgcctttcagagggggacaacggttggaaacgaccgctaataccgcatgaagcaatcggaccgcatgatctgattgccaaagattttatcgctgaaagatgggct

SEQ ID NO: 2310 - DNA, 225 bp, unidentified
  misc_feature 1..225: note = bacterial strain Ascusb_3884 encodes 16S rRNA
  source 1..225: mol_type = genomic DNA
agagtttgatcatggctcaggacgaacgctggcggcgtgcttaacacatgcaagtcgaacgaagcagcagtgaaggaggcttcggccaatggatctgttgacttagtggcggacgggtgagtaacgcgtgagcaacctgcctttcagagggggataacgtttggaaacgaacgctaataccgcatgaagtatttccgctgcatgacggagataccaaaggagcaa

SEQ ID NO: 2311 - DNA, 225 bp, unidentified
  misc_feature 1..225: note = bacterial strain Ascusb_3342 encodes 16S rRNA
  source 1..225: mol_type = genomic DNA
agagtttgatcatggctcaggacgaacgctggcggcgtgcctaacacatgcaagtcgagcggggacatgagacggaggatgaagatttcggttggagttcgaagacttatgttctagcggcggacgggtgagtaacgcgtgagcaacctgtcccttacagggggataacacagcgaaagttgtactaataccgcataagaccacgacggggcatcccggaggggt

SEQ ID NO: 2312 - DNA, 225 bp, unidentified
  misc_feature 1..225: note = bacterial strain Ascusb_1566 encodes 16S rRNA
  source 1..225: mol_type = genomic DNA
agagtttgatcatggctcaggatgaacgctggcggcgtgcctaacacatgcaagtcgaacgaagcacttctgaacagagattcgtcgaagtttggatttgacttagtggcggacgggtgagtaatgtatgagcaacctgcctttcggagggggacaacagttggaaacgactgctaataccgcataatgtatcgagggggcatccccatgataccaaaggagcaa

SEQ ID NO: 2313 - DNA, 225 bp, unidentified
  misc_feature 1..225: note = bacterial strain Ascusb_2255 encodes 16S rRNA
  source 1..225: mol_type = genomic DNA
agagtttgatcatggctcaggatgaacgctagctacaggcttaacacatgcaagtcgaggggcagcattatcgaagcttgctttgatagatggcgaccggcgcacgggtgagtaacgcgtatccaaccttcccatcactcagggatagcccgccgaaaggcgaattaatacctgatggtctccttcgcggacatctaacgaggagtaaagatttattggtgatgg

SEQ ID NO: 2314 - DNA, 225 bp, unidentified
  misc_feature 1..225: note = bacterial strain Ascusb_3855 encodes 16S rRNA
  source 1..225: mol_type = genomic DNA
agagtttgatcctggctcaggatgaacgctagctacaggcttaacacatgcaagtcgaggggcagcatggagattgcttgcaatttctgatggcgaccggcgcacgggtgagtaacgcgtatccaacctgcctgcaagtagggaatagcccggagaaattcggattaatgccctatgtggccctttgatgacatctgaagagggttaaagattaattgcttgcgg

SEQ ID NO: 2315 - DNA, 225 bp, unidentified
  misc_feature 1..225: note = bacterial strain Ascusb_2223 encodes 16S rRNA
  source 1..225: mol_type = genomic DNA
agagtttgatcatggctcaggatgaacgctggcggcgtgcataacacattcaagtcgaacgaagcgtatggaatgagatcttcggatcaagtgaaatacgacttagtggcggacgggtgagtaacgcgtgagcaaccttcctgcctgtgagggataacacagggaaacttgtgctaataccgcatgacgtatggagatcgcatggtcatcataccaaagatatat

SEQ ID NO: 2316 - DNA, 225 bp, unidentified
  misc_feature 1..225: note = bacterial strain Ascusb_721 encodes 16S rRNA
  source 1..225: mol_type = genomic DNA
agagtttgatcatggctcaggacgaacgctggcggcacgcctaacacatgcaagtcgaacggtgttgatttgagtttacttagatcaacatagtggcggacgggtgagtaacacgtgagcaacctgccttttggcgagggatagcttctggaaacggatggtaatacctcataatatagctgagtcgcatggcttggttatcaaagaatttcgccaaaagatggg

SEQ ID NO: 2317 - DNA, 225 bp, unidentified
  misc_feature 1..225: note = bacterial strain Ascusb_459 encodes 16S rRNA
  source 1..225: mol_type = genomic DNA
agagtttgatcatggctcaggatgaacgctggcggcgtgcataacacattcaagtcgaacggtgaagtaccttcgggtgcggatcagtggcggacgggtgagtaacgcgtgagcaacctgccctggattgagggataacacagggaaacttgtgctaatacctcatgacgtatacttatcgcatgttaggtataccaaagatttattgatacaggatgggctcgc

SEQ ID NO: 2318 - DNA, 225 bp, unidentified
  misc_feature 1..225: note = bacterial strain Ascusb_1882 encodes 16S rRNA
  source 1..225: mol_type = genomic DNA
agagtttgatcatggctcaggatgaacgctggcggcgtgcctaatacatgcaagtcgaacgagggtacttgtacccgagtggcgaacgggtgagtaacacgtaggtaacctgccttttagtttgggatacccagaggaaactttggctaataccggatatgaatttgagaggcatctctcgaatttgaaaggagcgtttgctccgctttaagatggacctgcggc

SEQ ID NO: 2319 - DNA, 225 bp, unidentified
  misc_feature 1..225: note = bacterial strain Ascusb_731 encodes 16S rRNA
  source 1..225: mol_type = genomic DNA
agagtttgatcatggctcaggacgaacgctggcggcacgcctaacacatgcaagtcgaacggtgtcaattgagcttgcttaattgacatagtggcggacgggtgagtaacacgtgagcaacctgcctttcagagagggatagcttccggaaacggatggtaatacctcatgacatagatgagccgcatgacttatctatcaaagatttatcactgagagatgggc

SEQ ID NO: 2320 - DNA, 225 bp, unidentified
  misc_feature 1..225: note = bacterial strain Ascusb_2179 encodes 16S rRNA
  source 1..225: mol_type = genomic DNA
agagtttgatcctggctcaggataaacgctggcggcgcacataagacatgcaagtcgaacggaagccgttataaaaaagattgaagatttatctgattgaagttttataacaatgactttagtggcggactggtgagtaatacatgagcaacctgcctattagaggggaacaacagttagaaatgactgctaataccgcatatgccatatgaatcacatggttca

SEQ ID NO: 2321 - DNA, 225 bp, unidentified
  misc_feature 1..225: note = bacterial strain Ascusb_991 encodes 16S rRNA
  source 1..225: mol_type = genomic DNA
agagtttgatcatggctcaggatgaacgctagcggcaggcttaacacatgcaagtcgaggggcagcgggggtagcaatacccgccggcgaccggcgaaagggtgcgtaacgcgtgagcaacctgcccgcatccggggcataagcggtggaaacgccgtctaatttcccataacaacgagggccgcatgacccacgtttgaaagatccgtcggatgcggatgggct

SEQ ID NO: 2322 - DNA, 225 bp, unidentified
  misc_feature 1..225: note = bacterial strain Ascusb_6352 encodes 16S rRNA
  source 1..225: mol_type = genomic DNA
agagtttgatcctggctcaggatgaacgctggcggcatgcctaagacatgcaagtcgaacgaggtgccccattgaagatgaagtgcttgcactgatttggatttggatcagcacctagtggcggacgggtgagtaacacgtgggtgatctacccttaagactggaatacctattggaaacgatagttaataccggataacacattaattcgttttaatgttgaaa

SEQ ID NO: 2323 - DNA, 225 bp, unidentified
  misc_feature 1..225: note = bacterial strain Ascusb_1017 encodes 16S rRNA
  source 1..225: mol_type = genomic DNA
agagtttgatcatggctcaggatgaacgctggcggcgtgcttaacacatgcaagtcgaacgggaattacttttaagcttgcttagttgtaattctagtggcggacgggtgagtaacgcgtgggtaacctgccttataccgggggacaacagttggaaacgactgctaataccgcataagcgcacagacaggcatctgtcagtgtgaaaaactccggtggtataag

SEQ ID NO: 2324 - DNA, 225 bp, unidentified
  misc_feature 1..225: note = bacterial strain Ascusb_871 encodes 16S rRNA
  source 1..225: mol_type = genomic DNA
agagtttgatcatggctcaggacgaacgctggcggcacgcttaacacatgcaagtcgaacgaacggagatagcttgctatcgaagttagtggcggacgggtgagtaacacgtgagcaatctgcctttaagtggggaataacggctggaaacgaccggtaataccgcataaaatacaggaaccgcatgatttttgtatcaaagatttatcgcttaaagatgagctc

SEQ ID NO: 2325 - DNA, 225 bp, unidentified
  misc_feature 1..225: note = bacterial strain Ascusb_3112 encodes 16S rRNA
  source 1..225: mol_type = genomic DNA
agagtttgatcatggctcaggataaacgctggcggcgcacataagacatgcaagtcgaacggaagtcgttgtaatgatgtggaaatgaacggagaacttgttcaaagagagtggaaattgacttacaacaatggctttagtggcggactggtgagtaatgtataagtaacctgcctatcagaggggaacaacagttagaaatgactgctaataccgcatatgcca

SEQ ID NO: 2326 - DNA, 225 bp, unidentified
  misc_feature 1..225: note = bacterial strain Ascusb_1912 encodes 16S rRNA
  source 1..225: mol_type = genomic DNA
agagtttgatcatggctcaggatgaacgctggcggcgtgcctaacacatgcaagtcgaacgaagcgtcccgcccgaagatgaggagtgcttgcacaaatctgattcaattgggatgacttagtggcggacgggtgagtaacgcgtgggtaacctgccttatacagggggataacagttagaaatgactgctaataccgcataagcgcacagtatcgcatgataca

SEQ ID NO: 2327 - DNA, 225 bp, unidentified
  misc_feature 1..225: note = bacterial strain Ascusb_19080 encodes 16S rRNA
  source 1..225: mol_type = genomic DNA
agagtttgatcctggctcaggatgaacgctagctacaggcttaacacatgcaagtcgaggggcagcatgatcaaagcttgctttggttgatggcgaccggcgcacgggtgagtaacgcgtatccaaccttccccttagtagggcatagcccgtagaaatgcggattaataccctatgttgttcgtagaggacatctgaaatgaaccaaaggtttaccgctaaggg

SEQ ID NO: 2328 - DNA, 225 bp, unidentified
  misc_feature 1..225: note = bacterial strain Ascusb_1091 encodes 16S rRNA
  source 1..225: mol_type = genomic DNA
agagtttgatcctggctcaggatgaacgctagctacaggcttaacacatgcaagtcgaggggcagcatgatcaaagcttgctttgattgatggcgaccggcgcacgggtgagtaacgcgtatccaaccttccccttagtagggcatagcccggcgaaagtcggattaataccctatgttattcgtcgaggacatctgaagtgaatcaaagatttatcgctaaggg

SEQ ID NO: 2329 - DNA, 225 bp, unidentified
  misc_feature 1..225: note = bacterial strain Ascusb_2923 encodes 16S rRNA
  source 1..225: mol_type = genomic DNA
agagtttgatcatggctcaggatgaacgctagcggcaggcttaacacatgcaagtcgaggggcagcgcgggagtagcaatacttctggcggcgaccggcgcaagggtgcgtaacgcgtgagcaacatacccgtcacagggggataagcgatggaaacgtcgtctaataccgcataaaacttagggcggcatcgtccggagttgaaacttacgagggtgacggatt

SEQ ID NO: 2330 - DNA, 225 bp, unidentified
  misc_feature 1..225: note = bacterial strain Ascusb_9969 encodes 16S rRNA
  source 1..225: mol_type = genomic DNA
agagtttgatcctggctcaggacgaacgctggcggcatgcctaacacatgcaagtcgaacggagttttggagcttgctccaaaacttagtggcggacgggtgagtaacgcgtgagtaacctgcctttcagtggggaataatattctgaaaagagtactaataccgcataacatacagaagtcgcatggcttttgtatcaaagatttatcgctgaaagatggactc

SEQ ID NO: 2331 - DNA, 225 bp, unidentified
  misc_feature 1..225: note = bacterial strain Ascusb_3082 encodes 16S rRNA
  source 1..225: mol_type = genomic DNA
agagtttgatcatggctcaggatgaacgctggcggcgtgcctaacacatgcaagtcgaacgaagcttgagaaatgatttcttcggaatgaattttgatatgacttagtggcggacgggtgagtaacacgtgagcaacctgcctttcagagggggataacggctggaaacggtcgctaataccgcatgatgtatcgaaatggcatcattttgataccaaaggagca

SEQ ID NO: 2332 - DNA, 225 bp, unidentified
  misc_feature 1..225: note = bacterial strain Ascusb_6001 encodes 16S rRNA
  source 1..225: mol_type = genomic DNA
agagtttgatcatggctcaggacgaacgctggcggcgtgcttaacacatgcaagtcgaacgaagcgacagtgaaggaggcttcggccaatggatctgttgacttagtggcggacgggtgagtaacgcgtgagcaacctgcctttcagagggggataacgtttggaaacgaacgctaataccgcatgacgtatctttgctgcatgacagagataccaaaggagcaa

SEQ ID NO: 2333 - DNA, 225 bp, unidentified
  misc_feature 1..225: note = bacterial strain Ascusb_5462 encodes 16S rRNA
  source 1..225: mol_type = genomic DNA
agagtttgatcatggctcagaacgaacgctggcggcgcgtcttaagcatgcaagtcgaatggcaagatcggtgcttgcactgatcctagaatggcggactggtgagtaacgcgtgggtgacgtaccttttggatggggatagctcctggaaacaggagataataccgaatacgctgcatgggaacagaggccatgcaggaaagtatcttttgatacgccgaaaga

SEQ ID NO: 2334 - DNA, 225 bp, unidentified
  misc_feature 1..225: note = bacterial strain Ascusb_2725 encodes 16S rRNA
  source 1..225: mol_type = genomic DNA
agagtttgatcatggctcaggattaacgctggcggcatgcctaatacatgcaagtcgaatggaagagcttgcttttccatggcgaacgggtgagtaacacgtaggtaacctaccttaaggacgaggataacctttggaaacgaaggataatactggataggacatcacaaaacacatgtttagatgtttaaaggagcaatccaccataagaggggcctgcggcgc

SEQ ID NO: 2335 - DNA, 225 bp, unidentified
  misc_feature 1..225: note = bacterial strain Ascusb_3509 encodes 16S rRNA
  source 1..225: mol_type = genomic DNA
agagtttgatcatggctcaggataaacgctggcggcgtgcttaacacatgcaagtcgaacggagtatttctcccgagaccgaggaagcttgcttccgaagaatcatttgaaatacttagtggcggacgggtgagtaacgcgtgggtaacctgcctcacactgggggatagcagttggaaacgactgataataccgcataagcgcacaataccgcatggtatggtg

SEQ ID NO: 2336 - DNA, 225 bp, unidentified
  misc_feature 1..225: note = bacterial strain Ascusb_2285 encodes 16S rRNA
  source 1..225: mol_type = genomic DNA
agagtttgatcatggctcagaacgaacgctggcggcgcgtcttaagcatgcaagtcgagcggtaagttggaagcttgcttctaacctagagcggcggactggtgagtaacgcgtgggtgacgtacccttgtgacggggacagctggtagaaatatcagataataccggatacgctgagtgttgtcagaggacactcaggaaaggaacttttgttccgcacaagga

SEQ ID NO: 2337 - DNA, 225 bp, unidentified
  misc_feature 1..225: note = bacterial strain Ascusb_3560 encodes 16S rRNA
  source 1..225: mol_type = genomic DNA
agagtttgatcctggctcaggatgaacgctagctacaggcttaacacatgcaagtcgaggggcagcattgagatagcttgctatttcagatggcgaccggcgcacgggtgagtaacgcgtatccaaccttccccttagtagaggatagcccggcgaaagtcggattaatactctatgttgtattttgaggacatctgacgaataccaaagattcatcgctaaggg

SEQ ID NO: 2338 - DNA, 225 bp, unidentified
  misc_feature 1..225: note = bacterial strain Ascusb_1545 encodes 16S rRNA
  source 1..225: mol_type = genomic DNA
agagtttgatcatggctcaggacgaacgctggcggcgtgcctaacacatgcaagtcgaacggagttatgttacgaagctcttcggaacggacgacatagcttagtggcggacgggtgagtaacgcgtgagcaacctgcctttcagagggggacaacggttggaaacgaccgctaataccgcatgaaatgatcggaccgcatgatctggtcatcaaagatttatcg

SEQ ID NO: 2339 - DNA, 225 bp, unidentified
  misc_feature 1..225: note = bacterial strain Ascusb_804 encodes 16S rRNA
  source 1..225: mol_type = genomic DNA
agagtttgatcatggctcaggatgaacgctagcgacaggcctaacacatgcaagtcgaggggcagcgcgggagaagcttgcttttcctggcggcgaccggcgcacgggtgcgtaacaggtgtgcaatctgtccatagtcgggggatagcccagcgaaagctgaattaatactccatgtgaatcgaagccgcatgactttgatttgaaacgcgaggactatgggtg

SEQ ID NO: 2340 - DNA, 225 bp, unidentified
  misc_feature 1..225: note = bacterial strain Ascusb_3019 encodes 16S rRNA
  source 1..225: mol_type = genomic DNA
agagtttgatcctggctcagaacgaacgctggcggcgcgtcttaagcatgcaagtcgagcggcaagatatcttcgggtatcctagagcggcggactggtgagtaacacgtagatgacgcacccttctgacggggatagcctgtggaaacacagggtaataccggataagcccgtggggattggaagcttacggggaaaggaactattgttccgcgggaggagcgg

SEQ ID NO: 2341 - DNA, 225 bp, unidentified
  misc_feature 1..225: note = bacterial strain Ascusb_3810 encodes 16S rRNA
  source 1..225: mol_type = genomic DNA
agagtttgatcctggctcaggatgaacgctggcggcgtgcctaatacatgcaagtcgaacgagaagtcttcggacttcgagtggcgaacgggtgagtaacacgtattcaatctgccctaacgactgggataccctcgggaaaccttggctaataccggataggaattttgatcgcatgatcgaaattttaaaggatcttttgattcacgataggatgagaatgcg

SEQ ID NO: 2342 - DNA, 225 bp, unidentified
  misc_feature 1..225: note = bacterial strain Ascusb_2301 encodes 16S rRNA
  source 1..225: mol_type = genomic DNA
agagtttgatcctggctcaggatgaacgctagcggcaggcttaacacatgcaagtcgaggggcagcggggcccagcaatgggctgccggcgaccggcgcacgggtgcgtaacgcgtatgcaacctgcccgcgacagggggataaccggtggaaacgccgactaataccccgtaatgcactaagtcgcatggcttggtgctgaaagcttcggtggtcgcggatggg

SEQ ID NO: 2343 - DNA, 225 bp, unidentified
  misc_feature 1..225: note = bacterial strain Ascusb_3477 encodes 16S rRNA
  source 1..225: mol_type = genomic DNA
agagtttgatcatggctcaggatgaacgctagcggcaggcttaacacatgcaagtcgcggggcagcgcggggtagcaatactctggcggcgaccggcggaagggtgcgtaacgcgtgagcaacttgcccgcatcagggggataagcgttggaaacgacgtctaataccccgtaacaacggtgaccgcatgattaccgtttgaaagctccggcggatgcggatggg

SEQ ID NO: 2344 - DNA, 225 bp, unidentified
  misc_feature 1..225: note = bacterial strain Ascusb_1601 encodes 16S rRNA
  source 1..225: mol_type = genomic DNA
agagtttgatcctggctcaggatgaacgctggcggcatgcctaacacatgcaagtcgaacggagctattacggaagcttgcttttgttttagcttagtggcggacgggtgagtaacgcgtgagaaacctgcccttgagtggggaataacaccgagaaatcggtgctaataccgcataatgtcacgggatcgcatgttcttgtgaccaaaggatttattcgcttaa

SEQ ID NO: 2345 - DNA, 225 bp, unidentified
  misc_feature 1..225: note = bacterial strain Ascusb_14943 encodes 16S rRNA
  source 1..225: mol_type = genomic DNA
agagtttgatcatggctcaggatgaacgctagctacaggcttaacacatgcaagtcgaggggaaacggcattttagcttgctaagatggacgtcgaccggcgaatgggtgagtaacgcgtatccaaccttccgttaagtagggaatagccttgcgaaagtaagattaatgccctatgtggtgttttgaggacatctgaagatcaccaaaggtttaccgcttaacg

SEQ ID NO: 2346 - DNA, 225 bp, unidentified; identical to SEQ ID NO: 2345
  misc_feature 1..225: note = bacterial strain Ascusb_1125 encodes 16S rRNA
  source 1..225: mol_type = genomic DNA

SEQ ID NO: 2347 - DNA, 225 bp, unidentified
  misc_feature 1..225: note = bacterial strain Ascusb_3123 encodes 16S rRNA
  source 1..225: mol_type = genomic DNA
agagtttgatcatggctcaggatgaacgctggcggcatgcctaagacatgcaagtcgaacgaggtgtcccattgaagatgaagtgcttgcacagatttggatttggattcacacctagtggcgaacgggtgagtaacacatgggtgacctacctttaagactgggatacctattggaaacgatagttaataccggataacacgtatattcgtttatacgttgaaa

SEQ ID NO: 2348 - DNA, 225 bp, unidentified
  misc_feature 1..225: note = bacterial strain Ascusb_2531 encodes 16S rRNA
  source 1..225: mol_type = genomic DNA
agagtttgatcctggctcaggatgaacgctagcggcaggcttaacacatgcaagtcgaggggcagcgcgaggtagcaatactttggcggcgaccggcggaagggtgcgtaacgcgtgagcaacatgcccgtcacagggggataatccatggaaacgtggtctaacaccgcatagattatagaggtgacatcaccattataagaaattcgcaagaaggtgacggat

SEQ ID NO: 2349 - DNA, 225 bp, unidentified
  misc_feature 1..225: note = bacterial strain Ascusb_1147 encodes 16S rRNA
  source 1..225: mol_type = genomic DNA
agagtttgatcatggctcaggatgaacgctagcgacaggcctaacacatgcaagtcgaggggcagcgcgggaggagcttgcttttcctggcggcgaccggcgcacgggtgcgtaacaggtgtgcaatctgtcctataccggggcatagcccagcgaaagttgaattaattccccatgtgtcatgaagccgcatgactttatgatgaaacgttagggtatagggtg

SEQ ID NO: 2350 - DNA, 225 bp, unidentified
  misc_feature 1..225: note = bacterial strain Ascusb_1273 encodes 16S rRNA
  source 1..225: mol_type = genomic DNA
agagtttgatcatggctcaggatgaacgctagcgacaggcctaacacatgcaagtcgaggggcagcgcggaaatagtttactagttctggcggcgaccggcgcacgggtgcgtaacaggtgtgcaatctgtcctataccggggcatagcccagcgaaagttggattaaatccccatgtgaagtgaagccgcatgactttgctttgaaacgttagggtatagggtg

SEQ ID NO: 2351 - DNA, 225 bp, unidentified
  misc_feature 1..225: note = bacterial strain Ascusb_68 encodes 16S rRNA
  source 1..225: mol_type = genomic DNA
agagtttgatcatggctcaggatgaacgctagctacaggcttaacacatgcaagtcgagcggaacttcttcggaagtttagcggcagacgggtgagtaacacgtatccaacctttcccttactcgggtatagcctcgggaaactgagagtaatccccgatgaagtgtacgataagcattttttgcacaccaaagatttatcggtaaggggtggggatgcgttcca

SEQ ID NO: 2352 - DNA, 225 bp, unidentified
  misc_feature 1..225: note = bacterial strain Ascusb_1016 encodes 16S rRNA
  source 1..225: mol_type = genomic DNA
agagtttgatcctggctcaggacgaacgctggcggcatgcctaacacatgcaagtcgaacggagttggaaggagcttgctcttttcaacttagtggcggacgggtgagtaacgcgtgagcaacctgcctttcagtggggaataatgttttgaaaagaacactaataccgcataatgtattgaaaccgcatgattttgataccaaaggatttattcgctgagagat

SEQ ID NO: 2353 - DNA, 225 bp, unidentified
  misc_feature 1..225: note = bacterial strain Ascusb_4839 encodes 16S rRNA
  source 1..225: mol_type = genomic DNA
agagtttgatcatggctcaggatgaacgctagctacaggcttaacacatgcaagtcgcggggcatcatggtgtgtagcaatacacactgatggcgaccggcggatgggtgagtaacgcgtatccaacctggccctatctcgggcacagcccctcgaaagagggattaattcccgatgttcccacgagttcgcatgttcttgtgggcaaaggcctttgccggatag

SEQ ID NO: 2354 - DNA, 225 bp, unidentified
  misc_feature 1..225: note = bacterial strain Ascusb_1979 encodes 16S rRNA
  source 1..225: mol_type = genomic DNA
agagtttgatcatggctcaggacgaacgctggcggcgtgcttaacacatgcaagtcgaacgaagcagcagtgaaggaggcttcggccaatggaactgttgacttagtggcggacgggtgagtaacgcgtgagcaacctgcctttcagagggggataacgtttggaaacgaacgctaataccgcatgaagtatctttgctgcatgacagagataccaaaggagcaa

SEQ ID NO: 2355 - DNA, 225 bp, unidentified
  misc_feature 1..225: note = bacterial strain Ascusb_2685 encodes 16S rRNA
  source 1..225: mol_type = genomic DNA
agagtttgatcatggctcaggatgaacgctggcggcgtgcttaacacatgcaagtcgaacggaactggttttgaagatttccttcgggaatgattcgttactagtttagtggcggacgggtgagtaacgcgtgagtaacctgcccttgagagggggataacgttctgaaaagaacgctaataccgcataacattatcgagtcgcatgacttgataatcaaaactc

SEQ ID NO: 2356 - DNA, 225 bp, unidentified
  misc_feature 1..225: note = bacterial strain Ascusb_1448 encodes 16S rRNA
  source 1..225: mol_type = genomic DNA
agagtttgatcatggctcaggacgaacgctggcggcgtgcctaacacatgcaagtcgaacgaagcattttcctcggagattcgtcgaagagggacttgacttagtggcggacgggtgagtaatacatgagcaacctgccctgaggagggggacaacagttggaaacgactgctaataccgcatgatgtatccgggaggcatcttctggataccaaagatttatcg

SEQ ID NO: 2357 - DNA, 225 bp, unidentified
  misc_feature 1..225: note = bacterial strain Ascusb_133 encodes 16S rRNA
  source 1..225: mol_type = genomic DNA
agagtttgatcatggctcaggacgaacgctggcggcatgcctaacacatgcaagtcgaacggagcttaagaagcttgctttttaagcttagtggcggacgggtgagtaacgcgtgagcaacctgcctttcagtggggaataatactctgaaaagggtactaataccgcataatgtacagagatcgcatggtttatgtaccaaagatttatcgctgagagatgggc

SEQ ID NO: 2358 - DNA, 225 bp, unidentified
  misc_feature 1..225: note = bacterial strain Ascusb_1800 encodes 16S rRNA
  source 1..225: mol_type = genomic DNA
agagtttgatcatggctcaggatgaacgctagctacaggcttaacacatgcaagtcgaggggcagcatgaacttagcttgctaagtttgatggcgaccggcgcacgggtgagtaacgcgtatccaacctaccccttagtagggcatagcccgtagaaatgcggattaataccctatgttttccggagacggcatcagaactggaacaaagattgatcgctaaggg

SEQ ID NO: 2359 - DNA, 225 bp, unidentified
  misc_feature 1..225: note = bacterial strain Ascusb_1726 encodes 16S rRNA
  source 1..225: mol_type = genomic DNA
agagtttgatcatggctcaggatgaacgctggcggcgtgcctaatacatgcaagtcgaacgagggtgcttgcaccctagtggcgaacgggtgagtaacacgtaggtaacctgccctttagtttgggatacccagaggaaactttggctaataccggatatgaattcgagaggcatctcttgaatttgaaaggagcgtttgctccgctttaggatggacctgcggc

SEQ ID NO: 2360 - DNA, 225 bp, unidentified
  misc_feature 1..225: note = bacterial strain Ascusb_317 encodes 16S rRNA
  source 1..225: mol_type = genomic DNA
agagtttgatcatggctcaggatgaacgctggcggcgtgcctaacacatgcaagtcgaacgaagcacattccttcggggatgtgactgagtggcggacgggtgagtaacgcgtgggtaacctgccctgtacagggggacaacagctagaaatggctgctaataccgcataagcgcacgagggggcatcctcttgtgtgaaaaactatcggtggtacaggatgggc

SEQ ID NO: 2361 - DNA, 225 bp, unidentified; identical to SEQ ID NO: 2281
  misc_feature 1..225: note = bacterial strain Ascusb_439 encodes 16S rRNA
  source 1..225: mol_type = genomic DNA

SEQ ID NO: 2362 - DNA, 225 bp, unidentified
  misc_feature 1..225: note = bacterial strain Ascusb_985 encodes 16S rRNA
  source 1..225: mol_type = genomic DNA
agagtttgatcatggctcaggacgaacgctggcggcgtgcttaacacatgcaagtcgaacgaggttataggagagcttgctcgaatataaccgagtggcggacgggtgagtaacgcgtgagcaacctgtctcacacaggggaataacgcatcgaaagatgtgctaataccgcataggaccacgataggacatcctattgaggtgaaaggagcaatccggtgtgag

SEQ ID NO: 2363 - DNA, 225 bp, unidentified
  misc_feature 1..225: note = bacterial strain Ascusb_2679 encodes 16S rRNA
  source 1..225: mol_type = genomic DNA
agagtttgatcatggctcaggatgaacgctagcggcaggcctaacacatgcaagtcgaggggcagcggggtgtagcaatacaccgccggcgaccggcgcacgggtgcgtaacgcgtatgcaacctgcccgcgacagggggataacgctgtgaaagcggcactaataccccgtaacacccggggccgcatggccttgggttgaaaggagagatccggtcgcggatg

SEQ ID NO: 2364 - DNA, 225 bp, unidentified
  misc_feature 1..225: note = bacterial strain Ascusb_6088 encodes 16S rRNA
  source 1..225: mol_type = genomic DNA
agagtttgatcatggctcaggatgaacgctagctacaggcttaacacatgcaagtcgcggggcagcgaggggttagcttgctaaccctgtcggcgaccggcgcacgggtgagtaacgcgtatccaaccttccccctagtagggcatagcccggcgaaagtcggattaataccctatgttgtatattgaggacatctgatttataccaaagattgatcgctagggg

SEQ ID NO: 2365 - DNA, 225 bp, unidentified
  misc_feature 1..225: note = bacterial strain Ascusb_245 encodes 16S rRNA
  source 1..225: mol_type = genomic DNA
agagtttgatcatggctcagattgaacgctggcggcaggcctaatacatgcaagtcgaacggtaacatggaagtagcaatacttttgatgacgagtggcggacgggtgagtaatgtttgggaatctacctatcagagggggatagcaactggaaacggttgataaaaccgcgtaagctctgaggaggaaagtaatgggatcgcaagaccattagctgatagatga

SEQ ID NO: 2366 - DNA, 225 bp, unidentified
  misc_feature 1..225: note = bacterial strain Ascusb_360 encodes 16S rRNA
  source 1..225: mol_type = genomic DNA
agagtttgatcatggctcaggacgaacgctggcggcacgcttaacacatgcaagtcgaacggagttagcccttcgggactaacttagtggcggacgggtgagtaacacgtgagcaacctgccttcgagagtggaataatggccggaaacagccactaataccgcataacacagcgagaccgcatgatcttgctgtcaaagatttatcgctcgaagatgggctcgc

SEQ ID NO: 2367 - DNA, 225 bp, unidentified
  misc_feature 1..225: note = bacterial strain Ascusb_184 encodes 16S rRNA
  source 1..225: mol_type = genomic DNA
agagtttgatcatggctcaggatgaacgctggcggcgtgcctaacacatgcaagtcgaacggtgatgatttgaaattttcggatggattttcatcatagtggcggacgggtgagtaacgcgtggataacctgcctcgtactggggaatagcagctggaaacggctggtaataccgcataagcgcacgatgccgcatggcactgtgtgaaaagatttatcggtacg

SEQ ID NO: 2368 - DNA, 225 bp, unidentified
  misc_feature 1..225: note = bacterial strain Ascusb_334 encodes 16S rRNA
  source 1..225: mol_type = genomic DNA
agagtttgatcatggctcaggacgaacgctggcggcacgcttaacacatgcaagtcgaacgagcgaaagagtgcttgcactctctagctagtggcggacgggtgagtaacacgtgagcaatctgcctttcggagagggataccatttggaaacgaatgttaatacctcataacataacgaagccgcatgactttgttatcaaacgaatttcgccgaaagatgagc

SEQ ID NO: 2369 - DNA, 225 bp, unidentified
  misc_feature 1..225: note = bacterial strain Ascusb_1745 encodes 16S rRNA
  source 1..225: mol_type = genomic DNA
agagtttgatcatggctcaggatgaacgctagcggcaggcctaacacatgcaagtcgaggggcagcggggtgtagcaatacactgccggcgaccggcgcacgggtgcgtaacgcgtatgcaacctgcccgcgacagggggataaccggtggaaacgccgactaataccccgtaacgcactgtctcgcatgggatggtgctgaaagcctccgggtggtcgcggatg

SEQ ID NO: 2370 - DNA, 225 bp, unidentified
  misc_feature 1..225: note = bacterial strain Ascusb_2047 encodes 16S rRNA
  source 1..225: mol_type = genomic DNA
agagtttgatcatggctcaggataaacgctggcggcgcacataagacatgcaagtcgaacgaacttaatactttagtttactatagtaagcggttagtggcggactggtgagtaatgcataagcaacctgcctataagagtggaataacagtgagaaatcactgctaataccacataagctgtgagtatggcatcatacaaacagaaaacggagcaatccgctta

SEQ ID NO: 2371 - DNA, 225 bp, unidentified; identical to SEQ ID NO: 2345
  misc_feature 1..225: note = bacterial strain Ascusb_19281 encodes 16S rRNA
  source 1..225: mol_type = genomic DNA

SEQ ID NO: 2372 - DNA, 225 bp, unidentified
  misc_feature 1..225: note = bacterial strain Ascusb_1261 encodes 16S rRNA
  source 1..225: mol_type = genomic DNA
agagtttgatcatggctcaggatgaacgctggcggcgtgcttaacacatgcaagtcgaacggacttattggaattaatacttcggtaagcgttttaataagttagtggcggacgggtgagtaacgcgtgggtaacctgccttacaccgggggataacagttggaaacgactgctaataccgcataagaccacggtaccgcatggtactggggtaaaagttccggc

SEQ ID NO: 2373 - DNA, 225 bp, unidentified
  misc_feature 1..225: note = bacterial strain Ascusb_21056 encodes 16S rRNA
  source 1..225: mol_type = genomic DNA
agagtttgatcatggctcaggataaacgctggcggcgcacataagacatgcaagtcgaacggaagtcgttatattgattttgaagagaacggagaacttgttcaaagggacatgatgaagatttataacaatggctttagtggcggactggtgagtaatacgtaagcaacctgcctattagaggggaacaacagttagaaatgactgctaataccgcatatgcca

SEQ ID NO: 2374 - DNA, 225 bp, unidentified
  misc_feature 1..225: note = bacterial strain Ascusb_2052 encodes 16S rRNA
  source 1..225: mol_type = genomic DNA
agagtttgatcatggctcaggatgaacgctggcggcgtgcctaacacatgcaagtcgaacggaactgcatatgaagaattccttcgggaaggactcgcttgtagtttagtggcggacgggtgagtaacgcgtgagtaacctgcccttgagagggggataacgttctgaaaaggacgctaataccgcataacattattgagtcgcatggcttgataatcaaaactc

SEQ ID NO: 2375 - DNA, 225 bp, unidentified
  misc_feature 1..225: note = bacterial strain Ascusb_12390 encodes 16S rRNA
  source 1..225: mol_type = genomic DNA
agagtttgatcctggctcaggatgaacgctagctacaggcttaacacatgcaagtcgaggggcagcgaggagttagcttgctaactctgtcggcgaccggcgcacgggtgagtaacgcgtatccaaccttccccttagtagggcatagcccggcgaaagtcggattaataccctatgttgtcgtttgaagacatctgaagacgattaaagattcatcgctaaggg

SEQ ID NO: 2376 - DNA, 225 bp, unidentified
  misc_feature 1..225: note = bacterial strain Ascusb_1155 encodes 16S rRNA
  source 1..225: mol_type = genomic DNA
agagtttgatcctggctcaggacgaacgctggcggcgtgcctaacacatgcaagtcgaacggagttgcgtcacgaagttcttcggagcggacgacgcagcttagtggcggacgggtgagtaacgcgtgagcaacctgcctttcagagggggacaacggttggaaacgaccgctaataccgcatgaaatgactggaccgcatgatccggtcatcaaagattttatc

SEQ ID NO: 2377 - DNA, 225 bp, unidentified
  misc_feature 1..225: note = bacterial strain Ascusb_4485 encodes 16S rRNA
  source 1..225: mol_type = genomic DNA
agagtttgatcatggctcaggatgaacgctagctacaggcttaacacatgcaagtcgaggggcagcatgaaagtagcttgctacttttgatggcgaccggcgcacgggtgcgtaacacgtatccaatctacccatggctcagggatagcctttcgaaagaaagattaatacctgatggtttcatgagcccgcatggacttatgaataaagatttatcggcgatgg

SEQ ID NO: 2378 - DNA, 225 bp, unidentified
  misc_feature 1..225: note = bacterial strain Ascusb_773 encodes 16S rRNA
  source 1..225: mol_type = genomic DNA
agagtttgatcatggctcaggatgaacgctagcgacaggcctaacacatgcaagtcgaggggcagcacttcgggtggcgaccggcgcacgggtgagtaacgcgtatgtaacctgcccttgagtgggggatagcccatcgaaagatggattaataccgcataatgccgcggatgaacatttattagcggccaaagatttattgctcagggatggacatgcgtatga

SEQ ID NO: 2379 - DNA, 225 bp, unidentified
  misc_feature 1..225: note = bacterial strain Ascusb_1956 encodes 16S rRNA
  source 1..225: mol_type = genomic DNA
agagtttgatcatggctcaggatgaacgctggcggcgtgcttaacacatgcaagtcgaacggagttatgatgtgagcggaaagaagcttgctttggactaatcttttcataacttagtggcggacgggtgagtaacgcgtgggtaacctgccttatacagggggataacagtcggaaacgactgctaataccgcataagcgcacagtatcgcatgatacagtgtg

SEQ ID NO: 2380 - DNA, 225 bp, unidentified
  misc_feature 1..225: note = bacterial strain Ascusb_3924 encodes 16S rRNA
  source 1..225: mol_type = genomic DNA
agagtttgatcctggctcaggatgaacgctagctacaggcttaacacatgcaagtcgaggggcatcatggcgattgcttgcaattgtcgatggcgaccggcgcacgggtgagtaacgcgtatccaaccttccccttagtacgggatagcccggcgaaagtcggattaataccgtatgtattccgaagcaggcatctaatttggaataaagattcatcgctaaggg

SEQ ID NO: 2381 - DNA, 225 bp, unidentified
  misc_feature 1..225: note = bacterial strain Ascusb_2897 encodes 16S rRNA
  source 1..225: mol_type = genomic DNA
agagtttgatcatggctcaggatgaacgctagctacaggcttaacacatgcaagtcgaggggcagcattgggatagcttgctattccagatggcgaccggcgcacgggtgagtaacgcgtatccaaccttccccttagtagaggatagcccggcgaaagtcggattaatactctatgttgtgttttgaggacatctgacgaacaccaaaggttcaccgctaaggg

SEQ ID NO: 2382 - DNA, 225 bp, unidentified
  misc_feature 1..225: note = bacterial strain Ascusb_2786 encodes 16S rRNA
  source 1..225: mol_type = genomic DNA
agagtttgatcatggctcaggatgaacgctagcgacaggcctaacacatgcaagtcgaggggcagcgcgggagaagcttgcttttcctggcggcgaccggcgcacgggtgcgtaacaggtgtgcaatctgtccatagtcggggaatagcccagcgaaagttggattaaagctccatgtgagtgaacgccgcatgacgatcacttgaaacgtaaggactatgggtg

SEQ ID NO: 2383 - DNA, 225 bp, unidentified
  misc_feature 1..225: note = bacterial strain Ascusb_2500 encodes 16S rRNA
  source 1..225: mol_type = genomic DNA
agagtttgatcatggctcaggatgaacgctagcggcaggcttaacacatgcaagtcgaggggtaacgcgaggtagcaatactttggcgacgaccggcgcacgggtgcgtaacgcgtatgcaacctacctgtaacagggggataacggagagaaatttccactaataccccatattgtcattccttcgcatgttgggatgacgaaagcttcggtggttacggatgg

SEQ ID NO: 2384 - DNA, 225 bp, unidentified
  misc_feature 1..225: note = bacterial strain Ascusb_3345 encodes 16S rRNA
  source 1..225: mol_type = genomic DNA
agagtttgatcctggctcagaatgaacgttggcggcgtggattaggcatgcaagtcgagcggcaaggtttttattttcggatagggaccctagagcggcggaagggataggacaatatagatacgtgcctcttagctcaggatagcgtctggaaacgggcgataatactgaatgaggtctccggaccaaaggtgagattccgctaggagatcggtctatagccta

SEQ ID NO: 2385 - DNA, 225 bp, unidentified
  misc_feature 1..225: note = bacterial strain Ascusb_4146 encodes 16S rRNA
  source 1..225: mol_type = genomic DNA
agagtttgatcatggctcaggatgaacgctggcggcgtgcttaacacatgcaagtcgaacgaagcgtcccgcccgaagaagtggagtgcttgcacaaaacggactcaattgggatgacttagtggcggacgggtgagtaacgcgtgggtaacctgccttacacagggggacaacagttggaaacgactgctaataccgcataacccgctagtaccgcatggtaca

SEQ ID NO: 2386 - DNA, 225 bp, unidentified
  misc_feature 1..225: note = bacterial strain Ascusb_1772 encodes 16S rRNA
  source 1..225: mol_type = genomic DNA
agagtttgatcatggctcagaacgaacgctggcggcgcgtcttaagcatgcaagtcgagcgggattatccagcttgctggatatgagagcggcggactggtgagtaacgcgtgggtgacgtgcccttctgcccgggatagccggtagaaataccggataataccggatgagctccgcggcgctggaggccgcggaggaaaggagctattgttccgcggaaggagc

SEQ ID NO: 2387 - DNA, 225 bp, unidentified
  misc_feature 1..225: note = bacterial strain Ascusb_1666 encodes 16S rRNA
  source 1..225: mol_type = genomic DNA
agagtttgatcatggctcaggatgaacgctagcgacaggcctaacacatgcaagtcgaggggcagcgcgggagaagcttgcttttcctggcggcgaccggcgcacgggtgcgtaacaggtgtgcaatctgtcctataccggggcatagcccagcgaaagttggattaattctccatgtgaagcgataccgcatgatattgctttgaaacgtaagggtatagggtg

SEQ ID NO: 2388 - DNA, 225 bp, unidentified
  misc_feature 1..225: note = bacterial strain Ascusb_2481 encodes 16S rRNA
  source 1..225: mol_type = genomic DNA
agagtttgatcatggctcaggatgaacgctggcggcgtgcttaacacatgcaagtcgaacgaggctgcatggctgaagttttcggatggaagccgtgctgaccgagtggcggacgggtgagtaacgcgtggggaacctgccccattccgggggataccagctggaaacggctgttaataccgcataagcgcacgtgaaggcatcttcgtgtgtgaaaaactgagg

SEQ ID NO: 2389 - DNA, 225 bp, unidentified
  misc_feature 1..225: note = bacterial strain Ascusb_218 encodes 16S rRNA
  source 1..225: mol_type = genomic DNA
agagtttgatcatggctcaggatgaacgctggcggcgtgcctaatacatgcaagtcgaacgggtgtagcaatacatcagtggcgaacgggtgagtaacacgttggtgacctgccccaaagatgggaatatcacctggaaacgggtggcaaaaccgaataagcttagctcagtcagagaaggctaagtaaaagcgtaagctactttgggaggggcctgcggcccat

SEQ ID NO: 2390 - DNA, 225 bp, unidentified
  misc_feature 1..225: note = bacterial strain Ascusb_987 encodes 16S rRNA
  source 1..225: mol_type = genomic DNA
agagtttgatcatggctcaggatgaacgctagcggcaggcttaacacatgcaagtcgaggggcagcgcggagtagcaatactctggcggcgaccggcggaagggtgcgtaacacgtgagcaacttgcccgtgacagggggataagcgatggaaacgtcgtctaacatcccgtaacacgaggggaggcatctcccttcgttgaaaactccggtggtcacggatggg

SEQ ID NO: 2391 - DNA, 225 bp, unidentified
  misc_feature 1..225: note = bacterial strain Ascusb_4429 encodes 16S rRNA
  source 1..225: mol_type = genomic DNA
agagtttgatcctggctcaggatgaacgctggcggcgtgcttaacacatgcaagtcgaacggagtgtagacgctgaagcgatttcggtcaattcttgtttacacttagtggcggacgggtgagtaacgcgtgggtaacctgccgtatgcagggggacaacagttggaaacgactgctaataccgcataagcgcacagataggcatctatcggtgtgaaaagattt

SEQ ID NO: 2392 - DNA, 225 bp, unidentified
  misc_feature 1..225: note = bacterial strain Ascusb_3951 encodes 16S rRNA
  source 1..225: mol_type = genomic DNA
agagtttgatcatggctcaggatgaacgctagctacaggcttaacacatgcaagtcgaggggcagcgagaggaaagcttgcttttcttgtcggcgaccggcgcacgggtgagtaacgcgtatccaacctggcccttagtaggggatagcccggcgaaagtcggattaataccctatgttgttcaatgaggacatctgagctgaactaaagatttatcgctaaggg

SEQ ID NO: 2393 - DNA, 225 bp, unidentified
  misc_feature 1..225: note = bacterial strain Ascusb_738 encodes 16S rRNA
  source 1..225: mol_type = genomic DNA
agagtttgatcctggctcaggatgaacgctggcggcgtgcttaacacatgcaagtcgaacgaagcgcttttaaatgatctttcgggtgattttaattgtgactgagtggcggacgggtgagtaacgcgtgggtaacctgccttatactgggggatagcagttggaaacgactgataataccgcataagcgcacagttccgcatggaacggtgtgaaaatctccgg

SEQ ID NO: 2394 - DNA, 225 bp, unidentified
  misc_feature 1..225: note = bacterial strain Ascusb_15705 encodes 16S rRNA
  source 1..225: mol_type = genomic DNA
agagtttgatcatggctcaggatgaacgctggcggcatgcctaagacatgcaagtcgaacgaagtggcccaatgaagaatgcgagcttgctcaaattcggatttggattcccacttagtggcgcaagggtgagtaacacgtgggtaatctaccttcgagtctggaataacagttagaaatgattgctaatgccggatgatattgagaacgatacttcattcttta

SEQ ID NO: 2395 - DNA, 225 bp, unidentified
  misc_feature 1..225: note = bacterial strain Ascusb_1682 encodes 16S rRNA
  source 1..225: mol_type = genomic DNA
agagtttgatcatggctcaggatgaacgctggcggcgtgcctaacacatgcaagtcgaacgaagcatattctgcagagattcgtcgaagcggggtatgacttagtggcggacgggtgagtaatgtatgagcaacctgcctttcagagggggacaacagttggaaacgactgctaataccgcgtaatgtacagaggaggcatcttctttgtaccaaaggagcaatc

SEQ ID NO: 2396 - DNA, 225 bp, unidentified
  misc_feature 1..225: note = bacterial strain Ascusb_2596 encodes 16S rRNA
  source 1..225: mol_type = genomic DNA
agagtttgatcatggctcaggatgaacgctagctacaggcttaacacatgcaagtcgaggggcatcggggagttagcttgctaactttgccggcgaccggcgcacgggtgagtaacgcgtatccaaccttccctatagtagaggatagcccggagaaattcggattaatactctatgttcttccatgcggacatctaattggaagcaaaggttcaccgctatagg

SEQ ID NO: 2397 - DNA, 225 bp, unidentified
  misc_feature 1..225: note = bacterial strain Ascusb_4164 encodes 16S rRNA
  source 1..225: mol_type = genomic DNA
agagtttgatcctggctcaggatgaacgctagctacaggcttaacacatgcaagtcgaggggcatcgagaaggaagcttgctttctttgtcggcgaccggcgcacgggtgagtaacgcgtatccaaccttccccttagtagggcatagcccggcgaaagtcggattaataccctatgttcttctttgacggcatctgattggaagcaaagatttatcgctaaggg

SEQ ID NO: 2398 - DNA, 225 bp, unidentified
  misc_feature 1..225: note = bacterial strain Ascusb_2361 encodes 16S rRNA
  source 1..225: mol_type = genomic DNA
agagtttgatcctggctcagaacgaacgctggcggcgcgtcttaagcatgcaagtcgagcggtaagatggaagcttgcttctatcctagagcggcggactggtgagtaacgcgtgggtgacgtacccttgtgacggggacagctggtagaaatatcagataataccggatacgctgtatgttgtcagaggacatacaggaaaggatcttttgattcgcacaagga

SEQ ID NO: 2399 - DNA, 225 bp, unidentified
  misc_feature 1..225: note = bacterial strain Ascusb_632 encodes 16S rRNA
  source 1..225: mol_type = genomic DNA
agagtttgatcatggctcagaacgaacgctggcggcgcgtcttaagcatgcaagtcgaatggcaagatagagcttgctctatcctagaatggcggactggtgagtaacgcgtgggtgacgtaccctttagatggggatagctgatagaaatatcagataataccgaataagctgcatggagttagagttcatgcaggaaaggatcttttgatccgctgaaggagc

SEQ ID NO: 2400 - DNA, 225 bp, unidentified
  misc_feature 1..225: note = bacterial strain Ascusb_8258 encodes 16S rRNA
  source 1..225: mol_type = genomic DNA
agagtttgatcatggctcaggatgaacgctagcggcaggcttaacacatgcaagtcgaggggcagcgggtccagcaatggatgccggcgaccggcgcaagggtgcgtaacgcgtgagcgacatgcccgtgaccgggggataaccgatggaaacgtcgcctaaccccccatacgataacatatcgcatggtatgttattgaaaaccgtggtggtcacggattggct

SEQ ID NO: 2401 - DNA, 225 bp, unidentified
  misc_feature 1..225: note = bacterial strain Ascusb_3782 encodes 16S rRNA
  source 1..225: mol_type = genomic DNA
agagtttgatcatggctcaggacgaacgctggcggcgtgcctaacacatgcaagtcgaacggagtgcaatttggagattcgtcgaagagctgcacttagtggcggacgggtgagtaatgcgtgagcaacctgcccttcagagggggacaacagttggaaacgactgctaataccgcatgatgtatccgggaggcatcttctggataccaaagattttatcgctga

SEQ ID NO: 2402 - DNA, 225 bp, unidentified
  misc_feature 1..225: note = bacterial strain Ascusb_493 encodes 16S rRNA
  source 1..225: mol_type = genomic DNA
agagtttgatcatggctcaggacgaacgctggcggcatgcctaacacatgcaagtcgaacggagcttaaagagcttgctttttaagcttagtggcggacgggtgagtaacgcgtgagtaacctgcctcttagtggggaataataccttgaaaagggtactaataccgcataatgtacagagaccgcatggtcattgtaccaaagatttatcgctgagagatggac

SEQ ID NO: 2403 - DNA, 225 bp, unidentified
  misc_feature 1..225: note = bacterial strain Ascusb_707 encodes 16S rRNA
  source 1..225: mol_type = genomic DNA
agagtttgatcatggctcaggacgaacgctggcggcgtgcctaacacatgcaagtcgaacggagatactcctaattgagatttcggttgagagagggaatatcttagtggcggacgggtgagtaacgcgtgagtaacctgcctataagagggggataacgttctgaaaaggacgctaataccgcataacatatatttttcgcatgaaaggtatatcaaaggagga

SEQ ID NO: 2404 - DNA, 225 bp, unidentified
  misc_feature 1..225: note = bacterial strain Ascusb_10267 encodes 16S rRNA
  source 1..225: mol_type = genomic DNA
agagtttgatcctggctcaggatgaacgctagcgacaggcctaacacatgcaagtcgaggggcagcgcgggagaagcttgcttttcctggcggcgaccggcgcacgggtgcgtaacaggtgtgcaatctgtccatagtcgggggatagcccagcgaaagctgaattaatactccatgtgaatcgaagccgcatgactttgatttgaaacgcgaggactatgggtg

SEQ ID NO: 2405 - DNA, 225 bp, unidentified
  misc_feature 1..225: note = bacterial strain Ascusb_6422 encodes 16S rRNA
  source 1..225: mol_type = genomic DNA
agagtttgatcatggctcaggatgaacgctagctacaggcttaacacatgcaagtcgcggggcagcatgaagtttgcttgcaaactttgatggcgaccggcgcacgggtgagtaacgcgtatccaacctgcccttcagtagggaatagcccggcgaaagtcggattaatgccctatgttcttcgttgatgacatctgatatgaagcaaaggcttgccgctgaggg

SEQ ID NO: 2406 - DNA, 225 bp, unidentified
  misc_feature 1..225: note = bacterial strain Ascusb_1967 encodes 16S rRNA
  source 1..225: mol_type = genomic DNA
agagtttgatcatggctcaggacgaacgctggcggcgtgcctaacacatgcaagtcgaacggacgagaggagcttgctcctcgagttagtggcgaacgggtgagtaacgcgtgagcaacctgcctttcagagggggacaacggttggaaacgaccgctaataccgcatgatgcattctgaccgcatgatcgggatgccaaagatttatcgctgaaagatgggctc

SEQ ID NO: 2407 - DNA, 225 bp, unidentified
  misc_feature 1..225: note = bacterial strain Ascusb_761 encodes 16S rRNA
  source 1..225: mol_type = genomic DNA
agagtttgatcatggctcaggataaacgctggcggcgcacataagacatgcaagtcgaacgaacttaatactttagtttactatagtaagcggttagtggcggactggtgagtaatgcataagcaacctgcctataagaagggaataacagtgagaaatcactgctaataccgtataagctgtgagtatggcatcatacaaacagaaaaaggagcaatccgctta

SEQ ID NO: 2408 - DNA, 225 bp, unidentified
  misc_feature 1..225: note = bacterial strain Ascusb_8881 encodes 16S rRNA
  source 1..225: mol_type = genomic DNA
agagtttgatcatggctcaggatgaacgctggcggcatgcctaagacatgcaagtcgaacgaagtggcccaatgaagagtgcgagcttgctcaaactcggatttggattaccacttagtggcgcaagggtgagtaacacgtgggtaatctaccttcgagtctggaataacagttagaaatgattgctaatgccggatgatatggggaacgacattcattctttat

SEQ ID NO: 2409 - DNA, 225 bp, unidentified
  misc_feature 1..225: note = bacterial strain Ascusb_13304 encodes 16S rRNA
  source 1..225: mol_type = genomic DNA
agagtttgatcatggctcaggatgaacgctggcggcatgcctaagacatgcaagtcgaacgaggtggcccattgaaggatgcgtgcttgcacaaatctggatttggattaccacctagtggcagacgggtgagtaacacgtgggtgacctacctttaagctggggataacagttggaaacgattgctaataccgaataatgtataactgtcaaggttatactgaa

SEQ ID NO: 2410 - DNA, 225 bp, unidentified
  misc_feature 1..225: note = bacterial strain Ascusb_6655 encodes 16S rRNA
  source 1..225: mol_type = genomic DNA
agagtttgatcctggctcaggataaacgctggcggcgcacataagacatgcaagtcgaacggaagtcgttatatttgattctgaatgaaagatttatccggaatgatgatgattttataacaatggctttagtggcggactggtgagtaacgcgtaagcaatctgcctattagaggggaataacagtgagaaatcattgctaataccgcatatgccatgagtatc

SEQ ID NO: 2411 - DNA, 225 bp, unidentified
  misc_feature 1..225: note = bacterial strain Ascusb_10412 encodes 16S rRNA
  source 1..225: mol_type = genomic DNA
agagtttgatcctggctcaggatgaacgctggcggcgtgcctaacacatgcaagtcgaacgaagcatatctgacggagattcgtcgaagccgggtatgacttagtggcggacgggtgagtaatgtatgagcaacctgcctttcagagggggacaacagttggaaacgactgctaataccgcataatgtatttgagtggcatcactcggataccaaaggagcaatc

SEQ ID NO: 2412 - DNA, 225 bp, unidentified
  misc_feature 1..225: note = bacterial strain Ascusb_2258 encodes 16S rRNA
  source 1..225: mol_type = genomic DNA
agagtttgatcatggctcaggatgaacgctagcgtaacgcttaacacatgcaagtcgaacgaattctgcgttgtagcaatacatagtagaattagtggcaaacgagcgagtaacacgtacttaacttgcccttaagatgagtataactatagagatatagctaatcctcaatatgctcacgatggtgaaattccgatgtgaggaaagatttatcgcttaaggaga

SEQ ID NO: 2413 - DNA, 225 bp, unidentified
  misc_feature 1..225: note = bacterial strain Ascusb_10132 encodes 16S rRNA
  source 1..225: mol_type = genomic DNA
agagtttgatcatggctcaggatgaacgctggcggcgtgcctaacacatgcaagtcgaacgaagcatacggaccggagattcgtcaaaggaccgtatgacttagtggcggacgggtgagtaatgtatgagcaacctgcctttcagagggggacaacagttggaaacgactgctaataccgcgtaacgtatcgagggggcatcctcatgataccaaaggagcaatc

SEQ ID NO: 2414 - DNA, 225 bp, unidentified
  misc_feature 1..225: note = bacterial strain Ascusb_10378 encodes 16S rRNA
  source 1..225: mol_type = genomic DNA
agagtttgatcatggctcaggataaacgctggcggcgcacataagacatgcaagtcgaacggaagtcgttatactgattttgataagaacggagaacttgttcaaagggacttgatgaagatttataacaatggctttagtggcggactggtgagtaatacgtaagcaacctgcctattagaggggaacaacagttagaaatgactgctaataccgcatatgcca

SEQ ID NO: 2415 - DNA, 225 bp, unidentified
  misc_feature 1..225: note = bacterial strain Ascusb_788 encodes 16S rRNA
  source 1..225: mol_type = genomic DNA
agagtttgatcatggctcaggatgaacgctggcggcgtgcttaacacatgcaagtcgaacgaagctctccgaattgagatttcggtcaagacgaggagatgacttagtggcggacgggtgagtaacgcgtgggtaacctgccgtatgcagggggacaacagttggaaacgactgctaataccgcataagcgcacggttctgcatggaacagtgtgaaaagattta

SEQ ID NO: 2416 - DNA, 225 bp, unidentified
  misc_feature 1..225: note = bacterial strain Ascusb_536 encodes 16S rRNA
  source 1..225: mol_type = genomic DNA
agagtttgatcatggctcaggatgaacgctggcggcgtgcttaacacatgcaagtcgaacggagtgtaaacgctgaagcgatttcggtcaattcttgtttatacttagtggcggacgggtgagtaacgcgtgggtaacctgccgtatgcagggggacaacagttggaaacgactgctaataccgcataagcgcacagtaccgcatggtacagtgtgaaaagatct

SEQ ID NO: 2417 - DNA, 225 bp, unidentified
  misc_feature 1..225: note = bacterial strain Ascusb_2715 encodes 16S rRNA
  source 1..225: mol_type = genomic DNA
agagtttgatcatggctcaggatgaacgctggcggcgtgcttaacacatgcaagtcgaacgaggtataccgtatgaagttttcggacagaatgtggtataccgagtggcggacgggtgagtaacgcgtgggtaacctgccccatacagggggacaacagatggaaacgtctgctaataccgcataagcgcacggtatggcatcatacagtgtgaaaagttccggc

SEQ ID NO: 2418 - DNA, 225 bp, unidentified
  misc_feature 1..225: note = bacterial strain Ascusb_1407 encodes 16S rRNA
  source 1..225: mol_type = genomic DNA
agagtttgatcatggctcaggacgaacgctggcggcgtgcctaacacatgcaagtcgaacgaagcacttccgatttgagattcgtcaagaattggatttgacttagtggcggacgggtgagtaatgcgtgagcaacctgcccttgagtgggggacaacagttggaaacgactgctaataccgcataacgtatccgggaggcatcttctggataccaaagatttat

SEQ ID NO: 2419 - DNA, 225 bp, unidentified
  misc_feature 1..225: note = bacterial strain Ascusb_6841 encodes 16S rRNA
  source 1..225: mol_type = genomic DNA
agagtttgatcctggctcaggatgaacgctggcggcgtgcttaacacatgcaagtcgaacggaactgcttttgaagatttccttcgggaatgaatcagttgtagtttagtggcggacgggtgagtaacgcgtgagtaacctgcccttgagagggggataacgttctgaaaaggacgctaataccgcataacattatcgagtcgcatggcttgataatcaaaactc

SEQ ID NO: 2420 - DNA, 225 bp, unidentified
  misc_feature 1..225: note = bacterial strain Ascusb_988 encodes 16S rRNA
  source 1..225: mol_type = genomic DNA
agagtttgatcatggctcaggatgaacgctggcggcgtgcttaacacatgcaagtcgaacgaagccaaaaggaagcttgctttctttgaagcttagtggcggacgggtgagtaacgcgtgaggaacctgcccttcagtggggaataacagccggaaacgactgctaataccgcataacgtcggagtgccgcatgacacaccgaccaaaggatttattcgctgaag

SEQ ID NO: 2421 - DNA, 225 bp, unidentified
  misc_feature 1..225: note = bacterial strain Ascusb_904 encodes 16S rRNA
  source 1..225: mol_type = genomic DNA
agagtttgatcatggctcaggacgaacgctggcggcgtgcctaacacatgcaagtcgaacggacgaggggagcttgctccccaagttagtggcggacgggtgagtaacacgtgagcaacctgcccttcggagggggacaacagcgggaaactgctgctaataccgcataacgtattctggaggcatctccgggataccaaagattttatcgccgaaggatgggct

SEQ ID NO: 2422 - DNA, 225 bp, unidentified
  misc_feature 1..225: note = bacterial strain Ascusb_2245 encodes 16S rRNA
  source 1..225: mol_type = genomic DNA
agagtttgatcatggctcaggacgaacgctggcggcgtgcttaacacatgcaagtcgaacgaggttattggagagcttgctcgaagataaccgagtggcggacgggtgagtaacgcgtgagcaacctgtctcacacaggggaataacgcatcgaaagatgtgctaataccgcgtaggaccacggcgtcgcatggcgctgaggtgaaaggagaaatccggtgtgag

SEQ ID NO: 2423 - DNA, 225 bp, unidentified
  misc_feature 1..225: note = bacterial strain Ascusb_3078 encodes 16S rRNA
  source 1..225: mol_type = genomic DNA
agagtttgatcatggctcaggacgaacgctggcggcgcgcctaacacatgcaagtcgaacggagcttggagagcttgcttttcaagcttagtggcggacgggtgagtaacacgtgagcaacctgcctttcagagggggacaacagttggaaacgactgctaataccgcataacatcatcggatggcatcatttgatgatcaaagatttatcgctgaaagatgggc

SEQ ID NO: 2424 - DNA, 225 bp, unidentified
  misc_feature 1..225: note = bacterial strain Ascusb_1040 encodes 16S rRNA
  source 1..225: mol_type = genomic DNA
agagtttgatcatggctcaggatgaacgctggcggcgtgcctaatacatgcaagtcgaacgagcgagatccagcttgctggatttagcgagtggcgaacgggtgagtaatacgtaagcaacctgcctacacggactgggataacacctggaaacgggcgctaataccggataggtaatgagaaggcatcttcttattattaaaggtttgaaacacaagtagatgg

SEQ ID NO: 2425 - DNA, 225 bp, unidentified
  misc_feature 1..225: note = bacterial strain Ascusb_4177 encodes 16S rRNA
  source 1..225: mol_type = genomic DNA
agagtttgatcatggctcaggatgaatgctggcggcgtgcctaatacatgcaagtcgaacggtaacagggtctcactgttctcttgacgctcttggcctattggtaagagttatagattcgagggaactgtgagattgctgacgagtggcggacggctgagtaacgcgtgggaacataccctaaactgagggataactagtcgaaagattagctaataccgcata

SEQ ID NO: 2426 - DNA, 225 bp, unidentified
  misc_feature 1..225: note = bacterial strain Ascusb_4947 encodes 16S rRNA
  source 1..225: mol_type = genomic DNA
agagtttgatcctggctcaggataaacgctggcggcgcacataagacatgcaagtcgaacggaagtcgttatattgattttgaagagaacggagaacttgttcaaagggacatgatgaagatttataacaatggctttagtggcggactggtgagtaatacgtaagcaacctgcctattagaggggaacaacagttagaaatgactgctaataccgcatatgcca

SEQ ID NO: 2427 - DNA, 225 bp, unidentified
  misc_feature 1..225: note = bacterial strain Ascusb_8556 encodes 16S rRNA
  source 1..225: mol_type = genomic DNA
agagtttgatcctggctcaggatgaacgctggcggcatgcctaagacatgcaagtcgtacgagaaggcccactgaaattaatcgaagttggagtgcttgcacaaagatggactttggtggatgtggattctccttcgagtggcaaacgggtgagtaacacgtgggttacctacctctaagacggggataccaattggaaacgattgttaataccggatgtgttct

SEQ ID NO: 2428 - DNA, 225 bp, unidentified
  misc_feature 1..225: note = bacterial strain Ascusb_1345 encodes 16S rRNA
  source 1..225: mol_type = genomic DNA
agagtttgatcatggctcagaacgaacgctggcggcgcgtcttaagcatgcaagtcgagcggtaagttatagcttgctataacctagagcggcggactggtgagtaacgcgtgggtgacgtacctttgtgacggggacagctcctagaaataggagataataccggatacgctgcatgttgtcagaggacatgcaggaaaggatcttttgattcgcacagagagc

SEQ ID NO: 2429 - DNA, 225 bp, unidentified
  misc_feature 1..225: note = bacterial strain Ascusb_2446 encodes 16S rRNA
  source 1..225: mol_type = genomic DNA
agagtttgatcatggctcaggatgaacgctagctacaggcttaacacatgcaagtcgaggggtaacaggaggaaagcttgcttttcttgctgacgaccggcgcacgggtgagtaacgcgtatccaaccttccccttagtagaggatagcccggcgaaagtcggattaatactctatgttcttcctggatggcatctgatgggaagcaaaggttcaccgctaaggg

SEQ ID NO: 2430 - DNA, 225 bp, unidentified
  misc_feature 1..225: note = bacterial strain Ascusb_1592 encodes 16S rRNA
  source 1..225: mol_type = genomic DNA
agagtttgatcatggctcaggacgaacgctggcggcgtgcctaacacatgcaagtcgagcggagacatattgcaaagaggaagttttcggatggaatcagagggatatgttttagcggcggacgggtgagtaacgcgtgagcaacctgtcccttacagagggataacacagcgaaagttgtactaataccgcataagaccacggaccggcatcggtttgaggtca

SEQ ID NO: 2431 - DNA, 225 bp, unidentified
  misc_feature 1..225: note = bacterial strain Ascusb_1752 encodes 16S rRNA
  source 1..225: mol_type = genomic DNA
agagtttgatcatggctcaggatgaacgctagctacaggcttaacacatgcaagtcgaggggcagcataacgaaagcttgcttttgttgatggcgaccggcgcacgggtgagtaacgcgtatccaaccttccccttagtagggcatagcccggcgaaagtcggattaataccctatgttcttcgtcgaggacatctgaaatggagcaaaggtttaccgctaaggg

SEQ ID NO: 2432 - DNA, 225 bp, unidentified
  misc_feature 1..225: note = bacterial strain Ascusb_454 encodes 16S rRNA
  source 1..225: mol_type = genomic DNA
agagtttgatcatggctcaggacgaacgctggcggcatgcctaacacatgcaagtcgaacgaagcttgagagcttgcttttaagcttagtggcggacgggtgagtaacgcgtgagcaacctgcctttcagtggggaataatactttgaaaagagtactaataccgcataacgtataatggtcgcatgactgatataccaaagatttatcgctgagagatgggctc

SEQ ID NO: 2433 - DNA, 225 bp, unidentified
  misc_feature 1..225: note = bacterial strain Ascusb_1224 encodes 16S rRNA
  source 1..225: mol_type = genomic DNA
agagtttgatcctggctcaggatgaacgctggcggcgtgcttaacacatgcaagtcgaacggagattactttttagcttgctaagttgtaatcttagtggcggacgggtgagtaacgcgtgggtaacctgccttatccagggggataacagtgagaaattactgctaataccgcataagcgcacagtttcgcatgaaacagtgtgaaaagatttatcgggataag

SEQ ID NO: 2434 - DNA, 225 bp, unidentified
  misc_feature 1..225: note = bacterial strain Ascusb_3957 encodes 16S rRNA
  source 1..225: mol_type = genomic DNA
agagtttgatcatggctcaggacaaacgctggcggcgtgcctaacacatgcaagtcgaacgaagcactgtggaaagagacttcggtcaattgaaactttgacttagtggcggacgggtgagtaatgcatgagcaacctgccctggagagggggacaacagctggaaacggctgctaataccgcatgatgtcactgggaggcatctcctggtgaccaaagatttat

SEQ ID NO: 2435 - DNA, 225 bp, unidentified
  misc_feature 1..225: note = bacterial strain Ascusb_9106 encodes 16S rRNA
  source 1..225: mol_type = genomic DNA
agagtttgatcctggctcaggacgaacgctggcggcgtgcttaacacatgcaagtcgaacgaggttatgtgaaggaagtcttcggatggaatttgtataaccgagtggcggacgggtgagtaacgcgtgaggaacctgtcttctacagggggataacggtccgaaaggattgctaataccgcataagaccacgaggccgcatggtcatgaggtcaaaggagaaat

SEQ ID NO: 2436 - DNA, 225 bp, unidentified
  misc_feature 1..225: note = bacterial strain Ascusb_2036 encodes 16S rRNA
  source 1..225: mol_type = genomic DNA
agagtttgatcctggctcaggatgaacgctggcggcacgcttaacacatgcaagtcgagcggaggcggagacttcggtttccaactcagcggcggacgggtgaggaacgcgtgggtaatctgccccataccgggggataactcagagaaatctgagctaaaaccgcataagcctacggagtcgcatggctctggaggaaaaactccggtggtatgggatgagccc

SEQ ID NO: 2437 - DNA, 225 bp, unidentified
  misc_feature 1..225: note = bacterial strain Ascusb_294 encodes 16S rRNA
  source 1..225: mol_type = genomic DNA
agagtttgatcatggctcaggatgaacgctggcggcgtgcctaatacatgcaagtcgaacgggtgcagcaatgtaccagtggcgaacgggtgagtaacacgttggtgacctgccccaaagatgggaatatcacctggaaacgggtggcaaaaccgaataagcttaccccttttagaaaagggtaagtaaaagcgaaagctactttgggaggggcctgcggcccat

SEQ ID NO: 2438 - DNA, 225 bp, unidentified
  misc_feature 1..225: note = bacterial strain Ascusb_3017 encodes 16S rRNA
  source 1..225: mol_type = genomic DNA
agagtttgatcatggctcaggacgaacgctggcggcgtgcctaacacatgcaagtcgaacggaagtaagcgctgatgaagcttcggcagattcttgtttactttagtggcggacgggcgagtaacgcgtgagcaacctgcccttcagagggggacaacagttggaaacgactgctaataccgcataacgtatcgggatggcatcatcctgataccaaaggagcaa

SEQ ID NO: 2439 - DNA, 225 bp, unidentified
  misc_feature 1..225: note = bacterial strain Ascusb_225 encodes 16S rRNA
  source 1..225: mol_type = genomic DNA
agagtttgatcatggctcaggatgaacgctggcggcgtgcttaatacatgcaagtcgaacgaagttttctcgccgaagcttgcttcattgagaaaacttagtggcggacgggtgagtaacgcgtgggtaacctgccttacacagggggataacagttagaaatgactgctaataccgcataagcgcacgaaatcgcatgattatgtgtgaaaagatttatcggtg

SEQ ID NO: 2440 - DNA, 225 bp, unidentified
  misc_feature 1..225: note = bacterial strain Ascusb_4891 encodes 16S rRNA
  source 1..225: mol_type = genomic DNA
agagtttgatcatggctcaggatgaacgctggcggcgtgcctaacacatgcaagtcgaacgaagcacttctaatcggagatttgtcaaagattgggattgacttagtggcggacgggtgagtaatgcgtgagcaacctgcctttcagagggggacaacagttggaaacgactgctaataccgcataacataaccggggggcatcccctggttatcaaaggagcaa

SEQ ID NO: 2441 - DNA, 225 bp, unidentified
  misc_feature 1..225: note = bacterial strain Ascusb_4668 encodes 16S rRNA
  source 1..225: mol_type = genomic DNA
agagtttgatcctggctcaggatgaacgctggcggcatgcctaagacatgcaagtcgaacgaagtggcccaatgaagagagcgagcttgctcaatctcagatttggattcccacttagtggcgcaagggtgagtaacacgtgggtaatctgccttcgagtctggaataacagttagaaatgattgctaatgccggataatatggagaacgatacgtcattcttta

SEQ ID NO: 2442 - DNA, 225 bp, unidentified
  misc_feature 1..225: note = bacterial strain Ascusb_965 encodes 16S rRNA
  source 1..225: mol_type = genomic DNA
agagtttgatcctggctcaggatgaacgctggcggcgtgcttaacacatgcaagtcgaacgaagcgctttatttgatttcttcggaatgaagattttgcgactgagtggcggacgggtgagtaacgcgtgggtaacctgccttgtacagggggataacagttggaaacgactgctaataccgcataagcgcacaggaccgcatggtctggtgtgaaaaactccgg

SEQ ID NO: 2443 - DNA, 225 bp, unidentified
  misc_feature 1..225: note = bacterial strain Ascusb_1480 encodes 16S rRNA
  source 1..225: mol_type = genomic DNA
agagtttgatcatggctcaggacgaacgctggcggcgcgcctaacacatgcaagtcgaacggagcttggagagcttgcttttcaagcttagtggcggacgggtgagtaacacgtgagcaacctgcctttcagagggggacaacagttggaaacgactgctaataccgcataacatcgtgagatggcatcattttacgatcaaagatttatcgctgaaagatgggc

SEQ ID NO: 2444 - DNA, 225 bp, unidentified
  misc_feature 1..225: note = bacterial strain Ascusb_1742 encodes 16S rRNA
  source 1..225: mol_type = genomic DNA
agagtttgatcatggctcaggataaacgctggcggcgtgcctaatacatgcaagtcgatcgctggagttctagcttgctagagcgaaggagaggcgaacgggtgagtaatacataagcaacctgcccacgaagactgggataattcctggaaacggggactaataccggataggcagcttgatcgcatgatcgagctgttaaagattcaaagcactggtggatgg

SEQ ID NO: 2445 - DNA, 225 bp, unidentified
  misc_feature 1..225: note = bacterial strain Ascusb_219 encodes 16S rRNA
  source 1..225: mol_type = genomic DNA
agagtttgatcatggctcaggatgaacgctggcggcgtgcataacacattcaagtcgaacggtgaagtcccttcggggacggatcagtggcggacgggtgagtaacgcgtgagcaacctgccgtatagtgggggataacacagggaaacttgtgctaataccgcatgacacataggaaccgcatgattccgatgtcaaagatttattgctgtacgatgggctcgc

SEQ ID NO: 2446 - DNA, 225 bp, unidentified
  misc_feature 1..225: note = bacterial strain Ascusb_4249 encodes 16S rRNA
  source 1..225: mol_type = genomic DNA
agagtttgatcggccacactgggactgatacacggcccagactcctacgggagacagcagttaggaatattcgtcaatgggggaaaccctgaacgagcaatgccgcgtgaacgatgacggtcctctggattgtaaagttctgttgtttggaaataatgatagctttaggaaatgattgctatttgaaggtaccattcaagaaagctccggctaactacgtgccag

SEQ ID NO: 2447 - DNA, 225 bp, unidentified
  misc_feature 1..225: note = bacterial strain Ascusb_7742 encodes 16S rRNA
  source 1..225: mol_type = genomic DNA
agagtttgatcatggctcaggatgaacgctggcggcatgcctaagacatgcaagtcgaacgaagtggcccaatgaagaatgcgagcttgctcaaatttagatttggatctccacttagtggcgcaagggtgagtaacacgtggataatctacctttgagtctggaataacaattagaaatgattgctaatgccggattatatatataatgttacgacataatata

SEQ ID NO: 2448 - DNA, 225 bp, unidentified
  misc_feature 1..225: note = bacterial strain Ascusb_5251 encodes 16S rRNA
  source 1..225: mol_type = genomic DNA
agagtttgatcctggctcaggatgaacgctggcggcacgcttaacacatgcaagtcgaacgaagatttaagagcttgcttttaaatcttagtggcggacgggtgcgtaacgcgtgggtaacctacccttgacagggggataacgtatagaaatgtacgctaataccgcataagcccacggagtcgcatggctctgagggaaaagctgagacggtcaaggatgggc

SEQ ID NO: 2449 - DNA, 225 bp, unidentified
  misc_feature 1..225: note = bacterial strain Ascusb_2106 encodes 16S rRNA
  source 1..225: mol_type = genomic DNA
agagtttgatcctggctcaggatgaacgctggcggcgtgcttaacacatgcaagtcgaacgaagctctgcgaactgagatttcggtcaaggtgaggagatgacttagtggcggacgggtgagtaacgcgtgggtaacctgccgtatgcagggggacaacagttggaaacgactgctaataccgcataagcgcacggttctgcatggaacagtgtgaaaagattta

SEQ ID NO: 2450 - DNA, 225 bp, unidentified
  misc_feature 1..225: note = bacterial strain Ascusb_758 encodes 16S rRNA
  source 1..225: mol_type = genomic DNA
agagtttgatcatggctcaggatgaacgctggcggcgtgcttaacacatgcaagtcgaacgaagctcccagatctgatgattcgtctgaagtgaagggaagacttagtggcggacgggtgagtaacgcgtgggtaacctgccgtatacagggggataacagttagaaatgactgctaataccgcataagcgcacagtaaggcatcttacagtgtgaaaaactccg

SEQ ID NO: 2451 - DNA, 225 bp, unidentified
  misc_feature 1..225: note = bacterial strain Ascusb_2304 encodes 16S rRNA
  source 1..225: mol_type = genomic DNA
agagtttgatcatggctcaggacgaacgctggcggcgtgcctaacacatgcaagtcgaacggacgaggggagcttgctccccgagttagtggcggacgggtgagtaacgcgtgagcaacctgcctttcagtgggggacaacggttggaaacgaccgctaataccgcataacacagcggaggggcatccctctggtgtcaaagatttattgctgaaagatgggctc

SEQ ID NO: 2452 - DNA, 225 bp, unidentified
  misc_feature 1..225: note = bacterial strain Ascusb_567 encodes 16S rRNA
  source 1..225: mol_type = genomic DNA
agagtttgatcatggctcaggatgaacgctagcggcaggcttaacacatgcaagtcgaggggtaacgcggtgtagcaatacactggcgacgaccggcgcacgggtgcgtaacgcgtatgcaacctacctgtaacaggggcataacggagggaaacttccactaattccccatattgttgtgataccgcatgatattgcaacgaaagcttcggtggttacggatgg

SEQ ID NO: 2453 - DNA, 225 bp, unidentified
  misc_feature 1..225: note = bacterial strain Ascusb_963 encodes 16S rRNA
  source 1..225: mol_type = genomic DNA
agagtttgatcatggctcaggatgaacgctggcggcgtgcttaacacatgcaagttgggcggtttctttcgaatgagacttcggtggattttggaagagatagcagcggacgggtgagtaaagcacaaggacgtgccctgaggcgggggacaactacgggaaaccgtagctaataccccgtaagccgagaggtgaaagcagcaatgcgccgaaggagcgacttgt

SEQ ID NO: 2454 - DNA, 225 bp, unidentified
  misc_feature 1..225: note = bacterial strain Ascusb_4244 encodes 16S rRNA
  source 1..225: mol_type = genomic DNA
agagtttgatcatggctcagaacgaacgctggcggcgcgtcttaagcatgcaagtcggacggcaagattagagcttgctctgatcctagagtggcggactggtgagtaacgcgtgggtgacgtacccttttgacggggatagcttttagaaataagagataataccggataagctctgcattgttagagggtgcagaggaaaggttctttagaaccgcgaaagga

SEQ ID NO: 2455 - DNA, 225 bp, unidentified
  misc_feature 1..225: note = bacterial strain Ascusb_2539 encodes 16S rRNA
  source 1..225: mol_type = genomic DNA
agagtttgatcctggctcagaacgaacgctggcggcgcgtcttaagcatgcaagtcgagcggtaagttatagcttgctataacctagagcggcggactggtgagtaacgcgtgggtgacgtacctttgtgacggggacagctggtagaaatatcagataataccggatacgctgcatgttgtcagaggacatgcaggaaaggttcttttgaaccgcacagagagc

SEQ ID NO: 2456 - DNA, 225 bp, unidentified
  misc_feature 1..225: note = bacterial strain Ascusb_2123 encodes 16S rRNA
  source 1..225: mol_type = genomic DNA
agagtttgatcctggctcaggatgaacgctagctacaggcttaacacatgcaagtcgaggggcatcacgtgaggcagcaatgcatctgggtggcgaccggcgaatgggtgagtaacgagtatccaacctggcccatactcgggcacagccccgcgaaagcgggattaatgcccgatgcggcgtatctcccgcatgggaattacgtcaaaggtataaactggtatg

SEQ ID NO: 2457 - DNA, 225 bp, unidentified
  misc_feature 1..225: note = bacterial strain Ascusb_75 encodes 16S rRNA
  source 1..225: mol_type = genomic DNA
agagtttgatcatggctcaggacgaacgctggcggcgtgcctaacacatgcaagtcgaacggaactgcttcgaaggatttcttcggaatgacattgattcagtttagtggcggacgggtgagtaacgcgtgagtaacctgccttcaagagggggataacattctgaaaagaatgctaataccgcatgacatatgattgtcgcatggcagacatatcaaagattta

SEQ ID NO: 2458 - DNA, 225 bp, unidentified
  misc_feature 1..225: note = bacterial strain Ascusb_3175 encodes 16S rRNA
  source 1..225: mol_type = genomic DNA
agagtttgatcctggctcaggatgaacgctagctacaggcttaacacatgcaagtcgaggggcagcatagggtttgcttgcaaactctgatggcgaccggcgcacgggtgagtaacgcgtatccaacctgcccatggctagggaatagcccgttgaaaagcggattaatgccctatggcgtcctttgaaggcatctaacgaggactaaaggtttaccggccatgg

SEQ ID NO: 2459 - DNA, 225 bp, unidentified
  misc_feature 1..225: note = bacterial strain Ascusb_2389 encodes 16S rRNA
  source 1..225: mol_type = genomic DNA
agagtttgatcatggctcaggatgaacgctggcggcgtgcctaacacatgcaagtcgaacggaactggttttgaagattctcttcggagatgattcgttactagtttagtggcggacgggtgagtaacgcgtgagtaacctgcccttgagagggggataacgttctgaaaaggacgctaataccgcataatactattgaaccgcatgatttaatagtcaaaactc

SEQ ID NO: 2460 - DNA, 225 bp, unidentified
  misc_feature 1..225: note = bacterial strain Ascusb_2710 encodes 16S rRNA
  source 1..225: mol_type = genomic DNA
agagtttgatcatggctcaggatgaacgctagcgacaggcctaacacatgcaagtcgaggggcagcgcggggaaagcttgcttttcctggcggcgaccggcgcacgggtgagtaacgcgtatgcaacctgccagcaagcgcgggatagccttccgaaagggagattaacaccgcatgaggccgcggatgggcatccatctgcggtgaaatgagaagcttgctgat

SEQ ID NO: 2461 - DNA, 225 bp, unidentified
  misc_feature 1..225: note = bacterial strain Ascusb_2633 encodes 16S rRNA
  source 1..225: mol_type = genomic DNA
agagtttgatcctggctcaggatgaacgctagctacaggcttaacacatgcaagtcgaggggcagcatgaagtttgcttgcaaactttgatggcgaccggcgcacgggtgagtaacgcgtatccaaccttccccttactagggaatagcccggcgaaagtcggattaatgccctatgttctcctttgcgggcatctaacgaggagcaaagattcatcggtaaggg

SEQ ID NO: 2462 - DNA, 225 bp, unidentified
  misc_feature 1..225: note = bacterial strain Ascusb_229 encodes 16S rRNA
  source 1..225: mol_type = genomic DNA
agagtttgatcatggctcaggacgaacgctggcggcgtgcctaacacatgcaagtcgaacggagtgaaagtagcttgctactggaacttagtggcggacgggtgagtaacacgtgagtaacctgcctttcagaggggaataatgtctggaaacggacactaataccgcataacatattttgatcgcatgatcgggatatcaaaggagcaatccgctgaaagatgg

SEQ ID NO: 2463 - DNA, 225 bp, unidentified
  misc_feature 1..225: note = bacterial strain Ascusb_2219 encodes 16S rRNA
  source 1..225: mol_type = genomic DNA
agagtttgatcatggctcaggacgaacgctggcggcgtgcctaacacatgcaagtcgaacgaagcactcggagcttgctttgagtgacttagtggcggacgggtgagtaatgcgtgagcaacctgccctgaagagggggacaacagttggaaacgactgctaataccgcatgatgtattctgggggcatccccgggataccaaagatttatcgcttcaggatggg

SEQ ID NO: 2464 - DNA, 225 bp, unidentified
  misc_feature 1..225: note = bacterial strain Ascusb_5606 encodes 16S rRNA
  source 1..225: mol_type = genomic DNA
agagtttgatcatggctcaggatgaacgctggcggcacgcttaacacatgcaagtcgaacgaagcttacggaagggagttttcggacaaacggaagtaagacttagtggcggacgggtgcgtaacgcgtgggtaacctaccctggactgggggataacgtatagaaatgtacgctaataccgcataagctcacgggaccgcatggttctgtgggaaaagccgaga

SEQ ID NO: 2465 - DNA, 225 bp, unidentified
  misc_feature 1..225: note = bacterial strain Ascusb_14227 encodes 16S rRNA
  source 1..225: mol_type = genomic DNA
aggtttgatcatggctcaggatgaacgctagctacaggcttaacacatgcaagtcgaggggaaacggcattttagcttgctaagatggacgtcgaccggcgaatgggtgagtaacgcgtatccaaccttccgttaagtagggaatagccttgcgaaagtaagattaatgccctatgtggtgttttgaggacatctgaagatcaccaaaggtttaccgcttaacga

SEQ ID NO: 2466 - DNA, 225 bp, unidentified
  misc_feature 1..225: note = bacterial strain Ascusb_2205 encodes 16S rRNA
  source 1..225: mol_type = genomic DNA
agagtttgatcatggctcaggatgaacgctagctacaggcttaacacatgcaagtcgaggggcagcatggagtcagcttgctgactttgatggcgaccggcgcacgggtgcgtaacacgtatccaatctacccatggctcagggatagcctttcgaaagaaagattaatacctgatggtctcaagttaagacatcttttcttgagtaaagatttatcggcgatgg

SEQ ID NO: 2467 - DNA, 225 bp, unidentified
  misc_feature 1..225: note = bacterial strain Ascusb_6203 encodes 16S rRNA
  source 1..225: mol_type = genomic DNA
agagtttgatcctggctcaggatgaacgctggcggcatgcctaagacatgcaagtcgaacgaagtggcccaatgaagaatgcgagcttgctcaagtttggatttggattcccacttagtggcgcaagggtgagtaacacgtaggtaatctaccttcgagtctggaataacagttagaaatgattgctaatgccggatgatatggggaacgataattcattcatta

SEQ ID NO: 2468 - DNA, 225 bp, unidentified
  misc_feature 1..225: note = bacterial strain Ascusb_9859 encodes 16S rRNA
  source 1..225: mol_type = genomic DNA
agagtttgatcatggctcaggatgaacgctggcggcatgcctaagacatgcaagtcgaacgaagtggcccaatgaagaatgcgagcttgctcaaatttggatttggattcccacttagtggcgcaagggtgagtaacacgtgggtaatctaccttcgagtctggaataacagttagaaatgattgctaatgccggataatatggggaacgatatttcattcttta

SEQ ID NO: 2469 - DNA, 225 bp, unidentified
  misc_feature 1..225: note = bacterial strain Ascusb_1641 encodes 16S rRNA
  source 1..225: mol_type = genomic DNA
agagtttgatcatggctcaggatgaacgctggcggcgtgcctaatacatgcaagtcgaacggagatgccgaatcagaagccttcgggcggacgaattggtaatcttagtggcggacgggtgagtaacacgtgagcaacctgcctttcagagggggacaacgactggaaacggtcgctaataccgcataacataccgagacggcatcgtcatggtatcaaaggagc

SEQ ID NO: 2470 - DNA, 225 bp, unidentified
  misc_feature 1..225: note = bacterial strain Ascusb_1731 encodes 16S rRNA
  source 1..225: mol_type = genomic DNA
agagtttgatcctggctcagaacgaacgctggcggcgcgtcttaagcatgcaagtcgaacgggatcatccagcttgctggatgtgagagtggcggactggtgagtaacacgtgggtgacgtacccttgagacggggatagccggtagaaataccgggtaataccggatgtgaagtgtggtcttggaagccatactggaaaggagcttttgctccgctcgaggaac

SEQ ID NO: 2471 - DNA, 225 bp, unidentified
  misc_feature 1..225: note = bacterial strain Ascusb_3389 encodes 16S rRNA
  source 1..225: mol_type = genomic DNA
agagtttgatcatggctcaggataaacgctggcggcgtgcataacacattcaagtcgaacgaagctccggaacttgcttgcaagggaaggaagacttagtggcggacgggtgagtaacgcgtgagcaacctgcctcggggtgcgggataacgtttggaaacgaacgctaataccgcatgacgcacggagatcgcatggtcactgtgccaaagatttattgccctg

SEQ ID NO: 2472 - DNA, 225 bp, unidentified
  misc_feature 1..225: note = bacterial strain Ascusb_2030 encodes 16S rRNA
  source 1..225: mol_type = genomic DNA
agagtttgatcatggctcaggacgaacgctggcggcgtgcctaacacatgcaagtcgaacggagctgttacggaagttcttcggagcggaagtttcagcttagtggcggacgggtgagtaacgcgtgagcaacctgcctttcagagggggacaacggttggaaacgaccgctaataccgcatgaagcattttgaccgcatgatcgagatgccaaagattttatcg

SEQ ID NO: 2473 - DNA, 225 bp, unidentified
  misc_feature 1..225: note = bacterial strain Ascusb_6801 encodes 16S rRNA
  source 1..225: mol_type = genomic DNA
agagtttgatcctggctcaggacgaacgctggcggcgtgcctaacacatgcaagtcgaacggacgaggggagcttgctccccaagttagtggcggacgggtgagtaacacgtgagcaacctgcccttcggagggggacaacagcgggaaactgctgctaataccgcataatgtattctggaggcatctccgggataccaaagattttatcgccgaaggatgggct

SEQ ID NO: 2474 - DNA, 225 bp, unidentified
  misc_feature 1..225: note = bacterial strain Ascusb_1953 encodes 16S rRNA
  source 1..225: mol_type = genomic DNA
agagtttgatcctggctcagaacgaacgctggcggcgcgtcttaagcatgcaagtcgagcggtaagattggtgcttgcactaatcctagagcggcggactggtgagtaacgcgtgggtgacgtacctttgtgacggggacagctcctagaaataggagataataccggatacgctgcatgttgtcagaggacatgcaggaaaggatcttttgattcgcacagaga

SEQ ID NO: 2475 - DNA, 225 bp, unidentified
  misc_feature 1..225: note = bacterial strain Ascusb_7730 encodes 16S rRNA
  source 1..225: mol_type = genomic DNA
agagtttgatcatggctcaggatgaacgctggcggcatgcctaagacatgcaagtcgtacgaggtgtcccattgaagtggagtgcttgcacaaagcggatttggattcacacctagtggcgcaagggtgagtaacacatgggtaatctgccctggagactggaataacaattagaaatgattgctaatgccggatgatatataagaggatacgttctcttatagt

SEQ ID NO: 2476 - DNA, 225 bp, unidentified
  misc_feature 1..225: note = bacterial strain Ascusb_1380 encodes 16S rRNA
  source 1..225: mol_type = genomic DNA
agagtttgatcatggctcaggacgaacgctggcggcgtgcctaacacatgcaagtcgaacggaactgctttgaaagaatcttcggatgattgagattcagtttagtggcggacgggtgagtaacgcgtgagtaacctgccttcgagaggggaataacgttctgaaaagatcgctaataccgcatgacatattgaaatcgcatggttttgatatcaaagatttatc

SEQ ID NO: 2477 - DNA, 225 bp, unidentified
  misc_feature 1..225: note = bacterial strain Ascusb_6471 encodes 16S rRNA
  source 1..225: mol_type = genomic DNA
agagtttgatcatggctcaggatgaacgctagctacaggcttaacacatgcaagtcgaggggcagcatgatcttagcttgctaagattgatggcgaccggcgcacgggtgagtaacgcgtatccaaccttccctatagtagaggatagcccggcgaaagtcggattaatactctatgttttccgttgcagacatctaaaatggaacaaaggtttaccgctatagg

SEQ ID NO: 2478 - DNA, 225 bp, unidentified
  misc_feature 1..225: note = bacterial strain Ascusb_1414 encodes 16S rRNA
  source 1..225: mol_type = genomic DNA
agagtttgatcatggctcaggatgaacgctggcggcgtgcttaacacatgcaagtcgaacgaagcacctctaattgaagattgacgaagcttgcttctgattgattcgccttgaggtgactgagtggcggacgggtgagtaacgcgtgggtaacctaccctatacagggggataacagttggaaacagctgctaataccgcataagcgcacagcttcgcatgaag

SEQ ID NO: 2479 - DNA, 225 bp, unidentified
  misc_feature 1..225: note = bacterial strain Ascusb_2313 encodes 16S rRNA
  source 1..225: mol_type = genomic DNA
agagtttgatcatggctcaggatgaacgctggcggcgtgcctaacacatgcaagtcgaacgaagcgtcccgcccgaagagaaggagtgcttgcacaaatttaattcaattgggatgacttagtggcggacgggtgagtaacgcgtgggtaacctgccttatacagggggataacagttagaaatgactgctaataccgcataagcgcacagtatcgcatggtaca

SEQ ID NO: 2480 - DNA, 225 bp, unidentified
  misc_feature 1..225: note = bacterial strain Ascusb_12755 encodes 16S rRNA
  source 1..225: mol_type = genomic DNA
agagtttgatcctggctcaggatgaacgctggcggcgtgcttaacacatgcaagtcgaacggaactggttttgaagatttccttcgggaatgattcgttactagtttagtggcggacgggtgagtaacgcgtgagtaacctgcccttgagagggggataacgttctgaaaagaacgctaataccgcataacattatcgagtcgcatggcttgataatcaaaactg

SEQ ID NO: 2481 - DNA, 225 bp, unidentified
  misc_feature 1..225: note = bacterial strain Ascusb_13706 encodes 16S rRNA
  source 1..225: mol_type = genomic DNA
agagtttgatcatggctcaggacgaacgctggcggcgtgcctaacacatgcaagtcgaacggacgaggggagcttgctccctgagttagtggcgaacgggtgagtaacgcgtgagcaacctgcctttcagagggggacaacggttggaaacgaccgctaataccgcatgaagcaatcggaccgcatgatctgattgccaaagattttatcgctgaaagatgggct

SEQ ID NO: 2482 - DNA, 225 bp, unidentified
  misc_feature 1..225: note = bacterial strain Ascusb_1858 encodes 16S rRNA
  source 1..225: mol_type = genomic DNA
agagtttgatcatggctcagaacgaacgctggcggcgcgtcttaagcatgcaagtcgagcggtaagattggtgcttgcactaatcctagagcggcggactggtgagtaacgcgtgggtgacgtaccttcgtgacggggacagctcctagaaataggagataataccggatacgctgtatgttgtcagaggacatacaggaaaggatcttttgattcgcacggaga

SEQ ID NO: 2483 - DNA, 225 bp, unidentified
  misc_feature 1..225: note = bacterial strain Ascusb_2440 encodes 16S rRNA
  source 1..225: mol_type = genomic DNA
agagtttgatcatggctcagaacgaacgctggcggcgcgtcttaagcatgcaagtcgagcgggaagaagtagcttgctatttctgagagcggcggactggtgagtaacacgtggatgacgcacccttctgacggggacagcccgtggaaacacggagtaataccggatgagcccttacttgttagaggagtaaggggaaaggagctaaggcttcgcaggaggagc

SEQ ID NO: 2484 - DNA, 225 bp, unidentified
  misc_feature 1..225: note = bacterial strain Ascusb_3048 encodes 16S rRNA
  source 1..225: mol_type = genomic DNA
agagtttgatcatggctcaggatgaacgctagcggcaggcttaacacatgcaagtcgaggggcagcgcgaggtagcaatactttggcggcgaccggcggaagggtgcgtaacgcgtgagcaacttgcccgtatctgggacataaccggtggaaacgccgactaatttcccataacaacagagaagacatcttttttgtttgaaagcttcggtggatacggatggg

SEQ ID NO: 2485 - DNA, 225 bp, unidentified
  misc_feature 1..225: note = bacterial strain Ascusb_3264 encodes 16S rRNA
  source 1..225: mol_type = genomic DNA
agagtttgatcatggctcaggatgaacgctagctacaggcttaacacatgcaagtcgaggggcagcatgaagtcagcttgctgactttgatggcgaccggcgcacgggtgcgtaacacgtatccaatctgcccgttacccggggatagcctttcgaaagaaagattaatacccgatggcttcacaccgccgcatggcgttgtgaataaagattcatcggtaacgg

SEQ ID NO: 2486 - DNA, 225 bp, unidentified
  misc_feature 1..225: note = bacterial strain Ascusb_2705 encodes 16S rRNA
  source 1..225: mol_type = genomic DNA
agagtttgatcctggctcaggatgaacgctggcggcacgcctaacacatgcaagtcgaacggagcttattgaagcttgctttaataaacttagtggcggacgggtgagtaacacgtgagcaacctgcctttcagagagggatagcttctggaaacggatggtaatacctcataacatattggtacggcatcgtattaatatcaaagatttatcgctgaaagatgg

SEQ ID NO: 2487 - DNA, 225 bp, unidentified
  misc_feature 1..225: note = bacterial strain Ascusb_2711 encodes 16S rRNA
  source 1..225: mol_type = genomic DNA
agagtttgatcatggctcaggatgaacgctggcggcgtgcctaacacatgcaagtcgaacgggaactccaagatgagacttcggtggatttttggaaattctagtggcggacgggtgagtaacgcgtgggtaacctgcccttaagaggtgaataacaacgagaaatcggtgctaatacaccatatgcttactagtgtcgcatgacatagtgaggaaagaatttcg

SEQ ID NO: 2488 - DNA, 225 bp, unidentified
  misc_feature 1..225: note = bacterial strain Ascusb_1980 encodes 16S rRNA
  source 1..225: mol_type = genomic DNA
agagtttgatcatggctcagaacgaacgctggcggcgcgtcttaagcatgcaagtcgaacgggattcaggggcttgcccctgatgagagtggcggactggtgagtaacacgtaggtgacatgccttttggttggggatagcctgtggaaacacagggtaataccgaataagaccgcggattctgatccgcggtgaaaggagctccggctccgccgatagattggc

SEQ ID NO: 2489 - DNA, 225 bp, unidentified
  misc_feature 1..225: note = bacterial strain Ascusb_4975 encodes 16S rRNA
  source 1..225: mol_type = genomic DNA
agagtttgatcctggctcagaacgaacgctggcggcaggcttaacacatgcaagttgaacgggatttgatggtagcttgctatcattaatgagagtagcgcactggtgagtaacacgtgggaacgtacattgtagtgggggacaacagagggaaacttctgctaataccgcataatccctgagggggaaagatttatcgctataatatcggcccgcggaagatta

SEQ ID NO: 2490 - DNA, 225 bp, unidentified
  misc_feature 1..225: note = bacterial strain Ascusb_733 encodes 16S rRNA
  source 1..225: mol_type = genomic DNA
agagtttgatcatggctcaggatgaacgctggcggcgtgcctaacacatgcaagtcgaacgaagcacttttaccggagattcgtcgaaggtgaatttgacttagtggcggacgggtgagtaatgtatgagcaacctgcctttcagtgggggacaacagttggaaacgactgctaataccgcataatgtatcgagggggcatccccatgataccaaaggagtaatt

SEQ ID NO: 2491 - DNA, 225 bp, unidentified
  misc_feature 1..225: note = bacterial strain Ascusb_2295 encodes 16S rRNA
  source 1..225: mol_type = genomic DNA
agagtttgatcatggctcaggatgaacgctagctacaggcttaacacatgcaagtcgaggggcagcatgaagtttgcttgcaaactttgatggcgaccggcgcacgggtgagtaacgcgtatccaaccttccccttagtagggcatagcccggcgaaagtcggattaataccctatgttgtcttatgaggacatctgagcaagactaaagatttatcgctaaggg

SEQ ID NO: 2492 - DNA, 225 bp, unidentified
  misc_feature 1..225: note = bacterial strain Ascusb_2191 encodes 16S rRNA
  source 1..225: mol_type = genomic DNA
agagtttgatcctggctcaggatgaacgctggcggcgtgcttaacacatgcaagtcgaacggagcttatttggaaagcttgcttttcgtttaagcttagtggcggacgggtgagtaacgcgtgagcaacctgccctagagtggggaataacaccgagaaatcggtgctaataccgcataatgtcggaggaccgcatgatccaccgaccaaaggatttattcgctt

SEQ ID NO: 2493 - DNA, 225 bp, unidentified
  misc_feature 1..225: note = bacterial strain Ascusb_3606 encodes 16S rRNA
  source 1..225: mol_type = genomic DNA
agagtttgatcatggctcaggatgaacgctagcggcaggcttaacacatgcaagtcgaggggcagcagggagtagcaatactctgctggcgaccggcgcacgggtgcgtaacgcgtatgcaacctaccctttacagggggataactcggggaaacccggactaataccccatatggtcacagaatcgcatggttttgtgacgaaagcttcggtggtatgggatgg

SEQ ID NO: 2494 - DNA, 225 bp, unidentified
  misc_feature 1..225: note = bacterial strain Ascusb_798 encodes 16S rRNA
  source 1..225: mol_type = genomic DNA
agagtttgatcatggctcaggatgaacgctggcggcgtgcttaacacatgcaagtcgaacggagcttacttggaaagcttgcttttcttttaagcttagtggcggacgggtgagtaacgcgtgagcaacctgcccttcagtggggaataacaccgagaaatcggtgctaataccgcataatgtcggaggaccgcatgatcttccgaccaaaggatttattcgctg

SEQ ID NO: 2495 - DNA, 225 bp, unidentified
  misc_feature 1..225: note = bacterial strain Ascusb_2415 encodes 16S rRNA
  source 1..225: mol_type = genomic DNA
agagtttgatcatggctcaggacgaacgctggcggcgtgcctaacacatgcaagtcgaacggagatattgcagatgaagatttcggttggattcagtaatatcttagtggcggacgggtgagtaacgcgtgagtaacctgccgatgagagtggaataacgttctgaaaagaacgctaataccgcataacatatatttgccgcatgacagatatatcaaagatttt

SEQ ID NO: 2496 - DNA, 225 bp, unidentified
  misc_feature 1..225: note = bacterial strain Ascusb_15630 encodes 16S rRNA
  source 1..225: mol_type = genomic DNA
agagtttgatcatggctcaggataaacgctggcggcgcacataagacatgcaagtcgaacggaagtcgttatactgattttgaaaagaacggagaacttgttcaaagggactggaagaagatttataacaatggctttagtggcggactggtgagtaatacgtaagcaacctacctattagaggggaacaacagttagaaatgactgctaataccgcatatgcca

SEQ ID NO: 2497 - DNA, 225 bp, unidentified
  misc_feature 1..225: note = bacterial strain Ascusb_9342 encodes 16S rRNA
  source 1..225: mol_type = genomic DNA
agagtttgatcatggctcaggatgaacgctggcggcatgcctaagacatgcaagtcgtacgaagtggccctttgaagtagagtgcttgcacaaagcggataaggattttcacttagtggcgcaagggtgagtaacacgtgggttatctgccttggagactggaataacaattggaaacgattgctaatgccggatgatatgtaagatgatacgttatcttatatt

SEQ ID NO: 2498 - DNA, 225 bp, unidentified
  misc_feature 1..225: note = bacterial strain Ascusb_13928 encodes 16S rRNA
  source 1..225: mol_type = genomic DNA
agagtttgatcctggctcaggacgaacgctggcggcgtgcttaacacatgcaagtcgagcggggacatgagggaataagcttcggcagaaagaatcatgttctagcggcggacgggtgagtaacgcgtgagcaatctgtcccagacagggggataacacttggaaacaggtgctaataccgcataagaccacgagatggcatcgtcttggggtaaaaggggagac

SEQ ID NO: 2499 - DNA, 225 bp, unidentified
  misc_feature 1..225: note = bacterial strain Ascusb_5721 encodes 16S rRNA
  source 1..225: mol_type = genomic DNA
agagtttgatcatggctcaggatgaacgctagctacaggcttaacacatgcaagtcgaggggcagcatgctgatagcttgctatcggtgatggcgaccggcgcacgggtgcgtaacacgtatccaatctacccatagctctgggatagcctttcgaaagaaagattaataccggatggtctgtcacggagacatctctgtgtcagtaaagatttatcggcgatgg

SEQ ID NO: 2500 - DNA, 225 bp, unidentified
  misc_feature 1..225: note = bacterial strain Ascusb_1784 encodes 16S rRNA
  source 1..225: mol_type = genomic DNA
agagtttgatcctggctcaggatgaacgctagctacaggcttaacacatgcaagtcgaggggcagcatgagagtagcttgctactcttgatggcgaccggcgcacgggtgcgtaacacgtatccaatctacccatggctcgggaatagcctttcgaaagaaagattaatgcccgatggtctgtgattgagacatctcgatgacagtaaagattaatcggcgatgg

SEQ ID NO: 2501 - DNA, 225 bp, unidentified
  misc_feature 1..225: note = bacterial strain Ascusb_1940 encodes 16S rRNA
  source 1..225: mol_type = genomic DNA
agagtttgatcatggctcaggatgaacgctggcggcgcatttaagacatgcaagtcgaacgaaaatttacgcttaaagagttgattagtttactaagagatgatttattgtaaattttagtggcggactggtgagtaatacataggtaatctgccttttagaggggaataactaggagaaattctagctaataccgcgtaagaccacacttaggcatctaagaga

SEQ ID NO: 2502 - DNA, 225 bp, unidentified
  misc_feature 1..225: note = bacterial strain Ascusb_2326 encodes 16S rRNA
  source 1..225: mol_type = genomic DNA
agagtttgatcatggctcaggacgaacgctggcggcgtgcttcatacatgcaagtcgaacgagaagctgacttcggtcagtggaaagtggcggacgggtgagtaatatgtaggaaatctgccctagagagggggacaacagagggaaacttctgctaataccccatatgagcttagttgaaatactaatcttgaaaactccggtgctctaggatgagcctgcatc

SEQ ID NO: 2503 - DNA, 225 bp, unidentified
  misc_feature 1..225: note = bacterial strain Ascusb_193 encodes 16S rRNA
  source 1..225: mol_type = genomic DNA
agagtttgatcatggctcaggatgaacgctagctacaggcttaacacatgcaagtcgagcggaacttcttcggaagtttagcggcagacgggtgagtaacacgtatccaacctttcccttactcgggtatagcctcgggaaactgagagtaatccccgatgaagtgtacgaggagcattttttgcacaccaaagattaatcggtgaggggtggggatgcgttcca

SEQ ID NO: 2504 - DNA, 225 bp, unidentified
  misc_feature 1..225: note = bacterial strain Ascusb_6229 encodes 16S rRNA
  source 1..225: mol_type = genomic DNA
agagtttgatcatggctcaggattaacgctggcggcatgcctaagacatgcaagtcgaacgaagcgccccattgagaactgaatgaagttggcgagcttgctcaaagatggaatgacgtaggatttggattctgcgcttagtggcgaacgggtgagtaacacgtgggttacctgccttcaagctggggataacagctagaaatggttgctaataccgaatgtgct

SEQ ID NO: 2505 - DNA, 225 bp, unidentified
  misc_feature 1..225: note = bacterial strain Ascusb_2686 encodes 16S rRNA
  source 1..225: mol_type = genomic DNA
agagtttgatcatggctcaggatgaacgctagcgacaggcctaacacatgcaagtcgaggggcagcgagaggaaagcttgcttttcttgtcggcgaccggcgcacgggtgagtaacgcgtatgcaacctggctactgctacgggatagccttgcgaaagtaagattaataccgtatgtgatatttagagacatctccttatattgaaagatttatcggcagtaga

SEQ ID NO: 2506 - DNA, 225 bp, unidentified
  misc_feature 1..225: note = bacterial strain Ascusb_3879 encodes 16S rRNA
  source 1..225: mol_type = genomic DNA
agagtttgatcatggctcaggatgaacgctagcggcaggcctaacacatgcaagtcgaggggtaacgcgaggtagcaataccttggcgacgaccggcgcacgggtgcgtaacgcgtatgcaacctgccctgtacagggggataacggggtgaaaatcccactaatatcccatggtgtcgcgaggccgcatgaccttgtgactaaagcttcggtggtacaggatgg

SEQ ID NO: 2507 - DNA, 225 bp, unidentified
  misc_feature 1..225: note = bacterial strain Ascusb_19362 encodes 16S rRNA
  source 1..225: mol_type = genomic DNA
agagtttgatcatggctcaggatgaacgctggcggcgtgcctaacacatgcaagtcgaacggtgatgatttgatattttcggatggattttcatcatagtggcggacgggtgagtaacgcgtggataacctgcctcgtactggggaatagcagctggaaacggctggtaataccgcataagcgcacggtgccgcatgacattgtgtgaaaagatttatcggtacg

SEQ ID NO: 2508 - DNA, 225 bp, unidentified
  misc_feature 1..225: note = bacterial strain Ascusb_158 encodes 16S rRNA
  source 1..225: mol_type = genomic DNA
agagtttgatcctggctcaggacgaacgctggcggcacgcctaacacatgcaagtcgaacggagatattttggtttactgagatatcttagtggcggacgggtgagtaacacgtgagcaacctgcctctgagagagggatagcttctggaaacggatggtaatacctcatgacataacgaagccgcatgactttgttatcaaagatttatcactcagagatgggc

SEQ ID NO: 2509 - DNA, 225 bp, unidentified
  misc_feature 1..225: note = bacterial strain Ascusb_9933 encodes 16S rRNA
  source 1..225: mol_type = genomic DNA
agagtttgatcatggctcaggatgaacgctagctacaggcttaacacatgcaagtcgaggggcagcatgaagtcagcttgctgactttgatggcgaccggcgcacgggtgcgtaacacgtatccaatctacccatggctcgggaatagcctttcgaaagaaagattaatgcccgatggtcttacggagagacatctctctgtaagtaaagatttatcggcgatgg

SEQ ID NO: 2510 - DNA, 225 bp, unidentified
  misc_feature 1..225: note = bacterial strain Ascusb_3718 encodes 16S rRNA
  source 1..225: mol_type = genomic DNA
agagtttgatcctggctcaggatgaacgctagctacaggcttaacacatgcaagtcgaggggcagcattgggatagcttgctattccagatggcgaccggcgcacgggtgagtaacgcgtatccaaccttccccatagtagggcacagcccggcgaaagtcggattaattccctatgttgtccagagaagacatctgacctggacgaaagattcatcgctatggg

SEQ ID NO: 2511 - DNA, 225 bp, unidentified
  misc_feature 1..225: note = bacterial strain Ascusb_7836 encodes 16S rRNA
  source 1..225: mol_type = genomic DNA
agagtttgatcctggctcaggatgaacgctggcggcgtgcctaacacatgcaagtcgaacgaagcactgggaacggagattcgtcgaagtttcctttgacttagtggcggacgggtgagtaatgtatgagcaacctgcctttcagagggggacaacagttggaaacgactgctaataccgcataacgtatagacgagacatcttgtttataccaaaggagcaatc

SEQ ID NO: 2512 - DNA, 225 bp, unidentified
  misc_feature 1..225: note = bacterial strain Ascusb_2381 encodes 16S rRNA
  source 1..225: mol_type = genomic DNA
agagtttgatcatggctcaggatgaacgctggcggcatgcctaagacatgcaagtcgtacgaagttgcccattgaaatggagtgcttgcacaaagtggatttggatcacaacttagtggcgaaagggtgagtaacacgtgggttatctacctcagagactgggataacagttggaaacgattgctaataccggattatatgtaagacgatacgttgtcttatatt

SEQ ID NO: 2513 - DNA, 225 bp, unidentified
  misc_feature 1..225: note = bacterial strain Ascusb_2569 encodes 16S rRNA
  source 1..225: mol_type = genomic DNA
agagtttgatcctggctcaggatgaacgctagctacaggcttaacacatgcaagtcgaggggcagcatgttggttgcttgcaaccaatgatggcgaccggcgcacgggtgagtaacgcgtatccaaccttccctatagtagaggatagcccggcgaaagtcggattaatactctatgttttccaatgcagacatctaaaatggaacaaaggtttaccgctatagg

SEQ ID NO: 2514 - DNA, 225 bp, unidentified
  misc_feature 1..225: note = bacterial strain Ascusb_6663 encodes 16S rRNA
  source 1..225: mol_type = genomic DNA
agagtttgatcatggctcaggacgaacgctggcggcgtgcttaacacatgcaagtcgaacggagttataacggatgagagcttcggcaggattccgatataactcagtggcggacgggtgagtaacgcgtgagcaacctgtcccagacagggggataacacttggaaacaggtgctaataccgcataagaccacggcatcacatggtgcaggggtaaaaggtgca

SEQ ID NO: 2515 - DNA, 225 bp, unidentified
  misc_feature 1..225: note = bacterial strain Ascusb_11848 encodes 16S rRNA
  source 1..225: mol_type = genomic DNA
agagtttgatcatggctcaggatgaacgctggcggcatgcctaagacatgcaagtcgaacgaggtggccctttgagggatgagtgcttgcacaaatcctaaaaaggattttccacctagtggcagacgggtgagtaacacgtgggtgacctacctttaagttggggataacagttggaaacgattgctaataccgaatgagatataacagtcgatgttatattga

SEQ ID NO: 2516 - DNA, 225 bp, unidentified
  misc_feature 1..225: note = bacterial strain Ascusb_12803 encodes 16S rRNA
  source 1..225: mol_type = genomic DNA
agagtttgatcatggctcaggatgaacgctagctacaggcttaacacatgcaagtcgaggggcagcatgatcttagcttgctaagattgatggcgaccggcgcacgggtgagtaacgcgtatccaaccttccctatagtagaggatagcccggcgaaagtcggattaatactctatgttattcaatgcggacatctaagttgaatcaaaggtttaccgctatagg

SEQ ID NO: 2517 - DNA, 225 bp, unidentified
  misc_feature 1..225: note = bacterial strain Ascusb_957 encodes 16S rRNA
  source 1..225: mol_type = genomic DNA
agagtttgatcatggctcagaacgaacgctggcggcgcgtcttaagcatgcaagtcgagcggtaagttgtagcttgctacaacctagagcggcggactggtgagtaacgcgtgggtgacgtacccttgtgacggggacagctcctagaaataggagataataccggatacgctgtgcattgtcagaggatgtacaggaaaggatcttttgatccgcacgaggagc

SEQ ID NO: 2518 - DNA, 225 bp, unidentified
  misc_feature 1..225: note = bacterial strain Ascusb_686 encodes 16S rRNA
  source 1..225: mol_type = genomic DNA
agagtttgatcatggctcaggacgaacgctggcggcgtgcctaacacatgcaagtcgaacggagttattttgaatgaaaatttcggttggattttaaagtgacttagtggcggacgggtgagtaacgcgtgagtaacctgcctagaagagggggataacgttctgaaaagaacgctaataccgcataatatatcgaagccgcatgactttgatatcaaaggagca

SEQ ID NO: 2519 - DNA, 225 bp, unidentified
  misc_feature 1..225: note = bacterial strain Ascusb_2674 encodes 16S rRNA
  source 1..225: mol_type = genomic DNA
agagtttgatcatggctcaggatgaacgctagctacaggcttaacacatgcaagtcgaggggcagcaggaatctagcttgctagatttgctggcgaccggcgcacgggtgagtaacgcgtatccaaccttccccatagtagaggatagcccggcgaaagtcggattaatactctatgttgtattttgaggacatctgacgaataccaaagattgatcgctatggg

SEQ ID NO: 2520 - DNA, 225 bp, unidentified
  misc_feature 1..225: note = bacterial strain Ascusb_4087 encodes 16S rRNA
  source 1..225: mol_type = genomic DNA
agagtttgatcctggctcagaacgaacgctggcggcgcgtcttaagcatgcaagtcgagcggcaagttgtagcttgctacaacctagagcggcggactggtgagtaacacgtgggtgacgcacccgggggaccgggatagcccttagaaataaggggtaataccggatacgaccgcaggcttggaggcctgcgaggaaaggggctctggccccgcccgcggaacg

SEQ ID NO: 2521 - DNA, 225 bp, unidentified
  misc_feature 1..225: note = bacterial strain Ascusb_4454 encodes 16S rRNA
  source 1..225: mol_type = genomic DNA
agagtttgatcctggctcaggatgaacgctagcgacaggcttaacacatgcaagtcgaggggcagcatgggaggtggcaacaccacccgatggcgaccggcgcactggtgagtaacacgtatgcgacctgcccccttcaggggaataacccggagaaatccggcctaatgccccatagtccgcggggactcattgccctgcggggaaaggtgagccggaagggga

SEQ ID NO: 2522 - DNA, 225 bp, unidentified
  misc_feature 1..225: note = bacterial strain Ascusb_19701 encodes 16S rRNA
  source 1..225: mol_type = genomic DNA
agagtttgatcatggctcagattgaacgctggcggcaggcttaacacatgcaagtcgtacggtaacagagggaagcttgcttctctgctgacgagtggcggacgggtgagtaatgtctgggaagctgcctgcttgagggggatagcggagcgaaagttccgataataccgcgtaagcccgagaggggaaagtgcgggaccgcaaggccgcacgcgagcagatgcg

SEQ ID NO: 2523 - DNA, 225 bp, unidentified
  misc_feature 1..225: note = bacterial strain Ascusb_1521 encodes 16S rRNA
  source 1..225: mol_type = genomic DNA
agagtttgatcatggctcaggacgaacgctggcggcatgcttaacacatgcaagtcgaacggatctgattccttcgggatgaaagattagtggcggacgggtgagtaatgtatgagcaatctgcccttgtcattgggataacatagggaaacttatgctaataccaaatatgaccacggtatcgcatggtactgcggtgaaagctccggcggacaaggatgagct

SEQ ID NO: 2524 - DNA, 225 bp, unidentified
  misc_feature 1..225: note = bacterial strain Ascusb_679 encodes 16S rRNA
  source 1..225: mol_type = genomic DNA
agagtttgatcatggctcaggataaacgctggcggcgtgcctaatacatgcaagtcgatcgctggagctcaagcttgcttgagtgaaggagaggcgaacgggtgagtaatacataagcaacctgcccacgaagactgggataatctctggaaacggggactaataccggataggtaacggagtcgcatgacactgttattaaagattcaaagcactggtggatgg

SEQ ID NO: 2525 - DNA, 225 bp, unidentified
  misc_feature 1..225: note = bacterial strain Ascusb_901 encodes 16S rRNA
  source 1..225: mol_type = genomic DNA
agagtttgatcatggctcaggatgaacgctggcggcgtgcttaacacatgcaagtcgaacgaggttattacagttgaagttttcggatggaaaccgttttaaccgagtggcggacgggtgagtaacgcgtgggaaacctgccctattccgggggataccagttggaaacgactgttaataccgcataagcgcacagcatcgcatgatgcagtgtgaaaaactccg

SEQ ID NO: 2526 - DNA, 225 bp, unidentified
  misc_feature 1..225: note = bacterial strain Ascusb_3265 encodes 16S rRNA
  source 1..225: mol_type = genomic DNA
agagtttgatcatggctcaggataaacgctggcggcgcacataagacatgcaagtcgaacggaagtcgttatattgattttgaaatgaacgttgaacttgttcaaggggacttgatgaagatttataacaatggctttagtggcggactggtgagtaatacgtaagcaacctgcctattagaggggaacaacagttagaaatgactgctaataccgcatatgcca

SEQ ID NO: 2527 - DNA, 225 bp, unidentified
  misc_feature 1..225: note = bacterial strain Ascusb_4773 encodes 16S rRNA
  source 1..225: mol_type = genomic DNA
agagtttgatcctggctcaggatgaacgctagcggcaggcctaacacatgcaagtcgaggggtaacgcgaggtagcaatactttggcgacgaccggcgcacgggtgcgtaacgcgtatgcaacctgccctgtacagggggataacggggtgaaaatcccactaatatcccatagtgccacgggatcgcatggttttgtggctaaagcttcggtggtacaggatgg

SEQ ID NO: 2528 - DNA, 225 bp, unidentified
  misc_feature 1..225: note = bacterial strain Ascusb_1840 encodes 16S rRNA
  source 1..225: mol_type = genomic DNA
agagtttgatcatggctcaggatgaacgctggcggcgtgcttaacacatgcaagtcgaacggaacttttctcccgaagaagcggagtgcttgcacaaagtggattcatttgaaaagtttagtggcggacgggtgagtaacgcgtgggtaacctgccgtatgccgggggacaacagttggaaacgactgctaataccgcataagcgcacactatcgcatgatagag

SEQ ID NO: 2529 - DNA, 225 bp, unidentified
  misc_feature 1..225: note = bacterial strain Ascusb_894 encodes 16S rRNA
  source 1..225: mol_type = genomic DNA
agagtttgatcatggctcaggatgaacgctagcgacaggcctaacacatgcaagtcgaggggcagcgagaggaaagcttgcttttcttgtcggcgaccggcgcacgggtgagtaacgcgtatgcaacctggctactgctacgggatagccttgcgaaagtaagattaataccgtatgtgctgagtttagacatctttattcagtgaaagatttatcggcagtaga

SEQ ID NO: 2530 - DNA, 225 bp, unidentified
  misc_feature 1..225: note = bacterial strain Ascusb_1228 encodes 16S rRNA
  source 1..225: mol_type = genomic DNA
agagtttgatcatggctcaggatgaacgctagcggcaggcttaacacatgcaagtcgaggggtaacagggcgtagcaatacgctgctgacgaccggcgcacgggtgcgtaacgcgtatgcaacctacctgtaacagggggataacggagtgaaaattccactaataccccatattgttattctttcgcatgttaggataacgaaagcttcggtggttacggatgg

SEQ ID NO: 2531 - DNA, 225 bp, unidentified
  misc_feature 1..225: note = bacterial strain Ascusb_874 encodes 16S rRNA
  source 1..225: mol_type = genomic DNA
agagtttgatcatggctcaggacgaacgctggcggcatgcctaacacatgcaagtcgaacggagttaagagagcttgcttttttaacttagtggcggacgggtgagtaacgcgtgagcaacttgcctctcggtggggaataatgtactgaaaaggacactaataccgcatgatgtgcagagatcgcatggtcattgcaccaaagatttatcgccgagagatgggc

SEQ ID NO: 2532 - DNA, 225 bp, unidentified
  misc_feature 1..225: note = bacterial strain Ascusb_10476 encodes 16S rRNA
  source 1..225: mol_type = genomic DNA
agagtttgatcatggctcaggacgaacgctggcggcgtgcttaacacatgcaagtcgaacggggattattgggatgagagcttcggcaggatttctgataattccagtggcggacgggtgagtaacgcgtgagcaacctgtcccagacagggggataacacttggaaacaggtgctaataccgcataagaccacggggtcacatggcccaggggtaaaaggagca

SEQ ID NO: 2533 - DNA, 225 bp, unidentified
  misc_feature 1..225: note = bacterial strain Ascusb_4846 encodes 16S rRNA
  source 1..225: mol_type = genomic DNA
agagtttgatcatggctcagaacgaacgctggcggcgcgtcttaagcatgcaagtcgaatggcaagaagagagcttgctctcttcctagaatggcggactggtgagtaacgcgtgggtgacgtaccctttagctggggatagcttttagaaataagagataataccgaataagctgcattttgttagagggaatgcaggaaaggatctttagattcactgaagga

SEQ ID NO: 2534 - DNA, 225 bp, unidentified
  misc_feature 1..225: note = bacterial strain Ascusb_15001 encodes 16S rRNA
  source 1..225: mol_type = genomic DNA
agagtttgatcctggctcaggacgaacgctggcggcgtgcctaacacatgcaagtcgagcggggacatacagtgaagaggaagttttcggatggaattggaacggtatgttctagcggcggacgggtgagtaacgcgtgagcaacctgtccttcacagggggataacacagcgaaagttgtactaataccgcataagaccacggagctgcatggctttggggtca

SEQ ID NO: 2535 - DNA, 225 bp, unidentified
  misc_feature 1..225: note = bacterial strain Ascusb_5315 encodes 16S rRNA
  source 1..225: mol_type = genomic DNA
agagtttgatcatggctcaggatgaacgctagctacaggcttaacacatgcaagtcgaggggcagcaggacgatagcttgctattgttgctggcgaccggcgcacgggtgagtaacgcgtatccaaccttccctatagtagagaatagcccggcgaaagtcggattaatgctctatgttgtgttttgatgacatctgacgaacaccaaaggttcaccgctatagg

SEQ ID NO: 2536 - DNA, 225 bp, unidentified
  misc_feature 1..225: note = bacterial strain Ascusb_7842 encodes 16S rRNA
  source 1..225: mol_type = genomic DNA
agagtttgatcctggctcaggatgaacgctagcggcaggcttaacacatgcaagtcgaggggcagcgggtttgtagcaatacagacgccggcgaccggcgcaagggtgcgtaacgcgtgagcgacatgcccgtgaccgggggataaccgatggaaacgtcgcctaaccccccatatgacgagggaccgcatgatcccttgttgaaaaccctggtggtcacggatt

SEQ ID NO: 2537 - DNA, 225 bp, unidentified
  misc_feature 1..225: note = bacterial strain Ascusb_9565 encodes 16S rRNA
  source 1..225: mol_type = genomic DNA
agagtttgatcatggctcaggatgaacgctggcggcatgcctaagacatgcaagtcgtacgaggcgtcccattgaaatggagtgcttgcacaaagtggatttggattttcgcctagtggcgcaagggtgagtaacacgtgggttatctgccttgaagactggaataacaattggaaacgattgctaatgccggatgatatataaaaggatacgttcttttatagt

SEQ ID NO: 2538 - DNA, 225 bp, unidentified
  misc_feature 1..225: note = bacterial strain Ascusb_12486 encodes 16S rRNA
  source 1..225: mol_type = genomic DNA
agagtttgatcctggctcaggataaacgctggcggcgcacataagacatgcaagtcgaacggaagtcgtcataatgattttgaaatggatttgaagatttatctgatatgaagttgatgatgatttatgacaatggctttagtggcggactggtgagtaacgcgtaagcaatctgcctattagaggggaataacagtgagaaatcattgctaataccgcatatgc

SEQ ID NO: 2539 - DNA, 225 bp, unidentified
  misc_feature 1..225: note = bacterial strain Ascusb_4058 encodes 16S rRNA
  source 1..225: mol_type = genomic DNA
agagtttgatcatggctcaggatgaacgctagcggcaggcttaacacatgcaagtcgaggggtaacgcggggtagcaatactctggcgacgaccggcgcacgggtgcgtaacgcgtatgcaacctacctgtaacaggggtataacggagtgaaaattccactaatcccccatattgttagagattcgcatgtttctctaacgaaagcttcggtggttacggatgg

SEQ ID NO: 2540 - DNA, 225 bp, unidentified
  misc_feature 1..225: note = bacterial strain Ascusb_1169 encodes 16S rRNA
  source 1..225: mol_type = genomic DNA
agagtttgatcatggctcagaacgaacgctggtggcgtgtcttatacatgcaagtcgagcgaggcagcaatgccgagcggcgaacgggtgagtaacgcgtaagcaatctgccccatatcaggaaatacccgtgccaacgcgcggttaatgtccaggagagtggctccttgcatgaggagttgactagagatttatcggtatgggatgagcttgcgtccgattagc

SEQ ID NO: 2541 - DNA, 225 bp, unidentified
  misc_feature 1..225: note = bacterial strain Ascusb_1684 encodes 16S rRNA
  source 1..225: mol_type = genomic DNA
agagtttgatcctggctcaggataaacgctggcggcgtgcctaatacatgcaagtcgaacgctggagaccgacttcggttggtcgaaggagtggcgaacgggtgagtaatacataagcaacctgcccacgaagaccgggataatccctggaaacggggactaataccggataggcatttgagaggcatctcttaaatgttaaagattaaaagcactggtggatgg

SEQ ID NO: 2542 - DNA, 225 bp, unidentified
  misc_feature 1..225: note = bacterial strain Ascusb_983 encodes 16S rRNA
  source 1..225: mol_type = genomic DNA
agagtttgatcatggctcaggacgaacgctggcggcgtgcttaacacatgcaagtcgaacgaggttattttgatgagatcttcggaaggattcgggataaccgagtggcggacgggtgagtaacgcgtgagcaacctgtcttacacagggggataacgctccgaaaggagtgctaataccgcataggaccacggagctgcatggctttgaggtgaaaggagcaat

SEQ ID NO: 2543 - DNA, 225 bp, unidentified
  misc_feature 1..225: note = bacterial strain Ascusb_12658 encodes 16S rRNA
  source 1..225: mol_type = genomic DNA
agagtttgatcctggctcaggatgaacgctagctacaggcttaacacatgcaagtcgaggggcatcatggagtttgcttgcaaactccgatggcgaccggcgcacgggtgagtaacgcgtatccaaccttccccttagtagggcatagcccggcgaaagtcggattaataccctatgttgtcgtttgaagacatctgaagacgattaaagattcatcgctaaggg

SEQ ID NO: 2544 - DNA, 225 bp, unidentified
  misc_feature 1..225: note = bacterial strain Ascusb_2927 encodes 16S rRNA
  source 1..225: mol_type = genomic DNA
agagtttgatcatggctcagaacgaacgctggcggcgcgtcttaagcatgcaagtcgagcggtaagtcgggagcttgctcctgacctagagcggcggactggtgagtaacgcgtgggtgacgtacctttatgacggggacagctcctagaaataggagataataccggatacgctgtgtgttgtcagaggacacacaggaaaggatcttttgattcgcataaaga

SEQ ID NO: 2545 - DNA, 225 bp, unidentified
  misc_feature 1..225: note = bacterial strain Ascusb_1281 encodes 16S rRNA
  source 1..225: mol_type = genomic DNA
agagtttgatcctggctcaggatgaacgctggcggcgtgcctaacacatgcaagtcgagcggagttatattttcggatttaacttagcggcggatgggtgagtaacgcgtggataacctgccctgctcagggggataacagttggaaacgactgttaataccgcatatgcacacagtaccgcatggtacagggtggaaagattttatcggagcaggatggatccg

SEQ ID NO: 2546 - DNA, 225 bp, unidentified
  misc_feature 1..225: note = bacterial strain Ascusb_12147 encodes 16S rRNA
  source 1..225: mol_type = genomic DNA
agagtttgatcatggctcaggatgaacgctggcggcatgcctaagacatgcaagtcgaacgaagtggcccaatgaagaatgcgagcttgctcaagtttggatttggattcccacttagtggcgcaagggtgagtaacacgtgggtaatctaccttcgagtctggaataacagttagaaatgattgctaatgccggatgatatcgagaacgatacgtctttcttta

SEQ ID NO: 2547 - DNA, 225 bp, unidentified
  misc_feature 1..225: note = bacterial strain Ascusb_4082 encodes 16S rRNA
  source 1..225: mol_type = genomic DNA
agagtttgatcatggctcagaacgaacgctggcggcgcgtcttaagcatgcaagtcgaacggcaagattggtgcttgcaccgatcctagagtggcggactggtgagtaacgcgtgggtgatgtaccctttggatggggatagccggtagaaataccgggtaataccgaataagcttgcttctttaatgtgaagtaaggaaagcagtgtatgctgcaccgaaggaa

SEQ ID NO: 2548 - DNA, 225 bp, unidentified
  misc_feature 1..225: note = bacterial strain Ascusb_287 encodes 16S rRNA
  source 1..225: mol_type = genomic DNA
agagtttgatcatggctcaggatgaacgctggcggcacgcctaacacatgcaagtcgaacggagtttaagagagcttgctcttttaaacttagtggcggacgggtgagtaacacgtgagcaacctgcctttcagagagggatagcttctggaaacggatggtaatacctcataacatattgatacggcatcgtattaatatcaaagatttatcgctgaaagatgg

SEQ ID NO: 2549 - DNA, 225 bp, unidentified
  misc_feature 1..225: note = bacterial strain Ascusb_4056 encodes 16S rRNA
  source 1..225: mol_type = genomic DNA
agagtttgatcatggctcaggatgaacgctagcggcaggcttaacacatgcaagtcgaggggcagcgtggcgtagcaatacgctgacggcgaccggcgaaagggtgagtaacgcgtgagcaacatgcccggtagaggaggatagtcgatggaaacgtcgtgtaatactccgtaacaacagaccccgcatgaggtttgtttaatagattaatcgctatcggattgg

SEQ ID NO: 2550 - DNA, 225 bp, unidentified
  misc_feature 1..225: note = bacterial strain Ascusb_2792 encodes 16S rRNA
  source 1..225: mol_type = genomic DNA
agagtttgatcatggctcaggatgaacgctggcggcgtgcctaatacatgcaagtcgaacggagaaatcacttcggtgatggatcagtggcgaacgggtgagtaacacatgaacaacctaccctgatgactgggataacgatctgaaaagatcgctaataccggataggtagcggaagggcatccttcttctattaaagttgggctacaacacaacaggatgggt

SEQ ID NO: 2551 - DNA, 225 bp, unidentified
  misc_feature 1..225: note = bacterial strain Ascusb_2780 encodes 16S rRNA
  source 1..225: mol_type = genomic DNA
agagtttgatcatggctcaggataaacgctggcggcgcacataagacatgcaagtcgaacgaacttaatcgaatatttatatttgaagcggttagtggcggactggtgagtaacgcgtaggcaacctgcccataagaggggaataacattgagaaatcagtgctaataccgcataagctgtgaacatcgcatgatgaaagcagaaaaggagtaatccgcttatgg

SEQ ID NO: 2552 - DNA, 225 bp, unidentified
  misc_feature 1..225: note = bacterial strain Ascusb_3090 encodes 16S rRNA
  source 1..225: mol_type = genomic DNA
agagtttgatcatggctcagattgaacgctggcggcaggcttaatacatgcaagtcgaacggtagcagcaggaaagcttgcttttctggctgacgagtggcggacgggtgagtaatacctgggaaactgcctataagagggggataacacctggaaacgggtgctaataccgcataaaccctgaggggaaaaggatgggaaaccatgcgcttatagatgtgccca

SEQ ID NO: 2553 - DNA, 225 bp, unidentified
  misc_feature 1..225: note = bacterial strain Ascusb_6755 encodes 16S rRNA
  source 1..225: mol_type = genomic DNA
agagtttgatcctggctcaggatgaacgctagctacaggcttaacacatgcaagtcgaggggcatcgaggagttagcttgctaactttgtcggcgaccggcgcacgggtgagtaacgcgtatccaaccttccccatagtagaggatagcccggcgaaagtcggattaatactctatgttcttcaatgcggacatctaatttgaagcaaaggttcaccgctatggg

SEQ ID NO: 2554 - DNA, 225 bp, unidentified
  misc_feature 1..225: note = bacterial strain Ascusb_2046 encodes 16S rRNA
  source 1..225: mol_type = genomic DNA
agagtttgatcatggctcagaacgaacgctggcggcgcgtcttaagcatgcaagtcgagcgggagatggtagcttgctaccattgagagcggcggactggtgagtaacgcgtgggtgacgtacctttgtgatggggatagctgctagaaatagcagataataccgaatacgctgtgtgttgtcagaggacacacaggaaaggttcttttgaatcgcacaaagagc

SEQ ID NO: 2555 - DNA, 225 bp, unidentified
  misc_feature 1..225: note = bacterial strain Ascusb_2175 encodes 16S rRNA
  source 1..225: mol_type = genomic DNA
agagtttgatcatggctcaggacgaacgctggcggcgtgcctaacacatgcaagtcgagcggggatgttggaagagcttgctcggaagacatcttagcggcggacgggtgagtaacgcgtgagcaacctgtcccagacagggggataccagatggaaacatctgctaataccgcataagaccacgggatcacatggttctggggtaaaaggaggaatccggtttg

SEQ ID NO: 2556 - DNA, 225 bp, unidentified
  misc_feature 1..225: note = bacterial strain Ascusb_3050 encodes 16S rRNA
  source 1..225: mol_type = genomic DNA
agagtttgatcatggctcaggataaacgctggcggcgcacataagacatgcaagtcgaacggaagtcgttgtaatgatgtggacatgaacagagaacttgttcaaagggagtgaaaattgacttacaacaatggctttagtggcggactggtgagtaatacgtaagcaacctacctattagaggggaacaacagttagaaatgactgctaataccgcatatgcca

SEQ ID NO: 2557 - DNA, 225 bp, unidentified
  misc_feature 1..225: note = bacterial strain Ascusb_888 encodes 16S rRNA
  source 1..225: mol_type = genomic DNA
agagtttgatcatggctcaggatgaacgctggcggcgcacataagacatgcaagtcgaacggaagtcgttagaaatgaattgacgatttatctgattgaagtttctaacaatggctttagtggcggactggtgagtaacacgtaagcaacctgcctatcagaggggaataacagtgagaaatcattgctaataccgcataagctagtagtatcgcatgatacagc

SEQ ID NO: 2558 - DNA, 225 bp, unidentified
  misc_feature 1..225: note = bacterial strain Ascusb_15111 encodes 16S rRNA
  source 1..225: mol_type = genomic DNA
agagtttgatcatggctcaggatgaacgctagctacaggcttaacacatgcaagtcgaggggcatcgggagagtagcttgctattcttgccggcgaccggcgcacgggtgagtaacgcgtatccaacctaccccatacaagaggatagcccggcgaaagtcggattaatactctatgtagtacgatgaaggcatctgagttgtatgaaaggtttcttccggtatg

SEQ ID NO: 2559 - DNA, 225 bp, unidentified
  misc_feature 1..225: note = bacterial strain Ascusb_132 encodes 16S rRNA
  source 1..225: mol_type = genomic DNA
agagtttgatcatggctcaggatgaacgctagctacaggcttaacacatgcaagtcgaggggcagcattgggatagcttgctattccagatggcgaccggcgcacgggtgagtaacgcgtatccaaccttccccatagtagggcacagcccggcgaaagtcggattaattccctatgcagtccagagaggacatctgacctggacgaaagattcatcgctatggg

SEQ ID NO: 2560 - DNA, 225 bp, unidentified
  misc_feature 1..225: note = bacterial strain Ascusb_2925 encodes 16S rRNA
  source 1..225: mol_type = genomic DNA
agagtttgatcatggctcaggacgaacgctggcggcgtgcttaacacatgcaagtcgaacgaggttatgtcacggaaggcttcggctggaagagatataaccgagtggcggacgggtgagtaacgcgtgaggaacctgtcttttgcagggggataacggtccgaaaggattgctaataccgcataagaccacgtcggggcatcccggtgaggtcaaaggagaaat

SEQ ID NO: 2561 - DNA, 225 bp, unidentified
  misc_feature 1..225: note = bacterial strain Ascusb_379 encodes 16S rRNA
  source 1..225: mol_type = genomic DNA
agagtttgatcatggctcaggatgaacgctagctacaggcttaacacatgcaagtcgaggggcagcattgagatagcttgctatttcagatggcgaccggcgcacgggtgagtaacgcgtatccaaccttccctatagtagagaatagcccggcgaaagtcggattaatgctctatatgttctattgatggcatcagagattgaacaaagaatttcgctatagga

SEQ ID NO: 2562 - DNA, 225 bp, unidentified
  misc_feature 1..225: note = bacterial strain Ascusb_3915 encodes 16S rRNA
  source 1..225: mol_type = genomic DNA
agagtttgatcatggctcaggacgaacgctggcggcgtgcttaacacatgcaagtcgaacgaggttatattgaggaaagcttcggccggaatcgatataaccgagtggcggacgggtgagtaacgcgtgagcaacctgtcttctacagggggataacggtccgaaaggattgctaataccgcataagaccacggtactgcatggtacagaggtcaaaggagagat

SEQ ID NO: 2563 - DNA, 225 bp, unidentified
  misc_feature 1..225: note = bacterial strain Ascusb_705 encodes 16S rRNA
  source 1..225: mol_type = genomic DNA
agagtttgatcctggctcaggatgaacgctggcggcgtgcttaatacatgcaagtcgaacgaagagcccttaaccgaagatgatgacgtgcttgcactgaatctgattcaccttagggttactgagtggcggacgggtgagtaacgcgtgggtaacctgccttagacagggggataacatcaagaaattggtgctaataccgcatatgctcacagtatcgcatga

SEQ ID NO: 2564 - DNA, 225 bp, unidentified
  misc_feature 1..225: note = bacterial strain Ascusb_1716 encodes 16S rRNA
  source 1..225: mol_type = genomic DNA
agagtttgatcatggctcaggatgaacgctggcggcgtgcctaacacatgcaagtcgaacgaagttttagcgacggaagtcttcggacggaagatgttacaacttagtggcggacgggtgagtaacgcgtgagcaacctgcctttcagagggggacaacagttggaaacgactgctaataccgcataacgtatatttatggcatcatagatataccaaaggagca

SEQ ID NO: 2565 - DNA, 225 bp, unidentified
  misc_feature 1..225: note = bacterial strain Ascusb_2767 encodes 16S rRNA
  source 1..225: mol_type = genomic DNA
agagtttgatcatggctcaggacgaacgctggcggcgtgcttaacacatgcaagtcgaacgaggatatgtcagaggagagcttcggcaggaatcaggcatattcgagtggcggacgggtgagtaacgcgtgagcaacctgtcccagacagggggataacacttggaaacaggtgctaataccgcataagaccacggtatcacatggtagtggggtaaaaggagca

SEQ ID NO: 2566 - DNA, 225 bp, unidentified
  misc_feature 1..225: note = bacterial strain Ascusb_10632 encodes 16S rRNA
  source 1..225: mol_type = genomic DNA
agagtttgatcctggctcaggatgaacgctggcggcatgcctaagacatgcaagtcgtacgaggtggcccgttgaattctgtgcttgcacaaaacgattcggatccccacctagtggcgaaagggtgagtaacacgtgggtaatctacctcagagactgggataactactggaaacggtagctaataccggatgatatatataacgatacgttgttatatagtaa

SEQ ID NO: 2567 - DNA, 225 bp, unidentified
  misc_feature 1..225: note = bacterial strain Ascusb_4360 encodes 16S rRNA
  source 1..225: mol_type = genomic DNA
agagtttgatcatggctcaggacgaacgctggcggcgtgcttaacacatgcaagtcgaacgaagcttgatgattgattccttcgggatgatttcagatatgactgagtggcggacgggtgagtaacgcgtgaggaacctgcctttcagagggggacaacgtttggaaacgaacgctaataccgcataacattgccgagtggcatcgcttggcaatcaaagattta

SEQ ID NO: 2568 - DNA, 225 bp, unidentified
  misc_feature 1..225: note = bacterial strain Ascusb_7041 encodes 16S rRNA
  source 1..225: mol_type = genomic DNA
agagtttgatcatggctcaggatgaacgctagcggcaggcttaacacatgcaagtcgaggggtaacgcgaggtagcaatactttggcgacgaccggcgcacgggtgcgtaacgcgtatgcaacctgcccgtaacaggggtataacggagggaaacttccactaatcccccatattgttgtggaaccgcatggtttttcaacgaaagcttcggtggttacggatgg

SEQ ID NO: 2569 - DNA, 225 bp, unidentified
  misc_feature 1..225: note = bacterial strain Ascusb_6460 encodes 16S rRNA
  source 1..225: mol_type = genomic DNA
agagtttgatcctggctcaggatgaacgctagcggcaggcttaacacatgcaagtcgaggggtaacagagggtagcaataccctgctgacgaccggcgcacgggtgcgtaacgcgtatgcaacctacctgtaacagggggataacggagtgaaaattccactaataccccatattgttggagattcgcatgtttctccaacgaaagcttcggtggttacggatgg

SEQ ID NO: 2570 - DNA, 225 bp, unidentified
  misc_feature 1..225: note = bacterial strain Ascusb_2735 encodes 16S rRNA
  source 1..225: mol_type = genomic DNA
agagtttgatcatggctcaggatgaacgctagcgacaggcctaacacatgcaagtcgaggggcagcgcggaggtagcaatatctttggcggcgaccggcgcacgggtgcgtaacaggtgtgcaatctgtccataatcggggaataacccggcgaaagccgaactaacgctccatgtgagcgagcggggcatcctgcttgtttgaaacgtgaggattatgggtgag

SEQ ID NO: 2571 - DNA, 225 bp, unidentified
  misc_feature 1..225: note = bacterial strain Ascusb_1244 encodes 16S rRNA
  source 1..225: mol_type = genomic DNA
agagtttgatcatggctcagaacgaacgctggcggcgcgtcttaagcatgcaagtcgagcggtaaggaagaagcttgcttcttccctagagcggcggactggtgagtaacgcgtgggtgacgtacctttgtgacggggacagctcctagaaataggagataataccggatacgctgcagcatgtcagaggtgctgcaggaaaggatcttttgattcgcacagaga

SEQ ID NO: 2572 - DNA, 225 bp, unidentified
  misc_feature 1..225: note = bacterial strain Ascusb_6524 encodes 16S rRNA
  source 1..225: mol_type = genomic DNA
agagtttgatcctggctcaggacgaacgctggcggcgtgcttaacacatgcaagtcgaacgaggttattttgatgagatcttcggaaggattcgggataaccgagtggcggacgggtgagtaacgcgtgagcaacctgtcttacacagggggataacgctccgaaaggagtgctaataccgcataggaccacggagctgcatggctttgaggtgaaaggagcaat

SEQ ID NO: 2573 - DNA, 225 bp, unidentified
  misc_feature 1..225: note = bacterial strain Ascusb_1891 encodes 16S rRNA
  source 1..225: mol_type = genomic DNA
agagtttgatcatggctcaggacgaacgctggcggcgtgcttaacacatgcaagtcgaacggagttaagcgctggtctgatgccggcttgccggaggatttccttgcttaacttagtggcggacgggtgagtaacgcgtgagtaacctgcccctcagtggggaataacgccctgaaaagagcgctaataccgcataatatatatttgccgcatgacaggtatatc

SEQ ID NO: 2574 - DNA, 225 bp, unidentified
  misc_feature 1..225: note = bacterial strain Ascusb_670 encodes 16S rRNA
  source 1..225: mol_type = genomic DNA
agagtttgatcatggctcaggatgaacgctagctacaggcttaacacatgcaagtcgaggggcagcatgttggttgcttgcaaccaatgatggcgaccggcgcacgggtgagtaacgcgtatccaaccttccccttagtagaggatagcccggcgaaagtcggattaatactctatgttcttcaatgcggacatctaagttgaagcaaagatttatcgctaaggg

SEQ ID NO: 2575 - DNA, 225 bp, unidentified
  misc_feature 1..225: note = bacterial strain Ascusb_1396 encodes 16S rRNA
  source 1..225: mol_type = genomic DNA
agagtttgatcatggctcaggatgaacgctggcggcgtgcttaacacatgcaagtcgaacgaagcgtcccgcccgatgaaatggagtgcttgcacaaagtagaatcaattgggatgacttagtggcggacgggtgagtaacgcgtgggtaacctgccttacacagggggacaacagttggaaacgactgctaataccgcataacccgctagtaccgcatggtaca

SEQ ID NO: 2576 - DNA, 225 bp, unidentified
  misc_feature 1..225: note = bacterial strain Ascusb_152 encodes 16S rRNA
  source 1..225: mol_type = genomic DNA
agagtttgatcatggctcaggacgaacgctggcggcacgcctaacacatgcaagtcgaacggagatttgagagcttgctcttaaatcttagtggcggacgggtgagtaacacgtgagcaacctgcctctgagagagggatagcttctggaaacggatggtaatacctcataacattacatgaccgcatgatcgtgtaatcaaagatttatcactcagagatgggc

SEQ ID NO: 2577 - DNA, 225 bp, unidentified
  misc_feature 1..225: note = bacterial strain Ascusb_3336 encodes 16S rRNA
  source 1..225: mol_type = genomic DNA
agagtttgatcatggctcaggatgaacgctggcggcgtgcctaacacatgcaagtcgaacgaagcatacgagacggagattcgtcgaagccttgtatgacttagtggcggacgggtgagtaatgtatgagcaacctgcctttcagtgggggacaacagttggaaacgactgctaataccgcataatgtacagagaggacatcctcattgtaccaaaggagcaatt

SEQ ID NO: 2578 - DNA, 225 bp, unidentified
  misc_feature 1..225: note = bacterial strain Ascusb_5077 encodes 16S rRNA
  source 1..225: mol_type = genomic DNA
agagtttgatcatggctcaggataaacgctggcggcgcacataagacatgcaagtcgaacggaagtcgttgtaatgatatggacatgaacggagaacttgttcaaagagattgaaagttgatttacaacaatggctttagtggcggactggtgagtaacacgtaagcaacctgcctatcagaggggaacaacagttagaaatgactgctaataccgcatatgcct

SEQ ID NO: 2579 - DNA, 225 bp, unidentified
  misc_feature 1..225: note = bacterial strain Ascusb_5279 encodes 16S rRNA
  source 1..225: mol_type = genomic DNA
agagtttgatcctggctcaggatgaacgctggcggcgtgcctaatacatgcaagtcgaacgaggtgtagcaatacaccgagtggcgaacgggtgagtaacacgtaggtaacctgccttttagtttgggatacccagaggaaactttggctaataccggatatagagctctgaaggcatcttcggagtttgaaaggggcttcggcctcgctttaagatggacctgc

SEQ ID NO: 2580 - DNA, 225 bp, unidentified
  misc_feature 1..225: note = bacterial strain Ascusb_690 encodes 16S rRNA
  source 1..225: mol_type = genomic DNA
agagtttgatcatggctcagaacgaacgctggtggcgtgtcttatacatgcaagtcgagcgacgtagcaatacgtagcggcgaacgggtgagtaacgcgtaagcaatctgccccatatcaggaaatacccgtgccaacgcgcggttaatgtccaggagagtggccagctgcatggctggttgactagagatttatcggtatgggatgagcttgcgtccgattagc

SEQ ID NO: 2581 - DNA, 225 bp, unidentified
  misc_feature 1..225: note = bacterial strain Ascusb_3691 encodes 16S rRNA
  source 1..225: mol_type = genomic DNA
agagtttgatcatggctcaggacgaacgctggcggcgtgcctaacacatgcaagtcgagcggagacatttcgagaagcggaagttttcggatggaagcagattgggatgttttagcggcggacgggtgagtaacgcgtgagcaacctgtccttcacagggggataacacagcgaaagttgtactaataccgcataagaccacagagtcacatggcttaggggtca

SEQ ID NO: 2582 - DNA, 225 bp, unidentified
  misc_feature 1..225: note = bacterial strain Ascusb_3716 encodes 16S rRNA
  source 1..225: mol_type = genomic DNA
agagtttgatcatggctcaggacgaacgctggcggcgtgcttaacacatgcaagtcgagcggagacgtatttcggagagcttcggcaggaagagatgcgtcttagcggcggacgggtgagtaacgcgtgagcaacctgtccttcacagggggataagataccgaaaggtgttctaataccgcatgagaccacaaggccacatggcgaaggggtcaaaggagcaat

SEQ ID NO: 2583 - DNA, 225 bp, unidentified
  misc_feature 1..225: note = bacterial strain Ascusb_992 encodes 16S rRNA
  source 1..225: mol_type = genomic DNA
agagtttgatcatggctcaggatgaacgctagctacaggcttaacacatgcaagtcgaggggcagcatagggtttgcttgcaaactctgatggcgaccggcgcacgggtgagtaacgcgtatccaacctgcccatggctagggaatagcccgttgaaaagcggattaatgccctatggggtcctttgcagacatctaacgaggactaaaggtttaccggccatgg

SEQ ID NO: 2584 - DNA, 225 bp, unidentified
  misc_feature 1..225: note = bacterial strain Ascusb_19874 encodes 16S rRNA
  source 1..225: mol_type = genomic DNA
agagtttgatcctggctcagattgaacgctggcggcaggcctaatacatgcaagtcgaacggtaacatggaagtagcaatacttttgatgacgagtggcggacgggtgagtaatatttgggaatctacctatcagagggggatagcaactggaaacggttgataagaccgcgtacgctctgaggaggaaagtaatgggatcgcaagaccattagctgatagatga

SEQ ID NO: 2585 - DNA, 225 bp, unidentified
  misc_feature 1..225: note = bacterial strain Ascusb_1189 encodes 16S rRNA
  source 1..225: mol_type = genomic DNA
agagtttgatcatggctcaggattaacgctggcggcatgcctaatacatgcaagtcgaatggaagagcttgcttttccatggcgaacgggtgagtaacacgtaggtaacctaccttaaggacgaggataacctttggaaacgaaggataatactggataggacatcataaaacacatgtttagatgtttaaaggagcaatccaccataagaggggcctgcggcgc

SEQ ID NO: 2586 - DNA, 225 bp, unidentified
  misc_feature 1..225: note = bacterial strain Ascusb_1374 encodes 16S rRNA
  source 1..225: mol_type = genomic DNA
agagtttgatcatggctcaggatgaacgctagcggcaggcttaacacatgcaagtcgaggggtaacagggagtagcaatactccgctgacgaccggcgcacgggtgcgtaacgcgtatgcaacctacctgtaacaggggtataacggagggaaacttccactaatcccccatattgttgtggattcgcatgtttccacaacgaaagctttctgtggttacggatg

SEQ ID NO: 2587 - DNA, 225 bp, unidentified
  misc_feature 1..225: note = bacterial strain Ascusb_12024 encodes 16S rRNA
  source 1..225: mol_type = genomic DNA
agagtttgatcatggctcaggatgaacgctagctacaggcttaacacatgcaagtcgaggggcagcatagggtttgcttgcagactctgatggcgaccggcgcacgggtgagtaacgcgtatccaacctgcccatggctagggaatagcccgttgaaaagcggattaatgccctatggtgtcctttgcagacatctaacgaggactaaaggtttaccggccatgg

SEQ ID NO: 2588 - DNA, 225 bp, unidentified
  misc_feature 1..225: note = bacterial strain Ascusb_2720 encodes 16S rRNA
  source 1..225: mol_type = genomic DNA
agagtttgatcatggctcaggatgaacgctagcgacaggcctaacacatgcaagtcgagcggcagcacctcgggtggcgagcggcgcacgggtgagtaacgcgtatgtaacctgcccatgagtgggggatagcccggtgaaaaccggattaataccccatgacaccggaatttgacatcttataccggttaaagattcattgctcatggatggacatgcgttgga

SEQ ID NO: 2589 - DNA, 225 bp, unidentified
  misc_feature 1..225: note = bacterial strain Ascusb_2457 encodes 16S rRNA
  source 1..225: mol_type = genomic DNA
agagtttgatcctggctcaggatgaacgctagctacaggcttaacacatgcaagtcgaggggcagcatgggagtagcttgctactcttgatggcgaccggcgcacgggtgcgtaacacgtatccaatctacccatggctcagggatagcctttcgaaagaaagattaatacctgatggtcttacttggagacatctcctagtaagtaaagatttatcggcgatgg

SEQ ID NO: 2590 - DNA, 225 bp, unidentified
  misc_feature 1..225: note = bacterial strain Ascusb_2775 encodes 16S rRNA
  source 1..225: mol_type = genomic DNA
agagtttgatcatggctcaggatgaacgctagcggcaggcttaacacatgcaagtcgaggggcagcgcgggtagcaatacttggcggcgaccggcgaaagggtgagtaacgcgtgagcaacatacccgttgatgggggataggaggtggaaacgccttgtaataccccatatgatacgaagtggcatcacattgtattgaaagattcattgtcaacggattggtt

SEQ ID NO: 2591 - DNA, 225 bp, unidentified
  misc_feature 1..225: note = bacterial strain Ascusb_2442 encodes 16S rRNA
  source 1..225: mol_type = genomic DNA
agagtttgatcctggctcaggacgaacgctggcggcatgcttcatacatgcaagtcgaacgataaggtctcttcggagatacataagtggcggacgggtgagtaatatgtaggaaatctgccctagagagggggacaacagagggaaacttctgctaataccccatatgagcgtagttgaaatactattcttgaaaactccggtgctctaggatgagcctgcatc

SEQ ID NO: 2592 - DNA, 225 bp, unidentified
  misc_feature 1..225: note = bacterial strain Ascusb_1669 encodes 16S rRNA
  source 1..225: mol_type = genomic DNA
agagtttgatcctggctcaggatgaacgctagcgacaggcctaacacatgcaagtcgaggggcagcgcgggagaagcttgcttttcctggcggcgaccggcgcacgggtgcgtaacaggtgtgcaatctgtcctataccggggcatagcccagcgaaagttggattaattctccatgtgagcgagtgccgcatgacacacgcttgaaacgtaagggtatagggtg

SEQ ID NO: 2593 - DNA, 225 bp, unidentified
  misc_feature 1..225: note = bacterial strain Ascusb_1279 encodes 16S rRNA
  source 1..225: mol_type = genomic DNA
agagtttgatcatggctcagaacgaacgctggtggcgtgtcttatacatgcaagtcgagcggcgtagcaatacgtagcggcgaacgggtgagtaacgcgtaagcaatctgccccatatcaggaaatacccgtgccaacgcgcggttaatgtccaggagagtggccccttgcatgaggggttgactagagattcatcggtatgggatgagcttgcgtccgattagc

SEQ ID NO: 2594 - DNA, 225 bp, unidentified
  misc_feature 1..225: note = bacterial strain Ascusb_3104 encodes 16S rRNA
  source 1..225: mol_type = genomic DNA
agagtttgatcctggctcaggacgaacgctggcggcgtgcttaacacatgcaagtcgaacggggattaccgaacggaagggcttcggtccggaagattggtgattctagtggcggacgggtgagtaacgcgtgagcaacctgtcccagacagggggataacacttggaaacaggtgctaataccgcataagaccacggggagacatcttcctggggtaaaaggtg

SEQ ID NO: 2595 - DNA, 225 bp, unidentified
  misc_feature 1..225: note = bacterial strain Ascusb_403 encodes 16S rRNA
  source 1..225: mol_type = genomic DNA
agagtttgatcatggctcaggacgaacgctggcggcatgcctaacacatgcaagtcgaacggagttaagagagcttgcttttttaacttagtggcggacgggtgagtaacgcgtgagtaacctgcctcttagtggggaataatgtactgaaaaggacactaataccgcataatgtatcgagatcgcatggttttgataccaaagatttatcgctgagagatggac

SEQ ID NO: 2596 - DNA, 225 bp, unidentified
  misc_feature 1..225: note = bacterial strain Ascusb_1620 encodes 16S rRNA
  source 1..225: mol_type = genomic DNA
agagtttgatcatggctcaggacgaacgctggcggcgtgcctaacacatgcaagtcgaacgaagctccggatcggattcttcggatgaagagaaggaagacttagtggcggacgggtgagtaacgcgtgagcaacctgcctttcagagggggataacagttggaaacgactgctaataccgcataacataagatcatcgcatggtggttttatcaaagctgaggc

SEQ ID NO: 2597 - DNA, 225 bp, unidentified
  misc_feature 1..225: note = bacterial strain Ascusb_2247 encodes 16S rRNA
  source 1..225: mol_type = genomic DNA
agagtttgatcatggctcaggatgaacgctagctacaggcttaacacatgcaagtcgaggggcatcgggaagttagcttgctaactttgccggcgaccggcgcacgggtgagtaacgcgtatccaaccttccccttagtagggcatagcccggcgaaagtcggattaataccctatgttattcgtcgaggacatctgaaatgaatcaaaggtttaccgctaaggg

SEQ ID NO: 2598 - DNA, 225 bp, unidentified
  misc_feature 1..225: note = bacterial strain Ascusb_5159 encodes 16S rRNA
  source 1..225: mol_type = genomic DNA
agagtttgatcatggctcaggatgaacgctggcggcatgcctaagacatgcaagtcgaacgaagcggcccaatgaagaatgcgagcttgctcaaatttggatttggattcccgcttagtggcgcaagggtgagtaacacgtgggtaatctaccttcgagtttggaataacagttagaaatgactgctaatgccgaataatatggagaacgataattcatttttta

SEQ ID NO: 2599 - DNA, 225 bp, unidentified
  misc_feature 1..225: note = bacterial strain Ascusb_1203 encodes 16S rRNA
  source 1..225: mol_type = genomic DNA
agagtttgatcatggctcagaacgaacgctggcggcaggtcttaggcatgcaagtcgaacggacgaagcggaagcttgcttccgcctagttagtggcgcacgagtgagtaacgcgtgggaaactgcccatcactggggaataacgtttggaaacgaacgctaataccgcatacgccggaaacgggaaagatttatcggtgatggatgtgcccgcgttggattagc

SEQ ID NO: 2600 - DNA, 225 bp, unidentified
  misc_feature 1..225: note = bacterial strain Ascusb_2894 encodes 16S rRNA
  source 1..225: mol_type = genomic DNA
agagtttgatcctggctcaggatgaacgctggcggcgtgcttaacacatgcaagtcgaacggaacttagtcaatcgaagcagagggtgcttgcacccaaagcttcacccgattaagtttagtggcggacgggtgagtaacgcgtgagcaaccaaccttttgcagtgggacaacaattagaaatgattgctaataccgcataagaccacactaccgcatggtagag

SEQ ID NO: 2601 - DNA, 225 bp, unidentified
  misc_feature 1..225: note = bacterial strain Ascusb_1776 encodes 16S rRNA
  source 1..225: mol_type = genomic DNA
agagtttgatcctggctcagaacgaacgctggcggcgcgtcttaagcatgcaagtcgagcggtaagtcgggagcttgctcctgacctagagcggcggactggtgagtaacgcgtgggtgacgtacctttgtgacggggacagctcctagaaataggagataataccggatacgctgcatgttgtcagaggacatgcaggaaaggatcttttgattcgcacagaga

SEQ ID NO: 2602 - DNA, 225 bp, unidentified
  misc_feature 1..225: note = bacterial strain Ascusb_949 encodes 16S rRNA
  source 1..225: mol_type = genomic DNA
agagtttgatcctggctcaggatgaacgctggcggcgtgcctaatacatgcaagtcgagcgagaactttagaagcagcgaattatcaaagcagaaaaagggaaagcggcggacgggtgagtaacgcgtaggcaacctgcccttagcagagggatagccattggaaacgatgattaaaacctcataacgctgaactgacacatgtcggatcagccaaagatttatc

SEQ ID NO: 2603 - DNA, 225 bp, unidentified
  misc_feature 1..225: note = bacterial strain Ascusb_1372 encodes 16S rRNA
  source 1..225: mol_type = genomic DNA
agagtttgatcatggctcaggataaacgctggcggcgcacataagacatgcaagtcgaacgaacttaattcattcttttagattgaaagcggttagtggcggactggtgagtacaacataagcaacctgcctataagaggggaacaacagttagaaatgactgctaataccgcatatgccataataatcacatgattatagtgggaaaggagcaatccgcttata

SEQ ID NO: 2604 - DNA, 225 bp, unidentified
  misc_feature 1..225: note = bacterial strain Ascusb_1924 encodes 16S rRNA
  source 1..225: mol_type = genomic DNA
agagtttgatcatggctcaggattaacgctggcggcatgcctaatacatgcaagtcgaatggaagagcttgcttttccatggcgaacgggtgagtaacacgtaggtaacctaccttaaggacgaggataacctttggaaacgaaggataatactggataggacattataaagcacatgcttaaatgtttaaaggagcaatccaccataagaggggcctgcggcgc

SEQ ID NO: 2605 - DNA, 225 bp, unidentified
  misc_feature 1..225: note = bacterial strain Ascusb_3526 encodes 16S rRNA
  source 1..225: mol_type = genomic DNA
agagtttgatcctggctcaggacgaacgctggcggcgtgcctaacacatgcaagtcgaacggacgaagggagcttgctccccgagttagtggcgaacgggtgagtaacgcgtgagcaacctgcctttcagagggggacaacggttggaaacgaccgctaataccgcatgaaacaatcggaccgcatgatctgattgtcaaagatttatcgctgaaagatgggctc

SEQ ID NO: 2606 - DNA, 225 bp, unidentified; identical to SEQ ID NO: 2308
  misc_feature 1..225: note = bacterial strain Ascusb_14159 encodes 16S rRNA
  source 1..225: mol_type = genomic DNA

SEQ ID NO: 2607 - DNA, 225 bp, unidentified
  misc_feature 1..225: note = bacterial strain Ascusb_17284 encodes 16S rRNA
  source 1..225: mol_type = genomic DNA
agagtttgatcatggctcaggatgaacgctggcggcgtgcttaacacatgcaagtcgaacggagtatcgacgctgaacgattgattagcttgctaagattgagttcttgttgatacttagtggcggacgggtgagtaacgcgtgggtaacctgccgtatgcagggggacaacagttggaaacgactgctaataccgcatatgcacacagtaaggcatcttacagg

SEQ ID NO: 2608 - DNA, 225 bp, unidentified
  misc_feature 1..225: note = bacterial strain Ascusb_4619 encodes 16S rRNA
  source 1..225: mol_type = genomic DNA
agagtttgatcatggctcaggacgaacgctggcggcgtgcttaacacatgcaagtcgaacggggatatcggggatgagagcttcggcaggaatttctgatattcgagtggcggacgggtgagtaacgcgtgaacaatctgtcccagacagggggataacacttggaaacaggtgctaataccgcataagaccacagcttcgcatggagcaggggtaaaaggagca

SEQ ID NO: 2609 - DNA, 225 bp, unidentified
  misc_feature 1..225: note = bacterial strain Ascusb_2320 encodes 16S rRNA
  source 1..225: mol_type = genomic DNA
agagtttgatcatggctcaggacgaacgctggcggcgtgcctaacacatgcaagtcgaacggaactgttttgaaagatttcttcggaatgattgattttcagtttagtggcggacgggtgagtaacgcgtgagtaacctgcctctgagaggggaataacgttttgaaaagaacgctaataccgcataacatttatctgtcgcatggcagataaatcaaagatttc

SEQ ID NO: 2610 - DNA, 225 bp, unidentified
  misc_feature 1..225: note = bacterial strain Ascusb_3244 encodes 16S rRNA
  source 1..225: mol_type = genomic DNA
agagtttgatcctggctcaggacgaacgctggcggcgtgcttaacacatgcaagtcgaacggagttaagcgctgaattgatgctagcttgctagtggattttcttgcttaacttagtggcggacgggtgagtaacgcgtgagtaacctgcctctcagtggggaataacgccctgaaaagagcgctaataccgcataatatatttttgccgcatgacaggaatatc

SEQ ID NO: 2611 - DNA, 225 bp, unidentified
  misc_feature 1..225: note = bacterial strain Ascusb_1685 encodes 16S rRNA
  source 1..225: mol_type = genomic DNA
agagtttgatcatggctcaggacgaacgctggcggcgcgcctaacacatgcaagtcgaacggacttcaggagcttgcttctgaagttagtggcggacgggtgagtaacacgtgagcaacctgcctttcagagggggacaacagttggaaacgactgctaataccgcataacgtggcttgggggcatccccgggctaccaaagatttatcgctgaaagatgggctc

SEQ ID NO: 2612 - DNA, 225 bp, unidentified
  misc_feature 1..225: note = bacterial strain Ascusb_1661 encodes 16S rRNA
  source 1..225: mol_type = genomic DNA
agagtttgatcatggctcaggatgaacgctagctacaggcttaacacatgcaagtcgaggggcagcgagaagaaagcttgctttctttgtcggcgaccggcgcacgggtgagtaacgcgtatccaaccttccccttagtagggcatagcccggcgaaagtcggattaataccctatgttttccaatgaggacatctgagctggaataaagattgatcgctaaggg

SEQ ID NO: 2613 - DNA, 225 bp, unidentified
  misc_feature 1..225: note = bacterial strain Ascusb_7414 encodes 16S rRNA
  source 1..225: mol_type = genomic DNA
agagtttgatcatggctcaggatgaacgctggcggcatgcctaagacatgcaagtcgaacgaggtggcccaatgaagatggagtgcttgcacaaagttggatttggattcccacctagtggcgcaagggtgagtaacacgtgggtaatctaccttcgagtctggaataacagttagaaatgattgctaatgccggataatatggaaaacgatacgtcattttgta

SEQ ID NO: 2614 - DNA, 225 bp, unidentified
  misc_feature 1..225: note = bacterial strain Ascusb_410 encodes 16S rRNA
  source 1..225: mol_type = genomic DNA
agagtttgatcatggctcaggatgaacgctggcggcgtgcttaacacatgcaagtcgaacggagcttagaaggaagcttgctttcatttaagcttagtggcggacgggtgagtaacgcgtgagcaacctgccctcgagtggggaataacatcgagaaatcggtgctaataccgcataatgtcgagagaccgcatgatctttcgaccaaaggatttattcgcttga

SEQ ID NO: 2615 - DNA, 225 bp, unidentified
  misc_feature 1..225: note = bacterial strain Ascusb_2684 encodes 16S rRNA
  source 1..225: mol_type = genomic DNA
agagtttgatcctggctcaggatgaacgctggcggcgtgcctaacacatgcaagtcgaacgaagcatatctgacggagattcgtcgaagttgggtatgacttagtggcggacgggtgagtaatgtatgagcaacctgcctttcagagggggacaacagttggaaacgactgctaataccgcataatgtatttgggtggcatcacctggataccaaaggagcaatc

SEQ ID NO: 2616 - DNA, 225 bp, unidentified
  misc_feature 1..225: note = bacterial strain Ascusb_6392 encodes 16S rRNA
  source 1..225: mol_type = genomic DNA
agagtttgatcatggctcagaacgaacgctggcggcgcgtcttaagcatgcaagtcgagcgggagtatccagcttgctggatatgagagcggcggactggtgagtaacgcgtgggtgacgcacccttgggtcggggatagccttaagaaattaagggtaataccggatgaggtcctgcaggttggagatgcaggaggaaaggagccacggctccgcccgaggaac

SEQ ID NO: 2617 - DNA, 225 bp, unidentified
  misc_feature 1..225: note = bacterial strain Ascusb_2040 encodes 16S rRNA
  source 1..225: mol_type = genomic DNA
agagtttgatcatggctcaggacgaacgctggcggcgtgcctaacacatgcaagtcgaacggagttacgggagcttgctcctgtaacttagtggcggacgggtgagtaacgcgtgagcaacctgccttacagagggggatagccattggaaacgatggataataccgcataacgtatggtcatggcatcttgatcataccaaaggagcaatccgctgtaagatgg

SEQ ID NO: 2618 - DNA, 225 bp, unidentified
  misc_feature 1..225: note = bacterial strain Ascusb_1992 encodes 16S rRNA
  source 1..225: mol_type = genomic DNA
agagtttgatcatggctcaggatgaacgctggcggcgtgcctaacacatgcaagtcgaacgagcagagaggagcttgctcctcaaagctagtggcggacgggtgagtaacgcgtggataacctaccctgtacaggggaataacagttagaaatgactgctaatgccgcataagcgcacactgccgcatggcagagtgtgaaaagccgagacggtacaggatggat

SEQ ID NO: 2619 - DNA, 225 bp, unidentified
  misc_feature 1..225: note = bacterial strain Ascusb_3034 encodes 16S rRNA
  source 1..225: mol_type = genomic DNA
agagtttgatcatggctcaggatgaacgctagctacaggcttaacacatgcaagtcgaggggcagcatgattctagcttgctagaattgatggcgaccggcgcacgggtgagtaacgcgtatccaaccttccccttagtagggcatagcccggcgaaagtcggattaataccctatgttcttcgttgaggacatctgaaatgaagcaaagatttatcgctaaggg

SEQ ID NO: 2620 - DNA, 225 bp, unidentified
  misc_feature 1..225: note = bacterial strain Ascusb_9232 encodes 16S rRNA
  source 1..225: mol_type = genomic DNA
agagtttgatcctggctcaggatgaacgctggcggcgtgcctaacacatgcaagtcgaacggagtgttgagagtttacttttaacacttagtggcggacgggtgagtaatgcgtgagcaacctgcctttcagagggggacaacagttggaaacgactgctaataccgcataacatatacggatggcatcatctgtgtatcaaaggagcaatccgctgaaagatgg

SEQ ID NO: 2621 - DNA, 225 bp, unidentified
  misc_feature 1..225: note = bacterial strain Ascusb_3891 encodes 16S rRNA
  source 1..225: mol_type = genomic DNA
agagtttgatcatggctcaggacgaacgctggcggcgtgcttaacacatgcaagtcgaacgaggtgatattgcggaaggcttcggccggaagcgatatgaccgagtggcggacgggtgagtaacgcgtgagcaacctgtcttacacagggggataacgctccgaaaggagtgctaataccgcataagaccacggtaccgcatgatactgaggtaaaaggagagat

SEQ ID NO: 2622 - DNA, 225 bp, unidentified
  misc_feature 1..225: note = bacterial strain Ascusb_1613 encodes 16S rRNA
  source 1..225: mol_type = genomic DNA
agagtttgatcatggctcaggacgaacgctggcggcgtgcttaacacatgcaagtcgaacgaggatcatggagagcttgcttgaaatgatccgagtggcggacgggtgagtaacgcgtgagcaacctgtctcacacaggggaataacgcatcgaaagatgtgctaataccgcataggaccacggagtcgcatggctttgaggtgaaaggagcaatccggtgtgag

SEQ ID NO: 2623 - DNA, 225 bp, unidentified
  misc_feature 1..225: note = bacterial strain Ascusb_1496 encodes 16S rRNA
  source 1..225: mol_type = genomic DNA
agagtttgatcatggctcaggatgaacgctggcggcgtgcttaacacatgcaagtcgaacggggtttattgaaagcttgctttttataaacctagtggcggacgggtgagtaacgcgtagggaacctgccccataccgggggacaacagttggaaacgactgctaataccgcatatgcttacgaagtcgcatgactttgtgaggaaaactccggtggtatgggat

SEQ ID NO: 2624 - DNA, 225 bp, unidentified
  misc_feature 1..225: note = bacterial strain Ascusb_3334 encodes 16S rRNA
  source 1..225: mol_type = genomic DNA
agagtttgatcatggctcaggatgaacgctagctacaggcttaacacatgcaagtcgaggggcagcatgaagtttgcttgcaaactttgatggcgaccggcgcacgggtgagtaacgcgtatccaaccttccccttagtaggggatagcccggcgaaagtcggattaataccctatgttttccaatgcagacatctaaaatggaacaaaggtttaccgctaaggg

SEQ ID NO: 2625 - DNA, 225 bp, unidentified
  misc_feature 1..225: note = bacterial strain Ascusb_3778 encodes 16S rRNA
  source 1..225: mol_type = genomic DNA
agagtttgatcatggctcagaacgaacgctggcggcgcgtcttaagcatgcaagtcgaacggcaagattggtgcttgcaccgatcctagagtggcggactggtgagtaacacgtgggtgacgtacccttttgttggggatagccggtagaaataccggataataccgaataatcttggcattttagaggatgttaaggaaaggagcttcggcttcgcagatggaa

SEQ ID NO: 2626 - DNA, 225 bp, unidentified
  misc_feature 1..225: note = bacterial strain Ascusb_2413 encodes 16S rRNA
  source 1..225: mol_type = genomic DNA
agagtttgatcctggctcaggatgaacgctagctacaggcttaacacatgcaagtcgaggggcagcatggagtcagcttgctgactttgatggcgaccggcgcacgggtgcgtaacacgtatccaatctacccatggctcgggaatagcctttcgaaagaaagattaatgcccgatggccttacggagagacatctctctgtaagtaaagatttatcggcgatgg

SEQ ID NO: 2627 - DNA, 225 bp, unidentified
  misc_feature 1..225: note = bacterial strain Ascusb_845 encodes 16S rRNA
  source 1..225: mol_type = genomic DNA
agagtttgatcatggctcaggatgaacgctagcggcaggcttaacacatgcaagtcgaggggcagcgagggtagcaatacctgtcggcgaccggcggaagggtgcgtaacgcgtgagcaacatgcccgcggccgggggataagcattggaaacgatgtctaataccccatacgatgcgaggaggcatctccttgttttgaaagatttatcggcagcggattggtt

SEQ ID NO: 2628 - DNA, 225 bp, unidentified
  misc_feature 1..225: note = bacterial strain Ascusb_2495 encodes 16S rRNA
  source 1..225: mol_type = genomic DNA
agagtttgatcatggctcaggatgaacgctggcggcgtgcctaatacatgcaagtcgagcgagggtagcaatacccgagcggcgaacgggtgagtaacacgtaggtaacctgcctttgagactgggatacccggacgaaagttcggctaataccggataacaacggggacggcatcgtctccgcttgaaaggtgcgtttgcaccactcttagatggacctgcggc

SEQ ID NO: 2629 - DNA, 225 bp, unidentified
  misc_feature 1..225: note = bacterial strain Ascusb_9898 encodes 16S rRNA
  source 1..225: mol_type = genomic DNA
agagtttgatcctggctcaggatgaacgctagcgacaggcctaacacatgcaagtcgaggggcagcgcggaagtagcttgctatttctggcggcgaccggcgcacgggtgcgtaacaggtgtgcaatctgtccatagtcggggaatagcccagcgaaagttggattaaagctccatgtgtcacgaagccgcatgactttgtgatgaaacgtaaggactatgggtg

SEQ ID NO: 2630 - DNA, 225 bp, unidentified
  misc_feature 1..225: note = bacterial strain Ascusb_1945 encodes 16S rRNA
  source 1..225: mol_type = genomic DNA
agagtttgatcatggctcaggatgaacgctagctacaggcttaacacatgcaagtcgaggggcagcaggacgatagcttgctattgttgctggcgaccggcgcacgggtgagtaacgcgtatccaaccttccccttagtagggcatagcccggtgaaaatcggattaataccctatgttgtgtcatgaggacatctgaataacactaaagatttatcgctaaggg

SEQ ID NO: 2631 - DNA, 225 bp, unidentified
  misc_feature 1..225: note = bacterial strain Ascusb_832 encodes 16S rRNA
  source 1..225: mol_type = genomic DNA
agagtttgatcatggctcaggattaacgctagcggtatgcctaatacatgcaagtcgagcgggagcagcaatgctctagcggcaaacgggtgagtaatacgtatctaatctgccctttagaaaggaacaacagatcgaaagatttgctaataccttataggacattaactcgcatgagataatgtttaaagttccgttcggaacgctttaggatgagggtgcggc

SEQ ID NO: 2632 - DNA, 225 bp, unidentified
  misc_feature 1..225: note = bacterial strain Ascusb_3259 encodes 16S rRNA
  source 1..225: mol_type = genomic DNA
agagtttgatcatggctcaggatgaacgctggcggcgtgcttaacacatgcaagtcgaacgaagcatttgtacctgatcttttcggagtgaagggacttatgacttagtggcggacgggtgagtaacgcgtgggcaacctgccgtatgcagggggacaacagttggaaacgactgctaataccgcataagcgcacactgtcacatggcagagtgtgaaaagaatt

SEQ ID NO: 2633 - DNA, 225 bp, unidentified
  misc_feature 1..225: note = bacterial strain Ascusb_4836 encodes 16S rRNA
  source 1..225: mol_type = genomic DNA
agagtttgatcctggctcaggatgaacgctggcggcgtgcctaatacatgcaagtcgaacgggtgcagcaatgtactagtggcgaacgggtgagtaacacgttggtgacctgccccaaagatgggaatatcacctggaaacgggtggcaaaaccgaataagcttatcttagttagagaaggataagtaaaagtgcaaactactttgggaggggcctgcggcccat

SEQ ID NO: 2634 - DNA, 225 bp, unidentified
  misc_feature 1..225: note = bacterial strain Ascusb_7156 encodes 16S rRNA
  source 1..225: mol_type = genomic DNA
agagtttgatcatggctcaggatgaacgctagcgacaggcctaacacatgcaagtcgaggggcagcgcggaaatagtttactagttctggcggcgaccggcgcacgggtgcgtaacaggtgtgcaatctgtccatagtcggggaatagcccaccgaaaggtgaattaatgctccatgtgagtagaagccgcatgacttttacttaaaacgtaaggactatgggtg

SEQ ID NO: 2635 - DNA, 225 bp, unidentified
  misc_feature 1..225: note = bacterial strain Ascusb_246 encodes 16S rRNA
  source 1..225: mol_type = genomic DNA
agagtttgatcctggctcaggacgaacgctggcggcacgcctaacacatgcaagtcgaacggagatttgagagcttgctcttaaatcttagtggcggacgggtgagtaacacgtgagcaacctgcctctgagagagggatagcttctggaaacggatggtaatacctcataacatagctggaccgcatgatccggttatcaaagatttatcactcagagatgggc

SEQ ID NO: 2636 - DNA, 225 bp, unidentified
  misc_feature 1..225: note = bacterial strain Ascusb_2896 encodes 16S rRNA
  source 1..225: mol_type = genomic DNA
agagtttgatcatggctcaggatgaacgctggcggcgtgcttaacacatgcaagtcgagcgagaagctcgtgaacgattcttcggatgagtgatcgagtggaaagcggcggacgggtgagtaacgcgtaggcaacctgccccatacaaagggatagctactggaaacggtaattaatacctcataacacgagaggatcgcatgttcttctcgtcaaagatttatc

SEQ ID NO: 2637 - DNA, 225 bp, unidentified
  misc_feature 1..225: note = bacterial strain Ascusb_17947 encodes 16S rRNA
  source 1..225: mol_type = genomic DNA
agagtttgatcatggctcaggatgaacgctagctacaggcttaacacatgcaagtcgaggggtaacgacagcgaaagcttgcttttgctgggcgacgaccggcgcacgggtgagtaacgcgtatccaacctgcccataactaagggataatccgtagaaatgcggtctaataccttatgtgttccgaagaagacatctgaattggaataaagatttatcggttat

SEQ ID NO: 2638 - DNA, 225 bp, unidentified
  misc_feature 1..225: note = bacterial strain Ascusb_554 encodes 16S rRNA
  source 1..225: mol_type = genomic DNA
agagtttgatcatggctcaggatgaacgctggcggcgtgcttaacacatgcaagtcgaacggagtttacatgaaacctagtgattgtaaacttagtggcggacgggtgagtaacgcgtgggtaacctgccttataccgggggacaacagttagaaatgactgctaataccgcataagcgcacggtgtcgcatgacacagtgtgaaaaactccggtggtataagat

SEQ ID NO: 2639 - DNA, 225 bp, unidentified
  misc_feature 1..225: note = bacterial strain Ascusb_1038 encodes 16S rRNA
  source 1..225: mol_type = genomic DNA
agagtttgatcatggctcaggacgaacgctggcggcatgcctaacacatgcaagtcgaacggagttaagagagcttgcttttttaacttagtggcggacgggtgagtaacgcgtgagtaacctgcctcttagtggggaataatgtactgaaaaggacactaataccgcatgatgtacagagatcgcatggtctttgtaccaaagatttatcgctgagagatggac

SEQ ID NO: 2640 - DNA, 225 bp, unidentified
  misc_feature 1..225: note = bacterial strain Ascusb_5866 encodes 16S rRNA
  source 1..225: mol_type = genomic DNA
agagtttgatcatggctcagaacgaacgctggcggcaggcctaacacatgcaagtcgagcgtgaaaggggcttcggccctgagtaaagcggcgcacgggtgagtaacacgtgaataatctgccctttggaccgggataacagaccgaaaggactgctaataccggataagcttccgcgccaaccgggcgagtggagaaaaggatgggtctttcgggaccattcac

SEQ ID NO: 2641 - DNA, 225 bp, unidentified
  misc_feature 1..225: note = bacterial strain Ascusb_17576 encodes 16S rRNA
  source 1..225: mol_type = genomic DNA
agagtttgatcctggctcaggatgaacgctagctacaggcttaacacatgcaagtcgaggggaaacgattagaggtgcttgcaccactaaggcgtcgaccggcgcacgggtgagtaacgcgtatccaacctgccccacggtaaggaataatccgtagaaatgcggtctaataccttatgtgctccgacgaggacatctgatttggagtaaagatttctcgccatg

SEQ ID NO: 2642 - DNA, 225 bp, unidentified
  misc_feature 1..225: note = bacterial strain Ascusb_933 encodes 16S rRNA
  source 1..225: mol_type = genomic DNA
agagtttgatcctggctcaggatgaacgctggcggcgtgcctaacacatgcaagtcgaacggtgatgatttgatattttcggatggattttcatcatagtggcggacgggtgagtaacgcgtggataacctgcctcgtactggggaatagcagctggaaacggctggtaataccgcataagcgcacggacccgcatgagtctgtgtgaaaagatttatcggtacg

SEQ ID NO: 2643 - DNA, 225 bp, unidentified
  misc_feature 1..225: note = bacterial strain Ascusb_1660 encodes 16S rRNA
  source 1..225: mol_type = genomic DNA
agagtttgatcatggctcaggatgaacgctggcggcgtgcttaacacatgcaagtcgaacggagtttattgagaagcttgctttttggtaaacttagtggcggacgggtgagtaacgcgtgggtaacctgccttataccgggggataacgtttggaaacgaacgctaataccgcataagcgcacgggctcgcatgagtctgtgtgaaaaactccggtggtataag

SEQ ID NO: 2644 - DNA, 225 bp, unidentified
  misc_feature 1..225: note = bacterial strain Ascusb_11992 encodes 16S rRNA
  source 1..225: mol_type = genomic DNA
agagtttgatcatggctcaggatgaacgctagctacaggcttaacacatgcaagtcgaacgaagttaaagagcttgctttttaacttagtggcggacgggtgagtaacgcgtgagcaacctgcctttcagtggggaataatacttcgaaaggagtactaataccgcataacgtatgacggtcgcatgactgacataccaaagatttatcgctgagagatgggctc

SEQ ID NO: 2645 - DNA, 225 bp, unidentified
  misc_feature 1..225: note = bacterial strain Ascusb_6349 encodes 16S rRNA
  source 1..225: mol_type = genomic DNA
agagtttgatcctggctcaggatgaacgctggcggcgtgcttaacacatgcaagtcgaacgaagcactggtcttgaagttttcggacggaaagacctttgacttagtggcggacgggtgagtaacgcgtgggcaacctgccgtatgcagggggacaacagttggaaacgactgctaataccgcataagcgcacggggacgcatgttcctgtgtgaaaagccttaa

SEQ ID NO: 2646 - DNA, 225 bp, unidentified
  misc_feature 1..225: note = bacterial strain Ascusb_593 encodes 16S rRNA
  source 1..225: mol_type = genomic DNA
agagtttgatcatggctcaggatgaacgctggcggcatgcctaacacatgcaagtcgaacggagttggaggtagcttgctactgacaacttagtggcggacgggtgagtaacgcgtgagtaacctgcctctaagagggggataacgttctgaaaagaacgctaataccgcatataattacgaagtcgcatgattttgtgatgaaaggagcaatccgcttagagat

SEQ ID NO: 2647 - DNA, 225 bp, unidentified
  misc_feature 1..225: note = bacterial strain Ascusb_9441 encodes 16S rRNA
  source 1..225: mol_type = genomic DNA
agagtttgatcatggctcaggatgaacgctagcgacaggcttaacacatgcaagtcgaggggcatcgcgggggtggcaacactcctggcggcgaccggcgcactggtgagtaacacgtatgcaacctgcccccggcagagggataaacccgggaaactgggcctaatacctcatgcgccgcgatcccgcatgggtttgcggtgaaaggattccggccggggatgg

SEQ ID NO: 2648 - DNA, 225 bp, unidentified
  misc_feature 1..225: note = bacterial strain Ascusb_3101 encodes 16S rRNA
  source 1..225: mol_type = genomic DNA
agagtttgatcctggctcaggatgaacgctagctacaggcttaacacatgcaagtcgagcggaacactttcgggtgtttagcggcagacgggtgagtaacacgtatccaacctttcccttacccgggtatagcctcgggaaactgagagtaatccccgatgtggtgcacgagaagcattttttgcgcacgaaagattcatcggtaaggggtggggatgcgttcca

SEQ ID NO: 2649 - DNA, 225 bp, unidentified
  misc_feature 1..225: note = bacterial strain Ascusb_771 encodes 16S rRNA
  source 1..225: mol_type = genomic DNA
agagtttgatcatggctcaggacgaacgctggcggcgtgcctaacacatgcaagtcgaacggagcgaaagcagcttgctgctggagcttagtggcggacgggtgagtaacacgtgagtaacctgcctttcagaggggaataatgtctggaaacggacactaataccgcataacatatattaaccgcatgattgatatatcaaaggagcaatccgctgaaagatgg

SEQ ID NO: 2650 - DNA, 225 bp, unidentified
  misc_feature 1..225: note = bacterial strain Ascusb_2003 encodes 16S rRNA
  source 1..225: mol_type = genomic DNA
agagtttgatcctggctcaggacgaacgctggcggcgtgcttaacacatgcaagtcgaacgaagtcgttccaccgacacggattacttcggtaagaagtgtcaccggaaaggcttagtggcggacgggtgagtaacgcgtgagcaacctgcccataagagggggataacagttggaaacgactgctaataccgcataagaccacattaccgcatggtagaggggt

SEQ ID NO: 2651 - DNA, 225 bp, unidentified
  misc_feature 1..225: note = bacterial strain Ascusb_2601 encodes 16S rRNA
  source 1..225: mol_type = genomic DNA
agagtttgatcatggctcaggataaacgctggcggcgcacataagacatgcaagtcgaacgaacttaatcttaatatttatattgagaagcggttagtggcggactggtgagtaacgcgtaagcaatctacctattagaggggaataacagtgagaaatcattgctaataccgcatatgccataagaaccacatggttccagtgggaaaggagcaatccgctaat

SEQ ID NO: 2652 - DNA, 225 bp, unidentified
  misc_feature 1..225: note = bacterial strain Ascusb_4699 encodes 16S rRNA
  source 1..225: mol_type = genomic DNA
agagtttgatcctggctcaggacgaacgctggcggcgcgcttaacacatgcaagtcgaacggacgaccccggaacagagattcgttgacgggaaggggaagttagtggcgaacgggtgagtaacacgtgaagaacctgcctcagagagggggataacacttagaaataggtgctaataccgcatatgaccacactaccgcatggtagagaggtgaaaggagcaat

SEQ ID NO: 2653 - DNA, 225 bp, unidentified
  misc_feature 1..225: note = bacterial strain Ascusb_869 encodes 16S rRNA
  source 1..225: mol_type = genomic DNA
agagtttgatcatggctcaggatgaacgctggcggcgtgcctaacacatgcaagtcgagcggagatacatgtctaagagatttcggtcgaattaattgtatcttagcggcggatgggtgaggaacgcgtggagaacctgcccttcacagggggataacagctggaaacggctgttaataccgcatatgctcacaggatcgcatgatccagggaggaaagccgaga

SEQ ID NO: 2654 - DNA, 225 bp, unidentified
  misc_feature 1..225: note = bacterial strain Ascusb_10944 encodes 16S rRNA
  source 1..225: mol_type = genomic DNA
agagtttgatcatggctcaggatgaacgctagctacaggcttaacacatgcaagtcgaggggcagcatgaacttagcttgctaagtttgatggcgaccggcgcacgggtgagtaacgcgtatccaaccttccccatagtaggggatagcccggcgaaagtcggattaataccctatgttcttcgtcgaggacatctgaagtgaagcaaaggtttaccgctatggg

SEQ ID NO: 2655 - DNA, 225 bp, unidentified
  misc_feature 1..225: note = bacterial strain Ascusb_3301 encodes 16S rRNA
  source 1..225: mol_type = genomic DNA
agagtttgatcatggctcaggacgaacgctggcggcgtgcctaacacatgcaagtcgaacggagatgcattggcggagacttcggtcaacaacgatgtattcttagtggcggacgggtgagtaacgcgtgagcaatttgcctttcagagggggataacagattgaaaagtctgctaataccgcataacgtgcgacgggggcatccccgatgcaccaaaggagcaa

SEQ ID NO: 2656 - DNA, 225 bp, unidentified
  misc_feature 1..225: note = bacterial strain Ascusb_5898 encodes 16S rRNA
  source 1..225: mol_type = genomic DNA
agagtttgatcatggctcagaacgaacgctggcggcgcgtcttaagcatgcaagtcgagcggtaagtcgggagcttgctcctgacctagagcggcggactggtgagtaacgcgtgggtgacgtacctttgtgatggggacagctcctagaaataggagataataccgaatacgctgtatgttgtcagaggatatacaggaaaggatcttttgattcgcacagaga

SEQ ID NO: 2657 - DNA, 225 bp, unidentified
  misc_feature 1..225: note = bacterial strain Ascusb_1594 encodes 16S rRNA
  source 1..225: mol_type = genomic DNA
agagtttgatcatggctcaggatgaatgctggcggcgtgcctaatacatgcaagtcgagcggtaacagaggtagcttgctacctgctgacgagcggcggacggctgagtaacgcgtgggaacggaccccaaactgagggataactactcgaaagagtggctaataccgcatgtgatcttcggattaaagcttcggcggtttgggactggcctgcgtacgattaga

SEQ ID NO: 2658 - DNA, 225 bp, unidentified
  misc_feature 1..225: note = bacterial strain Ascusb_3421 encodes 16S rRNA
  source 1..225: mol_type = genomic DNA
agagtttgatcctggctcaggatgaacgctggcggcgtgcctaacacatgcaagtcgagcggagccacagggtgatccttcgggtgatccctatgacttagcggcggatgggtgagtaacacgtgggtaatctgccctgcactgggggataacagttggaaacgactgttaataccgcatatgcacacgtggccgcatggccgtgggtggaaagattcatcggtg

SEQ ID NO: 2659 - DNA, 225 bp, unidentified
  misc_feature 1..225: note = bacterial strain Ascusb_465 encodes 16S rRNA
  source 1..225: mol_type = genomic DNA
agagtttgatcatggctcaggacgaacgctggcggcgtgcctaacacatgcaagtcgaacgaagcattttcctcggagattcgtcgaagagggacttgacttagtggcggacgggtgagtaatgcgtgagcaacctgcccttcagagggggacaacagttggaaacgactgctaataccgcatgatgtcatcgggaggcatcttctgatgaccaaagatttatcg

SEQ ID NO: 2660 - DNA, 225 bp, unidentified
  misc_feature 1..225: note = bacterial strain Ascusb_4463 encodes 16S rRNA
  source 1..225: mol_type = genomic DNA
agagtttgatcatggctcaggatgaacgctagcgacaggcctaacacatgcaagtcgaggggcagcgcgagaatagtttactagtcttggcggcgaccggcgcacgggtgcgtaacaggtgtgcaatctgtccatagtcgggggatagcccagcgaaagctgaattaaaactccatgtgaatcgaagccgcatgactttgatttgaaacgcaaggactatgggtg

SEQ ID NO: 2661 - DNA, 225 bp, unidentified
  misc_feature 1..225: note = bacterial strain Ascusb_5653 encodes 16S rRNA
  source 1..225: mol_type = genomic DNA
agagtttgatcatggctcaggacgaacgctggcggcgtgcttaacacatgcaagtcgaacgaggatacatcagatgagagcttcggcaggaatcaggtgtattcgagtggcggacgggtgagtaacgcgtgagcaacctgtcccagacaggggaataacacttggaaacaggtgctaataccgcataagaccacggggccacatggccttggggtaaaaggagca

SEQ ID NO: 2662 - DNA, 225 bp, unidentified
  misc_feature 1..225: note = bacterial strain Ascusb_16694 encodes 16S rRNA
  source 1..225: mol_type = genomic DNA
agagtttgatcctggctcagaacgaacgctggcggcgcgtcttaagcatgcaagtcgagcgggagtacctagcttgctaggtatgagagcggcggactggtgagtaacgcgtgggtgacgtactctccggacggggatagctcctagaaataggagataataccggatacggtgtcatgtgtcagaggcatgacaggaaagcagcctttgctgcgccggaggagc

SEQ ID NO: 2663 - DNA, 225 bp, unidentified
  misc_feature 1..225: note = bacterial strain Ascusb_3158 encodes 16S rRNA
  source 1..225: mol_type = genomic DNA
agagtttgatcatggctcaggatgaacgctggcggcgtgcctaatacatgcaagtcgatcgagggagacacagcttgctgagtcgaactagaggcgaacgggtgagtaatacataagcaacctgcccacgaagactgggataatccctggaaacggggactaagaccggataggtaacgggaccgcatggtcttgttattaaaggacaaaaacactggtggatgg

SEQ ID NO: 2664 - DNA, 225 bp, unidentified
  misc_feature 1..225: note = bacterial strain Ascusb_6751 encodes 16S rRNA
  source 1..225: mol_type = genomic DNA
agagtttgatcatggctcagaacgaacgctggcggcgcgtcttaagcatgcaagtcgagcggtaagattggtgcttgcactaatcctagagcggcggactggtgagtaacgcgtgggtgacgtacctttgtgacggggacagctcctagaaataggagataataccggatacgctgcatgttgtcagaggacatgcaggaaaggatcttttgattcgcacagaga

SEQ ID NO: 2665 - DNA, 225 bp, unidentified
  misc_feature 1..225: note = bacterial strain Ascusb_3055 encodes 16S rRNA
  source 1..225: mol_type = genomic DNA
agagtttgatcatggctcaggatgaacgctggcggcgtgcataacacattcaagtcgaacgaagcgtgcggaacgagaccttcgggtcaagagaagtacgacttagtggcggacgggtgagtaacgcgtgagcaaccttcctgcttgtgagggataacacagggaaacttgtgctaataccgcatgacgcataactgtcgcatggtggatatgccaaagatatat

SEQ ID NO: 2666 - DNA, 225 bp, unidentified
  misc_feature 1..225: note = bacterial strain Ascusb_13090 encodes 16S rRNA
  source 1..225: mol_type = genomic DNA
agagtttgatcctggctcaggatgaacgctggcggcatgcctaagacatgcaagtcgaacgagacggcccattgaagattgagtgcttgcacgatttcggatttggattcccgtctagtggcgcaagggtgagtaatacgtgggtaatctaccttcgagtttggaataacagttagaaatgattgctaatgccgaattatatattttaagatacgtcttttaata

SEQ ID NO: 2667 - DNA, 225 bp, unidentified
  misc_feature 1..225: note = bacterial strain Ascusb_4047 encodes 16S rRNA
  source 1..225: mol_type = genomic DNA
agagtttgatcatggctcaggatgaacgctggcggcgtgcttaacacatgcaagtcgaacgaagctccatttaagatttcttcggaatgattttgtggatgacttagtggcggacgggtgagtaacgcgtgaggaacctgccttgcagaggggaataacagttggaaacgactgctaataccgcataatacgaaggagtcgcatgattttttcgtcaaagattta

SEQ ID NO: 2668 - DNA, 225 bp, unidentified
  misc_feature 1..225: note = bacterial strain Ascusb_2140 encodes 16S rRNA
  source 1..225: mol_type = genomic DNA
agagtttgatcatggctcaggatgaacgctagctacaggcttaacacatgcaagtcgaggggcagcatgggagtagcttgctactcttgatggcgaccggcgcacgggtgcgtaacacgtatccaatctacccatggctcgggaatagcctttcgaaagaaagattaatgcccgatggtctgtcagtgagacatctcgcaggcagtaaagattaatcggcgatgg

SEQ ID NO: 2669 - DNA, 225 bp, unidentified
  misc_feature 1..225: note = bacterial strain Ascusb_2244 encodes 16S rRNA
  source 1..225: mol_type = genomic DNA
agagtttgatcatggctcaggatgaacgctagcggcaggcctaacacatgcaagtcgaggggcagcggggtgtagcaatacactgccggcgaccggcgcacgggtgcgtaacgcgtatgcaacctgcccgcgacagggggataacgctgggaaaccggcactaataccccgtaacacccgggtccgcatggatctgggttgaaaggagcgatccggtcgcggatg

SEQ ID NO: 2670 - DNA, 225 bp, unidentified
  misc_feature 1..225: note = bacterial strain Ascusb_1119 encodes 16S rRNA
  source 1..225: mol_type = genomic DNA
agagtttgatcatggctcagaacgaacgctggcggcaggtcttaggcatgcaagtcgaacgagcgaagcagggcttgccctgtggaacgagtggcgcacgagtgagtaacgcgtgggaaactgcccaccactggggaataacgtctggaaacggacgctaataccgcatacgccggaaacgggaaagatttatcggtggtggatgtgcccgcgttggattagctt

SEQ ID NO: 2671 - DNA, 225 bp, unidentified
  misc_feature 1..225: note = bacterial strain Ascusb_4974 encodes 16S rRNA
  source 1..225: mol_type = genomic DNA
agagtttgatcatggctcaggataaacgctggcggcgtgcttaacacatgcaagtcgaacggagtatctctcccgagactaaggaagcttgcttccgaggaatcatttgagatacttagtggcggacgggtgagtaacgcgtgggaaacctgccctatgcagggggataacagttggaaacgactgttaataccgcataagcgcacagtaccgcatggtacagtg

SEQ ID NO: 2672 - DNA, 225 bp, unidentified
  misc_feature 1..225: note = bacterial strain Ascusb_2541 encodes 16S rRNA
  source 1..225: mol_type = genomic DNA
agagtttgatcatggctcaggatgaacgctggcggcgtgcctaatacatgcaagtcgaacgagatgtagcaatacatctagtggcgaacgggtgagtaacacgtattcaatctgccctaacgactgggataccctcgggaaaccttggctaataccggataggaaatcgaatcgcatgatttgatttttaaaggatcttttgattcacgataggatgagaatgcg

SEQ ID NO: 2673 - DNA, 225 bp, unidentified
  misc_feature 1..225: note = bacterial strain Ascusb_1324 encodes 16S rRNA
  source 1..225: mol_type = genomic DNA
agagtttgatcatggctcaggatgaacgctagctacaggcttaacacatgcaagtcgaggggcagcatggtcttagcttgctaaggctgatggcgaccggcgcacgggtgagtaacgcgtatccaaccttccccttagtagggcatagcccggcgaaagtcggattaataccctatgttgtcaatagaggacatctgaagctgaccaaaggtttaccgctaaggg

SEQ ID NO: 2674 - DNA, 225 bp, unidentified
  misc_feature 1..225: note = bacterial strain Ascusb_12678 encodes 16S rRNA
  source 1..225: mol_type = genomic DNA
agagtttgatcctggctcaggatgaacgctggcggcgtgcctaacacatgcaagtcgaacgaagcgcctcgcccgacgaagtggagtgcttgcacaaagcggaatcaattgaggcgacttagtggcggacgggtgagtaacgcgtgggtaacctgccttatacagggggataacagttagaaatgactgctaataccgcataagcgcacagtatcgcatgatacg

SEQ ID NO: 2675 - DNA, 225 bp, unidentified
  misc_feature 1..225: note = bacterial strain Ascusb_4037 encodes 16S rRNA
  source 1..225: mol_type = genomic DNA
agagtttgatcctggctcaggatgaacgctggcggcgtgcttaacacatgcaagtcgagcgaagcactgtttctgaagttttcggatggacgagactttgactgagcggcggacgggtgagtaacgcgtggggaacctgccccataccgggggataacagatggaaacgtctgctaataccgcataagcgcacgaagcggcatcgttttgtgtgaaaaactccgg

SEQ ID NO: 2676 - DNA, 225 bp, unidentified
  misc_feature 1..225: note = bacterial strain Ascusb_2025 encodes 16S rRNA
  source 1..225: mol_type = genomic DNA
agagtttgatcatggctcaggatgaacgctagctacaggcttaacacatgcaagtcgaggggcagcatgaggtttgcttgcaaaccttgatggcgaccggcgcacgggtgcgtaacgcgtatccaaccttccagctactagggaatagcccgttgaaagacggattaatgccctatgtgttcattagatggcatcagatgttgaacaaagattcatcggtagctg

SEQ ID NO: 2677 - DNA, 225 bp, unidentified
  misc_feature 1..225: note = bacterial strain Ascusb_11080 encodes 16S rRNA
  source 1..225: mol_type = genomic DNA
agagtttgatcctggctcaggatgaacgctggcggcatgcctaagacatgcaagtcgaacgaggtggcccactgactaatattgaaaatggagtgcttgcacaaagttggatttattatgatgtggatcttccacctagtggcaaacgggtgagtaacacatgggttacctgcctctaagttggggataacagttggaaacgattgctaataccgaatgtgatct

SEQ ID NO: 2678 - DNA, 225 bp, unidentified
  misc_feature 1..225: note = bacterial strain Ascusb_2329 encodes 16S rRNA
  source 1..225: mol_type = genomic DNA
agagtttgatcctggctcaggatgaacgctggcggcgtgcttaacacatgcaagtcgaacgaagcatttaacctgatttcttcggattgaaggttttatgacttagtggcggacgggtgagtaacgcgtggggaacctgccccataccgggggacaacagttggaaacggctgctaataccgcataagcgcacgggatggcatcatccagtgtgaaaaactccgg

SEQ ID NO: 2679 - DNA, 225 bp, unidentified
  misc_feature 1..225: note = bacterial strain Ascusb_1989 encodes 16S rRNA
  source 1..225: mol_type = genomic DNA
agagtttgatcctggctcaggatgaacgctagctacaggcttaacacatgcaagtcgaggggcagcattgggatagcttgctattccagatggcgaccggcgcacgggtgagtaacgcgtatccaaccttccccatagtagggcacagcccggcgaaagtcggattaattccctatgctgtccagagaggacatctgacctggacgaaagattcatcgctatggg

SEQ ID NO: 2680 - DNA, 225 bp, unidentified
  misc_feature 1..225: note = bacterial strain Ascusb_8451 encodes 16S rRNA
  source 1..225: mol_type = genomic DNA
agagtttgatcatggctcaggatgaacgctagctacaggcttaacacatgcaagtcgaggggcagcatgacgattgcttgcaattgttgatggcgaccggcgcacgggtgagtaacgcgtatccaaccttccgcatagtagggaatagcccggcgaaagtcggattaatgccctatgttttccaatgaggacatctgagctggaacaaagatttatcgctatgcg

SEQ ID NO: 2681 - DNA, 225 bp, unidentified
  misc_feature 1..225: note = bacterial strain Ascusb_1095 encodes 16S rRNA
  source 1..225: mol_type = genomic DNA
agagtttgatcatggctcaggatgaacgctggcggcgtgcttaacacatgcaagtcgaacggactgcacggactgaaattttcggatggatgaccgtgtacgttagtggcggacgggtgagtaacgcgtgggaaacctgccctattccgggggataccagttggaaacgactgttaataccgcataagcgcacattgccgcatggcagagtgtgaaaaactccgg

SEQ ID NO: 2682 - DNA, 225 bp, unidentified
  misc_feature 1..225: note = bacterial strain Ascusb_1565 encodes 16S rRNA
  source 1..225: mol_type = genomic DNA
agagtttgatcatggctcaggatgaacgctggcggcgtgcttaacacatgcaagtcgaacgaagcattgaggaggaagttttcggacggaattcgctttgacttagtggcggacgggtgagtaacgcgtgggtaacctgccgtatgcagggggacaacagctggaaacggctgctaataccgcataagcgcacagcatcgcatggtgcagtgtgaaaagatttat

SEQ ID NO: 2683 - DNA, 225 bp, unidentified
  misc_feature 1..225: note = bacterial strain Ascusb_8178 encodes 16S rRNA
  source 1..225: mol_type = genomic DNA
agagtttgatcctggctcaggatgaacgctggcggcatgcctaagacatgcaagtcgaacgaggtgccccattgaagattgcgtgcttgcacaaaattggatttggatcagcacctagtggcggacgggtgagtaacacgtgggtgacctaccttcaagactgggatacctattggaaacgatagttaataccggataacacattaattcgttttaatgttgaaa

SEQ ID NO: 2684 - DNA, 225 bp, unidentified
  misc_feature 1..225: note = bacterial strain Ascusb_724 encodes 16S rRNA
  source 1..225: mol_type = genomic DNA
agagtttgatcctggctcaggatgaacgctagctacaggcttaacacatgcaagtcgaggggcagcatgagattagcttgctaatcttgatggcgaccggcgcacgggtgagtaacgcgtatccaaccttccccctactcaggcatagcccggtgaaaaccggattaactcctgatagtttcactagatggcatctgacggtgaataaagctcagcggtaaggga

SEQ ID NO: 2685 - DNA, 225 bp, unidentified
  misc_feature 1..225: note = bacterial strain Ascusb_4988 encodes 16S rRNA
  source 1..225: mol_type = genomic DNA
agagtttgatcatggctcaggatgaacgctggcggcgtgcttaacacatgcaagtcgaacggagtattgacgctgaggagtggagagcttgctcaaagcaaatcttgtcgatacttagtggcggacgggtgagtaacgcgtgggtaacctgccgtatgcagggggacaacagttggaaacgactgctaataccgcatatgcacacagtaaggcatcttacagggt

SEQ ID NO: 2686 - DNA, 225 bp, unidentified
  misc_feature 1..225: note = bacterial strain Ascusb_555 encodes 16S rRNA
  source 1..225: mol_type = genomic DNA
agagtttgatcatggctcaggataaacgctggcggcgtgcctaatacatgcaagtcgaacggagagagacaagcttgcttgtcgaacttagtggcgaacgggtgagtaatacataagcaacctgcccataaagtccgggataactttgggaaactggaattaataccggataggtaacttggacgcatgttcgggttattaaaggtgagaaacgctaatggatgg

SEQ ID NO: 2687 - DNA, 225 bp, unidentified
  misc_feature 1..225: note = bacterial strain Ascusb_4607 encodes 16S rRNA
  source 1..225: mol_type = genomic DNA
agagtttgatcctggctcaggacgaacgctggcggcgtgcttaacacatgcaagtcgagcggggataacggaactgaaagcttcggccggatgatctgttattccagcggcggacgggtgagtaacgcgtgagcaatctgtcccagacagggggataacacttggaaacaggtgctaataccgcataagaccacgtcctcacatggggatgaggtaaaaggagcg

SEQ ID NO: 2688 - DNA, 225 bp, unidentified
  misc_feature 1..225: note = bacterial strain Ascusb_443 encodes 16S rRNA
  source 1..225: mol_type = genomic DNA
agagtttgatcatggctcaggacgaacgctggcggcgtgcctaacacatgcaagtcgaacggacgaggggagcttgctccccaagttagtggcggacgggtgagtaacacgtgagcaacctgcccttcggagggggacaacagcgggaaactgctgctaataccgcataacgtatttttgaggcatctcgggaataccaaagattttatcgccgaaggatgggct

SEQ ID NO: 2689 - DNA, 225 bp, unidentified
  misc_feature 1..225: note = bacterial strain Ascusb_2222 encodes 16S rRNA
  source 1..225: mol_type = genomic DNA
agagtttgatcatggctcaggacgaacgctggcggcgtgcttaacacatgcaagtcgagcggactcttattgaaagcttgctggatataagagttagcggcggacgggtgagtaacgcgtgagcaacctgtcctctacagggggataagatcccgaaagggattctaataccgcatgagaccacagaaggacatccttcaggggtcaaaggagcaatccggtaga

SEQ ID NO: 2690 - DNA, 225 bp, unidentified
  misc_feature 1..225: note = bacterial strain Ascusb_4598 encodes 16S rRNA
  source 1..225: mol_type = genomic DNA
agagtttgatcatggctcaggatgaatgctggcggcgtgcctaatacatgcaagtcgagcggtaacagggcttcaccgtgttcttgacgcacttggccatagagcaagtagctgaattcgagagcacagtgaagctgctgacgagcggcggacggctgagtaacgcgtgggaacggaccccaaactgagggataacgcaccgaaaggtgtgctaataccgcatgt

SEQ ID NO: 2691 - DNA, 225 bp, unidentified
  misc_feature 1..225: note = bacterial strain Ascusb_3385 encodes 16S rRNA
  source 1..225: mol_type = genomic DNA
agagtttgatcatggctcaggatgaacgctagcggcaggcttaacacatgcaagtcgaggggcagcgtggagtagcaatactctgacggcgaccggcgaaagggtgagtaacgcgtgagcaacatgcccggtagtggaggatagtcgatggaaacgtcgtgtaatactccgtaacaacattgaccgcatgatcgatgtttaatagatttattgctatcggattgg

SEQ ID NO: 2692 - DNA, 225 bp, unidentified
  misc_feature 1..225: note = bacterial strain Ascusb_4965 encodes 16S rRNA
  source 1..225: mol_type = genomic DNA
agagtttgatcctggctcaggatgaacgctggcggcgtgcctaacacatgcaagtcgaacggagatcttacagatggaggcttcggtcaaaagaagtttgatcttagtggcggacgggtgagtaacgcgtggagaacctgccctgtacagggggataacaggcagaaatgcctgctaataccgcataagcgcacgggagcgcatgctccagtgtgaaaaactccg

SEQ ID NO: 2693 - DNA, 225 bp, unidentified
  misc_feature 1..225: note = bacterial strain Ascusb_495 encodes 16S rRNA
  source 1..225: mol_type = genomic DNA
agagtttgatcatggctcaggacgaacgctggcggcatgcctaacacatgcaagtcgaacggaagtaagagaagcttgcttttcttactttagtggcggacgggtgagtaacgcgtgagcaatctgcctttcagtggggaataatgttctgaaaagagcactaataccgcataaagtatcgttgccgcatgacgatggtaccaaagatttatcgctgagagatga

SEQ ID NO: 2694 - DNA, 225 bp, unidentified
  misc_feature 1..225: note = bacterial strain Ascusb_2402 encodes 16S rRNA
  source 1..225: mol_type = genomic DNA
agagtttgatcatggctcaggatgaacgctggcggcgtgcctaacacatgcaagtcgaacgaagcataactgacggagattcgtcgaagccggttatgacttagtggcggacgggtgagtaatgtatgagcaacctgcctttcagagggggacaacagttggaaacgactgctaataccgcataatgtacggaggggacatccccactgtaccaaaggagcaatc

SEQ ID NO: 2695 - DNA, 225 bp, unidentified
  misc_feature 1..225: note = bacterial strain Ascusb_1583 encodes 16S rRNA
  source 1..225: mol_type = genomic DNA
agagtttgatcatggctcaggatgaacgctagctacaggcttaacacatgcaagtcgaggggcagcgaggagttagcttgctaactctgtcggcgaccggcgcacgggtgagtaacgcgtatccaaccttccccgtactagaggatagcccggcgaaagtcggattaatactctatgttgtattatgaggacatctgagtaataccaaaggtttaccggtatggg

SEQ ID NO: 2696 - DNA, 225 bp, unidentified
  misc_feature 1..225: note = bacterial strain Ascusb_1941 encodes 16S rRNA
  source 1..225: mol_type = genomic DNA
agagtttgatcctggctcaggacgaacgctggcggcgtgcttaacacatgcaagtcgagcggagacatacgaacggaaggcttcggccggaagattgtatgttttagcggcggacgggtgagtaacgcgtgaacaatctgtccttcacagggggataagacagcgaaagttgttctaataccgcatgggaccacggcccggcatcgggcaggggtgaaaggagca

SEQ ID NO: 2697 - DNA, 225 bp, unidentified
  misc_feature 1..225: note = bacterial strain Ascusb_994 encodes 16S rRNA
  source 1..225: mol_type = genomic DNA
agagtttgatcatggctcaggatgaacgctggcggcgtgcttaacacatgcaagtcgaacggagcttatttggaaagcttgcttttcgtttaagcttagtggcggacgggtgagtaacgcgtgagcaacctgcccttcagtggggaataacaccgagaaatcggtgctaataccgcataatgtcggaggaccgcatgatccaccgaccaaaggatttattcgctg

SEQ ID NO: 2698 - DNA, 225 bp, unidentified
  misc_feature 1..225: note = bacterial strain Ascusb_3181 encodes 16S rRNA
  source 1..225: mol_type = genomic DNA
agagtttgatcatggctcaggacgaacgctggcggcgtgcctaacacatgcaagtcgaacggagttaagcgctgaatgaagcttcggcagaattcttgcttaacttagtggcggacgggtgagtaacgcgtgagtaacctgcctctgagaggggaataacgttctgaaaagatcgctaataccgcataacatatcgaagtcgcatggctttggtatcaaagattt

SEQ ID NO: 2699 - DNA, 225 bp, unidentified
  misc_feature 1..225: note = bacterial strain Ascusb_2547 encodes 16S rRNA
  source 1..225: mol_type = genomic DNA
agagtttgatcatggctcaggacgaacgctggcggcgtgcttaacacatgcaagtcgagcggacttgtgaatgaaagcttgctggatttcacaagttagcggcggacgggtgagtaacgcgtgagcaacctgtcctctacagggggataagatcccgaaagggattctaataccgcatgagaccacagaaggacatccttcaggggtcaaaggagcaatccggta

SEQ ID NO: 2700 - DNA, 225 bp, unidentified
  misc_feature 1..225: note = bacterial strain Ascusb_2107 encodes 16S rRNA
  source 1..225: mol_type = genomic DNA
agagtttgatcatggctcaggacgaacgctggcggcgtgcctaacacatgcaagtcgagcggagacttatcagatgagagcttcggcaggattcgggtaagttttagcggcggacgggtgagtaacgcgtgagcaatctgtctcagacagggggataacgcagcgaaagttgcactaataccgcatgagaccacagagccacatggcttaggggtcaaaggagca

SEQ ID NO: 2701 - DNA, 225 bp, unidentified
  misc_feature 1..225: note = bacterial strain Ascusb_2516 encodes 16S rRNA
  source 1..225: mol_type = genomic DNA
agagtttgatcatggctcaggatgaacgctagcggcaggcttaacacatgcaagtcgaggggcagcgcgaggtagcaataccttggcggcgaccggcgcacgggtgcgtaacgcgtatgcaacctacccactacagggggataacggagggaaacttccactaatatcccatggtgtcaccgaatcgcatggtttggtgactaaagctacggtggtagtggacgg

SEQ ID NO: 2702 - DNA, 225 bp, unidentified
  misc_feature 1..225: note = bacterial strain Ascusb_1675 encodes 16S rRNA
  source 1..225: mol_type = genomic DNA
agagtttgatcctggctcaggatgaacgctagcgacaggcctaacacatgcaagtcgagcggcagcacctcgggtggcgagcggcgcacgggtgagtaacgcgtatgtaacctgcccatgagtgggggatagcccggtgaaaaccggattaataccccatgataccattgtctgacatcatttaatggttaaagattcattgctcatggatggacatgcgttgga

SEQ ID NO: 2703 - DNA, 225 bp, unidentified
  misc_feature 1..225: note = bacterial strain Ascusb_3734 encodes 16S rRNA
  source 1..225: mol_type = genomic DNA
agagtttgatcatggctcaggatgaacgctagctacaggcttaacacatgcaagtcgaggggcagcatgaaagtagcttgctacttttgatggcgaccggcgcacgggtgcgtaacacgtatccaatctacccatggctcagggatagcctttcgaaagaaagattaatacctgatggcttcactttcccgcatggggaggtgaataaagatttatcggcgatgg

SEQ ID NO: 2704 - DNA, 225 bp, unidentified
  misc_feature 1..225: note = bacterial strain Ascusb_2477 encodes 16S rRNA
  source 1..225: mol_type = genomic DNA
agagtttgatcatggctcaggatgaacgctggcggcgtgcttaacacatgcaagtcgaacgaagctctttgaacggaggattcgtctgaagtgagaagatgacttagtggcggacgggtgagtaacgcgtggggaatctgccccgtaccgggggataacacttagaaataggtgctaataccgcataagcgcacggtgtcgcatgacacagtgtgaaaaactccg

SEQ ID NO: 2705 - DNA, 225 bp, unidentified
  misc_feature 1..225: note = bacterial strain Ascusb_20164 encodes 16S rRNA
  source 1..225: mol_type = genomic DNA
agagtttgatcatggctcaggacgaacgctggcggcgtgcctaacacatgcaagtcgaacggagttatgtcacgaagttcttcggagcggacgacgtagcttagtggcggacgggtgagtaacgcgtgagcaacctgcctttcagagggggacaacggttggaaacgaccgctaataccgcatgacatgactggagcgcatgatccggtcatcaaagattttatc

SEQ ID NO: 2706 - DNA, 225 bp, unidentified
  misc_feature 1..225: note = bacterial strain Ascusb_1876 encodes 16S rRNA
  source 1..225: mol_type = genomic DNA
agagtttgatcatggctcagaacgaacgctggtggcgtgtcttatacatgcaagtcgagcggtccagcaatggatagcggcgaacgggtgagtaacgcgtaagcaatctgccccctgctcgggaatagccgtgccaacgcgcggataataccggatatcgtggggccctgcatagggccttgacaaaagatttatcggcaggggatgagcttgcgtccgattagc

SEQ ID NO: 2707 - DNA, 225 bp, unidentified
  misc_feature 1..225: note = bacterial strain Ascusb_12149 encodes 16S rRNA
  source 1..225: mol_type = genomic DNA
agagtttgatcatggctcaggatgaacgctggcggcgtgcctaacacatgcaagtcgaacggggttaaagggaaattttcggatggacctttaacttagtggcggacgggtgagtaacgcgtggataacctgcctcacacagggggatagcagctggaaacggctggtaataccgcataagaccacagcaccgcatggtgcaggggtaaaagatttatcggtgtg

SEQ ID NO: 2708 - DNA, 225 bp, unidentified
  misc_feature 1..225: note = bacterial strain Ascusb_2231 encodes 16S rRNA
  source 1..225: mol_type = genomic DNA
agagtttgatcatggctcaggatgaacgctggcggcgtgcttaacacatgcaagtcgaacggatcatggatgaaagcttcggccggaatccatggttagtggcggacgggtgagtaacgcgtgggtaacctgcctcacactgggggataacgattggaaacgatcgctaataccgcataagaccacggtgccgcatggcacagaggtaaaaactccggtggtgtg

SEQ ID NO: 2709 - DNA, 225 bp, unidentified
  misc_feature 1..225: note = bacterial strain Ascusb_2421 encodes 16S rRNA
  source 1..225: mol_type = genomic DNA
agagtttgatcctggctcaggatgaacgctggcggcgtgcttaacacatgcaagtcgaacggagttaacgcgctgaggagagcttgctcaaatcttgcgttaacttagtggcggacgggtgagtaacgcgtggataacctgccttataccgggggataacacttagaaataggtgctaataccgcataagcgcacgctttcgcatgaaagagtgtgaaaaactcc

SEQ ID NO: 2710 - DNA, 225 bp, unidentified
  misc_feature 1..225: note = bacterial strain Ascusb_2029 encodes 16S rRNA
  source 1..225: mol_type = genomic DNA
agagtttgatcatggctcagaacgaacgctggcggcgcgtcttaagcatgcaagtcgaatggcaagatagagcttgctctatcctagaatggcggactggtgagtaacgcgtgggtgacgtaccctttagacggggatagctcctagaaataggagataataccggataagctgtaactctttagaggggttacaggaaaggatcttttgatccgctgaaggagc

SEQ ID NO: 2711 - DNA, 225 bp, unidentified
  misc_feature 1..225: note = bacterial strain Ascusb_12943 encodes 16S rRNA
  source 1..225: mol_type = genomic DNA
agagtttgatcatggctcaggattaacgctggcggcatgcctaagacatgcaagtcgaacgagatggtccattgaaaaatgcgtgcttgcacaaatttggatttgggttgccatctagtggcgaaagggtgagtaacacgtgggtaatctacctttgagtctggaataacagttagaaatgattgctaatgccggatgatatgtaaaacgatacgtcttttgtat

SEQ ID NO: 2712 - DNA, 225 bp, unidentified
  misc_feature 1..225: note = bacterial strain Ascusb_781 encodes 16S rRNA
  source 1..225: mol_type = genomic DNA
agagtttgatcatggctcaggatgaacgctggcggcgtgcttaacacatgcaagtcgaacgaagcactttatttgaagccttcgggtgaattattttgtgacttagtggcggacgggtgagtaacgcgtgggtaacctgcctcatacaccgggataacagttggaaacggctgctaataccggataagcatacagtaccgcatggtacagtgtgaaaaactcagg

SEQ ID NO: 2713 - DNA, 225 bp, unidentified
  misc_feature 1..225: note = bacterial strain Ascusb_791 encodes 16S rRNA
  source 1..225: mol_type = genomic DNA
agagtttgatcatggctcaggacgaacgctggcggcgtgcctaacacatgcaagtcgaacggacgaagggagcttgctccctgagttagtggcgaacgggtgagtaacgcgtgagcaacctgcctttcagagggggacaacggttggaaacgaccgctaataccgcatgaaacagtcggaccgcatgatctgactgtcaaagatttatcgctgaaagatgggctc

SEQ ID NO: 2714 - DNA, 225 bp, unidentified
  misc_feature 1..225: note = bacterial strain Ascusb_4098 encodes 16S rRNA
  source 1..225: mol_type = genomic DNA
agagtttgatcatggctcaggatgaacgctagctacaggcttaacacatgcaagtcgaggggcagcgggaagtcagcttgctgactttgccggcgaccggcgcacgggtgagtaacgcgtatccaaccttccccttagtagggcatagcccgtagaaatgcggattaataccctatgttattcgtcgaggacatctgaagtgaatcaaaggtttaccgctaaggg

SEQ ID NO: 2715 - DNA, 225 bp, unidentified
  misc_feature 1..225: note = bacterial strain Ascusb_1056 encodes 16S rRNA
  source 1..225: mol_type = genomic DNA
agagtttgatcatggctcaggatgaacgctggcggcgtgcttaacacatgcaagtcgaacgaagcacataagacggaatccttcgggaggaagatttatgtgactgagtggcggacgggtgagtaacgcgtgggtaacctgccctgtacagggggataacagttagaaatgactgctaataccgcataagcgcacagtaccgcatggtacagtgtgaaaaactcc

SEQ ID NO: 2716 - DNA, 225 bp, unidentified
  misc_feature 1..225: note = bacterial strain Ascusb_5611 encodes 16S rRNA
  source 1..225: mol_type = genomic DNA
agagtttgatcatggctcagaacgaacgctggcggcgcgtcttaagcatgcaagtcgagcggtaagattggtgcttgcactaatcctagagcggcggactggtgagtaacgcgtgggtgacgtacctttgtgacggggacagctcctagaaataggagataataccggatacgctgcatgttgtcagaggacatgcaggaaaggatcttttgatccgcacagaga

SEQ ID NO: 2717 - DNA, 225 bp, unidentified
  misc_feature 1..225: note = bacterial strain Ascusb_1150 encodes 16S rRNA
  source 1..225: mol_type = genomic DNA
agagtttgatcatggctcaggatgaacgctggcggcgtgcctaatacatgcaagtcgaacgagggtgcttgcaccctagtggcgaacgggtgagtaacacgtaggtaacctgcccttaagcttgggatacccagaggaaactttggctaataccggataacaacagaagaggcatctcttcagtttgaaaggccctttacggggtcacttaaggatggacctgcg

SEQ ID NO: 2718 - DNA, 225 bp, unidentified
  misc_feature 1..225: note = bacterial strain Ascusb_1688 encodes 16S rRNA
  source 1..225: mol_type = genomic DNA
agagtttgatcatggctcaggatgaacgctagctacaggcttaacacatgcaagtcgaggggcagcatgaagtttgcttgcaaactttgatggcgaccggcgcacgggtgagtaacgcgtatccaaccttcccatcactcagggatagcccgccgaaaggcgaattaatacctgatggtctcctttgcagacatctaacgaggagtaaagatttattggtgatgg

SEQ ID NO: 2719 - DNA, 225 bp, unidentified
  misc_feature 1..225: note = bacterial strain Ascusb_1802 encodes 16S rRNA
  source 1..225: mol_type = genomic DNA
agagtttgatcatggctcaggatgaacgctggcggcgtgcttaacacatgcaagtcgaacggagcctatcgagtgcttgcacttgagaaagcttagtggcggacgggtgagtaacgcgtgggtaacctgccctgtaccgggggataacagtcggaaacgactgctaataccgcataagcccacatgaccgcatggtcaagggggaaaaactccggtggtacagga

SEQ ID NO: 2720 - DNA, 225 bp, unidentified
  misc_feature 1..225: note = bacterial strain Ascusb_2754 encodes 16S rRNA
  source 1..225: mol_type = genomic DNA
agagtttgatcatggctcaggatgaacgctagcgacaggcctaacacatgcaagtcgaggggcagcgcgggagaagcttgcttttcctggcggcgaccggcgcacgggtgcgtaacaggtgtgcaatctgtccatagtcggggaatagcccagcgaaagttggattaaagctccatgtgagtagaagccgcatgacttttacttgaaacgtaaggactatgggtg

SEQ ID NO: 2721 - DNA, 225 bp, unidentified
  misc_feature 1..225: note = bacterial strain Ascusb_4704 encodes 16S rRNA
  source 1..225: mol_type = genomic DNA
agagtttgatcctggctcaggatgaacgctagctacaggcctaacacatgcaagtcgaggggcagcagatcgaaagcttgcttttgatgctggcgaccggcgaatgggtgagtcacgcgtgtccaacctgccccccgcccggggatagcccttggaaatgaggattaagacccgataggtgcgccttccgcatggcgagcgcatgaaactggcgagggatgggga

SEQ ID NO: 2722 - DNA, 225 bp, unidentified
  misc_feature 1..225: note = bacterial strain Ascusb_1094 encodes 16S rRNA
  source 1..225: mol_type = genomic DNA
agagtttgatcatggctcaggatgaacgctggcggcgtgcctaacacatgcaagtcgaacgaagcttggggaacggagattcgtcgaagagaaccaagacttagtggcggacgggtgagtaatgtatgagcaacctgcctttcagagggggacaacagttggaaacgactgctaataccgcgtaacgtatgacgggggcatccctgacataccaaaggagcaatc

SEQ ID NO: 2723 - DNA, 225 bp, unidentified
  misc_feature 1..225: note = bacterial strain Ascusb_114 encodes 16S rRNA
  source 1..225: mol_type = genomic DNA
agagtttgatcatggctcaggatgaacgctggcggcgtgcttaacacatgcaagtcgaacgggaattacattttagcttgctaagttgtaattctagtggcggacgggtgagtaacgcgtgggtaacctgccttataccgggggacaacagttggaaacgactgctaataccgcataagcgcacgggaaggcatctttctgtgtgaaaaactccggtggtataag

SEQ ID NO: 2724 - DNA, 225 bp, unidentified
  misc_feature 1..225: note = bacterial strain Ascusb_19138 encodes 16S rRNA
  source 1..225: mol_type = genomic DNA
agagtttgatcctggctcagaacgaacgctggtggcgtgtcttatacatgcaagtcgagcgaggcagcaatgccgagcggcgaacgggtgagtaacgcgtaagcaatctgccccgtatcaggaaatacccgtgccaacgcgcggttaatgtccaggagagtggccagctgcatggctggttgactagagatttatcggtacgggatgagcttgcgtccgattagc

SEQ ID NO: 2725 - DNA, 225 bp, unidentified
  misc_feature 1..225: note = bacterial strain Ascusb_2845 encodes 16S rRNA
  source 1..225: mol_type = genomic DNA
agagtttgatcatggctcaggacgaacgctggcggcgtgcttaacacatgcaagtcgaacgaggttatgttgaggaaggcttcggccggaattgatataaccgagtggcggacgggtgagtaacgcgtgagcaacctgtcttacacagggggataacactccgaaaggagcgctaataccgcataagaccacgatgccacatggcaatggggtaaaaggagcaat

SEQ ID NO: 2726 - DNA, 225 bp, unidentified
  misc_feature 1..225: note = bacterial strain Ascusb_1351 encodes 16S rRNA
  source 1..225: mol_type = genomic DNA
agagtttgatcctggctcaggattaacgctggcggcatgcctaatacatgcaagtcaaacgggaagcttcggcttctagtggcgaacgggtgagtaacacgtaggcaatctgtcctaaagattgggataacagctggaaacggctgataataccggataatagaagatatcgcatgataactttttgaaagacgcaattgtgtcactttaggaggagcctgcggc

SEQ ID NO: 2727 - DNA, 225 bp, unidentified
  misc_feature 1..225: note = bacterial strain Ascusb_542 encodes 16S rRNA
  source 1..225: mol_type = genomic DNA
agagtttgatcatggctcaggatgaacgctggcggcgtgcttaacacatgcaagtcgaacgaagcactggtcttgaagttttcggacagatagacctttgacttagtggcggacgggtgagtaacgcgtgggcaacctgccgtatgcagggggacaacagttggaaacgactgctaataccgcataagcgcacggggacgcatgttcctgtgtgaaaagccttaa

SEQ ID NO: 2728 - DNA, 225 bp, unidentified
  misc_feature 1..225: note = bacterial strain Ascusb_3160 encodes 16S rRNA
  source 1..225: mol_type = genomic DNA
agagtttgatcctggctcagaacgaacgctggcggcgcgtcttaagcatgcaagtcgagcggtaagtcgggagcttgctcctgacctagagcggcggactggtgagtaacgcgtgggtgacgtacctctgtgacggggacagctcctagaaataggagataataccggatacgctgcatgttgtcagaggacatgcaggaaaggatcttttgattcgcacagaga

SEQ ID NO: 2729 - DNA, 225 bp, unidentified
  misc_feature 1..225: note = bacterial strain Ascusb_11151 encodes 16S rRNA
  source 1..225: mol_type = genomic DNA
agagtttgatcctggctcaggatgaacgctggcggcatgcctaagacatgcaagtcgaacgaagtggcccaatgaagatgaagtgcttgcactgatttggaaatggattcccacttagtggcagacgggtgagtaacacgtgggtaacctaccccttagtctgggacaactattggaaacgatagctaataccggatgattcatagaaggataaccttttatgct

SEQ ID NO: 2730 - DNA, 225 bp, unidentified
  misc_feature 1..225: note = bacterial strain Ascusb_631 encodes 16S rRNA
  source 1..225: mol_type = genomic DNA
agagtttgatcatggctcagaacgaacgctggcggcgcgtcttaagcatgcaagtcgagcggtaagttatagcttgctataacctagagcggcggactggtgagtaacgcgtgggtgacgtacccttgtgacggggacagctcctagaaataggagataataccggatacgctgtgcattgtcagaggatgtacaggaaaggttcttttgaatcgcacaaggagc

SEQ ID NO: 2731 - DNA, 225 bp, unidentified
  misc_feature 1..225: note = bacterial strain Ascusb_1195 encodes 16S rRNA
  source 1..225: mol_type = genomic DNA
agagtttgatcatggctcaggatgaacgctggcggcgtgcttaacacatgcaagtcgagcgagaagctcgtgaacgattcttcggatgagtgatcgagtggaaagcggcggacgggtgagtaacgcgtaggcaacctgccccatacaaagggatagctactggaaacggtaattaatacctcataacgcagttttaccgcatgatagaactgccaaagatttatc

SEQ ID NO: 2732 - DNA, 225 bp, unidentified
  misc_feature 1..225: note = bacterial strain Ascusb_4808 encodes 16S rRNA
  source 1..225: mol_type = genomic DNA
agagtttgatcctggctcaggatgaacgctagctacaggcttaacacatgcaagtcgaggggcagcatgattctagcttgctagaattgatggcgaccggcgcacgggtgagtaacgcgtatccaaccttccctatagtagaggatagcccggcgaaagtcggattaatactctatgttgttcaatgcggacatctaagttgaaccaaaggtttaccgctatagg

SEQ ID NO: 2733 - DNA, 225 bp, unidentified
  misc_feature 1..225: note = bacterial strain Ascusb_3521 encodes 16S rRNA
  source 1..225: mol_type = genomic DNA
agagtttgatcatggctcaggatgaacgctggcggcgtgcctaacacatgcaagtcgaacgaagcactggagacggagattcgtcgaagtttccattgacttagtggcggacgggtgagtaatgtatgagcaacctgcctttcagagggggacaacagttggaaacgactgctaataccgcataatgtatagacgagacatcttgtttataccaaaggagcaatc

SEQ ID NO: 2734 - DNA, 225 bp, unidentified
  misc_feature 1..225: note = bacterial strain Ascusb_2396 encodes 16S rRNA
  source 1..225: mol_type = genomic DNA
agagtttgatcatggctcaggatgaacgctggcggcgtgcttaacacatgcaagtcgaacgaagcactttacttagatcccttcggggtgacgagttttgtgactgagtggcggacgggtgagtaacgcgtgggtaacctgccttacacagggggataacagttagaaatgactgctaataccgcataacccgctagtgtcgcatgacacagacggaaaagattt

SEQ ID NO: 2735 - DNA, 225 bp, unidentified
  misc_feature 1..225: note = bacterial strain Ascusb_5276 encodes 16S rRNA
  source 1..225: mol_type = genomic DNA
agagtttgatcctggctcagaacgaacgctggcggcgcgtcttaagcatgcaagtcggacggcaagacagaagcttgcttctgtcctagagtggcggactggtgagtaacgcgtgggtgattcacccccttgatgggaatagccggtagaaataccggataatgccgaataagctgtgatgtgtcagaggcatcacaggaaaggaactttagttccgcgagggga

SEQ ID NO: 2736 - DNA, 225 bp, unidentified
  misc_feature 1..225: note = bacterial strain Ascusb_6783 encodes 16S rRNA
  source 1..225: mol_type = genomic DNA
agagtttgatcatggctcagaacgaacgctggcggcgcgtcttaagcatgcaagtcgagcggtaagttggaagcttgcttctaacctagagcggcggactggtgagtaacgcgtgggtgacgtacctttgtgacggggacagctcctagaaataggagataataccggatacgctgcatgttgtcagaggacatgcaggaaaggatcttttgattcgcacagaga

SEQ ID NO: 2737 - DNA, 225 bp, unidentified
  misc_feature 1..225: note = bacterial strain Ascusb_467 encodes 16S rRNA
  source 1..225: mol_type = genomic DNA
agagtttgatcatggctcaggatgaacgctggcggcgtgcttaacacatgcaagtcgaacggaaacttaatgaaacctagtgatttaagttttagtggcggacgggtgagtaacgcgtgggtaacctgccgtatgcagggggataacagttagaaatgactgctaataccgcataagaccacagtctcgcatgagacaggggtaaaaactccggtggcatacgat

SEQ ID NO: 2738 - DNA, 225 bp, unidentified
  misc_feature 1..225: note = bacterial strain Ascusb_2761 encodes 16S rRNA
  source 1..225: mol_type = genomic DNA
agagtttgatcctggctcagaacgaacgctggcggcgcgttttaagcatgcaagtcgagcggcaaggacttcggtccctagagcggcggacgggtgagtaacacgtggataatctgccctgcagtctggaataccccatggaaacatgggctaatgccggatgcgacggagaggcgcaggcctctctgggaaagctcccatgggagcgctgcaggatgagtccgc

SEQ ID NO: 2739 - DNA, 225 bp, unidentified
  misc_feature 1..225: note = bacterial strain Ascusb_3233 encodes 16S rRNA
  source 1..225: mol_type = genomic DNA
agagtttgatcatggctcaggacgaacgctggcggcgcgcctaacacatgcaagtcgaacggacgaagggagcttgctccccgagttagtggcggacgggtgagtaacacgtgagcaacctgcctttcagagggggacaacagttggaaacgactgctaataccgcataacgtggtttggaggcatcttcgaactaccaaagatttatcgctgaaagatgggctc

SEQ ID NO: 2740 - DNA, 225 bp, unidentified
  misc_feature 1..225: note = bacterial strain Ascusb_604 encodes 16S rRNA
  source 1..225: mol_type = genomic DNA
agagtttgatcatggctcagaatgaacgctggcggcatggattaggcatgcaagtcgaacggggccctccggggcccagtggcggaagggtgagtaacacgtgagcaacccgcccccaaggccggaacaagcgctggaaacggcgtctgaaaccggatgaggacccccctcgcatgtgggggcgtccaaatattcataccctggggatgggctcgcggcccatta

SEQ ID NO: 2741 - DNA, 225 bp, unidentified
  misc_feature 1..225: note = bacterial strain Ascusb_2743 encodes 16S rRNA
  source 1..225: mol_type = genomic DNA
agagtttgatcatggctcaggatgaacgctagcgacaggcctaacacatgcaagtcgagcggcagcacctcgggtggcgagcggcgcacgggtgagtaacgcgtatgtaacctgcccatgagtgggggatagcccggtgaaaaccggattaataccccatgacaccaatgtctgacatcacttattggttaaagattcattgctcatggatggacatgcgttgga

SEQ ID NO: 2742 - DNA, 225 bp, unidentified
  misc_feature 1..225: note = bacterial strain Ascusb_6424 encodes 16S rRNA
  source 1..225: mol_type = genomic DNA
agagtttgatcatggctcaggatgaacgctagcgacaggcttaacacatgcaagtcgaggggcagcgcgggggtagcaatacctttggcggcgaccggcgcactggtgagtaacacgtatgcgacctgccccggacagggggataaacccgggaaactgggcctaataccccatatgccgtgaggacgcatgtcctttcggtgaaagatccgtcggtccgggatg

SEQ ID NO: 2743 - DNA, 225 bp, unidentified
  misc_feature 1..225: note = bacterial strain Ascusb_2895 encodes 16S rRNA
  source 1..225: mol_type = genomic DNA
agagtttgatcatggctcaggatgaacgctggcggcgtgcctaatacatgcaagtcgagcgaggtagcttgctacctagcggcgaacgggtgagtaacacgtaggtaacctgcctttaagactgggatacccaggcgaaagcttggctaataccggataacaacggggatcgcatgatctccgcttgaaaggtgcgtttgcaccacttttagatggacctgcggc

SEQ ID NO: 2744 - DNA, 225 bp, unidentified
  misc_feature 1..225: note = bacterial strain Ascusb_1256 encodes 16S rRNA
  source 1..225: mol_type = genomic DNA
agagtttgatcatggctcaggatgaacgctagcggcaggcttaacacatgcaagtcgaggggtaacagggcgtagcaatacgccgctgacgaccggcgcacgggtgcgtaacgcgtatacaacctacctgtaacagggggataacggagtgaaaactccactaataccccatattgacgagtcttcgcatgggggttcgtcgaaagcttcggtggttacggatgg

SEQ ID NO: 2745 - DNA, 225 bp, unidentified
  misc_feature 1..225: note = bacterial strain Ascusb_1507 encodes 16S rRNA
  source 1..225: mol_type = genomic DNA
agagtttgatcatggctcaggacgaacgctggcggcgcgcctaacacatgcaagtcgaacggactttatggaaactgaggcttcggcggacgaagaagtaaagttagtggcgaacgggtgagtaacacgtgaggaaccaacctttcagagggggataacacttagaaataggtgctaataccgcataagaccacagtgaggcatctcacaggggtcaaaggagca

SEQ ID NO: 2746 - DNA, 225 bp, unidentified
  misc_feature 1..225: note = bacterial strain Ascusb_10086 encodes 16S rRNA
  source 1..225: mol_type = genomic DNA
agagtttgatcatggctcaggatgaacgctagctacaggcttaacacatgcaagtcgcggggcatcgcatggggcggcaacgtccctggcggcgaccggcggatgggtgagtaacgcgtatccaacctggccccctctccgggacagcccctcgaaagagggattaataccggatgttcccgtttcgccgcatggcgtgatgggcaaaggcttcggtcggaaggg

SEQ ID NO: 2747 - DNA, 225 bp, unidentified
  misc_feature 1..225: note = bacterial strain Ascusb_20491 encodes 16S rRNA
  source 1..225: mol_type = genomic DNA
agagtttgatcatggctcaggatgaacgctagctacaggcttaacacatgcaagtcgaggggcagcatagtcaaagtttgctttgattgatggcgaccggcgcacgggtgagtaacgcgtatccaaccttccccttagtagggcatagcccggcgaaagtcggattaataccctatgttgtgtcatgaggacatctgaataacactaaagatttatcgctaaggg

SEQ ID NO: 2748 - DNA, 225 bp, unidentified
  misc_feature 1..225: note = bacterial strain Ascusb_1115 encodes 16S rRNA
  source 1..225: mol_type = genomic DNA
agagtttgatcatggctcaggacgaacgctggcggcgtgcctaacacatgcaagtcgagcggagattgcttagatgagagcttcggcaggattccgagtaatttcagcggcggacgggtgagtaacgcgtgagcaatctgtctcagacagggggataacgcagcgaaagttgcactaataccgcatgagaccacaacgccacatggcgaaggggtcaaaggagca

SEQ ID NO: 2749 - DNA, 225 bp, unidentified
  misc_feature 1..225: note = bacterial strain Ascusb_1344 encodes 16S rRNA
  source 1..225: mol_type = genomic DNA
agagtttgatcctggctcagaacgaacgctggcggcaggcttaacacatgcaagttgaacgggatttagttagtgcttgcactaactgatgagagtagcgcactggtgagtaacacgtgggaacatgccttttggtgggggacaacagttggaaacgactgctaataccgcataagcccggaaggggaaagattaattgccgaaagattggcccgcggaagatta

SEQ ID NO: 2750 - DNA, 225 bp, unidentified
  misc_feature 1..225: note = bacterial strain Ascusb_1172 encodes 16S rRNA
  source 1..225: mol_type = genomic DNA
agagtttgatcatggctcaggatgaacgctggcggcatgcctaacacatgcaagtcgaacggagctattacggaagcttgcttttgttctagcttagtggcggacgggtgagtaacgcgtgagaaacctgcccttaagtggggaataacaccgagaaatcggtgctaataccgcataatatctctggatcgcatgttcctggagatcaaaggatttattcgctta

SEQ ID NO: 2751 - DNA, 225 bp, unidentified
  misc_feature 1..225: note = bacterial strain Ascusb_307 encodes 16S rRNA
  source 1..225: mol_type = genomic DNA
agagtttgatcatggctcaggatgaacgctggcggcgtgcctaacacatgcaagtcgaacggtgatgactgatattttcggatggatttcatcatagtggcggacgggtgagtaacgcgtggataacctgcctcgtactggggaatagcagctggaaacggctggtaataccgcataagcgcacggacccgcatgagtctgtgtgaaaagatttatcggtacgag

SEQ ID NO: 2752 - DNA, 225 bp, unidentified
  misc_feature 1..225: note = bacterial strain Ascusb_1381 encodes 16S rRNA
  source 1..225: mol_type = genomic DNA
agagtttgatcatggctcaggatgaacgctggcggcgtgcttaacacatgcaagtcgaacgaagcacttgatccgattttttcggaatgaagatcttgtgacttagtggcggacgggtgagtaacgcgtgggcaatctgccccataccgggggacaacagttggaaacgactgctaataccgcataagcgcacggagccgcatggttctgtgtgaaaaactccgg

SEQ ID NO: 2753 - DNA, 225 bp, unidentified
  misc_feature 1..225: note = bacterial strain Ascusb_2615 encodes 16S rRNA
  source 1..225: mol_type = genomic DNA
agagtttgatcatggctcagaacgaacgctggcggcgcgtcttaagcatgcaagtcgagcggtaagtcgggagcttgctcctgacctagagcggcggactggtgagtaacgcgtgggtgacgtacctttgtgacggggacagctcctagaaataggagataataccggatacgctgtaacatgtcagaggtgttacaggaaaggatcttttgattcgcacagaga

SEQ ID NO: 2754 - DNA, 225 bp, unidentified
  misc_feature 1..225: note = bacterial strain Ascusb_45 encodes 16S rRNA
  source 1..225: mol_type = genomic DNA
agagtttgatcatggctcaggatgaacgctagctacaggcttaacacatgcaagtcgaggggaaacgattagaggtgcttgcaccactaaggcgtcgaccggcgcacgggtgagtaacgcgtatccaacctgccccatggtaaggaataatccgtagaaatgcggtctaataccttatgtgctccgaagaggacatctgatttggagtaaagatttatcgccatg

SEQ ID NO: 2755 - DNA, 225 bp, unidentified
  misc_feature 1..225: note = bacterial strain Ascusb_4185 encodes 16S rRNA
  source 1..225: mol_type = genomic DNA
agagtttgatcatggctcaggatgaacgctagctacaggcttaacacatgcaagtcgcggggcagcatgatctcagcttgctgaggttgatggcgaccggcgcacgggtgagtaacgcgtatccaaccttccctatagtagaggatagcccggcgaaagtcggattaatactctatgttttccgttgcggacatctaagacggaacaaaggcttgccgctatagg

SEQ ID NO: 2756 - DNA, 225 bp, unidentified
  misc_feature 1..225: note = bacterial strain Ascusb_3077 encodes 16S rRNA
  source 1..225: mol_type = genomic DNA
agagtttgatcctggctcaggacgaacgctggcggcgtgcctaacacatgcaagtcgaacggactgattcgcttcggtgatgaaagttagtggcggacgggtgagtaacgcgtgagtaacctgcctttcagagggggataacgtttggaaacgaacgctaataccgcataacatatcgttgtcgcatggcagtgatatcaaaggagcaatccgctgaaagatgga

SEQ ID NO: 2757 - DNA, 225 bp, unidentified
  misc_feature 1..225: note = bacterial strain Ascusb_1419 encodes 16S rRNA
  source 1..225: mol_type = genomic DNA
agagtttgatcatggctcaggatgaacgctagcggcaggcttaacacatgcaagtcgaggggcagcgcgaggtagcaatactttggcggcgaccggcgcacgggtgcgtaacgcgtatgcaacctacccactacagggggataacggagggaaacttccactaatatcccatggtgttgcggaaccgcatggttctgtaactaaagcttcggtggtagtggatgg

SEQ ID NO: 2758 - DNA, 225 bp, unidentified
  misc_feature 1..225: note = bacterial strain Ascusb_4121 encodes 16S rRNA
  source 1..225: mol_type = genomic DNA
agagtttgatcatggctcaggacgaacgctggcggcgcgcctaacacatgcaagtcgaacggagttaagagagcttgctttcttaacttagtggcggacgggtgagtaacacgtgagcaacctgcctttcagagggggacaacagttggaaacgactgctaataccgcataacgtcatttgaaggcatcttcgggtgaccaaagatttatcgctgaaagatgggc

SEQ ID NO: 2759 - DNA, 225 bp, unidentified
  misc_feature 1..225: note = bacterial strain Ascusb_1436 encodes 16S rRNA
  source 1..225: mol_type = genomic DNA
agagtttgatcatggctcaggatgaacgctagcgacaggcctaacacatgcaagtcgaggggcagcgggaaggaagcttgcttcctttgccggcgaccggcgcacgggtgagtaacgcgtatgcaacctggccgcagttgcgggatagccttccgaaagggagattaacaccgcatgaggccggagaggggcatccctttccggtgaaaagtcaatgactgcgga

SEQ ID NO: 2760 - DNA, 225 bp, unidentified
  misc_feature 1..225: note = bacterial strain Ascusb_4797 encodes 16S rRNA
  source 1..225: mol_type = genomic DNA
agagtttgatcatggctcaggacgaacgctggcggcgtgcttaacacatgcaagtcgaacggggattaccgagcggaaggcttcggccggaaggttggtaattccagtggcggacgggtgagtaacgcgtgagcaatctgtcccagacaggggaataacacttggaaacaggtgctaataccgcataagaccacgggatcgcatggttcaggggtaaaaggagga

SEQ ID NO: 2761 - DNA, 225 bp, unidentified
  misc_feature 1..225: note = bacterial strain Ascusb_591 encodes 16S rRNA
  source 1..225: mol_type = genomic DNA
agagtttgatcatggctcaggacgaacgctggcggcatgcctaacacatgcaagtcgaacggagaattgagagcttgcttttaattcttagtggcggacgggtgagtaacgcgtgagcaacctgcctctcagtggggaataatgtactgaaaaggacactaataccgcatgatgtatcggagtcgcatggctttgataccaaagatttatcgctgagagatgggc

SEQ ID NO: 2762 - DNA, 225 bp, unidentified
  misc_feature 1..225: note = bacterial strain Ascusb_2981 encodes 16S rRNA
  source 1..225: mol_type = genomic DNA
agagtttgatcatggctcaggatgaacgctggcggcgtgcttaacacatgcaagtcgaacgaagctacttttcacgatcccttcggggtgacgagttgtagactgagtggcggacgggtgagtaacgcgtgggtaacctgccctatacagggggacaacagctggaaacggctgctaataccgcataagcgcacaggagggcatcctctagtgtgaaaaactccg

SEQ ID NO: 2763 - DNA, 225 bp, unidentified
  misc_feature 1..225: note = bacterial strain Ascusb_3089 encodes 16S rRNA
  source 1..225: mol_type = genomic DNA
agagtttgatcatggctcaggatgaacgctggcggcgtgcttaacacatgcaagtcgaacggagcttaattggaaagcttgcttttcgtttaagcttagtggcggacgggtgagtaacgcgtgagcaacctgccccgaagtggggaataacaccgagaaatcggtgctaataccgcataatgtcggaggaccgcatgatccaccgaccaaaggatttattcgctt

SEQ ID NO: 2764 - DNA, 225 bp, unidentified
  misc_feature 1..225: note = bacterial strain Ascusb_1149 encodes 16S rRNA
  source 1..225: mol_type = genomic DNA
agagtttgatcatggctcagagcgaacgctagcggaatgctttatacatgcaagtcgaacggattttgatttttgtagcaatacaaagattacgattagtggcgaacgggtgagtaatagttaggaacttgccgaatagtgggggacaacagttagaaatgactgctaataccgcatactcccgagaggggaaagatttattgctattcgagaggcctaaccacg

SEQ ID NO: 2765 - DNA, 225 bp, unidentified
  misc_feature 1..225: note = bacterial strain Ascusb_4240 encodes 16S rRNA
  source 1..225: mol_type = genomic DNA
agagtttgatcctggctcaggatgaacgctagctacaggcttaacacatgcaagtcgaggggcatcatgtagtctgcttgcaggctatgatggcgaccggcgcacgggtgagtaacgcgtatccaacctgccctttactacggtatagcccagcgaaagttggattaatcccgtatattgtcgctcgatggcatctgagtgcgacgaaagatttatcggtagagg

SEQ ID NO: 2766 - DNA, 225 bp, unidentified
  misc_feature 1..225: note = bacterial strain Ascusb_2499 encodes 16S rRNA
  source 1..225: mol_type = genomic DNA
agagtttgatcatggctcaggatgaacgctggcggcgtgcctaacacatgcaagtcgaacgaggtcttttatcttggagattcgtcaaagagatttctgaccgagtggcggatgggtgagtaacgcgtggagaacctgcccttatcagggggataacaactggaaacggttgacaataccgcatacgctcttgtgatcgcatgatcgtgagaggaaagatttatc

SEQ ID NO: 2767 - DNA, 225 bp, unidentified
  misc_feature 1..225: note = bacterial strain Ascusb_4408 encodes 16S rRNA
  source 1..225: mol_type = genomic DNA
agagtttgatcctggctcaggacgaacgctggcggcgtgcctaacacatgcaagtcgaacggaactgacgccggttcttcggaaccattgtcagtttagtggcggacgggtgagtaacgcgtgagtaacctgcctctgagaggggaataacgttttgaaaagaacgctaataccgcataacatatataagtcgcatggcttatatatcaaagattttatcgctca

SEQ ID NO: 2768 - DNA, 225 bp, unidentified
  misc_feature 1..225: note = bacterial strain Ascusb_6154 encodes 16S rRNA
  source 1..225: mol_type = genomic DNA
agagtttgatcatggctcaggacgaacgctggcggcgtgcttaacacatgcaagtcgaacgaggatcaatagattgagagcttcggcaggattgaaattgattcgagtggcggacgggtgagtaacgcgtgagcaacctgtcccagacagggggataacacttggaaacaggtgctaataccgcataagaccacggtatcacatggtactggggtaaaaggtgta

SEQ ID NO: 2769 - DNA, 225 bp, unidentified
  misc_feature 1..225: note = bacterial strain Ascusb_6082 encodes 16S rRNA
  source 1..225: mol_type = genomic DNA
agagtttgatcatggctcaggacgaacgctggcggcgtgcttaacacatgcaagtcgaacggggattaccgagcggaaggcttcggtcggaaggttggtaattctagtggcggacgggtgagtaacgcgtgaacaatctgtcccagacaggggaataacacttggaaacaggtgctaataccgcatgagaccacgggtaggcatctacctgaggtaaaaggagta

SEQ ID NO: 2770 - DNA, 225 bp, unidentified
  misc_feature 1..225: note = bacterial strain Ascusb_2147 encodes 16S rRNA
  source 1..225: mol_type = genomic DNA
agagtttgatcatggctcaggatgaacgctggcggcgtgcctaatacatgcaagtcgaacggagcacttcggtgcttagtggcgaacgggtgagtaatatatgaacaacctacccctttgaccgggataacacactgaaaagcgtgctaataccggataggcgatcgagaggcatctcttgattattaaaggagcgcatgctccacattgggatgggttcatatc

SEQ ID NO: 2771 - DNA, 225 bp, unidentified
  misc_feature 1..225: note = bacterial strain Ascusb_1271 encodes 16S rRNA
  source 1..225: mol_type = genomic DNA
agagtttgatcctggctcaggatgaacgctggcggcgtgcttaacacatgcaagtcgagcgaagcactggacttgatttcttcggattgacggtcctttgactgagcggcggacgggtgagtaacgcgtggggaacctgccccataccgggggataacagctggaaacggctgctaataccgcataagcgcacgaggaggcatctctttgtgtgaaaaactccgg

SEQ ID NO: 2772 - DNA, 225 bp, unidentified
  misc_feature 1..225: note = bacterial strain Ascusb_2512 encodes 16S rRNA
  source 1..225: mol_type = genomic DNA
agagtttgatcctggctcagaacgaacgctggcggcatggattaggcatgcaagtcgaacgggagcagcaatgctccagtggcgcaagggtgaggaacacgtgaacaacctgccttcgagttggggatagcttctggaaacgggagataataccgaataacatcaccggatcgcatgatttggtgatcaaagcagcaatgcgcttgaagaggggttcgcgtccca

SEQ ID NO: 2773 - DNA, 225 bp, unidentified
  misc_feature 1..225: note = bacterial strain Ascusb_6616 encodes 16S rRNA
  source 1..225: mol_type = genomic DNA
agagtttgatcctggctcagaacgaacgctggcggcgcgtcttaagcatgcaagtcgaatggcaagatagagcttgctctatcctagaatggcggactggtgagtaacgcgtgggtgacgtaccctttagatggggatagctgatagaaatatcagataataccgaataagctgcatgaggttagagctcatgcaggaaaggatcttttgatccgctgaaggagc

SEQ ID NO: 2774 - DNA, 225 bp, unidentified
  misc_feature 1..225: note = bacterial strain Ascusb_5471 encodes 16S rRNA
  source 1..225: mol_type = genomic DNA
agagtttgatcctggctcaggatgaacgctggcggcgtgcttaacacatgcaagtcgaacggagtattgacgctgacgagcagagtagcttgctacgaagcaaatcttgttgatacttagtggcggacgggtgagtaacgcgtgggtaacctgccatatacagggggataacacttagaaataggtgctaataccgcataagcgcacagtaccgcatggtacagt

SEQ ID NO: 2775 - DNA, 225 bp, unidentified
  misc_feature 1..225: note = bacterial strain Ascusb_9386 encodes 16S rRNA
  source 1..225: mol_type = genomic DNA
agagtttgatcatggctcaggatgaacgctggcggcatgcctaagacatgcaagtcgaacgaggtgacccattgaagtggagtgcttgcacaatatggatatggattttcacctagtggcgcaagggtgagtaacacgtgggtaatctgcctttaagactgggataacaattggaaacgattgctaataccggatgaaatgcacgacataaagttgtgtagtaaa

SEQ ID NO: 2776 - DNA, 225 bp, unidentified
  misc_feature 1..225: note = bacterial strain Ascusb_2831 encodes 16S rRNA
  source 1..225: mol_type = genomic DNA
agagtttgatcatggctcaggacgaacgctggcggcgtgcttaacacatgcaagtcgaacgaggttattttgatgagatcttcggatggatttgaaataaccgagtggcggacgggtgagtaacgcgtgagcaacctgtcttctacagggggataacgctccgaaaggagtgctaataccgcataagaccacggagccacatggttttgaggtcaaaggagaaat

SEQ ID NO: 2777 - DNA, 225 bp, unidentified
  misc_feature 1..225: note = bacterial strain Ascusb_1636 encodes 16S rRNA
  source 1..225: mol_type = genomic DNA
agagtttgatcatggctcaggatgaacgctggcggcgtgcctaatacatgcaagtcgaacgctggatatccagcttgctggattgaaggagtggcgaacgggtgagtaatacataagcaacctgcccacgaagactgggataatctctggaaacggggactaagaccggataggtaataacgaggcatctcgatattattaaaggtgagaaacactggtggatgg

SEQ ID NO: 2778 - DNA, 225 bp, unidentified
  misc_feature 1..225: note = bacterial strain Ascusb_20843 encodes 16S rRNA
  source 1..225: mol_type = genomic DNA
agagtttgatcatggctcaggatgaacgctagctacaggcttaacacatgcaagtcgaggggcagcatgttggttgcttgcaaccaatgatggcgaccggcgcacgggtgagtaacgcgtatccaaccttccccatagtagaggatagcccggcgaaagtcggattaatactctatgttgtgtcatgaggacatctgaataacaccaaagatttatcgctatggg

SEQ ID NO: 2779 - DNA, 225 bp, unidentified
  misc_feature 1..225: note = bacterial strain Ascusb_4119 encodes 16S rRNA
  source 1..225: mol_type = genomic DNA
agagtttgatcctggctcaggacgaacgctggcggcgtgcctaacacatgcaagtcgagcggagacatttggaaagcttgctttttggatgtttcagcggcggacgggtgagtaacgcgtgagcaacctgcctttaacagggggataacgcatcgaaagatgtgctaataccgcatgagaccacaacactacatggtgaaagggtcaaaggagcaatccggttaa

SEQ ID NO: 2780 - DNA, 225 bp, unidentified
  misc_feature 1..225: note = bacterial strain Ascusb_2508 encodes 16S rRNA
  source 1..225: mol_type = genomic DNA
agagtttgatcatggctcaggatgaacgctggcggcgtgcttaacacatgcaagtcgaacggactcttatcgacagaagtatttatacggacgttggtaggcgttagtggcggacgggtgagtaacgcgtgggaaacctgccctattccgggggataccagttggaaacgactgttaataccgcataagcgcacattgccgcatggcagagtgtgaaaaactccg

SEQ ID NO: 2781 - DNA, 225 bp, unidentified
  misc_feature 1..225: note = bacterial strain Ascusb_197 encodes 16S rRNA
  source 1..225: mol_type = genomic DNA
agagtttgatcatggctcaggacgaacgctggcggcgtgcttaacacatgcaagtcgagcggagacatgtaacggaaggcttcggccggaagatatatgttttagcggcggacgggtgagtaacgcgtgagcaacctgtccttcacagggggataagataccgaaaggtgttctaataccgcataagaccacaacgtcacatggcgaaggggtcaaaggagcaat

SEQ ID NO: 2782 - DNA, 225 bp, unidentified
  misc_feature 1..225: note = bacterial strain Ascusb_2638 encodes 16S rRNA
  source 1..225: mol_type = genomic DNA
agagtttgatcatggctcaggatgaacgctagcggcaggcttaacacatgcaagtcgaggggcagcgggttgtagcaatacaatgccggcgaccggcgaaagggtgcgtaacgcgtgaacaatctgcccgtatccgggacataagcgatggaaacgtcgtctaatttcccataacaacgagggccgcatgacccatgtttgaaagattcgtcggatacggatgag

SEQ ID NO: 2783 - DNA, 225 bp, unidentified
  misc_feature 1..225: note = bacterial strain Ascusb_124 encodes 16S rRNA
  source 1..225: mol_type = genomic DNA
agagtttgatcctggctcaggatgaacgctagctacaggcttaacacatgcaagtcgaggggcagcatgaaggaagcttgcttcctttgatggcgaccggcgcacgggtgagtaacgcgtatccaacctgcccattacactgggatagcccgccgaaaggcgaattaatcccggatagtgttcttagatggcatcagacaaggactaaaggtaatttccggtaat

SEQ ID NO: 2784 - DNA, 225 bp, unidentified
  misc_feature 1..225: note = bacterial strain Ascusb_3805 encodes 16S rRNA
  source 1..225: mol_type = genomic DNA
agagtttgatcatggctcaggatgaacgctagcggcaggcttaacacatgcaagtcgaggggcagcagggagtagcaatactctgctggcgaccggcgcacgggtgcgtaacgcgtatgcaacctaccctgtacagggggataacggagagaaatttccactaatatcccatggagtcactggatcgcatggtccggtgactaaagcttcggtggtacgggatgg

SEQ ID NO: 2785 - DNA, 225 bp, unidentified
  misc_feature 1..225: note = bacterial strain Ascusb_12619 encodes 16S rRNA
  source 1..225: mol_type = genomic DNA
agagtttgatcatggctcaggatgaacgctagctacaggcttaacacatgcaagtcgaggggcagcgagagtgtagcaatacacttgtcggcgaccggcgcacgggtgagtaacgcgtatccaacctggcccttagtaggggatagcccggcgaaagtcggattaataccctatgttctcctttgagagcatttgatgaggagcaaagatttatcgctaggggat

SEQ ID NO: 2786 - DNA, 225 bp, unidentified
  misc_feature 1..225: note = bacterial strain Ascusb_3270 encodes 16S rRNA
  source 1..225: mol_type = genomic DNA
agagtttgatcctggctcaggatgaacgctggcggcgtgcttaacacatgcaagtcgaacgaagcactttacttgatctcttcggagtgattgttttgtgactgagtggcggacgggtgagtaacgcgtgggtaacctgccttgtacaggggaataacagttggaaacgactgctaataccgcataagcgcacaggaccgcatggtctggtgtgaaaaactccgg

SEQ ID NO: 2787 - DNA, 225 bp, unidentified
  misc_feature 1..225: note = bacterial strain Ascusb_653 encodes 16S rRNA
  source 1..225: mol_type = genomic DNA
agagtttgatcatggctcagaacgaacgctggtggcgtgtcttatacatgcaagtcgagcggtgcagcaatgcatagcggcgaacgggtgagtaacacgtaagcaatctgccccctgcttgggaatagccgtgccaacgcgcggataataccgaatatcgtggccttccgcatgggaggttgacaaaagatttatcggcaggggatgagcttgcgtccgattagc

SEQ ID NO: 2788 - DNA, 225 bp, unidentified
  misc_feature 1..225: note = bacterial strain Ascusb_9544 encodes 16S rRNA
  source 1..225: mol_type = genomic DNA
agagtttgatcatggctcaggatgaacgctggcggcatgcctaagacatgcaagtcgtacgagagggcccatgaagttgattgaaaacggagtgcttgcacaaagtcggattttaatggattggattttccctcgagtggcaaacgggtgagtaacacgtgggttacctacctctaagactgggataccaattggaaacgattgttaaaaccggatgtgctctac

SEQ ID NO: 2789 - DNA, 225 bp, unidentified
  misc_feature 1..225: note = bacterial strain Ascusb_1572 encodes 16S rRNA
  source 1..225: mol_type = genomic DNA
agagtttgatcatggctcaggacgaacgctggcggcgtgcctaacacatgcaagtcgaacgagcgcacgggagcttgctcctgtgctgcgagtggcggacgggtgagtaacgcgtgaggaacctgcccttcagagggggataacgtcgggaaactgacgctaataccgcataacgtgtctgatccgcatggatcggataccaaaggagcaatccgctgaaggatg

SEQ ID NO: 2790 - DNA, 225 bp, unidentified
  misc_feature 1..225: note = bacterial strain Ascusb_4760 encodes 16S rRNA
  source 1..225: mol_type = genomic DNA
agagtttgatcctggctcaggatgaacgctagcggcaggcttaacacatgcaagtcgaggggcagcggggtgtagcaatacactgccggcgaccggcgcacgggtgcgtaacgcgtatgcaacctgccccgcacagggggataacggagagaaatttccactaatatcccatggcgtattgaggccgcatggtcttgatactaaagcttcggtggtgcgggatgg

SEQ ID NO: 2791 - DNA, 225 bp, unidentified
  misc_feature 1..225: note = bacterial strain Ascusb_2631 encodes 16S rRNA
  source 1..225: mol_type = genomic DNA
agagtttgatcatggctcaggatgaacgctggcggcgtgcctaacacatgcaagtcgaacgaagcatcttgcccgaggaagaggagtgcttgcacaaatcggactcaactgagatgacttagtggcggacgggtgagtaacgcgtgggtaacctgccttatacagggggataacagttagaaatgactgctaataccgcataagcgcacagcaccgcatggtgca

SEQ ID NO: 2792 - DNA, 225 bp, unidentified
  misc_feature 1..225: note = bacterial strain Ascusb_2485 encodes 16S rRNA
  source 1..225: mol_type = genomic DNA
agagtttgatcatggctcaggatgaatgctggcggcgtgcctaatacatgcaagtcgagcggtaacagggcttcaccgtttccttgacactccgggctagatgcgggaggttgatttcgagggaacagtgaagctgctgacgagcggcggacggctgagtaacgcgtgggaacggaccccaaactgagggataactagtcgaaagattagctaataccgcatgtg

SEQ ID NO: 2793 - DNA, 225 bp, unidentified
  misc_feature 1..225: note = bacterial strain Ascusb_873 encodes 16S rRNA
  source 1..225: mol_type = genomic DNA
agagtttgatcatggctcaggatgaacgctggcggcgtgcttaacacatgcaagtcgaacgggcttaaatcggaagcttgcttctgatttaagttagtggcggacgggtgagtaacgcgtgggtaacctaccctgtgcagggggatagcagctggaaacggctgataaaaccgcataacacggtagcaccgcatggtgcagccgtcaaatatttataggcacagg

SEQ ID NO: 2794 - DNA, 225 bp, unidentified
  misc_feature 1..225: note = bacterial strain Ascusb_1747 encodes 16S rRNA
  source 1..225: mol_type = genomic DNA
agagtttgatcatggctcaggatgaacgctggcggcgtgcttaacacatgcaagtcgaacggagattacttttaagcttgcttagttgtaatcttagtggcggacgggtgagtaacgcgtgggcaacctgccttataccgggggacaacagctggaaacggctgctaataccgcataagcgcacagtatcgcatgatacagtgtgaaaaactccggtggtataag

SEQ ID NO: 2795 - DNA, 225 bp, unidentified
  misc_feature 1..225: note = bacterial strain Ascusb_1499 encodes 16S rRNA
  source 1..225: mol_type = genomic DNA
agagtttgatcatggctcaggatgaacgctagctacaggcttaacacatgcaagtcgcggggcagcgtggggatggcttgccatctctgacggcgaccggcgcacgggtgagtaacgcgtatccaacctgccccttaccacgggatagccctccgaaagggggattaataccgtatgtggccacgagacggcatccgaccgtggctaaaggctcagcggtaaggg

SEQ ID NO: 2796 - DNA, 225 bp, unidentified
  misc_feature 1..225: note = bacterial strain Ascusb_92 encodes 16S rRNA
  source 1..225: mol_type = genomic DNA
agagtttgatcatggctcaggatgaacgctggcggcgtgcttaacacatgcaagtcgaacggagaactgcccttcgggacggttcttagtggcggacgggtgagtaacgcgtgaggaacctgccttggagtggggaataacggctggaaacggccgctaataccgcataatgcagttgggtcgcatggctctgactgccaaagatttattgctctgagatggcct

SEQ ID NO: 2797 - DNA, 225 bp, unidentified
  misc_feature 1..225: note = bacterial strain Ascusb_15117 encodes 16S rRNA
  source 1..225: mol_type = genomic DNA
agagtttgatcctggctcaggatgaacgctagctacaggcttaacacatgcaagtcgaggggcatcgggagagtagcttgctattcttgccggcgaccggcgcacgggtgagtaacgcgtatccaacctaccccatacaagaggatagcccggcgaaagtcggattaatactctatgtagtacgatgaaggcatctgagttgtatgaaaggttattccggtatgg

SEQ ID NO: 2798 - DNA, 225 bp, unidentified
  misc_feature 1..225: note = bacterial strain Ascusb_4387 encodes 16S rRNA
  source 1..225: mol_type = genomic DNA
agagtttgatcctggctcaggacgaacgctggcggcgtgcttaacacatgcaagtcgaacggagttagacgctggattgatgccagcttgctggtggatttccttgtctagcttagtggcggacgggtgagtaacgcgtgagtaacctgccctcgagtggggaataacgttctgaaaagatcgctaataccgcataacacatactgatcgcatggtcggtatgtc

SEQ ID NO: 2799 - DNA, 225 bp, unidentified
  misc_feature 1..225: note = bacterial strain Ascusb_4311 encodes 16S rRNA
  source 1..225: mol_type = genomic DNA
agagtttgatcatggctcaggatgaacgctagctacaggcttaacacatgcaagtcgaggggcagcatgatctgtgcttgcacagattgatggcgaccggcgcacgggtgagtaacgcgtatccaaccttccccttagtagggcatagcccggcgaaagtcggattaataccctatgttttccaatgaggacatctgagctggaataaagattcatcgctaaggg

SEQ ID NO: 2800 - DNA, 225 bp, unidentified
  misc_feature 1..225: note = bacterial strain Ascusb_2113 encodes 16S rRNA
  source 1..225: mol_type = genomic DNA
agagtttgatcatggctcaggatgaacgctagctacaggcttaacacatgcaagtcgaggggcagcgagaagaaagcttgctttctttgtcggcgaccggcgcacgggtgagtaacgcgtatccaaccttccccttagtagggcatagcccggcgaaagtcggattaataccctatgttgtttgaagcggacatctaattcaaaccaaagattcatcgctaaggg

SEQ ID NO: 2801 - DNA, 225 bp, unidentified
  misc_feature 1..225: note = bacterial strain Ascusb_626 encodes 16S rRNA
  source 1..225: mol_type = genomic DNA
agagtttgatcatggctcaggatgaacgctggcggcgtgcctaacacatgcaagtcgaacggggttaaagagaaattttcggatggacctttaacttagtggcggacgggtgagtaacgcgtggataacctgcctcgcacagggggatagcagctggaaacggctggtaataccgcataagaccacggccctgcatggggctgaggtaaaagatttatcggtgcg

SEQ ID NO: 2802 - DNA, 225 bp, unidentified
  misc_feature 1..225: note = bacterial strain Ascusb_4195 encodes 16S rRNA
  source 1..225: mol_type = genomic DNA
agagtttgatcctggctcaggatgaacgctggcggcgtgcctaacacatgcaagtcgaacggagatttaacgctgatgaggcttcggcggaatcttgttaaatcttagtggcggacgggtgagtaacgcgtgggcaacctgcctcgtactgggggataacagttggaaacgactgttaataccgcataagcgcacggtatcgcatgatacagtgtgaaaaactcc

SEQ ID NO: 2803 - DNA, 225 bp, unidentified
  misc_feature 1..225: note = bacterial strain Ascusb_3401 encodes 16S rRNA
  source 1..225: mol_type = genomic DNA
agagtttgatcatggctcaggatgaacgctggcggcgtgcctaatacatgcaagtcgagcgagaatcagatgaactgagattcgtcaacggaattctgaggaaagcggcggacgggtgagtaacgcgtaggcaacctgcccttagcagagggatagccattggaaacgatgattaaaacctcataatgctgttttgacacatgtcttgacagccaaagatttatc

SEQ ID NO: 2804 - DNA, 225 bp, unidentified
  misc_feature 1..225: note = bacterial strain Ascusb_2551 encodes 16S rRNA
  source 1..225: mol_type = genomic DNA
agagtttgatcctggctcaggatgaacgctggcggcgtgcttaacacatgcaagtcgaacgaagcacttacgacagaagccttcgggtggaagatgtttgtgactgagtggcggacgggtgagtaacgcgtgggaaacctgccctatgcagggggataacagtcggaaacgactgctaataccgcataagcgcacagcatcgcatggtgcagtgtgaaaagcctt

SEQ ID NO: 2805 - DNA, 225 bp, unidentified
  misc_feature 1..225: note = bacterial strain Ascusb_7916 encodes 16S rRNA
  source 1..225: mol_type = genomic DNA
agagtttgatcatggctcaggatgaacgctggcggcgtgcttaacacatgcaagtcgaacgaagcatttatttcggatctttcgggagaagagatttatgactgagtggcggacgggtgagtaacgcgtggggaacctgccccataccgggggacaacagttggaaacgactgctaataccgcataagcgcacagggctgcatggcccggtgtgaaaaactccgg

SEQ ID NO: 2806 - DNA, 225 bp, unidentified
  misc_feature 1..225: note = bacterial strain Ascusb_2582 encodes 16S rRNA
  source 1..225: mol_type = genomic DNA
agagtttgatcctggctcaggatgaacgctagcggcaggcttaacacatgcaagtcgaggggtaacagggagtagcaatactctgctgacgaccggcgcacgggtgcgtaacgcgtatgcaacctacctgtaacagggggataacggagagaaatttccactaataccccatattgttgtggattcgcatgttttcacaacgaaagcttcggtggttacggatgg

SEQ ID NO: 2807 - DNA, 225 bp, unidentified
  misc_feature 1..225: note = bacterial strain Ascusb_1696 encodes 16S rRNA
  source 1..225: mol_type = genomic DNA
agagtttgatcatggctcaggatgaacgctggcggcgtgcttaacacatgcaagtcgaacgaagcagtggacttcggtttacagcttagtggcggacgggtgagtaacgcgtgggcaacctgccttacaccgggggataacagttggaaacgactgctaataccgcataagaccacggtaccgcatggtacaggggtaaaagttccggcgatgtaagatggaccc

SEQ ID NO: 2808 - DNA, 225 bp, unidentified
  misc_feature 1..225: note = bacterial strain Ascusb_3722 encodes 16S rRNA
  source 1..225: mol_type = genomic DNA
agagtttgatcatggctcaggatgaacgctagcggcaggcttaacacatgcaagtcgaggggtaacagggagtagcaatactctgctgacgaccggcgcacgggtgcgtaacgcgtatgcaacctacctgtaacagggggataacggagggaaacttccactaataccccatattgttgtggattcgcatgttttcacaacgaaagcttcggtggttacggatgg

SEQ ID NO: 2809 - DNA, 225 bp, unidentified
  misc_feature 1..225: note = bacterial strain Ascusb_5711 encodes 16S rRNA
  source 1..225: mol_type = genomic DNA
agagtttgatcctggctcaggatgaacgctagcgacaggcctaacacatgcaagtcgaggggcagcgcgggagaagcttgcttttcctggcggcgaccggcgcacgggtgagtaacgcgtatgcaacctgccagtaagcgcgggatagccttccgaaagggagattaacaccgcatgaggccgcggatgggcatccatctgcggtgaaatgagaagcttactgat

SEQ ID NO: 2810 - DNA, 225 bp, unidentified
  misc_feature 1..225: note = bacterial strain Ascusb_864 encodes 16S rRNA
  source 1..225: mol_type = genomic DNA
agagtttgatcctggctcaggatgaacgctggcggcgtgcttaacacatgcaagtcgaacggagtatttcgcccgagacctgaggtagcttgctacggatggaatcaattgaaatacttagtggcggacgggtgagtaacgcgtgagtaacctgccctttagtggggaataacaccgagaaatcggtgctaataccgcataatgtcagaggaccgcatgatcttc

SEQ ID NO: 2811 - DNA, 225 bp, unidentified
  misc_feature 1..225: note = bacterial strain Ascusb_4048 encodes 16S rRNA
  source 1..225: mol_type = genomic DNA
agagtttgatcctggctcaggatgaacgctagctacaggcttaacacatgcaagtcgaggggcagcatggtcttagcttgctaagactgatggcgaccggcgcacgggtgagtaacgcgtatccaacctggcccttagtaggggatagcccggcgaaagtcggattaataccctatgttcttcgtagaggacatctgaaatgaagcaaagattaatcgctaaggg

SEQ ID NO: 2812 - DNA, 225 bp, unidentified
  misc_feature 1..225: note = bacterial strain Ascusb_8561 encodes 16S rRNA
  source 1..225: mol_type = genomic DNA
agagtttgatcatggctcaggatgaacgctagctacaggcttaacacatgcaagtcgaggggcagcatggtggtagcttgctaccaccgatggcgaccggcgcacgggtgagtaacacgtatccaacctgcccatgacccggggatagccctctgaaaggaggattaatacccgatacggtgcgagtgggacatcccgctcttaccaaagattcatcggtcacgg

SEQ ID NO: 2813 - DNA, 225 bp, unidentified
  misc_feature 1..225: note = bacterial strain Ascusb_532 encodes 16S rRNA
  source 1..225: mol_type = genomic DNA
agagtttgatcatggctcaggatgaacgctggcggcgtgcttaacacatgcaagtcgaacgaagcacttgaacctgatttcttcggattgaaggatcttgtgacttagtggcggacgggtgagtaacgcgtgggcaacctgcctcacactgggggacaacagttggaaacgactgctaataccgcataagcgcacactgctgcatggcagagtgtgaaaaactga

SEQ ID NO: 2814 - DNA, 225 bp, unidentified
  misc_feature 1..225: note = bacterial strain Ascusb_718 encodes 16S rRNA
  source 1..225: mol_type = genomic DNA
agagtttgatcctggctcagaacgaacgctggcggcgcgttttaagcatgcaagtcgggcggcaaggtccttcgggaccctagagcggcggacgggtgagtaacacgtggacaatctgccctgcagtctggaatagcctatggaaacatgggataatgccggatgcgacgcgttggcgcaggccgatgcgggaaagttcccacgggaacgctgcaggatgagtcc

SEQ ID NO: 2815 - DNA, 225 bp, unidentified
  misc_feature 1..225: note = bacterial strain Ascusb_7172 encodes 16S rRNA
  source 1..225: mol_type = genomic DNA
agagtttgatcatggctcaggatgaacgctagctacaggcttaacacatgcaagtcgaggggcagcatgtcgtgtgcttgcacacgatgatggcgaccggcgcacgggtgcgtaacgcgtatccaaccttcccgcaagccggggatagcccggcgaaagtcggattaatacccgatgtggtgctttgaggacatctgactggcactaaaggcttgccgcttgcgg

SEQ ID NO: 2816 - DNA, 225 bp, unidentified
  misc_feature 1..225: note = bacterial strain Ascusb_1425 encodes 16S rRNA
  source 1..225: mol_type = genomic DNA
agagtttgatcatggctcaggacgaacgctggcggcacgcttaacacatgcaagtcgaacggagttttgatcagcttgctgaacaaaacttagtggcggacgggtgagtaacacgtgagcaacctgcctttgagagcggaatagcttctggaaacggatggtaataccgcataacattattgaatcgcatggtttaataatcaaagatttatcgctcaaagatgg

SEQ ID NO: 2817 - DNA, 225 bp, unidentified
  misc_feature 1..225: note = bacterial strain Ascusb_5492 encodes 16S rRNA
  source 1..225: mol_type = genomic DNA
agagtttgatcatggctcagaacgaacgctggcggcgcgtcttaagcatgcaagtcgagcggtaagttggaagcttgcttctaacctagagcggcggactggtgagtaacgcgtgggtgacgtaccttcgtgacggggacagctcctagaaataggagataataccggatacgctgtgtgttgtcagaggacacacaggaaaggatcttttgattcgcacgaaga

SEQ ID NO: 2818 - DNA, 225 bp, unidentified
  misc_feature 1..225: note = bacterial strain Ascusb_8863 encodes 16S rRNA
  source 1..225: mol_type = genomic DNA
agagtttgatcctggctcaggattaacgctggcggcatgcctaatacatgcaagtcgaatggaagagcttgcttttccatggcgaacgggtgagtaacacgtaggtaacctaccttaaggacgaggataacctttggaaacgaaggataatactggataggacatcaaaaagcacatgcttagatgtttaaaggagcaatccaccataagaggggcctgcggcgc

SEQ ID NO: 2819 - DNA, 225 bp, unidentified
  misc_feature 1..225: note = bacterial strain Ascusb_4511 encodes 16S rRNA
  source 1..225: mol_type = genomic DNA
agagtttgatcatggctcaggatgaacgctggcggcgtgcttaacacatgcaagtcgaacgaagcgtcccgcccgatgaagtggagtgcttgcacaaagcagaatcaattgggatgacttagtggcggacgggtgagtaacgcgtgggtaacctgccttacacagggggacaacagttggaaacgactgctaataccgcataacccgctagtatcgcatgataca

SEQ ID NO: 2820 - DNA, 225 bp, unidentified
  misc_feature 1..225: note = bacterial strain Ascusb_324 encodes 16S rRNA
  source 1..225: mol_type = genomic DNA
agagtttgatcatggctcaggatgaacgctggcggcgtgcttaatacatgcaagtcgaacgaagacttctcgctgaattgaattcattcttttcttgagatgtcttagtggcggacgggtgagtaacgcgtgggtaacctgccttacacagggggataacagttagaaatgactgctaataccgcataagcgcacagtatcgcatgatacagtgtgaaaaactcc

SEQ ID NO: 2821 - DNA, 225 bp, unidentified
  misc_feature 1..225: note = bacterial strain Ascusb_9394 encodes 16S rRNA
  source 1..225: mol_type = genomic DNA
agagtttgatcctggctcaggatgaacgctggcggcgtgcttaacacatgcaagtcgaacgggatatactttttagcttgctaagttgtatatctagtggcggacgggtgagtaacgcgtgggtaacctgccgtatgccgggggacaacagttggaaacgactgctaataccgcataagcgcacagtaccgcatggtacggtgtgaaaaactccggtggcatacg

SEQ ID NO: 2822 - DNA, 225 bp, unidentified
  misc_feature 1..225: note = bacterial strain Ascusb_514 encodes 16S rRNA
  source 1..225: mol_type = genomic DNA
agagtttgatcatggctcaggacgaacgctggcggcgtgcctaacacatgcaagtcgagcggagacatttggaaagcttgctttttggatgtttcagcggcggacgggtgagtaacgcgtgagcaacctgcctttaacagggggataacgcatcgaaagatgtgctaataccgcataagaccacaacgctacatggcgaaggggtcaaaggagcaatccggttaa

SEQ ID NO: 2823 - DNA, 225 bp, unidentified
  misc_feature 1..225: note = bacterial strain Ascusb_113 encodes 16S rRNA
  source 1..225: mol_type = genomic DNA
agagtttgatcatggctcaggacgaacgctggcggcacgcttaacacatgcaagtcgaacggagttatttggagcttgctctggataacttagtggcggacgggtgagtaacacgtgagcaacctgccttcaagagcggaatagcttctggaaacggatggtaataccgcataacattacgggaccgcatgattctgtaatcaaagatttatcgcttgaagatgg

SEQ ID NO: 2824 - DNA, 225 bp, unidentified
  misc_feature 1..225: note = bacterial strain Ascusb_2697 encodes 16S rRNA
  source 1..225: mol_type = genomic DNA
agagtttgatcctggctcaggatgaacgctggcggcgtgcctaatacatgcaagtcgagcgagaatcgaatgaacggagattcgtcgaagtgatttcgaggaaagcggcggacgggtgagtaacgcgtaggcaacctgcccttagcagagggatagccattggaaacgatgattaaaacctcataatgctgtagaaacacatgttactgcagccaaagatttatc

SEQ ID NO: 2825 - DNA, 225 bp, unidentified
  misc_feature 1..225: note = bacterial strain Ascusb_3282 encodes 16S rRNA
  source 1..225: mol_type = genomic DNA
agagtttgatcctggctcaggatgaacgctagctacaggcttaacacatgcaagtcgaggggcagcaggaatctagcttgctagatttgctggcgaccggcgcacgggtgagtaacgcgtatccaaccttccccttagtagggcatagcccgtagaaatgcggattaataccctatgttttccgatgcagacatctaatttggaataaaggtttaccgctaaggg

SEQ ID NO: 2826 - DNA, 225 bp, unidentified
  misc_feature 1..225: note = bacterial strain Ascusb_4173 encodes 16S rRNA
  source 1..225: mol_type = genomic DNA
agagtttgatcatggctcaggatgaacgctagctacaggcttaacacatgcaagtcgaggggtaacattggcggagcttgctcagccagatgacgaccggcgcacgggtgagtaacgcgtatccaacctgcccattggtcagggataacctcccgaaagggagcctaatacctgatgttgtgagaagaaggcctctgattttcacgaaagacttcggtcgccgat

SEQ ID NO: 2827 - DNA, 225 bp, unidentified
  misc_feature 1..225: note = bacterial strain Ascusb_332 encodes 16S rRNA
  source 1..225: mol_type = genomic DNA
agagtttgatcatggctcaggatgaacgctggcggcgtgcttaatacatgcaagtcgaacgaagatatttcgctgatgcgattcgtcaaatcttgaaatatcttagtggcggacgggtgagtaacgcgtgggtaacctgccttacacagggggataacagttagaaatgactgctaataccgcataagcgcacgagatcgcatgatcatgtgtgaaaagatttat

SEQ ID NO: 2828 - DNA, 225 bp, unidentified
  misc_feature 1..225: note = bacterial strain Ascusb_4597 encodes 16S rRNA
  source 1..225: mol_type = genomic DNA
agagtttgatcctggctcaggatgaacgctagcgacaggcttaacacatgcaagtcgaggggcagcatgggaggtggcaacaccacccgatggcgaccggcgcactggtgagtaacacgtatgcaacctgccccccacaggggaataaaccagagaaatttggcctaatgccccgtagtccccgcgcccgcatggccgcggggggaaagatccgtcggtggggga

SEQ ID NO: 2829 - DNA, 225 bp, unidentified
  misc_feature 1..225: note = bacterial strain Ascusb_7297 encodes 16S rRNA
  source 1..225: mol_type = genomic DNA
agagtttgatcatggctcaggatgaacgctggcggcgtgcctaacacatgcaagtcgaacggtgatatatagatgatttcggtctgaagtatatcatagtggcggacgggtgagtaacgcgtggataacctgccccgtactgggggatagcagctggaaacggctggtaataccgcataagcgcacgagggggcctcccctagtgtgaaaagattcatcggtacg

SEQ ID NO: 2830 - DNA, 225 bp, unidentified
  misc_feature 1..225: note = bacterial strain Ascusb_168 encodes 16S rRNA
  source 1..225: mol_type = genomic DNA
agagtttgatcatggctcaggatgaacgctagctacaggcttaacacatgcaagtcgaggggcagcattagattagcttgctaatttagatggcgaccggcgcacgggtgagtaacgcgtatccaaccttccccctgctcagggatagcccggtgaaaaccggattaagacctgatagtttcactagatggcatctgacggtgaataaaggtttcggcaagggat

SEQ ID NO: 2831 - DNA, 225 bp, unidentified
  misc_feature 1..225: note = bacterial strain Ascusb_2426 encodes 16S rRNA
  source 1..225: mol_type = genomic DNA
agagtttgatcatggctcaggatgaacgctagcggcaggcttaacacatgcaagtcgaggggcagcaggcggtagcaataccgtgctggcgaccggcgcacgggtgcgtaacgcgtatgcaacctacccactacagggggataacggagggaaacttccactaatatcccatggtgtcatcggatcgcatggtctggtgactaaagctacggtggtagtggatgg

SEQ ID NO: 2832 - DNA, 225 bp, unidentified
  misc_feature 1..225: note = bacterial strain Ascusb_917 encodes 16S rRNA
  source 1..225: mol_type = genomic DNA
agagtttgatcctggctcaggatgaacgctggcggcgtgcttaatacatgcaagtcgaacggatgaaggaagaaagcttgctttcttcccgattcagtggcgaacgggtgagtaatacgtaggcaacctgccccaaagcgggggatagcagttggaaacgactattaataccgcataggtaatagggaggcatctccttattattaaaggtgcgtttgcaccgct

SEQ ID NO: 2833 - DNA, 225 bp, unidentified
  misc_feature 1..225: note = bacterial strain Ascusb_1920 encodes 16S rRNA
  source 1..225: mol_type = genomic DNA
agagtttgatcatggctcaggatgaacgctggcggcgtgcttaacacatgcaagtcgaacggagtttagatgaagcttgcgattctaaacttagtggcggacgggtgagtaacgcgtgggtaacctgccttataccgggggataacacttagaaataggtgctaataccgcataagcgcacagtcctgcatgggacagtgtgaaaaactccggtggtataagatg

SEQ ID NO: 2834 - DNA, 225 bp, unidentified
  misc_feature 1..225: note = bacterial strain Ascusb_3105 encodes 16S rRNA
  source 1..225: mol_type = genomic DNA
agagtttgatcatggctcaggacgaacgctggcggcgtgcctaacacatgcaagtcgaacggagtttgaggaatgaaggtttcgattggattttcttaaacttagtggcggacgggtgagtaacgcgtgagtaacctgcccataagagggggataacgttttgaaaagaacgctaataccgcataacatatcgaagccgcatggcattgatatcaaaggagcaat

SEQ ID NO: 2835 - DNA, 225 bp, unidentified; identical to SEQ ID NO: 2317
  misc_feature 1..225: note = bacterial strain Ascusb_402 encodes 16S rRNA
  source 1..225: mol_type = genomic DNA

SEQ ID NO: 2836 - DNA, 225 bp, unidentified
  misc_feature 1..225: note = bacterial strain Ascusb_6906 encodes 16S rRNA
  source 1..225: mol_type = genomic DNA
agagtttgatcatggctcaggatgaacgctagctacaggcttaacacatgcaagtcgaggggcagcatggtggtagcttgctaccactgatggcgaccggcgcacgggtgagtaacacgtatccaacctgccttcagctcggggatagccctctgaaaggaggattaatacccgatgtgtttgcagtccggcatcggactgcaatcaaagatttatcggctgttg

SEQ ID NO: 2837 - DNA, 225 bp, unidentified
  misc_feature 1..225: note = bacterial strain Ascusb_5319 encodes 16S rRNA
  source 1..225: mol_type = genomic DNA
agagtttgatcatggctcaggatgaatgctggcggcgtgcctaatacatgcaagtcgagcggtaacagggcttcaccgtgttcttgacacacctagcgcagagtcgtaggttgttgacttcgagagcacagtgaagctgctgacgagcggcggacggctgagtaacgcgtgggaacggaccccaaactgagggataacgcaccgaaaggtgtgctaataccgcat

SEQ ID NO: 2838 - DNA, 225 bp, unidentified
  misc_feature 1..225: note = bacterial strain Ascusb_3781 encodes 16S rRNA
  source 1..225: mol_type = genomic DNA
agagtttgatcctggctcaggatgaacgctagcgacaggcttaacacatgcaagtcgaggggcagcgcggaggtggcaacacttctggcggcgaccggcgcactggtgagtaacacgtatgcgacctgccccggacagggggataaacccgggaaactgggcctaataccccatacgccgatgggatgcatgtcctttcggtgaaagatccgtcggtccgggatg

SEQ ID NO: 2839 - DNA, 225 bp, unidentified
  misc_feature 1..225: note = bacterial strain Ascusb_1589 encodes 16S rRNA
  source 1..225: mol_type = genomic DNA
agagtttgatcatggctcaggatgaacgctagcggcaggcttaacacatgcaagtcgaggggcagcgcggggtagcaatactctggcggcgaccggcggaagggtgcgtaacgcgtgagcaacatgcccgtatgagggggataagcgctggaaacggcgtctaataccccgtaacactggagatcgcatggttttcagttaaaagatttatcgcatacggattgg

SEQ ID NO: 2840 - DNA, 225 bp, unidentified
  misc_feature 1..225: note = bacterial strain Ascusb_16249 encodes 16S rRNA
  source 1..225: mol_type = genomic DNA
agagtttgatcctggctcaggatgaacgctggcggcatgcctaagacatgcaagtcgaacgaggcgaccttaagaagactgagtgcttgcacaaagttggaagaagatcatcgcctagtggcagacgggtgagtaacacgtgggttacctaccttcaagttggggataacagttggaaacgattgctaataccgaataagatgtacttgtacattgaaagaagcc

SEQ ID NO: 2841 - DNA, 225 bp, unidentified
  misc_feature 1..225: note = bacterial strain Ascusb_3696 encodes 16S rRNA
  source 1..225: mol_type = genomic DNA
agagtttgatcatggctcaggacgaacgctggcggcacgcttaacacatgcaagtcgaacggagtattttggagcttgctttgaaatacttagtggcggacgggtgagtaacacgtgagcaacctgcctttgagagcggaatagcttctggaaacggatggtaataccgcatgacattacagtaccgcatggtacagtaatcaaagatttatcgctcaaagatgg

SEQ ID NO: 2842 - DNA, 225 bp, unidentified
  misc_feature 1..225: note = bacterial strain Ascusb_13100 encodes 16S rRNA
  source 1..225: mol_type = genomic DNA
agagtttgatcatggctcaggacgaacgctggcggcgtgcttaacacatgcaagtcgaacgaggttatgtgaaggaaggtttcggctggaatttatataatcgagtggcggacgggtgagtaacgcgtgaggaacctgtcttctacagggggataacggtccgaaaggattgctaataccgcataagaccacgaagtcgcatggctttgaggtcaaaggagaaat

SEQ ID NO: 2843 - DNA, 225 bp, unidentified
  misc_feature 1..225: note = bacterial strain Ascusb_831 encodes 16S rRNA
  source 1..225: mol_type = genomic DNA
agagtttgatcatggctcagagtgaacgctggcggcgtggctcagacatgcaagtcgagcgagaatatgccttcgggtataggaaagcggcaaacgggtgagtaatacgtaagtaatctgcctctaaaacgggaatagcttggtgaaaactgaggtaatgcccgataccaacttgtttcgcatgaaacaagtttgaaaggtttgtaatgacgtttagagaggagc

SEQ ID NO: 2844 - DNA, 225 bp, unidentified
  misc_feature 1..225: note = bacterial strain Ascusb_9689 encodes 16S rRNA
  source 1..225: mol_type = genomic DNA
agagtttgatcatggctcaggacgaacgctggcggcgtgcctaacacatgcaagtcgaacggggtatgattcttcggagtcatacttagtggcgaacgggtgagtaacgcgtgagcaacctgcctttttgagggggataacaaccggaaacggttgctaataccgcataagaccacactgtcgcatgacagaggggtcaaaggagcaatccgcagaaagaggggc

SEQ ID NO: 2845 - DNA, 225 bp, unidentified
  misc_feature 1..225: note = bacterial strain Ascusb_3313 encodes 16S rRNA
  source 1..225: mol_type = genomic DNA
agagtttgatcatggctcaggataaacgctggcggcgcacataagacatgcaagtcgaacggaagtcgttatattgattttgaagagaacggagaacttgttcaaagggacatgatgaagatatataacaatggctttagtggcggactggtgagtaatacgtaagcaacctgcctatcagaggggaacaacagttagaaatgactgctaataccgcatatgcca

SEQ ID NO: 2846 - DNA, 225 bp, unidentified
  misc_feature 1..225: note = bacterial strain Ascusb_2294 encodes 16S rRNA
  source 1..225: mol_type = genomic DNA
agagtttgatcatggctcaggatgaacgctggcggcgtgcctaatacatgcaagtcgagcgagaatctgacgatcggagattcgtcaaagagaatcagaggaaagcggcggacgggtgagtaacgcgtaggcaacctgcccttagcagagggatagccattggaaacgatgattaaaacctcataaagctgtgagcacacatgtacacacagccaaagatttatc

SEQ ID NO: 2847 - DNA, 225 bp, unidentified
  misc_feature 1..225: note = bacterial strain Ascusb_1547 encodes 16S rRNA
  source 1..225: mol_type = genomic DNA
agagtttgatcctggctcaggatgaacgctggcggcgtgcctaacacatgcaagtcgaacggagtgcagacgctgaagatcaaagtagcttgctatagagagattcttgtttgtacttagtggcggacgggtgagtaacgcgtggaaaacctgcctcatacagggggataacaggaagaaattcctgctaataccgcatgagcgcacactgtcgcatggcagagt

SEQ ID NO: 2848 - DNA, 225 bp, unidentified
  misc_feature 1..225: note = bacterial strain Ascusb_1179 encodes 16S rRNA
  source 1..225: mol_type = genomic DNA
agagtttgatcctggctcagaacgaacgctggtggcgtgtcttatacatgcaagtcgagcggggcagcaatgcccagcggcgaacgggtgagtaacgcgtaagcaatctgccccatatcaggaaatacccgtgccaacgcgcggttaatgtccaggagcgtggccttccgcatgggaggttgacaagagatttatcggtatgggatgagcttgcgtccgattagc

SEQ ID NO: 2849 - DNA, 225 bp, unidentified
  misc_feature 1..225: note = bacterial strain Ascusb_611 encodes 16S rRNA
  source 1..225: mol_type = genomic DNA
agagtttgatcatggctcagaacgaacgctggcggcacgcttaacacatgcaagtcggacggagtgtaagggcttgctcttacacttagtggcggacgggtgagtaacacgtgggaacatatcctgtagtggtggatagctctgggaaactggaggtaatacagcataagctcgagagaggaaagagagattgctataggggtggcccgcggctgattaggtagt

SEQ ID NO: 2850 - DNA, 225 bp, unidentified
  misc_feature 1..225: note = bacterial strain Ascusb_943 encodes 16S rRNA
  source 1..225: mol_type = genomic DNA
agagtttgatcatggctcaggatgaacgctagctacaggcttaacacatgcaagtcgaggggcagcatgatcttagcttgctaaggttgatggcgaccggcgcacgggtgagtaacgcgtatccaacctggcccacagtagggaatagcccggcgaaagtcggattaatgccctatgttctccttcgagagcatttgaggaggagcaaagattcatcgctatggg

SEQ ID NO: 2851 - DNA, 225 bp, unidentified
  misc_feature 1..225: note = bacterial strain Ascusb_7806 encodes 16S rRNA
  source 1..225: mol_type = genomic DNA
agagtttgatcatggctcaggatgaacgctggcggcatgcctaagacatgcaagtcgaacgagacgacctcaagaagactgagtgcttgcacgaagttggaaagagatcatcgtctagtggcagacgggtgagtaacacgtgggtaacctacctttaagttggggataacagttggaaacgattgctaataccgaataagatgtacttgtacattgaaagaagcc

SEQ ID NO: 2852 - DNA, 225 bp, unidentified
  misc_feature 1..225: note = bacterial strain Ascusb_668 encodes 16S rRNA
  source 1..225: mol_type = genomic DNA
agagtttgatcatggctcaggatgaacgctagcgacaggcctaacacatgcaagtcgaggggcagcgcgggagaagcttgcttttcctggcggcgaccggcgcacgggtgcgtaacaggtgtgcaatctgtccatagtcgggggatagcccagcgaaagctgaattaacactccatgtgaatcgaagccgcatgactttgatttgaaacgcaaggactatgggtg

SEQ ID NO: 2853 - DNA, 225 bp, unidentified
  misc_feature 1..225: note = bacterial strain Ascusb_1665 encodes 16S rRNA
  source 1..225: mol_type = genomic DNA
agagtttgatcatggctcaggatgaacgctagcggcaggcttaacacatgcaagtcgaggggcagcgcggggtagcaataccctggcggcgaccggcgcacgggtgcgtaacgcgtatgcaacctgccccgcacagggggataacggagggaaacttccactaatatcccatggtgttcccgggccgcatggtctggggactaaagcttcggtggtgcgggatgg

SEQ ID NO: 2854 - DNA, 225 bp, unidentified
  misc_feature 1..225: note = bacterial strain Ascusb_1892 encodes 16S rRNA
  source 1..225: mol_type = genomic DNA
agagtttgatcatggctcaggacgaacgctggcggcgtgcctaacacatgcaagtcgaacggagttgacttgaatgagattttcggattgagttcggttaacttagtggcggacgggtgagtaacgcgtgagtaacctgcccacaagagggggataacgtcttgaaaaagacgctaataccgcataacatatcgaagccgcatgactttgatatcaaaggaggaa

SEQ ID NO: 2855 - DNA, 225 bp, unidentified
  misc_feature 1..225: note = bacterial strain Ascusb_2612 encodes 16S rRNA
  source 1..225: mol_type = genomic DNA
agagtttgatcatggctcaggattaacgctggcggcgtgcctaatacatgcaagtcgaatggtagcaataccatggcgaacgggtgagtaacacgtaggtaacctgtctttaagacgaggataaccgatggaaacgtcggataatactcgataggtgatatgagggcatccttgaatcattaaagatttatcacttagagaggggcctgcggcgcattagctaga

SEQ ID NO: 2856 - DNA, 225 bp, unidentified
  misc_feature 1..225: note = bacterial strain Ascusb_4129 encodes 16S rRNA
  source 1..225: mol_type = genomic DNA
agagtttgatcctggctcaggacgaacgctggcggcgtgcttaacacatgcaagtcgaacggggattattggaatgagagcttcggcaggatttctggtaattctagtggcggacgggtgagtaacgcgtgagcaacctgtcccagacagggggataacacttggaaacaggtgctaataccgcataagaccacagcatcacatggtgcaggggtaaaaggtgga

SEQ ID NO: 2857 - DNA, 225 bp, unidentified
  misc_feature 1..225: note = bacterial strain Ascusb_3794 encodes 16S rRNA
  source 1..225: mol_type = genomic DNA
agagtttgatcctggctcaggacgaacgctggcggcgtgcttaacacatgcaagtcgaacgaagcttgaagaatgaattcttcggaatgaattctgatatgactgagtggcggacgggtgagtaacgcgtgagcaacctgcccttcggagggggatagtgtctggaaacggacagtaataccgcataacgttaggatatggcatcataagctaaccaaagattta

SEQ ID NO: 2858 - DNA, 225 bp, unidentified; identical to SEQ ID NO: 2584
  misc_feature 1..225: note = bacterial strain Ascusb_3228 encodes 16S rRNA
  source 1..225: mol_type = genomic DNA

SEQ ID NO: 2859 - DNA, 225 bp, unidentified
  misc_feature 1..225: note = bacterial strain Ascusb_16972 encodes 16S rRNA
  source 1..225: mol_type = genomic DNA
agagtttgatcctggctcaggatgaacgctggcggcatgcctaagacatgcaagtcgaacgaggtggcccacagattgatattgaaaatggagtgcttgcacaaagtcggatttatcatgatgtggatcttccacctagtggcaaacgggtgagtaacacatgggttacctacctctaagttggggataacagttggaaacgattgctaataccgaatatgatct

SEQ ID NO: 2860 - DNA, 225 bp, unidentified
  misc_feature 1..225: note = bacterial strain Ascusb_3998 encodes 16S rRNA
  source 1..225: mol_type = genomic DNA
agagtttgatcctggctcaggatgaacgctggcggcgcgcctaacacatgcaagtcgaacggttaaagcacctccgggtgtgaataaagtggcgaacggctgagtaacacgtgggcaacctgcccctcgctccgggacagcctcgggaaactgggagtaataccggatactccgccacccccgcatgggggaggcgggaaagctccgacggcgagggatgggccc

SEQ ID NO: 2861 - DNA, 225 bp, unidentified
  misc_feature 1..225: note = bacterial strain Ascusb_2741 encodes 16S rRNA
  source 1..225: mol_type = genomic DNA
agagtttgatcatggctcaggacgaacgctggcggcgtgcctaacacatgcaagtcgagcggggacttaccgaatgaaagcttcggccggattttgataagttctagcggcggacgggtgagtaacgcgtgagcaatctgtctcagacagggggataacgcagcgaaagttgcactaataccgcatgagaccacagagccacatggcttaggggtcaaaggagca

SEQ ID NO: 2862 - DNA, 225 bp, unidentified
  misc_feature 1..225: note = bacterial strain Ascusb_2808 encodes 16S rRNA
  source 1..225: mol_type = genomic DNA
agagtttgatcatggctcaggatgaacgctggcggcacgcttaacacatgcaagtcgagcggagtttaaggcttcggttttaaacttagcggcggacgggtgagtaacacgtgggtaacctaccctatacagggggataacgtatagaaatgtacgctaataccgcataagccaacagggaggcatcttccggttggaaaagccgagacggtataggatgggccc

SEQ ID NO: 2863 - DNA, 225 bp, unidentified
  misc_feature 1..225: note = bacterial strain Ascusb_445 encodes 16S rRNA
  source 1..225: mol_type = genomic DNA
agagtttgatcatggctcaggatgaacgctagctacaggcttaacacatgcaagtcgaggggcagcataacgaaagcttgcttttgttgatggcgaccggcgcacgggtgagtaacgcgtatccaaccttccctgtagtagagaatagcccggcgaaagtcggattaatgctctatgttgtatttcgatgacatctgaagaataccaaaggtttaccgctatagg

SEQ ID NO: 2864 - DNA, 225 bp, unidentified
  misc_feature 1..225: note = bacterial strain Ascusb_262 encodes 16S rRNA
  source 1..225: mol_type = genomic DNA
agagtttgatcatggctcaggacgaacgctggcggcatgcctaacacatgcaagtcgaacggagcttaagaagcttgctttttaagcttagtggcggacgggtgagtaacgcgtgagcaacctgcctttcagtggggaataatactctgaaaagagtactaataccgcatgacgtacagataccgcatggtaactgtaccaaagatttatcgctgagagatgggc

SEQ ID NO: 2865 - DNA, 225 bp, unidentified
  misc_feature 1..225: note = bacterial strain Ascusb_2489 encodes 16S rRNA
  source 1..225: mol_type = genomic DNA
agagtttgatcatggctcaggacgaacgctggcggcgtgcctaacacatgcaagtcgaacggagataaggggcttgctccttatcttagtggcggacgggtgagtaacgcgtgagtaacctgcctttcagagggggataaccattggaaacgatggataataccgcataacgtacagttgtcgcatggcagttgtaccaaaggagcaatccgctgaaagatggac

SEQ ID NO: 2866 - DNA, 225 bp, unidentified
  misc_feature 1..225: note = bacterial strain Ascusb_1291 encodes 16S rRNA
  source 1..225: mol_type = genomic DNA
agagtttgatcctggctcaggacgaacgctggcggcgtgcttcatacatgcaagtcgaacgagaagttaccttcgggtaatggaaagtggcggacgggtgagtaatgtgtagagaatctgccctagagagggggacaaccgttggaaacgacagctaataccccatatgagcgtaactgaaatgttattcttgaaaactccggtgctctgggatgagtctgcatc

SEQ ID NO: 2867 - DNA, 225 bp, unidentified
  misc_feature 1..225: note = bacterial strain Ascusb_753 encodes 16S rRNA
  source 1..225: mol_type = genomic DNA
agagtttgatcatggctcaggatgaacgctagctacaggcttaacacatgcaagtcgaggggcagcataacggaagcttgcttctgttgatggcgaccggcgcacgggtgagtaacgcgtatccaaccttccccttagtagagaatagcccggcgaaagtcggattaatgctctatgttgtattttgaggacatctgacgaataccaaaggttcaccgctaaggg

SEQ ID NO: 2868 - DNA, 225 bp, unidentified
  misc_feature 1..225: note = bacterial strain Ascusb_7519 encodes 16S rRNA
  source 1..225: mol_type = genomic DNA
agagtttgatcatggctcaggacgaacgctggcggcgtgcttaacacatgcaagtcgaacgaggttatgttaaggaaggtttcggccggaattgatataaccgagtggcggacgggtgagtaacgcgtgagcaacctgtcttacacagggggataacactccgaaaggagcgctaataccgcataagaccacgatgccacatggcaatggggtaaaaggaggaat

SEQ ID NO: 2869 - DNA, 225 bp, unidentified
  misc_feature 1..225: note = bacterial strain Ascusb_1117 encodes 16S rRNA
  source 1..225: mol_type = genomic DNA
agagtttgatcctggctcaggacaaacgctggcggcgtgcctaacacatgcaagtcgaacgagaatcttcggaaagagacttcggtcaatggaaggagaggacagtggcggacgggtgagtaatgcatgagcaacctgccttggagtgggggacaacagttggaaacgactgctaataccgcatgaagttacgggggggcatcctcctgtaaccaaagatttatc

SEQ ID NO: 2870 - DNA, 225 bp, unidentified
  misc_feature 1..225: note = bacterial strain Ascusb_1744 encodes 16S rRNA
  source 1..225: mol_type = genomic DNA
agagtttgatcatggctcaggatgaacgctggcggcgtgcctaatacatgcaagtcgaacgagcgaagtccagcttgctggatggagctagtggcgaacgggtgagtaatacgtaagcaacctgcctacacggactgggataacacctggaaacgggcgctaataccggataggtaacggaagggcatccttctgttattaaaggtttgaaacacaagtagatgg

SEQ ID NO: 2871 - DNA, 225 bp, unidentified
  misc_feature 1..225: note = bacterial strain Ascusb_384 encodes 16S rRNA
  source 1..225: mol_type = genomic DNA
agagtttgatcatggctcaggatgaacgctggcggcacgcctaacacatgcaagtcgaacggagtttattgaagcttgctttgataaacttagtggcggacgggtgagtaacacgtgagcaacctgcctttcagagagggatagcttctggaaacggatggtaatacctcataacatattgatacggcatcgtattgatatcaaagatttatcgctgaaagatgg

SEQ ID NO: 2872 - DNA, 225 bp, unidentified
  misc_feature 1..225: note = bacterial strain Ascusb_196 encodes 16S rRNA
  source 1..225: mol_type = genomic DNA
agagtttgatcatggctcaggatgaacgctggcggcgtgcttaacacatgcaagtcgaacgaagccaaaaggaagcttgctttctttgaagcttagtggcggacgggtgagtaacgcgtgaggaacctgcccttcagtggggaataacagccggaaacgactgctaataccgcataatgtcatcggaccgcatgatctgatgaccaaaggatttattcgctgaag

SEQ ID NO: 2873 - DNA, 225 bp, unidentified
  misc_feature 1..225: note = bacterial strain Ascusb_1544 encodes 16S rRNA
  source 1..225: mol_type = genomic DNA
agagtttgatcctggctcaggacgaacgctggcggcgcgcctaacacatgcaagtcgaacggactttatggaaactgaggcttcggcggacgaagaaataaagttagtggcgaacgggtgagtaacacgtgaggaacctacctctcagagggggataacacttagaaataggtgctaataccgcataagaccacgaccgggcatccggatggggtcaaaggagca

SEQ ID NO: 2874 - DNA, 225 bp, unidentified
  misc_feature 1..225: note = bacterial strain Ascusb_1722 encodes 16S rRNA
  source 1..225: mol_type = genomic DNA
agagtttgatcatggctcaggatgaacgctggcggcgtgcctaacacatgcaagtcgaacggacctattatttaacagagacttcggttgaagttggttttaggttagtggcggacgggtgagtaacgcgtggagaacctgccctgtactgggggataacagtgagaaatcactgctaataccgcataagcgcacgaaaccgcatggttttgtgtgaaaaactcc

SEQ ID NO: 2875 - DNA, 225 bp, unidentified
  misc_feature 1..225: note = bacterial strain Ascusb_4733 encodes 16S rRNA
  source 1..225: mol_type = genomic DNA
agagtttgatcatggctcaggacgaacgctggcggcgtgcttaacacatgcaagtcgaacggggattaggttggaaaggcttcggcccggaagacttaattcgagtggcggacgggtgagtaacgcgtgagcaacctgtcccagacagggggataacacttggaaacaggtgctaataccgcataagaccacggggtcacatggctctggggtaaaaggagcaat

SEQ ID NO: 2876 - DNA, 225 bp, unidentified
  misc_feature 1..225: note = bacterial strain Ascusb_674 encodes 16S rRNA
  source 1..225: mol_type = genomic DNA
agagtttgatcatggctcaggacgaacgctggcggcacgcttaacacatgcaagtcgaacggtgaaagtagcttgctactggatcagtggcggacgggtgagtaacacgtgagcaatctgcctctaagtggggaataacgtttggaaacggacggtaataccgcataatatacattgaccgcatgatcggtgtatcaaagatttatcgcttagagatgagctcgc

SEQ ID NO: 2877 - DNA, 225 bp, unidentified
  misc_feature 1..225: note = bacterial strain Ascusb_3712 encodes 16S rRNA
  source 1..225: mol_type = genomic DNA
agagtttgatcatggctcaggatgaacgctagctacaggcttaacacatgcaagtcgaggggcagcattgagatagcttgctatttcagatggcgaccggcgcacgggtgagtaacgcgtatccaaccttccctatagtagagaatagcccggcgaaagtcggattaatgctctatgttgttcaatgcggacatctaagttgaaccaaaggtttaccgctatagg

SEQ ID NO: 2878 - DNA, 225 bp, unidentified
  misc_feature 1..225: note = bacterial strain Ascusb_2773 encodes 16S rRNA
  source 1..225: mol_type = genomic DNA
agagtttgatcatggctcaggacgaacgctggcggcgtgcctaacacatgcaagtcgaacgaagcacttctggattgagattcgtcaagatccggatttgacttagtggcggacgggtgagtaatacatgagcaacctgccctggagtgggggacaacagttggaaacgactgctaataccgcataatgtatccggaaggcatcttctggataccaaagatttat

SEQ ID NO: 2879 - DNA, 225 bp, unidentified
  misc_feature 1..225: note = bacterial strain Ascusb_1952 encodes 16S rRNA
  source 1..225: mol_type = genomic DNA
agagtttgatcatggctcaggatgaacgctggcggcgtgcctaacacatgcaagtcgaacggaaacataacgctactgagatttcggtcaaagtttgttgtgttttagtggcggacgggtgagtaacgcgtggataacctgccatatacagggggataacagttagaaatgactgctaataccgcataagcgcacagtctcgcatgggacagtgtgaaaagccga

SEQ ID NO: 2880 - DNA, 225 bp, unidentified
  misc_feature 1..225: note = bacterial strain Ascusb_2873 encodes 16S rRNA
  source 1..225: mol_type = genomic DNA
agagtttgatcatggctcaggatgaacgctagctacaggcttaacacatgcaagtcgaggggcagcatgaagtcagcttgctgactttgatggcgaccggcgcacgggtgcgtaacacgtatccaacctgcccgttactcggggatagcctttcgaaagaaagattaatacccgatggtttcgcatcaccgcatgacggtgcgaataaagattcatcggtaacgg

SEQ ID NO: 2881 - DNA, 225 bp, unidentified
  misc_feature 1..225: note = bacterial strain Ascusb_3988 encodes 16S rRNA
  source 1..225: mol_type = genomic DNA
agagtttgatcatggctcaggatgaacgctagcggcaggcttaacacatgcaagtcgaggggcagcgcggggtagcaatactctggcggcgaccggcaaaagggtgcgtaacacgtgagcaacctgcccgtcacagggggataagcgctggaaacggcgtctaataccgcgtaacacattttcccgcatgagaggatgttgaaaatttcgatggtgacggatggg

SEQ ID NO: 2882 - DNA, 225 bp, unidentified
  misc_feature 1..225: note = bacterial strain Ascusb_1006 encodes 16S rRNA
  source 1..225: mol_type = genomic DNA
agagtttgatcatggctcaggacgaacgctggcggcacgcctaacacatgcaagtcgaacggtgatttgggagcttgcttccaaatcatagtggcggacgggtgagtaacacgtgagcaacctgcctctgagagagggatagcttctggaaacggatggtaatacctcataacattacatgaccgcatgatcgtgtaatcaaagatttatcactcagagatgggc

SEQ ID NO: 2883 - DNA, 225 bp, unidentified
  misc_feature 1..225: note = bacterial strain Ascusb_490 encodes 16S rRNA
  source 1..225: mol_type = genomic DNA
agagtttgatcatggctcaggacgaacgctggcggcacgcttaacacatgcaagtcgaacggagatactgagagcttgcttttggtatcttagtggcggacgggtgagtaacacgtgagcaacctgcctttgagagtggaatagcttctggaaacggatggtaataccgcatgatgttattttatcgcatggtagaataaccaaagatttatcgctcgaagatgg

SEQ ID NO: 2884 - DNA, 225 bp, unidentified
  misc_feature 1..225: note = bacterial strain Ascusb_3329 encodes 16S rRNA
  source 1..225: mol_type = genomic DNA
agagtttgatcatggctcaggacgaacgctggcggcgtgcttaacacatgcaagtcgaacggggattagttgattgagagcttcggcaggatatcgattaattcgagtggcggacgggtgagtaacgcgtgagcaacctgtcccagacagggggataacacttggaaacaggtgctaataccgcataagaccacgggatcacatggttctggggtaaaaggagca

SEQ ID NO: 2885 - DNA, 225 bp, unidentified
  misc_feature 1..225: note = bacterial strain Ascusb_4617 encodes 16S rRNA
  source 1..225: mol_type = genomic DNA
agagtttgatcatggctcaggatgaacgctggcggcgtgcctaacacatgcaagtcgaacggacttttcatcttagaggcttcggccaaagaggtttaaagttagtggcggacgggtgagtaacgcgtggagaacctgcctcatgctgggggataacagtgagaaatcactgctaataccgcataagcgcacgaaggcgcatgcctttgtgtgaaaaactccggt

SEQ ID NO: 2886 - DNA, 225 bp, unidentified
  misc_feature 1..225: note = bacterial strain Ascusb_2017 encodes 16S rRNA
  source 1..225: mol_type = genomic DNA
agagtttgatcatggctcaggatgaacgctagctacaggcttaacacatgcaagtcgaggggcagcatgatcgaagcttgctttgattgatggcgaccggcgcacgggtgagtaacgcgtatccaaccttccctatagtagaggatagcccggcgaaagtcggattaatactctatgttttccgaagcagacatctaatttggaacaaaggttcaccgctatagg

SEQ ID NO: 2887 - DNA, 225 bp, unidentified
  misc_feature 1..225: note = bacterial strain Ascusb_1867 encodes 16S rRNA
  source 1..225: mol_type = genomic DNA
agagtttgatcatggctcaggacgaacgctggcggcatgcctaacacatgcaagtcgaacgagagtagcaatactcgagtggcgaacgggtgagtaacacgtgagcaacctgccttacacaacgggatacctactggaaacagtagttaatacggtataagaccacagtaccgcatgatacagtggtaaaagatttatcggtgtaagatgggctcgcggcgcatt

SEQ ID NO: 2888 - DNA, 225 bp, unidentified
  misc_feature 1..225: note = bacterial strain Ascusb_2558 encodes 16S rRNA
  source 1..225: mol_type = genomic DNA
agagtttgatcatggctcaggatgaacgctagcggcaggcctaacacatgcaagtcgaggggcagcagggcgtagcaatacgctgctggcgaccggcgcacgggtgcgtaacgcgtatgcaacctacccataacagggggataacggggtgaaaaccccactaataccccgtatagacacttggtcgcatggccgggtgtcgaaagccttcgggtggttatggat

SEQ ID NO: 2889 - DNA, 225 bp, unidentified
  misc_feature 1..225: note = bacterial strain Ascusb_2949 encodes 16S rRNA
  source 1..225: mol_type = genomic DNA
agagtttgatcctggctcaggatgaacgctggcggcgtgcttaacacatgcaagtcgaacgaagcatttgttcggatttcttcggattgaagaacttatgacttagtggcggacgggtgagtaacgcgtggggaacctgccccataccgggggacaacagctggaaacggctgctaataccgcataagcgcacgggatggcatcatccagtgtgaaaaactccgg

SEQ ID NO: 2890 - DNA, 225 bp, unidentified
  misc_feature 1..225: note = bacterial strain Ascusb_2428 encodes 16S rRNA
  source 1..225: mol_type = genomic DNA
agagtttgatcctggctcaggataaacgctggcggcgtgcttaacacatgcaagtcgaacggggtaatcctcccgaagacctgacgagcttgctctgacggaattcatttggattacttagtggcggacgggtgagtaacgcgtgggaaacctgcctcacactgggggatagcagttggaaacgactgataataccgcataagcgcacagcaccgcatggtgcag

SEQ ID NO: 2891 - DNA, 225 bp, unidentified
  misc_feature 1..225: note = bacterial strain Ascusb_8175 encodes 16S rRNA
  source 1..225: mol_type = genomic DNA
agagtttgatcctggctcaggacgaacgctggcggcgtgcttaacacatgcaagtcgagcggggatagaattggaagttcttcgggatggaagattttattctagcggcggacgggtgagtaacgcgtgaacaatctgtcccagacagggggataacacttggaaacaggtgctaataccgcataagaccacgttttcgcatgggaatgaggtaaaaggagcgat

SEQ ID NO: 2892 - DNA, 225 bp, unidentified
  misc_feature 1..225: note = bacterial strain Ascusb_1733 encodes 16S rRNA
  source 1..225: mol_type = genomic DNA
agagtttgatcctggctcaggatgaacgctggcggcacgcttaacacatgcaagtcgaacggagcagaaagagcttgcttttcctgctcagtggcggacgggtgcgtaacgcgtgggtaatctgcccttgacagggggataacgtatagaaatgtacgctaataccgcataagctcacggagtggcatcactctgggggaaaagggataccggtcaaggatgagc

SEQ ID NO: 2893 - DNA, 225 bp, unidentified
  misc_feature 1..225: note = bacterial strain Ascusb_2483 encodes 16S rRNA
  source 1..225: mol_type = genomic DNA
agagtttgatcctggctcaggatgaacgctagctacaggcttaacacatgcaagtcgaggggcagcgggaagaaagcttgctttctttgccggcgaccggcgcacgggtgagtaacgcgtatccaaccttccccttagtagggcatagcccggcgaaagtcggattaataccctatgttattcgtagaggacatctgaaatgaatcaaagatttatcgctaaggg

SEQ ID NO: 2894 - DNA, 225 bp, unidentified
  misc_feature 1..225: note = bacterial strain Ascusb_694 encodes 16S rRNA
  source 1..225: mol_type = genomic DNA
agagtttgatcatggctcaggacgaacgctggcggcacgcttaacacatgcaagtcgaacgaacgaaggagagcttgctctccggagttagtggcggacgggtgagtaacacgtgagcaacctgccttcgagcgaggaataatggctggaaacggccactaatacctcataatgcagcggtaccgcatgatactgctgccaaagatttatcacttgaagatgggc

SEQ ID NO: 2895 - DNA, 225 bp, unidentified
  misc_feature 1..225: note = bacterial strain Ascusb_862 encodes 16S rRNA
  source 1..225: mol_type = genomic DNA
agagtttgatcatggctcaggatgaacgctggcggcgtgcttaacacatgcaagtcgaacggagacaaacgccgattgaagcttcggcagaaatcatgtttgtcttagtggcggacgggtgagtaacgcgtgggtaacctgccttataccgggggataacacttagaaataggtgctaataccgcataagcgcacagcttcgcatgaagcagtgtgaaaaactcc

SEQ ID NO: 2896 - DNA, 225 bp, unidentified
  misc_feature 1..225: note = bacterial strain Ascusb_740 encodes 16S rRNA
  source 1..225: mol_type = genomic DNA
agagtttgatcatggctcaggacgaacgctggcggcgtgcctaacacatgcaagtcgagcggggacatacagtgaagaggaagttttcggatggaattggaacggtatgttctagcggcggacgggtgagtaacgcgtgagcaacctgtccttcacagggggataacacagcgaaagttgtactaataccgcataagaccacggagctgcatggctttggggtca

SEQ ID NO: 2897 - DNA, 225 bp, unidentified
  misc_feature 1..225: note = bacterial strain Ascusb_6782 encodes 16S rRNA
  source 1..225: mol_type = genomic DNA
agagtttgatcatggctcaggatgaatgctggcggcgtgcctaatacatgcaagtcgagcggtaacagggtttcaccgtttccttgacacacctagcgtattatcgtaggttgttagtttcgagggaacagtgaagctgctgacgagcggcggacggctgagtaacgcgtgggaacggaccccaaactgagggataactagtcgaaagattagctaataccgcat

SEQ ID NO: 2898 - DNA, 225 bp, unidentified
  misc_feature 1..225: note = bacterial strain Ascusb_619 encodes 16S rRNA
  source 1..225: mol_type = genomic DNA
agagtttgatcctggctcaggatgaacgctagctacaggcttaacacatgcaagtcgaggggcagcatgcaggtagcttgctatctgtgatggcgaccggcgcacgggtgagtaacgcgtatccaaccttccccgtagtagggcacagcccggcgaaagtcggattaattccctatgttctccaatgcagacatctaagttggagcaaagattcatcgctatggg

SEQ ID NO: 2899 - DNA, 225 bp, unidentified
  misc_feature 1..225: note = bacterial strain Ascusb_4139 encodes 16S rRNA
  source 1..225: mol_type = genomic DNA
agagtttgatcctggctcaggacgaacgctggcggcgtgcctaacacatgcaagtcgaacggacgagaggagcttgctcctcgagttagtggcgaacgggtgagtaacgcgtgagcaacctgcctttcagagggggacaacggttggaaacgaccgctaataccgcatgatgtattctggtcgcatgatcggggtgccaaagatttatcgctgaaagatgggctc

SEQ ID NO: 2900 - DNA, 225 bp, unidentified
  misc_feature 1..225: note = bacterial strain Ascusb_4328 encodes 16S rRNA
  source 1..225: mol_type = genomic DNA
agagtttgatcctggctcaggataaacgctggcggcgcacataagacatgcaagtcgaacggaagtcgttatactgattttgaaaggaactgagaacttgttcaacgggactggatggagatttataacaatggctttagtggcggactggtgagtaatacgtaagcaacctgcctattagaggggaacaacagttagaaatgactgctaataccgcatatgcct

SEQ ID NO: 2901 - DNA, 225 bp, unidentified
  misc_feature 1..225: note = bacterial strain Ascusb_4258 encodes 16S rRNA
  source 1..225: mol_type = genomic DNA
agagtttgatcatggctcaggataaacgctggcggcgcacataagacatgcaagtcgaacgagaatcgttaaaaacggattgaagatttatcagattgaagtttttaacaatggttctagtggcggactggtgagtaacacgtaagcaacctgcctattagaggggaataacagtgagaaatcattgctaataccgcatatgctcacagaatcacatgatttagt

SEQ ID NO: 2902 - DNA, 225 bp, unidentified
  misc_feature 1..225: note = bacterial strain Ascusb_783 encodes 16S rRNA
  source 1..225: mol_type = genomic DNA
agagtttgatcatggctcaggatgaacgctggcggcgtgcttaacacatgcaagtcgaacggagtttatggagcttgctctgtaaacttagtggcggacgggtgagtaacgcgtgggtaacctgcctttcacagggggataacagttagaaatgactgctaataccgcataagcgcacaggacggcatcgtctggtgtgaaaaactccggtggtgaaagatggac

SEQ ID NO: 2903 - DNA, 225 bp, unidentified
  misc_feature 1..225: note = bacterial strain Ascusb_9575 encodes 16S rRNA
  source 1..225: mol_type = genomic DNA
agagtttgatcatggctcaggacgaacgctggcggcgtgcttaacacatgcaagtcgaacggggtctattagcttgctaagacgacctagtggcaaacgggtgagtaacgcgtgggcaacctgccggaaagatggggacaacatcccgaaaggggtgctaataccgaatgttgtacgagggacgcatgttccatgtactaaaggatcctatccgctttccgatgg

SEQ ID NO: 2904 - DNA, 225 bp, unidentified
  misc_feature 1..225: note = bacterial strain Ascusb_7129 encodes 16S rRNA
  source 1..225: mol_type = genomic DNA
agagtttgatcctggctcaggatgaacgctagcggcaggcttaacacatgcaagtcgaggggcatcgcggggtagcaatactctggcggcgaccggcgaaagggtgagtaacgcgtgagcaacatgcccgtaggtggaggatagtcgatggaaacgtcgtgtaatactccgtaacaacagttttcgcatggagattgtttaatagattgattgcctacggattgg

SEQ ID NO: 2905 - DNA, 225 bp, unidentified
  misc_feature 1..225: note = bacterial strain Ascusb_968 encodes 16S rRNA
  source 1..225: mol_type = genomic DNA
agagtttgatcatggctcaggatgaacgctggcggcgtgcctaacacatgcaagtcgaacggaaaccaagcgcttcggagacttcggtcaatgtttgtttggttttagtggcggacgggtgagtaacgcgtggataacctgcctcatacagggggataacagttagaaatgactgctaataccgcataagcgcacgggatcgcatgattctgtgtgaaaaactcc

SEQ ID NO: 2906 - DNA, 225 bp, unidentified
  misc_feature 1..225: note = bacterial strain Ascusb_6413 encodes 16S rRNA
  source 1..225: mol_type = genomic DNA
agagtttgatcatggctcaggacgaacgctggcggcgtgcttcatacatgcaagtcgaacgataaggttccttcgggaatacataagtggcggacgggtgagtaatatgtagagaatctgccctgaagagggggacaacagagggaaacttctgctaataccccatatgcgcgtagttgagatactattcgtgaaagatttatcgcttcaggatgagtctgcatc

SEQ ID NO: 2907 - DNA, 225 bp, unidentified
  misc_feature 1..225: note = bacterial strain Ascusb_2603 encodes 16S rRNA
  source 1..225: mol_type = genomic DNA
agagtttgatcctggctcaggatgaacgctggcggcgtgcctaacacatgcaagtcgaacggattttactcgctgcagagacttcggtcaaagcttgagtaaagttagtggcggacgggtgagtaacgcgtgggcaacctgcctcatactgggggataacagttggaaacgactgttaataccgcataagcgcacagcatcgcatgatgcagtgtgaaaaactcc

SEQ ID NO: 2908 - DNA, 225 bp, unidentified
  misc_feature 1..225: note = bacterial strain Ascusb_7646 encodes 16S rRNA
  source 1..225: mol_type = genomic DNA
agagtttgatcctggctcaggacgaacgctggcggcgtgcttaacacatgcaagtcgaacgaggtgatattgcggaaggcttcggctggaagtgatatgaccgagtggcggacgggtgagtaacgcgtgagcaacctgtcttacacagggggataacgctccgaaaggagtgctaataccgcataagaccacggtaccgcatgatactgaggtaaaaggagaaat

SEQ ID NO: 2909 - DNA, 225 bp, unidentified
  misc_feature 1..225: note = bacterial strain Ascusb_1910 encodes 16S rRNA
  source 1..225: mol_type = genomic DNA
agagtttgatcatggctcaggatgaacgctagctacaggcttaacacatgcaagtcgaggggcatcaggacgatagcttgctattgttgctggcgaccggcgcacgggtgagtaacgcgtatccaaccttccccatagtagaggatagcccggcgaaagtcggattaatactctatgttgtataatgatgacatcagacttataccaaagattgatcgctatggg

SEQ ID NO: 2910 - DNA, 225 bp, unidentified
  misc_feature 1..225: note = bacterial strain Ascusb_312 encodes 16S rRNA
  source 1..225: mol_type = genomic DNA
agagtttgatcatggctcaggatgaacgctggcggcgtgcttaacacatgcaagtcgaacgggaattacattttagcttgctaagttgtaattctagtggcggacgggtgagtaacgcgtgggtaacctgccttataccgggggacaacagttggaaacgactgctaataccgcataagcgcacagtatcgcatgatacagtgtgaaaaactccggtggtataag

SEQ ID NO: 2911 - DNA, 225 bp, unidentified
  misc_feature 1..225: note = bacterial strain Ascusb_12026 encodes 16S rRNA
  source 1..225: mol_type = genomic DNA
agagtttgatcatggctcaggatgaacgctggcggcatgcctaagacatgcaagtcgaacgaagtggcccattgaagatgaagtgcttgcactgatttggatttggattcccacttagtggcagacgggtgagtaacacgtgggtaacctaccccttagtctgggacaactattggaaacgatagctaataccggatgattcatagaaggataaccttctgtgct

SEQ ID NO: 2912 - DNA, 225 bp, unidentified
  misc_feature 1..225: note = bacterial strain Ascusb_2173 encodes 16S rRNA
  source 1..225: mol_type = genomic DNA
agagtttgatcatggctcaggacgaacgctggcggcatgcctaacacatgcaagtcgaacggagtatgtttcttcggagatatatttagtggcgaacgggtgagtaacgcgtgagcaacctgcctcagtgagggggataacacttggaaacaggtgctaataccgcataagaccacaccgccgcatgacggaggggtcaaaggagcaatccgcactgagaggggc

SEQ ID NO: 2913 - DNA, 225 bp, unidentified
  misc_feature 1..225: note = bacterial strain Ascusb_3981 encodes 16S rRNA
  source 1..225: mol_type = genomic DNA
agagtttgatcctggctcaggacgaacgctggcggcgtgcttaacacatgcaagtcgaacgaggttattttgaagagatcttcggatggatttgaaataaccgagtggcggacgggtgagtaacgcgtgagcaacctgtcttctacagggggataacgctccgaaaggagtgctaataccgcataagaccacgaagccgcatggttttgaggtcaaaggaggaat

SEQ ID NO: 2914 - DNA, 225 bp, unidentified
  misc_feature 1..225: note = bacterial strain Ascusb_5503 encodes 16S rRNA
  source 1..225: mol_type = genomic DNA
agagtttgatcctggctcaggacgaacgctggcggcgtgcttaacacatgcaagtcgaacggggatagtcgtggaagtccttcgggatggaagggattattcgagtggcggacgggtgagtaacgcgtgaacaatctgtcccagacagggggataacacttggaaacaggtgctaataccgcataagaccacggggaggcatcttcctgaggtaaaaggagcgat

SEQ ID NO: 2915 - DNA, 225 bp, unidentified
  misc_feature 1..225: note = bacterial strain Ascusb_5183 encodes 16S rRNA
  source 1..225: mol_type = genomic DNA
agagtttgatcatggctcaggacgaacgctggcggcgtgcttaacacatgcaagtcgaacggagttaagcgctgaattgaaggtagcttgctactggattttcttgcttaacttagtggcggacgggtgagtaacgcgtgagtaacctgcctctcagtggggaataacgccctgaaaagagcgctaataccgcataatatatttttgccgcatgacaggaatatc

SEQ ID NO: 2916 - DNA, 225 bp, unidentified
  misc_feature 1..225: note = bacterial strain Ascusb_1097 encodes 16S rRNA
  source 1..225: mol_type = genomic DNA
agagtttgatcctggctcaggatgaacgctggcggcgtgcctaatacatgcaagtcgaacggaaatttaacgctgaggcgagcttgctcaattcttgttaaattttagtggcggacgggtgagtaacgcgtgggtaacctgccttacactgggggacaacagttggaaacgactgctaataccgcataagcgcacagaatcgcatgattcagtgtgaaaaactcc

SEQ ID NO: 2917 - DNA, 225 bp, unidentified
  misc_feature 1..225: note = bacterial strain Ascusb_5922 encodes 16S rRNA
  source 1..225: mol_type = genomic DNA
agagtttgatcatggctcaggatgaacgctagctacaggcttaacacatgcaagtcgaggggcagcatgaagtttgcttgcaaactttgatggcgaccggcgcacgggtgagtaacgcgtatccaaccttccccttagtaggggatagcccggcgaaagtcggattaataccctatgttctcctttgaagacatctgacgaggagcaaagattgatcgctaaggg

SEQ ID NO: 2918 - DNA, 225 bp, unidentified
  misc_feature 1..225: note = bacterial strain Ascusb_951 encodes 16S rRNA
  source 1..225: mol_type = genomic DNA
agagtttgatcatggctcaggacgaacgctggcggcgtgcctaacacatgcaagtcgaacggagatattccggattgagatttcggttgattgaaaggatatcttagtggcggacgggtgagtaacgcgtgagtaacctgcccataagagggggataacgttctgaaaagaacgctaataccgcataacatatgtaattcgcatggaagacatatcaaaggagca

SEQ ID NO: 2919 - DNA, 225 bp, unidentified
  misc_feature 1..225: note = bacterial strain Ascusb_701 encodes 16S rRNA
  source 1..225: mol_type = genomic DNA
agagtttgatcctggctcaggatgaacgctagcggcaggcttaacacatgcaagtcgaggggcagcagggagtagcaatactctgctggcgaccggcgcacgggtgcgtaacgcgtatgcaacctaccctgtacagggggataacggagagaaatttccactaatatcccatggagtcatcggatcgcatggtctggtgactaaagcttcggtggtacgggatgg

SEQ ID NO: 2920 - DNA, 225 bp, unidentified
  misc_feature 1..225: note = bacterial strain Ascusb_6305 encodes 16S rRNA
  source 1..225: mol_type = genomic DNA
agagtttgatcatggctcaggacgaacgctggcggcgtgcttaacacatgcaagtcgaacggagttaagcgctgaattgatgctagcttgctagtggattttcttgcttaacttagtggcggacgggtgagtaacgcgtgagtaacctgcctctcagtggggaataacgccctgaaaagagcgctaataccgcataacatatttttgccgcatgacagagatatc

SEQ ID NO: 2921 - DNA, 225 bp, unidentified
  misc_feature 1..225: note = bacterial strain Ascusb_1997 encodes 16S rRNA
  source 1..225: mol_type = genomic DNA
agagtttgatcatggctcaggatgaacgctggcggcgtgcctaacacatgcaagtcgaacggaactgctttaaatgatttcttcggaatgaatttgttgtagtttagtggcggacgggtgagtaacgcgtgagtaacctgcccttcagagggggataacgatctgaaaagaccgctaataccgcataacatcacggtaccgcatgatactgtgatcaaaactcag

SEQ ID NO: 2922 - DNA, 225 bp, unidentified
  misc_feature 1..225: note = bacterial strain Ascusb_4483 encodes 16S rRNA
  source 1..225: mol_type = genomic DNA
agagtttgatcctggctcaggatgaacgctagctacaggcttaacacatgcaagtcgaggggcagcatggggtttgcttgcaaaccccgatggcgaccggcgcacgggtgagtaacgcgtatccaacctgcccctgtcctcgggatagcccgccgaaaggcggattaataccggacgctgtcacatgatggcatcagagcgtgacgaaaggattttttccggaca

SEQ ID NO: 2923 - DNA, 225 bp, unidentified
  misc_feature 1..225: note = bacterial strain Ascusb_1532 encodes 16S rRNA
  source 1..225: mol_type = genomic DNA
agagtttgatcatggctcaggatgaacgctagcggcaggcttaacacatgcaagtcgaggggtaacaggggatgtagcaatacatcctgctgacgaccggcgcacgggtgcgtaacgcgtatgcaacctgcccgcaacaggggtataacggagtgaaaattccactaatcccccatattgtcattaggccgcatggctttatgacgaaaggttattctggttgcg

SEQ ID NO: 2924 - DNA, 225 bp, unidentified
  misc_feature 1..225: note = bacterial strain Ascusb_4980 encodes 16S rRNA
  source 1..225: mol_type = genomic DNA
agagtttgatcatggctcagaacgaacgctggcggcgcgtcttaagcatgcaagtcgagcggtaagattggtgcttgcactaatcctagagcggcggactggtgagtaacgcgtgggtgacgtaccttcgtgatggggacagctcctagaaataggagataataccgaatacgctgtgtgttgtcagaggacacacaggaaaggttcttttgaaccgcacggaga

SEQ ID NO: 2925 - DNA, 225 bp, unidentified
  misc_feature 1..225: note = bacterial strain Ascusb_7893 encodes 16S rRNA
  source 1..225: mol_type = genomic DNA
agagtttgatcctggctcaggacgaacgctggcggcgtgcctaacacatgcaagtcgaacggagttatgttacgaagctcttcggaacggacgacatagcttagtggcggacgggtgagtaacgcgtgagcaacctgcctttcagagggggacaacggttggaaacgaccgctaataccgcatgaaatgactggaccgcatgatccggtcatcaaagattttatc

SEQ ID NO: 2926 - DNA, 225 bp, unidentified
  misc_feature 1..225: note = bacterial strain Ascusb_1107 encodes 16S rRNA
  source 1..225: mol_type = genomic DNA
agagtttgatcatggctcaggatgaacgctagcggcaggcttaacacatgcaagtcgaggggcagcggagagtagcaatactctgccggcgaccggcgaaagggtgcgtaacgcgtgagcaacttgcccgtatccgggacataagcggtggaaacgccgtctaatttcccataacaacagaggccgcatgacctttgtttgaaagatccgtcggatacggatggg

SEQ ID NO: 2927 - DNA, 225 bp, unidentified
  misc_feature 1..225: note = bacterial strain Ascusb_2781 encodes 16S rRNA
  source 1..225: mol_type = genomic DNA
agagtttgatcctggctcaggatgaacgctagctacaggcttaacacatgcaagtcgaggggcagcatgacgatagcttgctattgtcgatggcgaccggcgcacgggtgagtaacgcgtatccaaccttccccttagtagggcatagcccggcgaaagtcggattaataccctatgttgtcgtttgaagacatctgaagacgattaaagattgatcgctaaggg

SEQ ID NO: 2928 - DNA, 225 bp, unidentified
  misc_feature 1..225: note = bacterial strain Ascusb_186 encodes 16S rRNA
  source 1..225: mol_type = genomic DNA
agagtttgatcatggctcaggacgaacgctggcggcgtgcttaacacatgcaagtcgaacgaggttaattgaaggaagtcttcggatggaatttggttaaccgagtggcggacgggtgagtaacgcgtgaggaacctgtcttctacagggggataacggtccgaaaggattgctaataccgcataagaccacgaagtcgcatggctttgaggtcaaaggagaaat

SEQ ID NO: 2929 - DNA, 225 bp, unidentified
  misc_feature 1..225: note = bacterial strain Ascusb_4154 encodes 16S rRNA
  source 1..225: mol_type = genomic DNA
agagtttgatcatggctcaggatgaacgctagcgacaggcctaacacatgcaagtcgagcggcagcaccttgggtggcgagcggcgcacgggtgagtaacgcgtatgtaacctgcccatgagtgggggatagcccggtgaaaaccggattaataccccatgacaccattgtctgacatcatttaatggttaaagattcattgctcatggatggacatgcgttgga

SEQ ID NO: 2930 - DNA, 225 bp, unidentified
  misc_feature 1..225: note = bacterial strain Ascusb_3125 encodes 16S rRNA
  source 1..225: mol_type = genomic DNA
agagtttgatcatggctcaggatgaacgctagcggcaggcttaacacatgcaagtcgaggggcagcgcggagtagcaatactctggcggcgaccggcaaaagggtgcgtaacacgtgagcaacctgcccgtcacagggggataagcgctggaaacggcgtctaataccgcgtaacacatttttccgcatggatggatgttgaaaatttcgatggtgacggatggg

SEQ ID NO: 2931 - DNA, 225 bp, unidentified
  misc_feature 1..225: note = bacterial strain Ascusb_3663 encodes 16S rRNA
  source 1..225: mol_type = genomic DNA
agagtttgatcctggctcaggatgaacgctagctacaggcttaacacatgcaagtcgaggggcagcagatcgatagcttgctattgatgctggcgaccggcgcacgggtgagtaacgcgtatccaaccttccctatagtagaggatagcccggcgaaagtcggattaatactctatgttttccaatgcagacatctaagttggaacaaaggtttaccgctatagg

SEQ ID NO: 2932 - DNA, 225 bp, unidentified; identical to SEQ ID NO: 2308
  misc_feature 1..225: note = bacterial strain Ascusb_21055 encodes 16S rRNA
  source 1..225: mol_type = genomic DNA

SEQ ID NO: 2933 - DNA, 225 bp, unidentified
  misc_feature 1..225: note = bacterial strain Ascusb_481 encodes 16S rRNA
  source 1..225: mol_type = genomic DNA
agagtttgatcatggctcaggatgaacgctggcggcgtgcttaacacatgcaagtcgaacggaaatgtattgaaacctagtgatatacattttagtggcggacgggtgagtaacgcgtgggtaacctgccgtatgcagggggataacagttagaaatgactgctaataccgcataagaccacagtctcgcatgagacaggggtaaaaactccggtggcatacgat

SEQ ID NO: 2934 - DNA, 225 bp, unidentified
  misc_feature 1..225: note = bacterial strain Ascusb_2385 encodes 16S rRNA
  source 1..225: mol_type = genomic DNA
agagtttgatcatggctcaggatgaacgctggcggcgtgcctaacacatgcaagtcgagcgataagcacatttgatgaaacttcggtagattctggtgctgaaagcggcggacgggtgagtaacgcgtaggcaacctgcccttagcagggggatagccattggaaacgatgattaaaaccccataacacgaggacgtcacatgtcgacctcgtcaaagatttatc

SEQ ID NO: 2935 - DNA, 225 bp, unidentified
  misc_feature 1..225: note = bacterial strain Ascusb_5048 encodes 16S rRNA
  source 1..225: mol_type = genomic DNA
agagtttgatcctggctcaggatgaacgctggcggcgtgcctaacacattcaagtcgaacgagccgtagaaatacggcgagtggcggacgggtgagtaacgcgtaagcaatctgcctttgtgtgtggaataacaaccggaaacagttgctaataccgcataacgcataggaatcgcatggttcttatgccaaagatttatcgcacgaagatgagcttgcgtccga

SEQ ID NO: 2936 - DNA, 225 bp, unidentified
  misc_feature 1..225: note = bacterial strain Ascusb_5207 encodes 16S rRNA
  source 1..225: mol_type = genomic DNA
agagtttgatcatggctcaggatgaacgctggcggcatgcctaagacatgcaagtcgtacgaggtggcccaatgaaaatggagtgcttgcacaaagtcggatttggatttccaccgagtggcaaacgggtgagtaacacgtgggttacctacctctaagacggggataccaattggaaacgattgttaataccggatgtgctctacggagtaaagaagcctttaa

SEQ ID NO: 2937 - DNA, 225 bp, unidentified
  misc_feature 1..225: note = bacterial strain Ascusb_14795 encodes 16S rRNA
  source 1..225: mol_type = genomic DNA
agagtttgatcatggctcaggatgaacgctggcggcatgcctaagacatgcaagtcgtacgaggtggccctttgacttttgtgcttgcacaagatgattaggaatttccacctagtggcgaaagggtgagtaacacgtgggttatctacctcagagactgggataactactagaaatggtagctaatactggatgatatgtataatgatacgttattatatatta

SEQ ID NO: 2938 - DNA, 225 bp, unidentified
  misc_feature 1..225: note = bacterial strain Ascusb_321 encodes 16S rRNA
  source 1..225: mol_type = genomic DNA
agagtttgatcatggctcaggatgaacgctagctacaggcttaacacatgcaagtcgaggggcagcatatagatagcttgctatttatgatggcgaccggcgcacgggtgagtaacgcgtatccaaccttccctatactagagaatagcccggcgaaagtcggattaatgctctatgttcttctttgatggcatctgacgagaagcaaaggtttaccggtatagg

SEQ ID NO: 2939 - DNA, 225 bp, unidentified
  misc_feature 1..225: note = bacterial strain Ascusb_2494 encodes 16S rRNA
  source 1..225: mol_type = genomic DNA
agagtttgatcatggctcaggatgaacgctagctacaggcttaacacatgcaagtcgaggggcagcatagcgagagcttgcttttgctgatggcgaccggcgcacgggtgagtaacgcgtatccaaccttccctgtactagagaatagcccggcgaaagtcggattaatgctctatgttcttctttgatggcatctgacgagaagcaaaggtttaccggtatagg

SEQ ID NO: 2940 - DNA, 225 bp, unidentified
  misc_feature 1..225: note = bacterial strain Ascusb_5237 encodes 16S rRNA
  source 1..225: mol_type = genomic DNA
agagtttgatcctggctcaggatgaacgctagcggcaggcttaacacatgcaagtcgaggggcagcgcgggtagcaatacttggcggcgaccggcgaaagggtgagtaacgcgtgagcaacatacccgttggtgggggataggaggtggaaacgccttgtaataccccatatgatattgaatggcatcatttagtattgaaagattcattgccaacggattggtt

SEQ ID NO: 2941 - DNA, 225 bp, unidentified
  misc_feature 1..225: note = bacterial strain Ascusb_93 encodes 16S rRNA
  source 1..225: mol_type = genomic DNA
agagtttgatcatggctcaggacgaacgctggcggcacgcttaacacatgcaagtcgaacggagttatcgagagcttgcttttgataacttagtggcggacgggtgagtaacacgtgagcaatctgcccttaagagggggatagcagttggaaacgactgataataccgcataagatagtagtaccgcatggtacagctataaaagatttatcgcttaaggatga

SEQ ID NO: 2942 - DNA, 225 bp, unidentified
  misc_feature 1..225: note = bacterial strain Ascusb_1360 encodes 16S rRNA
  source 1..225: mol_type = genomic DNA
agagtttgatcctggctcaggatgaacgctggcggcgtgcctaacacatgcaagtcgaacggacttaagacgctgatgaggcttcggcggattcttgttttaagttagtggcggacgggtgagtaacgcgtgggcaacctgcctcatactgggggatagcagttggaaacgactgataataccgcataagcgcacagagtcgcatgactcagtgtgaaaaactcc

SEQ ID NO: 2943 - DNA, 225 bp, unidentified
  misc_feature 1..225: note = bacterial strain Ascusb_14034 encodes 16S rRNA
  source 1..225: mol_type = genomic DNA
agagtttgatcatggctcaggatgaacgctggcggcgcgcctaacacatgcaagtcgaacggttaaagcaccttcgggtgtgtataaagtggcgaacggctgagtaacacgtgggcaacctgcccctcgcaccgggacagcctcgggaaaccgtggttaataccggatacgccgcccaccccgcatggggagggcgggaaagccccgacggcgagggatgggccc

SEQ ID NO: 2944 - DNA, 225 bp, unidentified
  misc_feature 1..225: note = bacterial strain Ascusb_1883 encodes 16S rRNA
  source 1..225: mol_type = genomic DNA
agagtttgatcatggctcaggatgaacgctggcggcgtgcttaacacatgcaagtcgaacgaggttattacagttgaagttttcggatggatacagtattaaccgagtggcggacgggtgagtaacgcgtgggaaacctgccctattccgggggataccagttggaaacgactgttaataccgcataagcgcacggcaccgcatggtgcagtgtgaaaaactccg

SEQ ID NO: 2945 - DNA, 225 bp, unidentified
  misc_feature 1..225: note = bacterial strain Ascusb_3710 encodes 16S rRNA
  source 1..225: mol_type = genomic DNA
agagtttgatcctggctcaggatgaacgctggcggcgtgcttaacacatgcaagtcgaacggaactgcatatgaagatttacttcggtaatgattttttgtagtttagtggcggacgggtgagtaacgcgtgagtaacctgcccttgagagggggataacgttctgaaaaggacgctaataccgcataacattatcatatcgcatggtaggataatcaaaactga

SEQ ID NO: 2946 - DNA, 225 bp, unidentified
  misc_feature 1..225: note = bacterial strain Ascusb_1248 encodes 16S rRNA
  source 1..225: mol_type = genomic DNA
agagtttgatcctggctcaggatgaacgctggcggcgtgcttaacacatgcaagtcgaacggaacttttctcccgaagaagcggagtgcttgcacaaagtagattcatttgaaaagtttagtggcggacgggtgagtaacgcgtgggtaacctgccttacacagggggacaacagttggaaacgactgctaataccgcataagcgcacagtaccgcatggtacag

SEQ ID NO: 2947 - DNA, 225 bp, unidentified
  misc_feature 1..225: note = bacterial strain Ascusb_638 encodes 16S rRNA
  source 1..225: mol_type = genomic DNA
agagtttgatcctggctcagaacgaacgctggcggcaggcttaacacatgcaagttgaacgggatttgatggtagcttgctatcattaatgagagtagcgcactggtgagtaacacgtgggaacataccttttggtgggggacaacagttggaaacgactgctaataccgcataagccctaagggggaaaggagaaatttgccgaaagattggcccgcggaagat

SEQ ID NO: 2948 - DNA, 225 bp, unidentified
  misc_feature 1..225: note = bacterial strain Ascusb_9615 encodes 16S rRNA
  source 1..225: mol_type = genomic DNA
agagtttgatcctggctcaggatgaacgctagctacaggcttaacacatgcaagtcgaggggcatcatgggagtagcttgctacttttgatggcgaccggcgaatgggtgagtaacgcgtatccaacctgccgcagacccgggaatagcccttggaaatgaggattaagtcccgatatgcacattatccgcatggtttatgtgtgaaactaggtatgcgatgggg

SEQ ID NO: 2949 - DNA, 225 bp, unidentified
  misc_feature 1..225: note = bacterial strain Ascusb_3378 encodes 16S rRNA
  source 1..225: mol_type = genomic DNA
agagtttgatcatggctcaggatgaacgctggcggcgtgcttaacacatgcaagtcgaacgaagcactggaaaatggagattcgtcaaagttttcctttgactgagtggcgaacgggtgagtaatgcgtgagcaacctgcccttcagagggggacaacagttggaaacgactgctaataccgcatgacgtgttcgggcggcatcgtctgaacaccaaaggagaaa

SEQ ID NO: 2950 - DNA, 225 bp, unidentified
  misc_feature 1..225: note = bacterial strain Ascusb_5885 encodes 16S rRNA
  source 1..225: mol_type = genomic DNA
agagtttgatcatggctcaggacgaacgctggcggcgtgcctaacacatgcaagtcgagcggggattattgtgatgagagcttcggcaggattcgtggtaattctagcggcggacgggtgagtaacgcgtgaacaatctgtcccggacagggggataacacttggaaacaggtgctaataccgcataagaccacagggcggcatcgtccaggggtcaaaggagcg

SEQ ID NO: 2951 - DNA, 225 bp, unidentified
  misc_feature 1..225: note = bacterial strain Ascusb_1138 encodes 16S rRNA
  source 1..225: mol_type = genomic DNA
agagtttgatcatggctcaggataaacgctggcggcgtgcctaatacatgcaagtcgatcgctggagctcaagcttgcttgagtgaaggagaggcgaacgggtgagtaatacataagcaacctgcccacgaagactgggataatctctggaaacggggactaataccggataggtgacaagatcgcatgatcatgtcattaaagattcaaagcactggtggatgg

SEQ ID NO: 2952 - DNA, 225 bp, unidentified
  misc_feature 1..225: note = bacterial strain Ascusb_108 encodes 16S rRNA
  source 1..225: mol_type = genomic DNA
agagtttgatcatggctcaggatgaacgctggcggcgtgcttaacacatgcaagtcgaacgaggttaattgagcggattatttcggtatgaagcgcttttaactgagtggcggacgggtgagtaacgcgtgggcaacctgcctcattcagggggataccagttggaaacgactgttaataccgcataagcgcacggttccgcatggaacagtgtgaaaagctccg

SEQ ID NO: 2953 - DNA, 225 bp, unidentified
  misc_feature 1..225: note = bacterial strain Ascusb_613 encodes 16S rRNA
  source 1..225: mol_type = genomic DNA
agagtttgatcctggctcaggatgaacgctggcggcgtgcttaacacatgcaagtcgagcgaagctctcttgttgatttcttcggattgaaacaagagatgactgagcggcggacgggtgagtaacgcgtggagaacctgccccgtaccgggggataacagttagaaatgactgctaataccgcataagcgcacactatcgcatgatagagtgtgaaaaactccg

SEQ ID NO: 2954 - DNA, 225 bp, unidentified
  misc_feature 1..225: note = bacterial strain Ascusb_3773 encodes 16S rRNA
  source 1..225: mol_type = genomic DNA
agagtttgatcatggctcaggatgaacgctagctacaggcttaacacatgcaagtcgaggggcagcatgaagtttgcttgcaaactttgatggcgaccggcgcacgggtgagtaacgcgtatccaaccttccctacagtagggtatagcccggcgaaagtcggattaatcccctatgttctccatggatggcatctgatatggagcaaaggattccgctgtagga

SEQ ID NO: 2955 - DNA, 225 bp, unidentified
  misc_feature 1..225: note = bacterial strain Ascusb_12477 encodes 16S rRNA
  source 1..225: mol_type = genomic DNA
agagtttgatcatggctcaggatgaacgctggcggcatgcctaagacatgcaagtcgtacgaagtgacccattgaagtggagtgcttgcacaaagcggatttggattttcacttagtggcgcaagggtgagtaacacgtgggtaatctgccttggagactggaataacaattagaaatgattgctaatgccggatgatatataaaaggatacgttcttttatagt

SEQ ID NO: 2956 - DNA, 225 bp, unidentified
  misc_feature 1..225: note = bacterial strain Ascusb_10375 encodes 16S rRNA
  source 1..225: mol_type = genomic DNA
agagtttgatcatggctcaggatgaacgctagctacaggcttaacacatgcaagtcgaggggcatcgggagagtagcttgctattcttgccggcgaccggcgcacgggtgagtaacgcgtatccaacctaccccatacaagaggatagcccggcgaaagtcggattaatactctatgtagtacgatgaaggcatctgagttgtatgaaaggttttccggtatggg

SEQ ID NO: 2957 - DNA, 225 bp, unidentified
  misc_feature 1..225: note = bacterial strain Ascusb_15425 encodes 16S rRNA
  source 1..225: mol_type = genomic DNA
agagtttgatcatggctcaggatgaacgctggcggcatgcctaagacatgcaagtcgaacgagaaggcccattgaagattgcgtgcttgcacaaaattggatttggattcccttctagtggcgcaagggtgagtaacacgtgggtaatctgcctttgagtctggaataacagttagaaatgattgctaatgccggatgatacataaaacgatacgtcattttatg

SEQ ID NO: 2958 - DNA, 225 bp, unidentified
  misc_feature 1..225: note = bacterial strain Ascusb_1030 encodes 16S rRNA
  source 1..225: mol_type = genomic DNA
agagtttgatcatggctcaggacgaacgctggcggcgtgcctaacacatgcaagtcgaacggagctttacgctgaaattgagagcagcttgctgcaggaaatttcttgtaacgcttagtggcggacgggtgagtaacgcgtgaggaacctgccttacagagggggacaacagttggaaacgactgctaataccgcataacatagcgaaaggacatccttttgtta

SEQ ID NO: 2959 - DNA, 225 bp, unidentified
  misc_feature 1..225: note = bacterial strain Ascusb_847 encodes 16S rRNA
  source 1..225: mol_type = genomic DNA
agagtttgatcatggctcaggatgaacgctggcggcgtgcttaacacatgcaagtcgaacgaggttattgcagttgaagttttcggatggatacagcattaaccgagtggcggacgggtgagtaacgcgtggggaacctgccccattccgggggataccagttggaaacgactgttaataccgcataagcgcacagtaccgcatggtacggtgtgaaaaactccg

SEQ ID NO: 2960 - DNA, 225 bp, unidentified
  misc_feature 1..225: note = bacterial strain Ascusb_13295 encodes 16S rRNA
  source 1..225: mol_type = genomic DNA
agagtttgatcctggctcaggatgaacgctagctacaggcttaacacatgcaagtcgaggggaaacgattagaggtgcttgcaccactaaggcgtcgaccggcgcacgggtgagtaacgcgtatccaacctacctcatggtaaggaataatccgtagaaatgcggtctaataccttatgtgctccgaagaggacatctgatttggagtaaagatttatcgccatg

SEQ ID NO: 2961 - DNA, 225 bp, unidentified
  misc_feature 1..225: note = bacterial strain Ascusb_9754 encodes 16S rRNA
  source 1..225: mol_type = genomic DNA
agagtttgatcatggctcaggatgaacgctggcggcatgcctaagacatgcaagtcgaacgaagtggcccaatgaaaatggagtacttgtacaaaattagatttggatttctacttagtggcagacgggtgagtaacacgtaagtaacctaccttaaagactgggataacgtttggaaacgaacgctaataccggataattcattactagataactagaaatgct

SEQ ID NO: 2962 - DNA, 225 bp, unidentified
  misc_feature 1..225: note = bacterial strain Ascusb_350 encodes 16S rRNA
  source 1..225: mol_type = genomic DNA
agagtttgatcatggctcaggactaacgctggcggtgcgcctaacacatgcaagtcgtacgggctccttcgggagctagtggcagacgggtgagtaacgcgtaggtaatgtacctcttcgctggggatacctacctgaaaaggtggctaaaaccgaatgagcttttcaagcggcatcgcttgatttgcaaacctccggggcgaagagatcagcttgcgtactatc

SEQ ID NO: 2963 - DNA, 225 bp, unidentified
  misc_feature 1..225: note = bacterial strain Ascusb_2056 encodes 16S rRNA
  source 1..225: mol_type = genomic DNA
agagtttgatcatggctcaggacgaacgctggcggcgtgcctaacacatgcaagtcgagcggagattatggaagagcttgctcggagataatttcagcggcggacgggtgagtaacgcgtgagcaacctgccttcaacagggggataacgcatcgaaagatgtgctaataccgcgtaagaccacagcatcacatggtgcaggggtcaaaggagcaatccggttga

SEQ ID NO: 2964 - DNA, 225 bp, unidentified
  misc_feature 1..225: note = bacterial strain Ascusb_3134 encodes 16S rRNA
  source 1..225: mol_type = genomic DNA
agagtttgatcctggctcaggatgaacgctggcggcgtgcctaatacatgcaagtcgagcgagaaccgaatgaacagagattcgtcaaagtgatttcggggaaagcggcggacgggtgagtaacgcgtaggcaacctgcccttagcagagggatagccattggaaacgatgattaaaacctcataatgcttttgagacacatgtcacaagagccaaagatttatc

SEQ ID NO: 2965 - DNA, 225 bp, unidentified
  misc_feature 1..225: note = bacterial strain Ascusb_57 encodes 16S rRNA
  source 1..225: mol_type = genomic DNA
agagtttgatcctggctcaggatgaacgctagctacaggcttaacacatgcaagtcgaggggcagcgagaggaaagcttgctttccttgtcggcgaccggcgcacgggtgagtaacgcgtatccaaccttccccttagtagggcatagcccggcgaaagtcggattaacaccctatgttatccgaagaggacatctgaattggattaaaggtttaccgctaaggg

SEQ ID NO: 2966 - DNA, 225 bp, unidentified
  misc_feature 1..225: note = bacterial strain Ascusb_1427 encodes 16S rRNA
  source 1..225: mol_type = genomic DNA
agagtttgatcctggctcaggatgaacgctggcggcgtgcttaacacatgcaagtcgaacgagggttatcggttgaagttttcggacggaaacggataattcctagtggcggacgggtgagtaacgcgtggggaacctgccccattccgggggataccagttggaaacgactgttaataccgcataagcgcacggtactgcatggtacagtgtgaaaaactccgg

SEQ ID NO: 2967 - DNA, 225 bp, unidentified
  misc_feature 1..225: note = bacterial strain Ascusb_14918 encodes 16S rRNA
  source 1..225: mol_type = genomic DNA
agagtttgatcctggctcaggatgaacgctagctacaggcttaacacatgcaagtcgaggggaaacgattagaggtgcttgcaccactaaggcgtcgaccggcgcacgggtgagtaacgcgtatccaacctgccccatggtaaggaataatccgtagaaatgcggtctaataccttatgtgctccgaagaggacatctgatttggagtaaagatttatcgccatg

SEQ ID NO: 2968 - DNA, 225 bp, unidentified
  misc_feature 1..225: note = bacterial strain Ascusb_8785 encodes 16S rRNA
  source 1..225: mol_type = genomic DNA
agagtttgatcatggctcagaacgaacgctggcggcgcgtcttaagcatgcaagtcgaacggcaaggcgggtgcttgcacctgccccagagtggcggactggtgagtaacacgtgggtgacataccccccggacggggatagccggtagaaataccgggtaataccggatacggtcgcgcaggttagagctgcgcgaggaaaggagctgcggctccgccggggga

SEQ ID NO: 2969 - DNA, 225 bp, unidentified
  misc_feature 1..225: note = bacterial strain Ascusb_3529 encodes 16S rRNA
  source 1..225: mol_type = genomic DNA
agagtttgatcctggctcaggatgaacgctggcggcgtgcctaacacatgcaagtcgaacggagttaagggatattttcgaatggaacttaacttagtggcggacgggtgagtaacgcgtggataacctgcctcgcacagggggatagcagctggaaacggctgataataccgcataagactacagcaccgcctggtgcaggagtaaaagatttatcggtgcgag

SEQ ID NO: 2970 - DNA, 225 bp, unidentified
  misc_feature 1..225: note = bacterial strain Ascusb_2514 encodes 16S rRNA
  source 1..225: mol_type = genomic DNA
agagtttgatcatggctcaggatgaacgctagcggcaggcttaacacatgcaagtcgaggggtaacgcgaggtagcaatactttggcgacgaccggcgcacgggtgcgtaacgcgtatgcaacctacctgtaacagggggataacggagtgaaaattccactaataccccatattgtcattctttcgcatgttgggatgacgaaagcttcggtggttacggatgg

SEQ ID NO: 2971 - DNA, 225 bp, unidentified
  misc_feature 1..225: note = bacterial strain Ascusb_16784 encodes 16S rRNA
  source 1..225: mol_type = genomic DNA
agagtttgatcctggctcaggacgaacgctggcggcgtgcctaacacatgcaagtcgagcggagtcataatgaaagcttgctggatttatgacttagcggcggacgggtgagtaacgcgtgagcaatctgtccctcacagggggataataccgcgaaagtggttctaataccgcatgagaccacggatcggcatcgatctggggtcaaaggagcaatccggtgag

SEQ ID NO: 2972 - DNA, 225 bp, unidentified
  misc_feature 1..225: note = bacterial strain Ascusb_2887 encodes 16S rRNA
  source 1..225: mol_type = genomic DNA
agagtttgatcctggctcaggatgaacgctggcggcgtgcctaacacatgcaagtcgaacggaactgcatatgaagatttccttcgggaatgattcgcttgtagtttagtggcggacgggtgagtaacgcgtgagtaacctgcccttgagagggggataacgttctgaaaagaacgctaataccgcataacactattttatcgcatggtagaatagtcaaaactc

SEQ ID NO: 2973 - DNA, 225 bp, unidentified
  misc_feature 1..225: note = bacterial strain Ascusb_6350 encodes 16S rRNA
  source 1..225: mol_type = genomic DNA
agagtttgatcatggctcagaacgaacgctggcggcgcgtcttaagcatgcaagtcgagcggtaagtcgggagcttgctcctgacctagagcggcggactggtgagtaacgcgtgggtgacgtaccttcgtgacggggatagctcctagaaataggagataataccggataatctcttatgtgtcagaggcatgagaggaaaggatcttttgattcgcacggaga

SEQ ID NO: 2974 - DNA, 225 bp, unidentified
  misc_feature 1..225: note = bacterial strain Ascusb_9114 encodes 16S rRNA
  source 1..225: mol_type = genomic DNA
agagtttgatcctggctcaggacgaacgctggcggcgtgcttaacacatgcaagtcgaacgaggattagcggattgagagtttcgacaggattgaagctaattcgagtggcggacgggtgagtaacgcgtgagcaatctgtcccagacagggggataacacttggaaacaggtgctaataccgcataagaccacggcatcgcatggtgcaggggtaaaaggagga

SEQ ID NO: 2975 - DNA, 225 bp, unidentified
  misc_feature 1..225: note = bacterial strain Ascusb_5488 encodes 16S rRNA
  source 1..225: mol_type = genomic DNA
agagtttgatcctggctcaggatgaacgctagctacaggcttaacacatgcaagtcgaggggcagcagggttgttgcttgcaacaaccgctggcgaccggcgcacgggtgagtaacgcgtatccaacctggcccacagtagggaacagcccggcgaaagtcggattaatgccctatgttttcctttgagagcatttgacgaggaacaaagattcatcgctatggg

SEQ ID NO: 2976 - DNA, 225 bp, unidentified
  misc_feature 1..225: note = bacterial strain Ascusb_3254 encodes 16S rRNA
  source 1..225: mol_type = genomic DNA
agagtttgatcctggctcaggataaacgctggcggcatgcctaatacatgcaagtcaaacgggaagtagcaatacttctagtggcgaacgggtgagtaacacgtgggcaacctgccttgaagacgaggataacagttggaaacgactgataatactggatagtatacattaccgcatggttttgtatttaaagatgcgtttgcatcacttcaagaggggcctgcg

SEQ ID NO: 2977 - DNA, 225 bp, unidentified
  misc_feature 1..225: note = bacterial strain Ascusb_3802 encodes 16S rRNA
  source 1..225: mol_type = genomic DNA
agagtttgatcatggctcaggatgaacgctagctacaggcttaacacatgcaagtcgaggggcagcatgttggttgcttgcaaccaatgatggcgaccggcgcacgggtgagtaacgcgtatccaacctcccccacagtagaggatagcccggcgaaagtcggattaatactctatgttgtattttgaggacatctgacgaataccaaagatttatcgctatggg

SEQ ID NO: 2978 - DNA, 225 bp, unidentified
  misc_feature 1..225: note = bacterial strain Ascusb_1079 encodes 16S rRNA
  source 1..225: mol_type = genomic DNA
agagtttgatcatggctcaggatgaacgctagcggcaggcttaacacatgcaagtcgaggggtaacgcggggtagcaataccttggcgacgaccggcgcacgggtgcgtaacgcgtatgcaacctgcccgtaacagggggataacggggagaaattcccactaataccccatattatcgcgtagccgcatggttgtgcgatgaaagtttcgatggttacggatgg

SEQ ID NO: 2979 - DNA, 225 bp, unidentified
  misc_feature 1..225: note = bacterial strain Ascusb_1906 encodes 16S rRNA
  source 1..225: mol_type = genomic DNA
agagtttgatcatggctcaggattaacgctggcggcatgcctaatacatgcaagtcgaatggttagcttgctaaccatggcgaacgggtgagtaacacgtaggtaacctgtcttcaagacgaggataaccattggaaacgatggataatactggataggacaaatccccgcatgaggagatgtttaaaggagcaatccacttgatgaggggcctgcggtgcatta

SEQ ID NO: 2980 - DNA, 225 bp, unidentified
  misc_feature 1..225: note = bacterial strain Ascusb_4524 encodes 16S rRNA
  source 1..225: mol_type = genomic DNA
agagtttgatcatggctcaggatgaacgctagcggcaggcctaacacatgcaagtcgaggggcagcgcggggtagcaataccctggcggcgaccggcgcacgggtgcgtaacgcgtatgcaacctgccctgtacagggggataacggggtgaaaactccactaatatcccatagtgccacttggtcgcatggccgggtgtctaaagcttcggtggtacaggatgg

SEQ ID NO: 2981 - DNA, 225 bp, unidentified
  misc_feature 1..225: note = bacterial strain Ascusb_3927 encodes 16S rRNA
  source 1..225: mol_type = genomic DNA
agagtttgatcatggctcaggatgaacgctggcggcgtgcctaacacatgcaagtcgagcggagatgttgagagattcttcggatgatcacttcatcttagcggcggatgggtgagtaacacgtgggtaacctgccctgcacagggggataacagctggaaacggctgttaataccgcatatgcacacgctgccgcatggcagggggtggaaagatttatcggtg

SEQ ID NO: 2982 - DNA, 225 bp, unidentified
  misc_feature 1..225: note = bacterial strain Ascusb_5403 encodes 16S rRNA
  source 1..225: mol_type = genomic DNA
agagtttgatcctggctcaggatgaacgctagctacaggcttaacacatgcaagtcgaggggcagcgggaagtcagcttgctgactttgccggcgaccggcgcacgggtgagtaacgcgtatccaaccttccccttagtagcggatagcccggcgaaagtcggattaatacgctatgttcttcgtcgaggacatctgaagtgaagtaaagacatagtcgctaagg

SEQ ID NO: 2983 - DNA, 225 bp, unidentified
  misc_feature 1..225: note = bacterial strain Ascusb_3680 encodes 16S rRNA
  source 1..225: mol_type = genomic DNA
agagtttgatcatggctcaggatgaacgctagcgacaggcctaacacatgcaagtcgagcggcagcacctcgggtggcgagcggcgcacgggtgagtaacgcgtatgtaacctgcccatgagtgggggatagcccggtgaaaaccggattaataccccatgacaccattgtctgacatcatttaatggttaaagattcattgctcatggatggacatgcgttgga

SEQ ID NO: 2984 - DNA, 225 bp, unidentified
  misc_feature 1..225: note = bacterial strain Ascusb_141 encodes 16S rRNA
  source 1..225: mol_type = genomic DNA
agagtttgatcatggctcaggacgaacgctggcggcacgcttaacacatgcaagtcgaacggagataatttgagtttacttagattatcttagtggcggacgggtgagtaacacgtgagcaacctacctttgagagagggatagcttctggaaacggatggtaatacctcataacgtagttttaccgcatgataggactaccaaagatttatcactcaaagatgg

SEQ ID NO: 2985 - DNA, 225 bp, unidentified
  misc_feature 1..225: note = bacterial strain Ascusb_1691 encodes 16S rRNA
  source 1..225: mol_type = genomic DNA
agagtttgatcatggctcaggacgaacgctggcggcgtgcctaacacatgcaagtcgaacggaactattttgacagatttcttcggaatgacggatttttagtttagtggcggacgggtgagtaacgcgtgagtaacctgcctctaagaggggaataacgttctgaaaagatcgctaataccgcataacatattgaagccgcatgactttgatatcaaagattta

SEQ ID NO: 2986 - DNA, 225 bp, unidentified
  misc_feature 1..225: note = bacterial strain Ascusb_4069 encodes 16S rRNA
  source 1..225: mol_type = genomic DNA
agagtttgatcatggctcagaacgaacgctggcggcgcgttttaagcatgcaagtcgagcggcagcagcaatgcgagagcggcggacgggtgagtaacacgtgggtaatctgccctccggtcgggaatagcctgtggaaacacaggataataccggatgcgatggtccccgcacaagcgggggtcaggaaaggagccaaggctccgccggaggatgagcccgcgt

SEQ ID NO: 2987 - DNA, 225 bp, unidentified
  misc_feature 1..225: note = bacterial strain Ascusb_2904 encodes 16S rRNA
  source 1..225: mol_type = genomic DNA
agagtttgatcctggctcaggatgaacgctggcggcgtgcctaatacatgcaagtcgagcgagaatctgatgattggagattcgtcaaagagaatcagaggaaagcggcggacgggtgagtaacgcgtaggcaacctgcccttagcagagggatagccattggaaacgatgattaaaacctcataatgctgtttgagcacatgctcagacagccaaagatttatc

SEQ ID NO: 2988 - DNA, 225 bp, unidentified
  misc_feature 1..225: note = bacterial strain Ascusb_3294 encodes 16S rRNA
  source 1..225: mol_type = genomic DNA
agagtttgatcatggctcaggacgaacgctggcggcatgcctaacacatgcaagtcgaacgaggatagcaatatccgagtggcgaacgggtgagtaacacgtgagcaacctgccttacacaacgggatacctactggaaacagtagttaatacggtataagaccacagtaccgcatgatacagtggtaaaagatttatcggtgtaagatgggctcgcggcgcatt

SEQ ID NO: 2989 - DNA, 225 bp, unidentified
  misc_feature 1..225: note = bacterial strain Ascusb_2497 encodes 16S rRNA
  source 1..225: mol_type = genomic DNA
agagtttgatcctggctcagaacgaacgctggcggcaggcttaacacatgcaagttgagcgggattggaaagtagcttgctactgaccatgagagcagcgcactggtgagtaacacgtgggaacataccttttggtgggggacaacagttggaaacgactgctaataccgcataagccctgagggggaaagatttattgccgaaagattggcccgcggaagatta

SEQ ID NO: 2990 - DNA, 225 bp, unidentified
  misc_feature 1..225: note = bacterial strain Ascusb_977 encodes 16S rRNA
  source 1..225: mol_type = genomic DNA
agagtttgatcctggctcaggatgaacgctggcggcgtgcttaacacatgcaagtcgaacgaggaataattgatgaagttttcggatggatttagttattccgagtggcggacgggtgagtaacgcgtgggtaacctgccccatacagggggacaacagagggaaacttctgctaataccgcataagcggatcggatggcatcgtccggtccggaaagctccggc

SEQ ID NO: 2991 - DNA, 225 bp, unidentified
  misc_feature 1..225: note = bacterial strain Ascusb_11724 encodes 16S rRNA
  source 1..225: mol_type = genomic DNA
agagtttgatcatggctcaggatgaacgctggcggcatgcctaagacatgcaagtcgaacgaggtggcccattgaagatggagtgcttgcacaaaatcggatttggattcccacctagtggcggacgggtgagtaacacgtaggtgatctacctttaagactgggataactattggaaacgatagctaataccggataacatattgattcgtttcaatattgaaa

SEQ ID NO: 2992 - DNA, 225 bp, unidentified
  misc_feature 1..225: note = bacterial strain Ascusb_1860 encodes 16S rRNA
  source 1..225: mol_type = genomic DNA
agagtttgatcatggctcaggacgaacgctggcggcgtgcttaacacatgcaagtcgaacggagctaattccttcggggagaagcttagtggcggacgggtgagtaacgcgtgagcaatctgccttgcacagggggataacaactggaaacggttgctaataccgcataacgtaacggggaggcatctttctgttaccaaaggagcgatccggtgcaagatgagc

SEQ ID NO: 2993 - DNA, 225 bp, unidentified
  misc_feature 1..225: note = bacterial strain Ascusb_6705 encodes 16S rRNA
  source 1..225: mol_type = genomic DNA
agagtttgatcctggctcaggatgaacgctagcgacaggcttaacacatgcaagtcgaggggcagcatgggcatagcaatatgcccgatggcgaccggcgcactggtgagtaacacgtatgcaacctgcctcctccagggggataatccagagaaatttggcctaataccccgtagtccgcgagagggcatcctctcgcgtggaaagctccggcgggaggagatg

SEQ ID NO: 2994 - DNA, 225 bp, unidentified
  misc_feature 1..225: note = bacterial strain Ascusb_5337 encodes 16S rRNA
  source 1..225: mol_type = genomic DNA
agagtttgatcctggctcagaatgaacgctggcggcgtgcctaatacatgcaagtcgaacgaggtagcttcggctatctagtggcgaacgggtgagtaacacgtaggtaacctgcccttaagactgggatacccaggcgaaagcttggctaataccggataacaacattggaggcatctccgatgcttgaaaggcgcctttaaagcgccacttttggatggacct

SEQ ID NO: 2995 - DNA, 225 bp, unidentified
  misc_feature 1..225: note = bacterial strain Ascusb_1106 encodes 16S rRNA
  source 1..225: mol_type = genomic DNA
agagtttgatcatggctcaggatgaacgctggcggcgtgcctaacacatgcaagtcgaacgaagcacttaccgtgatccttcgggtgaacggtctgtgactgagtggcggacgggtgagtaacgcgtgggtaacctgccctgtacagggggataacagccagaaatggctgctaataccgcataagcgcaggccgtggcatcatggtctgcggaaaactccggtg

SEQ ID NO: 2996 - DNA, 225 bp, unidentified
  misc_feature 1..225: note = bacterial strain Ascusb_9033 encodes 16S rRNA
  source 1..225: mol_type = genomic DNA
agagtttgatcatggctcaggatgaacgctggcggcatgcctaagacatgcaagtcgaacgaagcggcccaatgaagatagagtgcttgcacaaagttggatttggattcccgcttagtggcgcaagggtgagtaacacgtgggtaatctaccttcgagtctggaataacagttagaaatgattgctaatgccggatgatatggaaaacgatacgtcattttgta

SEQ ID NO: 2997 - DNA, 225 bp, unidentified
  misc_feature 1..225: note = bacterial strain Ascusb_1342 encodes 16S rRNA
  source 1..225: mol_type = genomic DNA
agagtttgatcatggctcaggacgaacgctggcggcgtgcctaacacatgcaagtcgaacggacgaggggagcttgctccccaagttagtggcggacgggtgagtaacacgtgagcaacctgcccttcggagggggacaacagctggaaacggctgctaataccgcatgacacagcggggaggcatctccttactgtcaaagattttatcgccgaaggatgggct

SEQ ID NO: 2998 - DNA, 225 bp, unidentified
  misc_feature 1..225: note = bacterial strain Ascusb_13653 encodes 16S rRNA
  source 1..225: mol_type = genomic DNA
agagtttgatcctggctcaggatgaacgctagctacaggcttaacacatgcaagtcgaggggcagcatggtcaaagcttgctttgactgatggcgaccggcgcacgggtgagtaacgcgtatccaacctggcccatagtagggaatagcccggcgaaagtcggattaatgccctatgttgtatgaagaggacatctgattcttaccaaaggtttaccgctatggg

SEQ ID NO: 2999 - DNA, 225 bp, unidentified
  misc_feature 1..225: note = bacterial strain Ascusb_284 encodes 16S rRNA
  source 1..225: mol_type = genomic DNA
agagtttgatcatggctcaggacgaacgctggcggcacgcttaacacatgcaagtcgaacggagaatatttgagtttacttagatattcttagtggcggacgggtgagtaacacgtgagcaacctaccttagagagagggatagcttctggaaacggatggtaatacctcataacataactgaaccgcatgatttagttatcaaagatttatcactctgagatgg

SEQ ID NO: 3000 - DNA, 225 bp, unidentified
  misc_feature 1..225: note = bacterial strain Ascusb_9832 encodes 16S rRNA
  source 1..225: mol_type = genomic DNA
agagtttgatcctggctcaggatgaacgctggcggcatgcctaagacatgcaagtcgaacgaagaggccctttgaaattggagtgcttgcacaaagatggatttggattttctcttagtggcagacgggtgagtaacgcgtgggtaatctacctcaaagactgggataacttctggaaacggacgctaataccggataacacatatttagataactagatatgtt

SEQ ID NO: 3001 - DNA, 225 bp, unidentified
  misc_feature 1..225: note = bacterial strain Ascusb_4677 encodes 16S rRNA
  source 1..225: mol_type = genomic DNA
agagtttgatcctggctcaggacaaacgctggcggcgtgcctaacacatgcaagtcgaacgaagcactgcggaaagagacttcggtcaattgaagctttgacttagtggcggacgggtgagtaatgcatgagcaacctgccctggagagggggacaacagctggaaacggctgctaataccgcatgaagttgcggggaggcatctctctgcaaccaaagatttat

SEQ ID NO: 3002 - DNA, 225 bp, unidentified
  misc_feature 1..225: note = bacterial strain Ascusb_877 encodes 16S rRNA
  source 1..225: mol_type = genomic DNA
agagtttgatcatggctcaggatgaacgctagcggcaggcttaacacatgcaagtcgaggggcagcgcgaggtagcaatactttggcggcgaccggcggaagggtgcgtaacgcgtgagcaacatgcccgtatgagggggataagcgatggaaacgtcgtctaataccccgtaacacaggagatcgcatgatcatctgttgaaagattcatcgcatacggattgg

SEQ ID NO: 3003 - DNA, 225 bp, unidentified
  misc_feature 1..225: note = bacterial strain Ascusb_579 encodes 16S rRNA
  source 1..225: mol_type = genomic DNA
agagtttgatcctggctcaggatgaacgctagctacaggcttaacacatgcaagtcgaggggcagcgagaagaaagcttgctttctttgtcggcgaccggcgcacgggtgagtaacgcgtatccaaccttccccttagtagaggatagcccggcgaaagtcggattaatactctatgttattcgttgaggacatctgaaatgaatcaaaggtttaccgctaaggg

SEQ ID NO: 3004 - DNA, 225 bp, unidentified
  misc_feature 1..225: note = bacterial strain Ascusb_4740 encodes 16S rRNA
  source 1..225: mol_type = genomic DNA
agagtttgatcctggctcagaacgaacgctggcggcgcgtcttaagcatgcaagtcgagcgggattgagtagcttgctactcatgagagcggcggactggtgagtaacgcgtgggtgacgtaccctgaggatggggatagctcctagaaataggaggtaataccgaatacggtgtgcagggttagagactgtacatcaaaggttcttttgaaccgccacaggagc

SEQ ID NO: 3005 - DNA, 225 bp, unidentified
  misc_feature 1..225: note = bacterial strain Ascusb_189 encodes 16S rRNA
  source 1..225: mol_type = genomic DNA
agagtttgatcatggctcaggatgaacgctagctacaggcttaacacatgcaagtcgaggggcagcatgaagtttgcttgcaaactttgatggcgaccggcgcacgggtgagtaacgcgtatccaaccttccccttagtagggcatagcccggcgaaagtcggattaataccctatgttgtatgaagaggacatctgacttataccaaagatttatcgctaaggg

SEQ ID NO: 3006 - DNA, 225 bp, unidentified
  misc_feature 1..225: note = bacterial strain Ascusb_6247 encodes 16S rRNA
  source 1..225: mol_type = genomic DNA
agagtttgatcctggctcaggatgaacgctggcggcatgcctaatacatgcaagtcgaacggaccacttcggtggtcagtggcgaacgggtgagtaacacatgaacaacctgcccctatgactgggataacgtcttgaaaaggacgctaataccggataggcagtgacctggcatcaggacactgttaaagatgggctacatcgcaaagggatgggttcatgtcg

SEQ ID NO: 3007 - DNA, 225 bp, unidentified
  misc_feature 1..225: note = bacterial strain Ascusb_3281 encodes 16S rRNA
  source 1..225: mol_type = genomic DNA
agagtttgatcctggctcaggatgaatgctggcggcgtgcctaatacatgcaagtcgagcggtaacagggattcaccgtgttcttgacgcacttggccatagagcaagtagctgatttcgagagcacagtgaatctgctgacgagcggcggacggctgagtaacgcgtgggaacggaccccaaactgagggataactagtcgaaagattagctaataccgcatat

SEQ ID NO: 3008 - DNA, 225 bp, unidentified
  misc_feature 1..225: note = bacterial strain Ascusb_1574 encodes 16S rRNA
  source 1..225: mol_type = genomic DNA
agagtttgatcatggctcagagtgaacgctggcggcgtggttaagacatgcaagtcgaacgggatttgatcgaccgcaaggaagattgatgagagtggcaaacgggtgcgtaacacgtaaacaacttgccctttagttggggatagcttgccgaaaggtgaattaataccgaatgtggaggatttccgcatgggaatttttctaaaatttgtaatgatgctaagg

SEQ ID NO: 3009 - DNA, 225 bp, unidentified
  misc_feature 1..225: note = bacterial strain Ascusb_662 encodes 16S rRNA
  source 1..225: mol_type = genomic DNA
agagtttgatcatggctcaggattaacgctggcggcgtgcctaacacatgcaagtcgaacggaatatcttcggatatttagtggcgaacgggtgagtaatgtacaggtaatgtaccttcgtactgcgaataacaagctgaaaagtttgctaatacggaatagtttccttcgagggcatccttaaaggaataaagatttatcgtgcggagatcagcctgtatccta

SEQ ID NO: 3010 - DNA, 225 bp, unidentified
  misc_feature 1..225: note = bacterial strain Ascusb_2027 encodes 16S rRNA
  source 1..225: mol_type = genomic DNA
agagtttgatcatggctcaggatgaacgctagctacaggcttaacacatgcaagtcgaggggcagcatgagattagcttgctaatcttgatggcgaccggcgcacgggtgagtaacgcgtatccaaccttccccctactcaggcatagcccggtgaaaaccggattaactcctgatagtttcactagatggcatctgacggtgaataaagctcagcggtaaggga

SEQ ID NO: 3011 - DNA, 225 bp, unidentified
  misc_feature 1..225: note = bacterial strain Ascusb_1405 encodes 16S rRNA
  source 1..225: mol_type = genomic DNA
agagtttgatcatggctcaggatgaacgctggcggcgtgcataacacattcaagtcgaacggtgaaatgccttcgggcatggatcagtggcggacgggtgagtaacgcgtgagcaacctgccatacagtgggggataacacagggaaacttgtgctaataccgcatgacacatcgggaccgcatgattctgatgtcaaagagcaattgctgtatgatgggctcgc

SEQ ID NO: 3012 - DNA, 225 bp, unidentified
  misc_feature 1..225: note = bacterial strain Ascusb_424 encodes 16S rRNA
  source 1..225: mol_type = genomic DNA
agagtttgatcatggctcaggatgaacgctggcggcgtgcctaacacatgcaagtcgaacggggttactggcagcggagatttcggtcaaagcagcctttaacctagtggcggacgggtgagtaacgcgtggggaacctgccctgtactgggggataacagtgagaaatcactgctaataccgcataagcgcacagcatcgcatgatgcagtgtgaaaaactgag

SEQ ID NO: 3013 - DNA, 225 bp, unidentified
  misc_feature 1..225: note = bacterial strain Ascusb_2490 encodes 16S rRNA
  source 1..225: mol_type = genomic DNA
agagtttgatcatggctcaggacgaacgctggcggcgtgcttaacacatgcaagtcgaacggacggacacccttcggggtgcgagttagtggcggacgggtgagtaacgcgtgagtaacctgccttggagtggggaataacacagggaaacttgtgctaataccgcataacatcatgagatggcatcttcttatgatcaaagatttattgctccaagatgggctc

SEQ ID NO: 3014 - DNA, 225 bp, unidentified
  misc_feature 1..225: note = bacterial strain Ascusb_3947 encodes 16S rRNA
  source 1..225: mol_type = genomic DNA
agagtttgatcatggctcaggacgaacgctggcggcgtgcttaacacatgcaagtcgaacggggataacggagaggagagcttcggcaggaatcactgttattcgagtggcggacgggtgagtaacgcgtgaacaatctgtcccagacagggggataacacttggaaacaggtgctaataccgcataagaccacagcatcgcatggtgcaggggtaaaaggagcg

SEQ ID NO: 3015 - DNA, 225 bp, unidentified
  misc_feature 1..225: note = bacterial strain Ascusb_8701 encodes 16S rRNA
  source 1..225: mol_type = genomic DNA
agagtttgatcatggctcagaacgaacgctggcggcgcgtcttaagcatgcaagtcgagcggtaagttatagcttgctataacctagagcggcggactggtgagtaacgcgtgggtgacgtaccttcgtgacggggacagctcctagaaataggagataataccggatacgctgtatgttgtcagaggacatacaggaaaggatcttttgattcgcacgaagagc

SEQ ID NO: 3016 - DNA, 225 bp, unidentified
  misc_feature 1..225: note = bacterial strain Ascusb_198 encodes 16S rRNA
  source 1..225: mol_type = genomic DNA
agagtttgatcatggctcaggatgaacgctagctacaggcttaacacatgcaagtcgaggggcatcgagaggaaagcttgctttccttgtcggcgaccggcgcacgggtgagtaacgcgtatccaaccttccccttagtagggcatagcccggcgaaagtcggattaataccctatgttttccgatgaggacatctgagctggaacaaagatttatcgctaaggg

SEQ ID NO: 3017 - DNA, 225 bp, unidentified
  misc_feature 1..225: note = bacterial strain Ascusb_1829 encodes 16S rRNA
  source 1..225: mol_type = genomic DNA
agagtttgatcatggctcaggatgaacgctagctacaggcttaacacatgcaagtcgcggggcagcatggagtttgcttgcaaactttgatggcgaccggcgcacgggtgagtaacgcgtatccaaccttccccttagtagggcatagcccggcgaaagtcggattaataccctatgttcttcgtagaggacatctgaaatgaagcaaaggtttaccgctaaggg

SEQ ID NO: 3018 - DNA, 225 bp, unidentified
  misc_feature 1..225: note = bacterial strain Ascusb_3024 encodes 16S rRNA
  source 1..225: mol_type = genomic DNA
agagtttgatcctggctcaggacgaacgctggcggcgtgcctaacacatgcaagtcgagcggagttatagattggaaagcttcggccggaagatgtataacttagcggcggacgggtgagtaacgcgtgagcaacctgtcctctacagggggataagacagcgaaagttgttctaataccgcataagaccacattgccacatggcggaggggtcaaaggagcaat

SEQ ID NO: 3019 - DNA, 225 bp, unidentified
  misc_feature 1..225: note = bacterial strain Ascusb_112 encodes 16S rRNA
  source 1..225: mol_type = genomic DNA
agagtttgatcctggctcaggataaacgctggcggcgcacataagacatgcaagtcgaacggacttaattcgttagtttactaatggaagcggttagtggcggactggtgagtaacgcgtaagcaacctgcctattagtagggaataacagtgagaaatcattgctaataccgtataagctggaaacatcgcatgatgtagtcagaaaaggagcaattcgctaat

SEQ ID NO: 3020 - DNA, 225 bp, unidentified
  misc_feature 1..225: note = bacterial strain Ascusb_3860 encodes 16S rRNA
  source 1..225: mol_type = genomic DNA
agagtttgatcctggctcaggacgaacgctggcggcgtgcctaacacatgcaagtcgaacggagtgatttcacgaaggtcttcggattggacgagatcacttagtggcggacgggtgagtaacgcgtgagcaacctgcctttcagagggggacaacggttggaaacgaccgctaataccgcataaaacattctggtcgcatgatcgggatgtcaaagattttatc

SEQ ID NO: 3021 - DNA, 225 bp, unidentified
  misc_feature 1..225: note = bacterial strain Ascusb_20688 encodes 16S rRNA
  source 1..225: mol_type = genomic DNA
agagtttgatcatggctcaggattaacgctggcggcgtgcctaatacatgcaagtcgaatggtagcaataccatggcgaacgggtgagtaacacgtaggtaacctgtctttaagatgaggataaccgttggaaacgacggataatactcgataggtaattttagggcatcctaggattattaaagatttatcacttagagaggggcctgcggcgcattagctaga

SEQ ID NO: 3022 - DNA, 225 bp, unidentified
  misc_feature 1..225: note = bacterial strain Ascusb_6094 encodes 16S rRNA
  source 1..225: mol_type = genomic DNA
agagtttgatcctggctcaggatgaacgctagctacaggcttaacacatgcaagtcgaggggcagcatgacgattgcttgcaattgttgatggcgaccggcgcacgggtgagtaacgcgtatccaaccttccccatagtagaggatagcccggcgaaagtcggattaatactctatgttgtataacgaggacatctgaattataccaaagatttatcgctatggg

SEQ ID NO: 3023 - DNA, 225 bp, unidentified
  misc_feature 1..225: note = bacterial strain Ascusb_14648 encodes 16S rRNA
  source 1..225: mol_type = genomic DNA
aagtttgatcatggctcaggatgaacgctagctacaggcttaacacatgcaagtcgaggggtaacgacagcgaaagcttgcttttgctgggcgacgaccggcgaatgggtgagtaacgcgtatccaacctgccgcaaagtagggcacagccttgcgaaagtaagattaatgccctatgtgctgtgatgatgacatcagaattgcagtaaaggttcaccgctttgc

SEQ ID NO: 3024 - DNA, 225 bp, unidentified
  misc_feature 1..225: note = bacterial strain Ascusb_5179 encodes 16S rRNA
  source 1..225: mol_type = genomic DNA
agagtttgatcatggctcaggatgaacgctagctacaggcttaacacatgcaagtcgaggggcatcatgaagtttgcttgcaaactttgatggcgaccggcgcacgggtgagtaacgcgtatccaacctggcctatagtaggggatagcccggcgaaagtcggattaataccctatgttttccattgcgggcatctaatttggaacaaagattgatcgctatagg

SEQ ID NO: 3025 - DNA, 225 bp, unidentified
  misc_feature 1..225: note = bacterial strain Ascusb_2466 encodes 16S rRNA
  source 1..225: mol_type = genomic DNA
agagtttgatcatggctcaggatgaacgctagctacaggcttaacacatgcaagtcgaggggcagcatggtcttagcttgctaagactgatggcgaccggcgcacgggtgagtaacgcgtatccaaccttccccatagtagggaatagcccggcgaaagtcggattaatgccctatgttcttcaatgcagacatctaggttgaagcaaagattcatcgctatggg

SEQ ID NO: 3026 - DNA, 225 bp, unidentified
  misc_feature 1..225: note = bacterial strain Ascusb_1584 encodes 16S rRNA
  source 1..225: mol_type = genomic DNA
agagtttgatcatggctcaggatgaacgctggcggcgtgcttaacacatgcaagtcgaacggagtattgacgctgaacaaacgattagcttgctaaaagtgagttcttgttgatacttagtggcggacgggtgagtaacgcgtgggtaacctgccatgtacagggggataacacttagaaataggtgctaataccgcataagcctacaggatcgcatgatccagt

SEQ ID NO: 3027 - DNA, 225 bp, unidentified
  misc_feature 1..225: note = bacterial strain Ascusb_534 encodes 16S rRNA
  source 1..225: mol_type = genomic DNA
agagtttgatcatggctcagaacgaacgctggtggcgtgtcttatacatgcaagtcgagcggggcagcaatgcccagcggcgaacgggtgagtaacgcgtaagcaatctgccccatatcaggaaatacccgtgccaacgcgcggttaatgtccaggagcgtggcttcccgcatgggaagttgacaagagatttatcggtatgggatgagcttgcgtccgattagc

SEQ ID NO: 3028 - DNA, 225 bp, unidentified
  misc_feature 1..225: note = bacterial strain Ascusb_143 encodes 16S rRNA
  source 1..225: mol_type = genomic DNA
agagtttgatcatggctcaggacgaacgctggcggcacgcttaacacatgcaagtcgaacggagttatttggagcttgctttgaataacttagtggcggacgggtgagtaacacgtgagcaatctgcccttaagagggggatagcagttagaaatgactgataataccgcataagatagtagtaccgcatggtacagctataaaagattttatcgcttaaggatg

SEQ ID NO: 3029 - DNA, 225 bp, unidentified
  misc_feature 1..225: note = bacterial strain Ascusb_5543 encodes 16S rRNA
  source 1..225: mol_type = genomic DNA
agagtttgatcctggctcaggatgaacgctagctacaggcttaacacatgcaagtcgaggggcagcattgagatagcttgctatttcagatggcgaccggcgcacgggtgagtaacgcgtatccaaccttccctatagtagagaatagcccggcgaaagtcggattaatgctctatgttttccaatgcggacatctaaaatggaacaaaggtttaccgctatagg

SEQ ID NO: 3030 - DNA, 225 bp, unidentified
  misc_feature 1..225: note = bacterial strain Ascusb_2254 encodes 16S rRNA
  source 1..225: mol_type = genomic DNA
agagtttgatcatggctcaggatgaacgctagcgacaggcctaacacatgcaagtcgaggggcagcgcggggaaagcttgcttttcctggcggcgaccggcgcacgggtgcgtaacaggtgtgcaatctgtccatagtcggggaatagcccagcgaaagttggattaaagctccatgtgagtgaacgccgcatgacgatcacttgaaacgtaaggactatgggtg

SEQ ID NO: 3031 - DNA, 225 bp, unidentified
  misc_feature 1..225: note = bacterial strain Ascusb_498 encodes 16S rRNA
  source 1..225: mol_type = genomic DNA
agagtttgatcctggctcaggatgaacgctggcggcgtgcttaacacatgcaagtcgaacgaagcattggttttgaagttttcggacggaaaagcctttgacttagtggcggacgggtgagtaacgcgtgggcaacctgccgtatgcagggggacaacagttggaaacgactgctaataccgcataagcgcacggggacgcatgttcctgtgtgaaaagccttaa

SEQ ID NO: 3032 - DNA, 225 bp, unidentified
  misc_feature 1..225: note = bacterial strain Ascusb_9049 encodes 16S rRNA
  source 1..225: mol_type = genomic DNA
agagtttgatcctggctcaggatgaacgctagctacaggcttaacacatgcaagtcgaggggcagcatgaagtcagcttgctgactttgatggcgaccggcgcacgggtgcgtaacacgtatccaatctacccatggctcagggatagccttgcgaaagtaagattaatacctgatggtcttgatttccggcatcgggattcaagtaaagattcatcggcgatgg

SEQ ID NO: 3033 - DNA, 225 bp, unidentified
  misc_feature 1..225: note = bacterial strain Ascusb_2865 encodes 16S rRNA
  source 1..225: mol_type = genomic DNA
agagtttgatcatggctcaggacgaacgctggcggcgtgcctaacacatgcaagtcgaacggactgattcgcttcggtgatgaaagtcagtggcggacgggtgagtaacgcgtgagtaacctgccttacagagggggataacgtttggaaacgaacgctaataccgcataacatatatttgtcgcatggcagatatatcaaaggagcaatccgctgtaagatgga

SEQ ID NO: 3034 - DNA, 225 bp, unidentified
  misc_feature 1..225: note = bacterial strain Ascusb_5156 encodes 16S rRNA
  source 1..225: mol_type = genomic DNA
agagtttgatcatggctcaggatgaacgctagcggcaggcttaacacatgcaagtcgaggggcagcgggtgtagcaatacatgccggcgaccggcgcaagggtgcgtaacgcgtgagcgacatgcccgtgaccgggggataaccgatggaaacgtcgcctaaccccccatacgccgagggatcgcatggtcccttgttgaaaacgtcagtggtcacggattggct

SEQ ID NO: 3035 - DNA, 225 bp, unidentified
  misc_feature 1..225: note = bacterial strain Ascusb_1985 encodes 16S rRNA
  source 1..225: mol_type = genomic DNA
agagtttgatcctggctcaggatgaacgctagctacaggcttaacacatgcaagtcgaggggtaacattggctgagcttgctcagccagatgacgaccggcgcacgggtgagtaacgcgtatccaacctgcccatgggtcaggaataaactcccgaaagggagcctaatacctgatgttgtgagaagaaggcctctgattttcacgaaagacttcggttgccgat

SEQ ID NO: 3036 - DNA, 225 bp, unidentified
  misc_feature 1..225: note = bacterial strain Ascusb_11416 encodes 16S rRNA
  source 1..225: mol_type = genomic DNA
agagtttgatcctggctcagaacgaacgctggcggcgcgtcttaagcatgcaagtcggacggcaaggggagcttgctccccctagagtggcggactggtgagtaacacgtgggtgacgtaccctttagctggggatagccggtagaaataccgggtaataccgaataagcttgcccttttgatgtagggtaaggaaaggagcttcggcttcactgaaggaacggc

SEQ ID NO: 3037 - DNA, 225 bp, unidentified
  misc_feature 1..225: note = bacterial strain Ascusb_2164 encodes 16S rRNA
  source 1..225: mol_type = genomic DNA
agagtttgatcatggctcagaacgaacgctggcggcgcgtcttaagcatgcaagtcggacggcaaggggagcttgctccccctagagtggcggactggtgagtaacacgtgggtgacgtaccctttagctggggatagccggtagaaataccgggtaataccgaataagcttgcccttttaatgtagggtaaggaaaggagcttcggcttcactgaaggaacggc

SEQ ID NO: 3038 - DNA, 225 bp, unidentified
  misc_feature 1..225: note = bacterial strain Ascusb_1067 encodes 16S rRNA
  source 1..225: mol_type = genomic DNA
agagtttgatcatggctcaggacgaacgctggcggcatgcctaacacatgcaagtcgaacggagttaagagaagcttgcttttcttaacttagtggcggacgggtgagtaacgcgtgagcaatctgcctttcagtggggaataatgttctgaaaagagcactaataccgcataatgtacagtgaccgcatgatcgttgtaccaaagatttatcgctgagagatga

SEQ ID NO: 3039 - DNA, 225 bp, unidentified
  misc_feature 1..225: note = bacterial strain Ascusb_4613 encodes 16S rRNA
  source 1..225: mol_type = genomic DNA
agagtttgatcatggctcaggatgaacgctggcggcgtgcctaatacatgcaagtcgaacggagatgccttttcagaagccttcgggcggacgagttggtattcttagtggcggacgggtgagtaacacgtgagcaacctgcctttcagagggggataacggctggaaacggtcgctaataccgcatgatataccgaagtggcatcgctttggtatcaaaggagc

SEQ ID NO: 3040 - DNA, 225 bp, unidentified
  misc_feature 1..225: note = bacterial strain Ascusb_7126 encodes 16S rRNA
  source 1..225: mol_type = genomic DNA
agagtttgatcatggctcaggataaacgctggcggcgcacataagacatgcaagtcgaacggaagccgttttaaattaattgattggatatgagaacttgttcaatttgaagagattttaatttaaaacatatgactttagtggcggactggtgagtaacgcgtaagcaatctgcctatcagaggggaataacagcgagaaatcgttgctaataccgcatatgct

SEQ ID NO: 3041 - DNA, 225 bp, unidentified
  misc_feature 1..225: note = bacterial strain Ascusb_1683 encodes 16S rRNA
  source 1..225: mol_type = genomic DNA
agagtttgatcatggctcaggatgaacgctggcggcgtgcctaacacatgcaagtcgaacggacaagggggcttcggcctcattgttagtggcggacgggtgagtaacgcgtggagaacctgccctgtactgggggataacagtgggaaaccactgctaataccgcatacgctctagaggccgcatggccattagaggaaaactccggtggtataggatggctcc

SEQ ID NO: 3042 - DNA, 225 bp, unidentified
  misc_feature 1..225: note = bacterial strain Ascusb_11390 encodes 16S rRNA
  source 1..225: mol_type = genomic DNA
agagtttgatcatggctcaggatgaacgctagctacaggcttaacacatgcaagtcgaggggcagcatgacgattgcttgcaattgtcgatggcgaccggcgcacgggtgagtaacgcgtatccaaccttccccttagtagaggatagcccggcgaaagtcggattaatactctatgttcttcgaagcgggcatctaatttgaagcaaagattgatcgctaaggg

SEQ ID NO: 3043 - DNA, 225 bp, unidentified
  misc_feature 1..225: note = bacterial strain Ascusb_1994 encodes 16S rRNA
  source 1..225: mol_type = genomic DNA
agagtttgatcatggctcaggatgaacgctggcggcgtgcctaatacatgcaagtcgagcgagaatcgaatgaacggagattcgtcaaagtgaattcgaggaaagcggcggacgggtgagtaacgcgtaggcaacctgcccttagcagagggatagccattggaaacgatgattaaaacctcataatgctgcagaaacacatgtttttacagccaaagatttatc

SEQ ID NO: 3044 - DNA, 225 bp, unidentified
  misc_feature 1..225: note = bacterial strain Ascusb_2360 encodes 16S rRNA
  source 1..225: mol_type = genomic DNA
agagtttgatcctggctcaggatgaacgctggcggcgtgcctaacacatgcaagtcgaacgggactgtttagtgacgatttcggtctgaactttacagtttagtggcggacgggtgagtaacgcgtggataacctgcctttcacagggggatagcagctggaaacggctggtaataccgcatacgctcatgtcaccgcatggtgatgtgaggaaagacttatcgg

SEQ ID NO: 3045 - DNA, 225 bp, unidentified
  misc_feature 1..225: note = bacterial strain Ascusb_4364 encodes 16S rRNA
  source 1..225: mol_type = genomic DNA
agagtttgatcatggctcaggacgaacgctggcggcgtgcctaacacatgcaagtcgagcggagacatagggcggaaagcttcggctggaagacttatgttttagcggcggacgggtgagtaacgcgtgagcaatctgtccttcacagggggataagataccgaaaggtgttctaataccgcataagaccacagcaccgcatggtgtgggggtcaaaggagagat

SEQ ID NO: 3046 - DNA, 225 bp, unidentified
  misc_feature 1..225: note = bacterial strain Ascusb_4460 encodes 16S rRNA
  source 1..225: mol_type = genomic DNA
agagtttgatcatggctcaggacgaacgctggcggcgtgcttaacacatgcaagtcgaacggagttagacgctggtttgatgctagcttgctagtggatttccttgtctaacttagtggcggacgggtgagtaacgcgtgagtaacctgcctctcagtggggaataacgccctgaaaagagcgctaataccgcataacgtattctgaccgcatgatcgggatacc

SEQ ID NO: 3047 - DNA, 225 bp, unidentified
  misc_feature 1..225: note = bacterial strain Ascusb_2556 encodes 16S rRNA
  source 1..225: mol_type = genomic DNA
agagtttgatcatggctcaggacgaacgctggcggcacgcttaacacatgcaagtcgaacggtgacggtttcaagcttgcttgaaacttgatcagtggcggacgggtgagtaacacgtgagcaatctgcctctaagtggggaataacgactggaaacggtcggtaataccgcataacatagccgaaccgcatgatttggttatcaaagatttatcgcttagagat

SEQ ID NO: 3048 - DNA, 225 bp, unidentified
  misc_feature 1..225: note = bacterial strain Ascusb_891 encodes 16S rRNA
  source 1..225: mol_type = genomic DNA
agagtttgatcatggctcaggacgaacgctggcggcgtgcctaacacatgcaagtcgaacggagcgaaagcagcttgctgctggagcttagtggcggacgggtgagtaacacgtgagtaacctgcctttcagaggggaataatgtctggaaacggacactaataccgcataatatattgggatcgcatgattttgatatcaaaggagcaatccgctgaaagatgg

SEQ ID NO: 3049 - DNA, 225 bp, unidentified
  misc_feature 1..225: note = bacterial strain Ascusb_2177 encodes 16S rRNA
  source 1..225: mol_type = genomic DNA
agagtttgatcatggctcaggatgaacgctagcggcaggcttaacacatgcaagtcgaggggtaacgcggagtagcaatactctggcgacgaccggcgcacgggtgcgtaacgcgtatgcaacctaccttgtacagggggataacggagtgaaaattccactaatatcccatggtgttgttggttcgcatggactgacaactaaagcttcggtggtacaagatgg

SEQ ID NO: 3050 - DNA, 225 bp, unidentified
  misc_feature 1..225: note = bacterial strain Ascusb_1603 encodes 16S rRNA
  source 1..225: mol_type = genomic DNA
agagtttgatcctggctcagaacgaacgctggcggcgcgtcttaagcatgcaagtcgagcggtaaggaagaagcttgcttcttccctagagcggcggactggtgagtaacgcgtgggtgacgtacctttgtgacggggacagctcctagaaataggagataataccggatacgctgtatgttgtcagagggcatacaggaaaggatcttttgattcgcacagaga

SEQ ID NO: 3051 - DNA, 225 bp, unidentified
  misc_feature 1..225: note = bacterial strain Ascusb_620 encodes 16S rRNA
  source 1..225: mol_type = genomic DNA
agagtttgatcctggctcaggatgaacgctggcggcgtgcttaacacatgcaagtcgaacggagttatatttttgaagttttcggatggatgagatataacttagtggcggacgggtgagtaacgcgtggggaacctgccccataccgggggacaacagttggaaacgactgctaataccgcataagcgcacggaaggacatccttcagtgtgaaaaactccggt

SEQ ID NO: 3052 - DNA, 225 bp, unidentified
  misc_feature 1..225: note = bacterial strain Ascusb_754 encodes 16S rRNA
  source 1..225: mol_type = genomic DNA
agagtttgatcatggctcaggacgaacgctggcggcacgcttaacacatgcaagtcgaacggagctatttgagcttgcttagatagcttagtggcggacgggtgagtaacacgtgagcaatctgcctttcagagggggatagcagttggaaacgactgataataccgcataacataacgagaccgcatgatcttgttatcaaagatttatcgctgaaagatgagc

SEQ ID NO: 3053 - DNA, 225 bp, unidentified
  misc_feature 1..225: note = bacterial strain Ascusb_3534 encodes 16S rRNA
  source 1..225: mol_type = genomic DNA
agagtttgatcatggctcaggatgaacgctagcgacaggcctaacacatgcaagtcgagcggcagcacctcgggtggcgagcggcgcacgggtgagtaacgcgtatgtaacctgcccatgagtggggaatagcccggtgaaaaccggattaatgccccatgacaccattgtctgacatcatttaatggttaaagattcattgctcatggatggacatgcgttgga

SEQ ID NO: 3054 - DNA, 225 bp, unidentified
  misc_feature 1..225: note = bacterial strain Ascusb_889 encodes 16S rRNA
  source 1..225: mol_type = genomic DNA
agagtttgatcatggctcaggacgaacgctggcggcgtgcctaacacatgcaagtcgaacggagttcttgtggaagtccttcggggcggaagcttggacttagtggcgaacgggtgagtaacgcgtgagcaacctgcctttcagagggggacaacggttggaaacgaccgctaataccgcataatgcagctggaccgcatgatccggctgccaaagatttatcgc

SEQ ID NO: 3055 - DNA, 225 bp, unidentified
  misc_feature 1..225: note = bacterial strain Ascusb_7965 encodes 16S rRNA
  source 1..225: mol_type = genomic DNA
agagtttgatcctggctcaggatgaacgctggcggcgtgcctaatacatgcaagtcgaacgggtgcagcaatgtactagtggcgaacgggtgagtaacacgttggtgacctgccccaaagatgggaatatcacctggaaacgggtggcaaaaccgaataagcttatcttagttagagaaaggtaagtaaaagcgaaagctactttgggaggggcctgcggcccat

SEQ ID NO: 3056 - DNA, 225 bp, unidentified
  misc_feature 1..225: note = bacterial strain Ascusb_816 encodes 16S rRNA
  source 1..225: mol_type = genomic DNA
agagtttgatcatggctcaggacgaacgctggcggcatgcctaacacatgcaagtcgaacggagttttgaggagcttgctccttaaaacttagtggcggacgggtgagtaacgcgtgagcaacctgcctttcagtggggaataatgttttgaaaagaacactaataccgcataatgtatagagatcgcatgatttttgtaccaaaggatttattcgctgagagat

SEQ ID NO: 3057 - DNA, 225 bp, unidentified
  misc_feature 1..225: note = bacterial strain Ascusb_9365 encodes 16S rRNA
  source 1..225: mol_type = genomic DNA
agagtttgatcctggctcaggatgaacgctggcggcatgcctaagacatgcaagtcgaacgagacgacccattgaagattgcgagcttgctcaaagtccgatttggattcttcgtctagtggcgcaagggtgagtaacacgtgggtaatctgcctttaagtctggaataacagttagaaatgattgctaatgccggatgatatatgaaacgatacgtcatttcat

SEQ ID NO: 3058 - DNA, 225 bp, unidentified
  misc_feature 1..225: note = bacterial strain Ascusb_5231 encodes 16S rRNA
  source 1..225: mol_type = genomic DNA
agagtttgatcatggctcaggatgaatgctggcggcgtgcctaatacatgcaagtcgagcggtaacagggcttcaccgtttccttgacactccgggctgaatgcgggaggttgaattcgagggaacagtgaagctgctgacgagcggcggacggctgagtaacgcgtgggaacggaccccaaagtgagggataactactcgaaagagtggctaataccgcatgtg

SEQ ID NO: 3059 - DNA, 225 bp, unidentified
  misc_feature 1..225: note = bacterial strain Ascusb_6331 encodes 16S rRNA
  source 1..225: mol_type = genomic DNA
agagtttgatcatggctcaggatgaacgctggcggcatgcttaacacatgcaagtcgaacggacaatcacccttcggggtgtgcgttagtggcggacgggtgagtaacgcgtgaggaacctgccttgcagtggggaataacagccggaaacgactgctaataccgcatgatgcatcgttgtcgcatggcaatgatgccaaagatttatcgctgtgagatggcctc

SEQ ID NO: 3060 - DNA, 225 bp, unidentified
  misc_feature 1..225: note = bacterial strain Ascusb_6161 encodes 16S rRNA
  source 1..225: mol_type = genomic DNA
agagtttgatcatggctcaggacgaacgctggcggcgtgcctaacacatgcaagtcgagcggagatatgaggaacggaggcttcggcggaagggaatcatattttagcggcggacgggtgagtaacgcgtgagcaatctgtccctgacagggggataacacttggaaacaggtgctaataccgcataagaccacgaggcggcatcgccttggggtaaaaggagcg

SEQ ID NO: 3061 - DNA, 225 bp, unidentified
  misc_feature 1..225: note = bacterial strain Ascusb_1913 encodes 16S rRNA
  source 1..225: mol_type = genomic DNA
agagtttgatcatggctcagaacgaacgctggcggcatggattaggcatgcaagtcgaacgggagcagcaatgctccagtggcgcaagggtgaggaacacgtgaacaacctgccttcgagatggggatagcttctggaaacgggagataataccgaataacatcaactggtcgcatgactggttgatcaaagcagcaatgcgcttgaagaggggttcgcgtccca

SEQ ID NO: 3062 - DNA, 225 bp, unidentified
  misc_feature 1..225: note = bacterial strain Ascusb_7105 encodes 16S rRNA
  source 1..225: mol_type = genomic DNA
agagtttgatcatggctcaggacgaacgctggcggcgtgcttaacacatgcaagtcgaacgaagcttgattttggaatctttcgggatgaagaatgatatgacttagtggcggacgggtgagtaacgcgtgagtaacctgcctttcagagtggaataacgtttggaaacgaacgctaataccgcataacatcaatttatcgcatggtagaatgatcaaagattta

SEQ ID NO: 3063 - DNA, 225 bp, unidentified
  misc_feature 1..225: note = bacterial strain Ascusb_347 encodes 16S rRNA
  source 1..225: mol_type = genomic DNA
agagtttgatcctggctcaggatgaacgctggcggcgtgcttaacacatgcaagtcgaacggagcttagaaggaagcttgctttcatttaagcttagtggcggacgggtgagtaacgcgtgagcaacctgccctcgagtggggaataacatcgagaaatcggtgctaataccgcataaagtcgagagaccgcatgatctttcgaccaaaggatttattcgcttga

SEQ ID NO: 3064 - DNA, 225 bp, unidentified
  misc_feature 1..225: note = bacterial strain Ascusb_11260 encodes 16S rRNA
  source 1..225: mol_type = genomic DNA
agagtttgatcatggctcaggataaacgctggcggcgcacataagacatgcaagtcgaacggaagtcgtcataatgattccaatattgatatgaagatttatctgatttgaaattgaagatgacttatgacaatggctttagtggcggactggtgagtaacgcgtaagcaatctgcctattagaggggaataacagtgagaaatcattgctaataccgcatatgc

SEQ ID NO: 3065 - DNA, 225 bp, unidentified
  misc_feature 1..225: note = bacterial strain Ascusb_6575 encodes 16S rRNA
  source 1..225: mol_type = genomic DNA
agagtttgatcctggctcaggatgaacgctggcggcgtgcctaacacatgcaagtcgaacgggactgttaggaagatcttttcggagtgattccttacagtttagtggcggacgggtgagtaacgcgtggataacctgcctttcacagggggatagcagctggaaacggctggtaataccgcatacgctcagagcaccgcatgatgctttgaggaaagatttatc

SEQ ID NO: 3066 - DNA, 225 bp, unidentified
  misc_feature 1..225: note = bacterial strain Ascusb_2050 encodes 16S rRNA
  source 1..225: mol_type = genomic DNA
agagtttgatcctggctcaggatgaacgctggcggcgtgcctaacacatgcaagtcgagcggagtcatatgttgattcttcggatgatttatatgacttagcggcggatgggtgagtaacacgtgggtaatctgccctgcactgggggataacagttggaaacgactgttaataccgcatatgcacacgtggccgcatggccgtgggtggaaagattcatcggtg

SEQ ID NO: 3067 - DNA, 225 bp, unidentified
  misc_feature 1..225: note = bacterial strain Ascusb_11232 encodes 16S rRNA
  source 1..225: mol_type = genomic DNA
agagtttgatcctggctcaggatgaacgctagcggcaggcttaacacatgcaagtcgaggggcagcggggagtagcaatactccgccggcgaccggcgcaagggtgcgtaacgcgtgagcaacatgcccgtcacagggggataatccatggaaacgtggtctaaaaccgcatagattgcagagtggacatccactttgcaagaaattcgcaagaaggtgacggat

SEQ ID NO: 3068 - DNA, 225 bp, unidentified
  misc_feature 1..225: note = bacterial strain Ascusb_3882 encodes 16S rRNA
  source 1..225: mol_type = genomic DNA
agagtttgatcctggctcaggatgaacgctagcggcaggcttaacacatgcaagtcgaggggcagcaggcggtagcaatactgtgctggcgaccggcgcacgggtgcgtaacgcgtatgcaacctacccactacagggggataacggagggaaacttccactaatatcccatggtgtcaccgaatcgcatggtttggtgactaaagctacggtggtagtggatgg

SEQ ID NO: 3069 - DNA, 225 bp, unidentified
  misc_feature 1..225: note = bacterial strain Ascusb_2201 encodes 16S rRNA
  source 1..225: mol_type = genomic DNA
agagtttgatcatggctcaggacgaacgctggcggcgtgcctaacacatgcaagtcgaacgaagctcctgattggattcttcggatgaagagaaggaagacttagtggcggacgggtgagtaacgcgtgagcaacctgcctttcagagggggataacagttggaaacgactgctaataccgcataacatatagatgtcgcatggcatttgtatcaaagctgaggc

SEQ ID NO: 3070 - DNA, 225 bp, unidentified
  misc_feature 1..225: note = bacterial strain Ascusb_1536 encodes 16S rRNA
  source 1..225: mol_type = genomic DNA
agagtttgatcctggctcaggacgaacgctggcggcacgcttaacacatgcaagtcgaacggtgaatcggagcttgctttgattcatagtggcggacgggtgagtaacacgtgagtaacctgcctctgtgtggggaatagcttctggaaacggatggtaataccgcataacatatatgtatcgcatggtatatatatcaaagatttatcgcacagagatggactc

SEQ ID NO: 3071 - DNA, 225 bp, unidentified
  misc_feature 1..225: note = bacterial strain Ascusb_154 encodes 16S rRNA
  source 1..225: mol_type = genomic DNA
agagtttgatcctggctcaggatgaacgctagctacaggcttaacacatgcaagtcgaggggcagcatggcggaagcttgcttccgctgatggcgaccggcgcacgggtgagtaacgcgtatccaaccttccccctagcagggcatagcccgtagaaatgcggattaacaccctatgttgtgttttgaggacatctgacgaacactaaaggtttaccgctagggg

SEQ ID NO: 3072 - DNA, 225 bp, unidentified
  misc_feature 1..225: note = bacterial strain Ascusb_3436 encodes 16S rRNA
  source 1..225: mol_type = genomic DNA
agagtttgatcctggctcaggacgaacgctggcggcgtgcttaacacatgcaagtcgaacgaagcttgattacagatttcttcggaatgacgtatgatatgactgagtggcggacgggtgagtaacgcgtgagcaacctgcccttaggtgagggatagtgtctggaaacggacagtaatacctcataacatatatttgcggcatcgcagatatatcaaaggttta

SEQ ID NO: 3073 - DNA, 225 bp, unidentified
  misc_feature 1..225: note = bacterial strain Ascusb_2103 encodes 16S rRNA
  source 1..225: mol_type = genomic DNA
agagtttgatcctggctcaggatgaacgctagcggcaggcttaacacatgcaagtcgaggggcagcgcggggtagcaatactctggcggcgaccggcggaagggtgcgtaacgcgtgagcaacatgcccgtggcagggggataagcgatggaaacgtcgtctaagaccccgtaacaacagacctcgcatggggtttgtttgaaagcttcggcggccacggattgg

SEQ ID NO: 3074 - DNA, 225 bp, unidentified
  misc_feature 1..225: note = bacterial strain Ascusb_961 encodes 16S rRNA
  source 1..225: mol_type = genomic DNA
agagtttgatcatggctcaggatgaacgctggcggcgtgcttaacacatgcaagtcgaacgaagcactggttttgaagttttcggacggaaaagcctttgacttagtggcggacgggtgagtaacgcgtgggcaacctgccgtatgcagggggacaacagttggaaacgactgctaataccgcataagcgcacggggacgcatgttcctgtgtgaaaagccttga

SEQ ID NO: 3075 - DNA, 225 bp, unidentified
  misc_feature 1..225: note = bacterial strain Ascusb_4659 encodes 16S rRNA
  source 1..225: mol_type = genomic DNA
agagtttgatcatggctcaggatgaacgctagcgacaggcctaacacatgcaagtcgaggggcagcatggtcaaagcttgctttgactgatggcgaccggcgcacgggtgcgtaacaggtatgcaacctgtccttaaccaagggatagcccgctgaaaggcggattaacactttatgtgtcacgtgagggcatcctcgtgtgatgaaacgcaagggttaaggttg

SEQ ID NO: 3076 - DNA, 225 bp, unidentified
  misc_feature 1..225: note = bacterial strain Ascusb_5053 encodes 16S rRNA
  source 1..225: mol_type = genomic DNA
agagtttgatcatggctcaggacgaacgctggcggcacgcttaacacatgcaagtcgaacggagttattcggagcttgctctggataacttagtggcggacgggtgagtaacacgtgagcaacctgcctttgagagtgggatagcttctggaaacggatggtaataccgcataacattacggaaccgcatgattctgtaatcaaagatttatcgctcaaagatgg

SEQ ID NO: 3077 - DNA, 225 bp, unidentified
  misc_feature 1..225: note = bacterial strain Ascusb_1954 encodes 16S rRNA
  source 1..225: mol_type = genomic DNA
agagtttgatcctggctcaggatgaacgctggcggcgtgcctaacacatgcaagtcgagcggagttaagttttcggatttaacttagcggcggatgggtgagtaacacgtgggtaacctgccctgcacagggggataacagttggaaacgactgttaataccgcatatgcacacgatgccgcatggcaaagggtggaaagatttatcggtgcaggatgggcccgc

SEQ ID NO: 3078 - DNA, 225 bp, unidentified
  misc_feature 1..225: note = bacterial strain Ascusb_6255 encodes 16S rRNA
  source 1..225: mol_type = genomic DNA
agagtttgatcatggctcaggatgaacgctggcggcgtgcttaacacatgcaagtcgaacggaactgctttgaaagatttccttcggggatgacttcgttgtagtttagtggcggacgggtgagtaacgcgtgagtaacctgcccttgagagggggataacgttctgaaaagaacgctaataccgcataatactattgaatcgcatggtttaatagtcaaaactc

SEQ ID NO: 3079 - DNA, 225 bp, unidentified
  misc_feature 1..225: note = bacterial strain Ascusb_5742 encodes 16S rRNA
  source 1..225: mol_type = genomic DNA
agagtttgatcctggctcaggatgaacgctggcggcgtgcctaacacatgcaagtcgaacggagcatagacgctgtgagaagaatcagcttgctgaggaagcgaacttgtttatgcttagtggcggacgggtgagtaacgcgtggataacctggctcacacagggggatagcagttggaaacgactgataataccgcataagcgcacggcatcgcatgatgcagt

SEQ ID NO: 3080 - DNA, 225 bp, unidentified
  misc_feature 1..225: note = bacterial strain Ascusb_3391 encodes 16S rRNA
  source 1..225: mol_type = genomic DNA
agagtttgatcatggctcaggacgaacgctggcggcgtgcttaacacatgcaagtcgagcggggatagaattggaagttcttcgggatggaagattctattccagcggcggacgggtgagtaacgcgtgaacaatctgtcccagacagggggataacacttggaaacaggtgctaataccgcataagaccacgttttcgcatgggaatggggtaaaaggagcaat

SEQ ID NO: 3081 - DNA, 225 bp, unidentified
  misc_feature 1..225: note = bacterial strain Ascusb_3934 encodes 16S rRNA
  source 1..225: mol_type = genomic DNA
agagtttgatcatggctcaggacgaacgctggcggcgtgcttaacacatgcaagtcgaacgaggtttactggagagcttgctcgaaggtaaaccgagtggcggacgggtgagtaacgcgtgaacaatctgtctcatacagggggataacgcatcgaaagatgtgctaataccgcgtaggaccacaggaggacatcctccaggggtgaaaggagcaatccggtatg

SEQ ID NO: 3082 - DNA, 225 bp, unidentified
  misc_feature 1..225: note = bacterial strain Ascusb_3590 encodes 16S rRNA
  source 1..225: mol_type = genomic DNA
agagtttgatcatggctcaggatgaacgctagctacaggcttaacacatgcaagtcgaggggcagcatgatcttagcttgctaagattgatggcgaccggcgcacgggtgagtaacgcgtatccaaccttccccttagtagaggatagcccggcgaaagtcggattaatactctatgttttccgttgagagcatttgaagtggaacaaaggtttaccgctaaggg

SEQ ID NO: 3083 - DNA, 225 bp, unidentified
  misc_feature 1..225: note = bacterial strain Ascusb_1208 encodes 16S rRNA
  source 1..225: mol_type = genomic DNA
agagtttgatcatggctcaggacgaacgctggcggcgtgcttaacacatgcaagtcgaacgggcttaaagaggagcttgcttttctttaagttagtggcggacgggtgagtaacgcgtgagcaacttgccttggacagtggaataacacagggaaacttgtgctaataccgcatgaagtgcggagagggcatcctttctgtaccaaaggaagcaattccggtctg

SEQ ID NO: 3084 - DNA, 225 bp, unidentified
  misc_feature 1..225: note = bacterial strain Ascusb_10958 encodes 16S rRNA
  source 1..225: mol_type = genomic DNA
agagtttgatcctggctcaggatgaacgctggcggcgtgcttaacacatgcaagtcgaacgaagctccatttaagatttcttcggaatgattttgtggatgacttagtggcggacgggtgagtaacgcgtgaggaacctgccttgcagtggggaataacagttggaaacgactgctaataccgcataacacggagagatcgcatgttttctccgtcaaagattta

SEQ ID NO: 3085 - DNA, 225 bp, unidentified
  misc_feature 1..225: note = bacterial strain Ascusb_1823 encodes 16S rRNA
  source 1..225: mol_type = genomic DNA
agagtttgatcctggctcaggatgaacgctggcggcgtgcttaacacatgcaagtcgaacgaagcatctggtctgatttcttcggattgaagaccttatgacttagtggcggacgggtgagtaacgcgtgggcaatctgccccataccgggggacaacagttggaaacgactgctaataccgcataagcgcacggagccgcatggttctgtgtgaaaaactccgg

SEQ ID NO: 3086 - DNA, 225 bp, unidentified
  misc_feature 1..225: note = bacterial strain Ascusb_1042 encodes 16S rRNA
  source 1..225: mol_type = genomic DNA
agagtttgatcctggctcaggatgaacgctggcggcgtgcttaacacatgcaagtcgaacgaagccaaaaggaagcttgctttctttgaagcttagtggcggacgggtgagtaacgcgtgaggaacctgcccttcagtggggaataacagccggaaacgactgctaataccgcataacgtcaccggatcgcatgatctggtgaccaaaggatttattcgctgaag

SEQ ID NO: 3087 - DNA, 225 bp, unidentified
  misc_feature 1..225: note = bacterial strain Ascusb_6252 encodes 16S rRNA
  source 1..225: mol_type = genomic DNA
agagtttgatcatggctcaggatgaacgctggcggcgtgcttaacacatgcaagtcgaacggagtattgacgctgacgagcagagtagcttgctacgaagcaaatcttgttgatacttagtggcggacgggtgagtaacgcgtgggtaacctgccatatacagggggataacacttagaaataggtgctaataccgcataagcgcacagtaccgcatggtagagt

SEQ ID NO: 3088 - DNA, 225 bp, unidentified
  misc_feature 1..225: note = bacterial strain Ascusb_5946 encodes 16S rRNA
  source 1..225: mol_type = genomic DNA
agagtttgatcatggctcaggatgaacgctagcggcaggcttaacacatgcaagtcgaggggcagcgtggagtagcaatactctgacggcgaccggcgaaagggtgagtaacgcgtgagcaacatgcccggtagtggagaatagtcgatggaaacgtcgcgtaatactccgtaacacagagaaccgcatgattttctgttaatagatttatcgctaccggattgg

SEQ ID NO: 3089 - DNA, 225 bp, unidentified
  misc_feature 1..225: note = bacterial strain Ascusb_5499 encodes 16S rRNA
  source 1..225: mol_type = genomic DNA
agagtttgatcatggctcaggatgaacgctagcggcaggcttaacacatgcaagtcgaggggcagcgggtccagcaatggatgccggcgaccggcgcaagggtgcgtaacgcgtgagcgacatgcccgtgacctggggataaccgatggaaacgtcgcctaacccccaatacgatacacattcgcatggaagtgtattgaaaaccccggtggtcacggattggct

SEQ ID NO: 3090 - DNA, 225 bp, unidentified
  misc_feature 1..225: note = bacterial strain Ascusb_1715 encodes 16S rRNA
  source 1..225: mol_type = genomic DNA
agagtttgatcatggctcaggatgaacgctagctacaggcttaacacatgcaagtcgaggggcatcattgcgatagcttgctattgcagatggcgaccggcgcacgggtgagtaacgcgtatccaacctggcccttagtaggggatagcccggcgaaagtcggattaataccctatgttctcagcggcagacatctaatgctgagcaaagattcatcgctaaggg

SEQ ID NO: 3091 - DNA, 225 bp, unidentified
  misc_feature 1..225: note = bacterial strain Ascusb_146 encodes 16S rRNA
  source 1..225: mol_type = genomic DNA
agagtttgatcatggctcaggatgaacgctggcggcgtgcttaatacatgcaagtcgaacgaagcacttacgacagatcccctcggggtgaagatgtttgtgacttagtggcggacgggtgagtaacgcgtgggtaacctgcctcatgcagggggataacagttagaaatgactgctaataccgcataagcgcacggattcgcatgtttctgtgtgaaaagattt

SEQ ID NO: 3092 - DNA, 225 bp, unidentified
  misc_feature 1..225: note = bacterial strain Ascusb_751 encodes 16S rRNA
  source 1..225: mol_type = genomic DNA
agagtttgatcatggctcaggatgaacgctagctacaggcttaacacatgcaagtcgaggggcagcaggatcttagcttgctaagattgctggcgaccggcgcacgggtgagtaacgcgtatccaaccttccccttagtagggcatagcccgatgaaaatcggattaataccctatgttttccaatgaggacatctgagctggaacaaagattcatcgctaaggg

SEQ ID NO: 3093 - DNA, 225 bp, unidentified
  misc_feature 1..225: note = bacterial strain Ascusb_5320 encodes 16S rRNA
  source 1..225: mol_type = genomic DNA
agagtttgatcatggctcaggatgaacgctggcggcgtgcctaatacatgcaagtcgaacgggggcacttgtgccctagtggcgaacgggtgagtaacacgtaggtaacctgcccttaagcttgggatacccagaggaaactttggctaataccggataacaacagatgaggcatctcaactgtttgaaaggccctttacggggtcacttaaggatggacctgcg

SEQ ID NO: 3094 - DNA, 225 bp, unidentified
  misc_feature 1..225: note = bacterial strain Ascusb_6606 encodes 16S rRNA
  source 1..225: mol_type = genomic DNA
agagtttgatcctggctcaggatgaacgctggcggcgtgcctaacacatgcaagtcgaacggagatatgcggaatgcggacttgtccaaatgaaacatatgcttagtggcggacgggtgagtaacgcgtggataacctgcctttttctgggggatagcagttggaaacgactggtaataccgcatgagcttgtccctgggcatccaggggtgaggaaagatttat

SEQ ID NO: 3095 - DNA, 225 bp, unidentified
  misc_feature 1..225: note = bacterial strain Ascusb_4938 encodes 16S rRNA
  source 1..225: mol_type = genomic DNA
agagtttgatcatggctcaggatgaacgctagctacaggcttaacacatgcaagtcgaggggcagcattatcgaagcttgctttgatagatggcgaccggcgcacgggtgcgtaacacgtatccaatctacccatggctcagggatagcctttcgaaagaaagattaatacctgatggtcttacatggagacatctcctagtaagtaaagatttatcggcgatgg

SEQ ID NO: 3096 - DNA, 225 bp, unidentified
  misc_feature 1..225: note = bacterial strain Ascusb_20566 encodes 16S rRNA
  source 1..225: mol_type = genomic DNA
agagtttgatcatggctcaggattaacgctggcggcatgcctaagacatgcaagtcgaacgaagtgccccattgagaatggaatgaagttggagagcttgctcaaagatggaatgaagtaggatttggattctgcacttagtggcgaacgggtgagtaacacgtgggttatctgccttcaagctggggataacagttagaaatgactgctaataccgaatgtgct

SEQ ID NO: 3097 - DNA, 225 bp, unidentified
  misc_feature 1..225: note = bacterial strain Ascusb_2651 encodes 16S rRNA
  source 1..225: mol_type = genomic DNA
agagtttgatcctggctcagaacgaacgctggcggcgcgtcttaagcatgcaagtcgagcgggagatggtagcttgctaccattgagagcggcggactggtgagtaacgcgtgggtgacgtaccctccggacggggatagctcctagaaataggaggtaataccggatacggtgcctgctgtcagagggcaggcaggaaaggttcttttgaaccgccgggggagc

SEQ ID NO: 3098 - DNA, 225 bp, unidentified
  misc_feature 1..225: note = bacterial strain Ascusb_1481 encodes 16S rRNA
  source 1..225: mol_type = genomic DNA
agagtttgatcctggctcaggacgaacgctggcggcgtgcctaacacatgcaagtcgaacgggcgaagggagcttgctcccggagctagtggcgaacgggtgagtaacgcgtgagcaacctgcctttcagagggggacaacggtcggaaacgaccgctaataccgcatgatgcaattggaccgcatgatctgattgccaaagatttatcgctgaaagatgggctc

SEQ ID NO: 3099 - DNA, 225 bp, unidentified
  misc_feature 1..225: note = bacterial strain Ascusb_1461 encodes 16S rRNA
  source 1..225: mol_type = genomic DNA
agagtttgatcatggctcaggatgaacgctagctacaggcttaacacatgcaagtcgaggggcagcaggatttgtgcttgcacagattgctggcgaccggcgcacgggtgagtaacgcgtatccaaccttccccatagtagaggatagcccggcgaaagtcggattaatactctatgttgtacaacgaggacatctgaattgtaccaaagattcatcgctatggg

SEQ ID NO: 3100 - DNA, 225 bp, unidentified
  misc_feature 1..225: note = bacterial strain Ascusb_1633 encodes 16S rRNA
  source 1..225: mol_type = genomic DNA
agagtttgatcatggctcaggatgaacgctggcggcgtgcctaacacatgcaagtcgaacggaagataagcgcttcggagacttcggtcaatgtttgcttaactttagtggcggacgggtgagtaacgcgtggataacctgcctcatacagggggataacagttagaaatgactgctaataccgcataagcgcacggaatcgcatgtttctgtgtgaaaaactga

SEQ ID NO: 3101 - DNA, 225 bp, unidentified
  misc_feature 1..225: note = bacterial strain Ascusb_4091 encodes 16S rRNA
  source 1..225: mol_type = genomic DNA
agagtttgatcatggctcaggatgaacgctggcggcgtgcctaatacatgcaagtcgaacgggtgcagcaatgcattagtggcgaacgggtgagtaacacgttggtgacctgccccaaagatgggaatatcacctggaaacgggtggcaaaaccgaataagcttgaccgagttagagaaagtcaagtaaaagcgaaagctactttgggaggggcctgcggcccat

SEQ ID NO: 3102 - DNA, 225 bp, unidentified
  misc_feature 1..225: note = bacterial strain Ascusb_6431 encodes 16S rRNA
  source 1..225: mol_type = genomic DNA
agagtttgatcatggctcaggatgaacgctggcggcgtgcctaacacatgcaagtcgaacggagatttaacgctgatgagacttcggtcaattcttgttaaatcttagtggcggacgggtgagtaacgcgtgggcaacctgcctcgtactgggggataacagttggaaacgactgttaataccgcataagcgcacggtgtcgcatgacacagtgtgaaaaactcc

SEQ ID NO: 3103 - DNA, 225 bp, unidentified
  misc_feature 1..225: note = bacterial strain Ascusb_3827 encodes 16S rRNA
  source 1..225: mol_type = genomic DNA
agagtttgatcatggctcaggatgaacgctggcggcgtgcctaacacatgcaagtcgaacggagttatattggacggatcttcggagacagaagatataacttagtggcggacgggtgagtaacgcgtggagaacctggcccatacagggggacagcagctggaaacggctgataataccgcataagaccacgataccgcatggtattgaggtaaaagatttatc

SEQ ID NO: 3104 - DNA, 225 bp, unidentified
  misc_feature 1..225: note = bacterial strain Ascusb_6110 encodes 16S rRNA
  source 1..225: mol_type = genomic DNA
agagtttgatcatggctcaggacgaacgctggcggcgtgcttaacacatgcaagtcgagcggagacatatgacggaaagcttcggctggaagatatatgttttagcggcggacgggtgagtaacgcgtgagcaatctgtccttcacagggggataagataccgaaaggtgttctaataccgcatgagaccacaacgtcacatggcgaaggggtcaaaggagcaat

SEQ ID NO: 3105 - DNA, 225 bp, unidentified
  misc_feature 1..225: note = bacterial strain Ascusb_2817 encodes 16S rRNA
  source 1..225: mol_type = genomic DNA
agagtttgatcctggctcaggatgaacgctggcggcgtgcttaacacatgcaagtcgaacggagccaaaaggaagcttgctttctttgaagcttagtggcggacgggtgagtaacgcgtgagtaacctgcccttcagtggggaataacacagagaaatctgtgctaataccgcataatgtcttcttgccgcatgacaggaagaccaaaggatttattcgctgaag

SEQ ID NO: 3106 - DNA, 225 bp, unidentified
  misc_feature 1..225: note = bacterial strain Ascusb_1630 encodes 16S rRNA
  source 1..225: mol_type = genomic DNA
agagtttgatcatggctcaggatgaacgctagctacaggcttaacacatgcaagtcgtggggcagcatgaaggaagcttgcttcctttgatggcgaccggcgcacgggtgagtaacgcgtatccaaccttccccttactagaggatagcccggcgaaagtcggattaatactctatgttctccttagcaggcatctaacgaggagcaaagattcatcggtaaggg

SEQ ID NO: 3107 - DNA, 225 bp, unidentified
  misc_feature 1..225: note = bacterial strain Ascusb_7003 encodes 16S rRNA
  source 1..225: mol_type = genomic DNA
agagtttgatcatggctcaggatgaacgctagctacaggcttaacacatgcaagtcgaggggcagcatgattctagcttgctagaattgatggcgaccggcgcacgggtgagtaacgcgtatccaaccttccctatagtagaggatagcccggcgaaagtcggattaatactctatgttttccaatgaggacatctgagctggaataaaggtttaccgctatagg

SEQ ID NO: 3108 - DNA, 225 bp, unidentified
  misc_feature 1..225: note = bacterial strain Ascusb_17095 encodes 16S rRNA
  source 1..225: mol_type = genomic DNA
agagtttgatcctggctcaggataaacgctggcggcgcacataagacatgcaagtcgaacggaagccgttgtaatgatgttgacatggacagagaacttgttcgaagaaagtggatattgacttacaacaatgactttagtggcggactggtgagtaacgcgtgagcaacctgcctatcagaggggaataacagtgagaaatcattgctaataccgcatatgcca

SEQ ID NO: 3109 - DNA, 225 bp, unidentified
  misc_feature 1..225: note = bacterial strain Ascusb_5500 encodes 16S rRNA
  source 1..225: mol_type = genomic DNA
agagtttgatcctggctcagaacgaacgctggcggcgcgtcttaagcatgcaagtcgagcggcagcagcaatgcgagagcggcggacgggtgagtaacacgtgggtaatctgccctccagtcggggatagcctgtggaaacacaggataataccggatgcgatggtctgacacaagttggattaggaaaggggccaaggccccgctggaggatgagcccgcgtcc

SEQ ID NO: 3110 - DNA, 225 bp, unidentified
  misc_feature 1..225: note = bacterial strain Ascusb_6432 encodes 16S rRNA
  source 1..225: mol_type = genomic DNA
agagtttgatcatggctcaggatgaacgctagcggcaggcttaacacatgcaagtcgaggggcagcgggtgtagcaatacatgccggcgaccggcgaaagggtgagtaacgcgtgagcaacatgcccgtatgtgggggatagtcgatggaaacgtcgcgtaataccccgtaatatatggagctgcatggttccatattgaaagattcattgcatacggattggct

SEQ ID NO: 3111 - DNA, 225 bp, unidentified
  misc_feature 1..225: note = bacterial strain Ascusb_976 encodes 16S rRNA
  source 1..225: mol_type = genomic DNA
agagtttgatcatggctcaggatgaacgctggcggcgtgcttaacacatgcaagtcgaacggagtttagatgaagcttgcgattctaaacttagtggcggacgggtgagtaacgcgtgggtaacctgccttataccgggggataacacttagaaataggtgctaataccgcataagcgcacggagctgcatggctcagtgtgaaaaactccggtggtataagatg

SEQ ID NO: 3112 - DNA, 225 bp, unidentified
  misc_feature 1..225: note = bacterial strain Ascusb_3701 encodes 16S rRNA
  source 1..225: mol_type = genomic DNA
agagtttgatcatggctcagaacgaacgctggcggcgcgtcttaagcatgcaagtcggacggcaagatgagagcttgctcttatcctagagtggcggactggtgagtaacgcgtgggtgacgtaccctttagacggggatagcttttagaaataagagataataccggataagctctttattgtcagagggtaaagaggaaagcttcttttgaagcgctgaagga

SEQ ID NO: 3113 - DNA, 225 bp, unidentified
  misc_feature 1..225: note = bacterial strain Ascusb_5149 encodes 16S rRNA
  source 1..225: mol_type = genomic DNA
agagtttgatcatggctcaggacgaacgctggcggcgtgcttaacacatgcaagtcgaacgagaatctgtggaaagaggattcgtccaattgaagcagaggacagtggcggacgggtgagtaacgcgtgaggaacctgcctttcagagggggacaacagttggaaacgactgctaataccgcataacgcatttgtatcgcatggtacgaatgccaaagatttatc

SEQ ID NO: 3114 - DNA, 225 bp, unidentified
  misc_feature 1..225: note = bacterial strain Ascusb_14147 encodes 16S rRNA
  source 1..225: mol_type = genomic DNA
agagtttgatcctggctcaggatgaacgctggcggcgtgcttaacacatgcaagtcgaacggagtgtaaacgctgaagcgatttcggtcaattcttgtttatacttagtggcggacgggtgagtaacgcgtgggtaacctgccgtatgcagggggacaacagttggaaacgactgctaataccgcataagcgcacagtaccgcatggtatggtgtgaaaagattt

SEQ ID NO: 3115 - DNA, 225 bp, unidentified
  misc_feature 1..225: note = bacterial strain Ascusb_16442 encodes 16S rRNA
  source 1..225: mol_type = genomic DNA
agagtttgatcatggctcagaacgaacgctggtggcgtgtcttatacatgcaagtcgagcggggcagcaatgcccagcggcgaacgggtgagtaacgcgtaagcaatctgccccatatcaggaaatacccgtgccaacgcgcggttaatgtccaggagcgtggccttccgcatgggaggttgacaagagatttatcggtatgggatgagcttgcgtccgattagc

SEQ ID NO: 3116 - DNA, 225 bp, unidentified
  misc_feature 1..225: note = bacterial strain Ascusb_3921 encodes 16S rRNA
  source 1..225: mol_type = genomic DNA
agagtttgatcatggctcaggatgaacgctagctacaggcttaacacatgcaagtcgaggggcagcattatcgaagcttgctttgatagatggcgaccggcgcacgggtgcgtaacacgtatccaatctacccatggctcagggatagcctttcgaaagaaagattaatacctgatggtctgtgattgagacatctcggacacagtaaagatttatcggcgatgg

SEQ ID NO: 3117 - DNA, 225 bp, unidentified
  misc_feature 1..225: note = bacterial strain Ascusb_4280 encodes 16S rRNA
  source 1..225: mol_type = genomic DNA
agagtttgatcatggctcaggataaacgctggcggcgtgcctaatacatgcaagtcgatcgctggagttctagcttgctagagcgaaggagaggcgaacgggtgagtaatacataagcaacctgcccacgaagactgggataattcctggaaacggggactaataccggataggcagcgtgatcgcatgatcgtgctgttaaagattcaaagcactggtggatgg

SEQ ID NO: 3118 - DNA, 225 bp, unidentified
  misc_feature 1..225: note = bacterial strain Ascusb_3898 encodes 16S rRNA
  source 1..225: mol_type = genomic DNA
agagtttgatcatggctcaggatgaacgctggcggcgtgcttaacacatgcaagtcgaacggagcttaccgaatgaagttttcggatggattttggtaagcttagtggcggacgggtgagtaacgcgtggggaacctgccccataccgggggacaacagttggaaacgactgctaataccgcataagcgcacggtgtggcatcacacagtgtgaaaaactccggt

SEQ ID NO: 3119 - DNA, 225 bp, unidentified
  misc_feature 1..225: note = bacterial strain Ascusb_719 encodes 16S rRNA
  source 1..225: mol_type = genomic DNA
agagtttgatcatggctcaggatgaacgctagctacaggcttaacacatgcaagtcgcggggcatcaggagagaagcttgcttttcttgctggcgaccggcgcacgggtgagtaacgcgtatccaaccttccccttagtagggcatagcccggcgaaagtcggattaataccctatgttgtccgacgaaggcatctgacttggaccaaagattcatcgctaaggg

SEQ ID NO: 3120 - DNA, 225 bp, unidentified
  misc_feature 1..225: note = bacterial strain Ascusb_7288 encodes 16S rRNA
  source 1..225: mol_type = genomic DNA
agagtttgatcctggctcaggataaacgctggcggcgcacataagacatgcaagtcgaacggaagtcgttgtaatgatgtggatatgaacagagaacttgttcaacgggaattgatattgacttacaacaatggctttagtggcggactggtgagtaacacgtaagcaacctgcctattagaggggaataacagtgagaaatcattgctaataccgcatatgcca

SEQ ID NO: 3121 - DNA, 225 bp, unidentified
  misc_feature 1..225: note = bacterial strain Ascusb_4534 encodes 16S rRNA
  source 1..225: mol_type = genomic DNA
agagtttgatcatggctcaggacgaacgctggcggcgtgcctaacacatgcaagtcgaacgaagcactttccttggagattcgtcgaagagggatttgacttagtggcggacgggtgagtaatacatgagcaacctgccctgaggagggggacaacagttggaaacgactgctaataccgcatgatgtatccgggaggcatctactggataccaaagatttatcg

SEQ ID NO: 3122 - DNA, 225 bp, unidentified
  misc_feature 1..225: note = bacterial strain Ascusb_8854 encodes 16S rRNA
  source 1..225: mol_type = genomic DNA
agagtttgatcatggctcaggacgaacgctggcggcgtgcttaacacatgcaagtcgaacggggataacgttggaagtccttcgggacggaagatgttattcgagtggcggacgggtgagtaacgcgtgagcaacctgtcccagacagggggataacacttggaaacaggtgctaataccgcataagaccacggcatcacatggtgctgaggtaaaaggagcaat

SEQ ID NO: 3123 - DNA, 225 bp, unidentified
  misc_feature 1..225: note = bacterial strain Ascusb_7633 encodes 16S rRNA
  source 1..225: mol_type = genomic DNA
agagtttgatcctggctcaggatgaacgctagctacaggcttaacacatgcaagtcgaggggcagcaggagattagcttgctaatcttgctggcgaccggcgcacgggtgagtaacgcgtatccaaccttccccttagtagggcatagcccggcgaaagtcggattaataccctatgttttccgtcgatgacatcagaagtggaataaagatttatcgctaaggg

SEQ ID NO: 3124 - DNA, 225 bp, unidentified
  misc_feature 1..225: note = bacterial strain Ascusb_1065 encodes 16S rRNA
  source 1..225: mol_type = genomic DNA
agagtttgatcatggctcaggatgaacgctggcggcgtgcctaatacatgcaagtcgatcgagggagacttagcttgctaagtcgaactagaggcgaacgggtgagtaatacataagcaacctgcccacgaagactgggataatccctggaaacggggactaataccggataggtaaccggaccgcatgatctggttattaaaggttaaaaacactggtggatgg

SEQ ID NO: 3125 - DNA, 225 bp, unidentified
  misc_feature 1..225: note = bacterial strain Ascusb_2707 encodes 16S rRNA
  source 1..225: mol_type = genomic DNA
agagtttgatcctggctcaggatgaacgctggcggcgtgcctaacacatgcaagtcgaacggagtgttttcttcggaggacacttagtggcggacgggtgagtaacgcgtgggtaatctgccttacacagggggacaacagttggaaacgactgctaataccgcataagcccacgggaccgcatggtcctgtgagaaaagattcatcggtgtaagatgagcccgc

SEQ ID NO: 3126 - DNA, 225 bp, unidentified
  misc_feature 1..225: note = bacterial strain Ascusb_2116 encodes 16S rRNA
  source 1..225: mol_type = genomic DNA
agagtttgatcatggctcaggatgaacgctggcggcgtgcttaacacatgcaagtcgaacgaagcatttggtttgatttcttcggaatgaagaccttgtgacttagtggcggacgggtgagtaacgcgtgggcaatctgccccataccgggggacaacagttggaaacgactgctaataccgcataagcgcacgaggccgcatggccgtgtgtgaaaaactccgg

SEQ ID NO: 3127 - DNA, 225 bp, unidentified
  misc_feature 1..225: note = bacterial strain Ascusb_2403 encodes 16S rRNA
  source 1..225: mol_type = genomic DNA
agagtttgatcatggctcaggatgaacgctggcggcgtgcttaacacatgcaagtcgaacgaagcattaagaattgatttcttcggattgattttctttttgacttagtggcggacgggtgagtaacgcgtgggtaacctgccgtatgcagggggacaacagttagaaatgactgctaataccgcataacccgctagtgccgcatggcacagacggaaaagattt

SEQ ID NO: 3128 - DNA, 225 bp, unidentified
  misc_feature 1..225: note = bacterial strain Ascusb_2502 encodes 16S rRNA
  source 1..225: mol_type = genomic DNA
agagtttgatcatggctcagaacgaacgctggcggcaggcctaaaacatgcaagttgaacggttacagcaatgtagcagtagcggacgggtgaggaacatatgggaacatgccttttggtgtggaataacatctggaaacgggtgataataccgcataagccctttgggggaaagatttatcgccggaagagtggcccatatcagattagctagttggttaggta

SEQ ID NO: 3129 - DNA, 225 bp, unidentified
  misc_feature 1..225: note = bacterial strain Ascusb_1934 encodes 16S rRNA
  source 1..225: mol_type = genomic DNA
agagtttgatcatggctcaggacgaacgctggcggcgtgcttaacacatgcaagtcgaacgaggattattgagcggaaggcttcggccggaaggttgataattcgagtggcggacgggtgagtaacgcgtgaacaatctgtcccagacagggggataacacttggaaacaggtgctaataccgcataagaccacagaatcgcatggtacaggggtaaaaggagca

SEQ ID NO: 3130 - DNA, 225 bp, unidentified
  misc_feature 1..225: note = bacterial strain Ascusb_589 encodes 16S rRNA
  source 1..225: mol_type = genomic DNA
agagtttgatcatggctcaggatgaacgctggcggcgtgcctaacacatgcaagtcgaacggtggtgattgatattttcggatggatatcaccatagtggcggacgggtgagtaacgcgtggataacctgcctcgtactggggaatagcagctggaaacggctggtaataccgcataagcgcacagtgccgcatgacacggtgtgaaaagatttatcggtacgag

SEQ ID NO: 3131 - DNA, 225 bp, unidentified
  misc_feature 1..225: note = bacterial strain Ascusb_253 encodes 16S rRNA
  source 1..225: mol_type = genomic DNA
agagtttgatcatggctcaggatgaacgctagcggcaggcttaacacatgcaagtcgaggggcagcaggcggtagcaatactgtgctggcgaccggcgcacgggtgcgtaacgcgtatgcaacctacccactacagggggataacggagggaaacttccactaatatcccatggtgttgttttcccgcatggggaggcaactaaagcttcggtggtagtggatgg

SEQ ID NO: 3132 - DNA, 225 bp, unidentified
  misc_feature 1..225: note = bacterial strain Ascusb_2188 encodes 16S rRNA
  source 1..225: mol_type = genomic DNA
agagtttgatcctggctcaggatgaacgctagcgacaggcctaacacatgcaagtcgaggggcagcgcgggagaagcttgcttttcctggcggcgaccggcgcacgggtgcgtaacaggtgtgcaatctgtccatagtcgggggatagcccagcgaaagctgaattaacactccatgtgaatcgaagccgcatgactttgatttgaaacgcaaggactatgggtg

SEQ ID NO: 3133 - DNA, 225 bp, unidentified
  misc_feature 1..225: note = bacterial strain Ascusb_1817 encodes 16S rRNA
  source 1..225: mol_type = genomic DNA
agagtttgatcatggctcaggatgaacgctggcggcgtgcctaatacatgcaagtcgagcgagaacttcagaagttgcgatttatcaagacggaagaagggaaagcggcggacgggtgagtaacgcgtaggcaacctgcccctggcagagggatagccattggaaacgatgattaaaacctcataacgctggaagcacacatgtgcaatcagccaaagatttatc

SEQ ID NO: 3134 - DNA, 225 bp, unidentified
  misc_feature 1..225: note = bacterial strain Ascusb_4452 encodes 16S rRNA
  source 1..225: mol_type = genomic DNA
agagtttgatcatggctcaggatgaacgctagctacaggcttaacacatgcaagtcgaggggcagcatgggtgttgcttgcaacacctgatggcgaccggcgcacgggtgagtaacgcgtatccaaccttccccatagtagggcatagcccggcgaaagtcggattaattccctatgttcttcacagcggacatctcatgtgaagcaaaggtccaccgctatggg

SEQ ID NO: 3135 - DNA, 225 bp, unidentified
  misc_feature 1..225: note = bacterial strain Ascusb_1137 encodes 16S rRNA
  source 1..225: mol_type = genomic DNA
agagtttgatcatggctcaggataaacgctggcggcgtgcctaatacatgcaagtcgatcgctggaattcaagcttgcttgaatgaaggagaggcgaacgggtgagtaatacataagcaacctgcccacgaagactgggataatccctggaaacggggactaataccggataggtaacatattcgcatgaagatgttattaaagattagaagcactggtggatgg

SEQ ID NO: 3136 - DNA, 225 bp, unidentified
  misc_feature 1..225: note = bacterial strain Ascusb_1464 encodes 16S rRNA
  source 1..225: mol_type = genomic DNA
agagtttgatcctggctcaggacaaacgctggcggcgtgcctaacacatgcaagtcgaacgaagcactgtggaaagagacttcggtcaattgaaactttgacttagtggcggacgggtgagtaatgcatgagcaacctgccctggagagggggacaacagctggaaacggctgctaataccgcatgatgttgcggggaggcatcttcctgcaaccaaagatttat

SEQ ID NO: 3137 - DNA, 225 bp, unidentified
  misc_feature 1..225: note = bacterial strain Ascusb_17456 encodes 16S rRNA
  source 1..225: mol_type = genomic DNA
agagtttgatcctggctcaggatgaacgctagctacaggcttaacacatgcaagtcgaggggaaacgattagaggtgcttgcaccactaaggcgtcgaccggcgcacgggtgagtaacgcgtatccaacctgccccacggtaaggaataatccgtagaaatgcggtctaataccttatgtgctccgaagaggacatctgatttggagtaaagatttatcgccatg

SEQ ID NO: 3138 - DNA, 225 bp, unidentified
  misc_feature 1..225: note = bacterial strain Ascusb_6358 encodes 16S rRNA
  source 1..225: mol_type = genomic DNA
agagtttgatcatggctcaggacgaacgctggcggcgtgcttaacacatgcaagtcgaacggggataaattggatgagagcttcggcaggaatttgatttatcctagtggcggacgggtgagtaacgcgtgagcaacctgtcccagacagggggataacacttggaaacaggtgctaataccgcataagaccacgggatcacatggttctgaggtaaaaggtgta

SEQ ID NO: 3139 - DNA, 225 bp, unidentified
  misc_feature 1..225: note = bacterial strain Ascusb_5583 encodes 16S rRNA
  source 1..225: mol_type = genomic DNA
agagtttgatcatggctcaggataaacgctggcggcgtgcttaacacatgcaagtcgaacggagtattcctcccgaggattgacgaagcttgcttctgattgactcaattggaatacttagtggcggacgggtgagtaacgcgtgggtaacctgcctcacacagggggataacagttggaaacgactgttaataccgcataagcgcacagtaccgcatggtacgg

SEQ ID NO: 3140 - DNA, 225 bp, unidentified
  misc_feature 1..225: note = bacterial strain Ascusb_7077 encodes 16S rRNA
  source 1..225: mol_type = genomic DNA
agagtttgatcatggctcaggatgaacgctagcggcaggcttaacacatgcaagtcgaggggcagcgcgggtagcaatacttggcggcgaccggcgaaagggtgagtaacgcgtgagcaacatacccgttggtgggggataggaggtggaaacgccttgtaataccccatacgatacgaagtggcatcacattgtattgaaagattcattgccaacggattggtt

SEQ ID NO: 3141 - DNA, 225 bp, unidentified
  misc_feature 1..225: note = bacterial strain Ascusb_19117 encodes 16S rRNA
  source 1..225: mol_type = genomic DNA
agagtttgatcatggctcagaacgaacgctggcggcgcgtcttaagcatgcaagtcgggcggcaaggatgtgcttgcacatccctagagcggcggactggtgagtaacgcgtgggtgacgcaccctccggacggggatagcctgcagaaatgcagggtaataccggatacggccatacgggctggagccgtatggggaaaggagcttcggctccgccgggggagc

SEQ ID NO: 3142 - DNA, 225 bp, unidentified
  misc_feature 1..225: note = bacterial strain Ascusb_1737 encodes 16S rRNA
  source 1..225: mol_type = genomic DNA
agagtttgatcctggctcaggacgaacgctggcggcgtgcttaacacatgcaagtcgaacggggattagttgatagagagcttcggcaggaaattgattaattcgagtggcggacgggtgagtaacgcgtgagcaacctgtcccagacagggggataacacttggaaacaggtgctaataccgcataagaccacgggatcacatggttccggggtaaaaggagca

SEQ ID NO: 3143 - DNA, 225 bp, unidentified
  misc_feature 1..225: note = bacterial strain Ascusb_1276 encodes 16S rRNA
  source 1..225: mol_type = genomic DNA
agagtttgatcatggctcaggatgaacgctagctacaggcttaacacatgcaagtcgaggggtaacatgattggagcttgctccgattgatgacgaccggcgcacgggtgagtaacgcgtatccaacctgccccatgctctgggataaccttccgaaagggagcctaataccggatgttgtgcgacgatggcatcagaattgcacgaaagattcatcggcatggg

SEQ ID NO: 3144 - DNA, 225 bp, unidentified
  misc_feature 1..225: note = bacterial strain Ascusb_944 encodes 16S rRNA
  source 1..225: mol_type = genomic DNA
agagtttgatcatggctcaggatgaacgctagcgggaggcttaacacatgcaagtcgaggggcagcgcgggtagcaatacctggcggcgaccggcggacgggtgagtaacacgtatgcaacctgccctgcacaggggaatagcccggagaaatccggattaatgccccatggtccactgggtccgcatggatgtggtggtaaagattcatcggtgcaggatgggc

SEQ ID NO: 3145 - DNA, 225 bp, unidentified
  misc_feature 1..225: note = bacterial strain Ascusb_1822 encodes 16S rRNA
  source 1..225: mol_type = genomic DNA
agagtttgatcatggctcaggattaacgctggcggcgtgcataacacattcaagtcgaacggatgatgaagcttcggtttcatcattagtggcggacgggtgagtaacgcgtgagcaatctgcccctgattgcgggataacagagagaaatttctgctaatacggcataacacatcgggaccgcatggttctggtgtcaaagattcattgatcagggatgagctc

SEQ ID NO: 3146 - DNA, 225 bp, unidentified
  misc_feature 1..225: note = bacterial strain Ascusb_12657 encodes 16S rRNA
  source 1..225: mol_type = genomic DNA
agagtttgatcatggctcaggacgaacgctggcggcgtgcttaacacatgcaagtcgaacgaggttatgtgaaggaagtcttcggatggaatttatgtaatcgagtggcggacgggtgagtaacgcgtgaggaacctgtcttctacagggggataacggtccgaaaggattgctaataccgcataagaccacggggccgcatggttttgaggtcaaaggagaaat

SEQ ID NO: 3147 - DNA, 225 bp, unidentified
  misc_feature 1..225: note = bacterial strain Ascusb_4724 encodes 16S rRNA
  source 1..225: mol_type = genomic DNA
agagtttgatcatggctcaggatgaacgctggcggcgtgcataacacattcaagtcgaacgaagcgtagggaacggagccttcgggcgaagagaactatgacttagtggcggacgggtgagtaacgcgtgagcaaccttcctgcctgtgagggataacacagggaaacttgtgctaataccgcatgacgtatggagaccgcatgatcatcataccaaagatatat

SEQ ID NO: 3148 - DNA, 225 bp, unidentified
  misc_feature 1..225: note = bacterial strain Ascusb_535 encodes 16S rRNA
  source 1..225: mol_type = genomic DNA
agagtttgatcatggctcaggatgaacgctggcggcgtgcctaatacatgcaagtcgaacgaagttacttcggtaacttagtggcgaacgggtgagtaacacatgaacaacctaccctgacgacagggataacagtttgaaaagactgctaatacctgataggtgtaacggggacatccctgatacattaaagttgggatacaacgcgacaggatgggttcatgt

SEQ ID NO: 3149 - DNA, 225 bp, unidentified
  misc_feature 1..225: note = bacterial strain Ascusb_1978 encodes 16S rRNA
  source 1..225: mol_type = genomic DNA
agagtttgatcatggctcaggatgaacgctggcggcgtgcttaacacatgcaagtcgaacgaagctcttttgttgatcccttcggggtgattcaaaagatgactgagtggcggacgggtgagtaacgcgtgggtaacctgccctatacagggggataacagttggaaacggctgctaataccgcataagcgcacaggaccgcatggtctggtgtgaaaaactccg

SEQ ID NO: 3150 - DNA, 225 bp, unidentified
  misc_feature 1..225: note = bacterial strain Ascusb_9134 encodes 16S rRNA
  source 1..225: mol_type = genomic DNA
agagtttgatcatggctcaggataaacgctggcggcgcacataagacatgcaagtcgaacggaagtcgtatataaacagaatgacgatttatctgaatgaagtttatatacaatggctttagtggcggactggtgagtaatacgtaagcaacctgcctattagaggggaacaacagttagaaatgactgctaataccgcatatgccataatggagacatctccat

SEQ ID NO: 3151 - DNA, 225 bp, unidentified
  misc_feature 1..225: note = bacterial strain Ascusb_1146 encodes 16S rRNA
  source 1..225: mol_type = genomic DNA
agagtttgatcatggctcaggatgaacgctggcggcgtgcctaacacatgcaagtcgaacggggttaagtgatatcttcggatggaccttaacttagtggcggacgggtgagtaacgcgtggataacctgcctcacactgggggatagcagctggaaacggctggtaataccgcataagaccacgatgccgcatggcaccggggtaaaagatttatcggtgtgag

SEQ ID NO: 3152 - DNA, 225 bp, unidentified
  misc_feature 1..225: note = bacterial strain Ascusb_83 encodes 16S rRNA
  source 1..225: mol_type = genomic DNA
agagtttgatcatggctcaggatgaacgctagctacaggcttaacacatgcaagtcgaggggcagcatgaagtttgcttgcaaactttgatggcgaccggcgcacgggtgagtaacgcgtatccaaccttccccttactagggaatagcccggcgaaagtcggattaatgccctatgttctcctttgcgggcatctaacgaggagcaaagattcatcggtaaggg

SEQ ID NO: 3153 - DNA, 225 bp, unidentified
  misc_feature 1..225: note = bacterial strain Ascusb_1697 encodes 16S rRNA
  source 1..225: mol_type = genomic DNA
agagtttgatcatggctcaggatgaacgctggcggcgtgcttaacacatgcaagtcgaacggagactgttgatgaagcggaagggcttgcccggaagtggaattgatagtcttagtggcggacgggtgagtaacgcgtgggtaacctacctcatacaggggaatagcagttggaaacgactgataaaaccgcataaaacggcagcagggcatcctgcaaccgtca

SEQ ID NO: 3154 - DNA, 225 bp, unidentified
  misc_feature 1..225: note = bacterial strain Ascusb_1213 encodes 16S rRNA
  source 1..225: mol_type = genomic DNA
agagtttgatcatggctcaggatgaacgctggcggcatgcctaacacatgcaagtcgaacggagttatgagatagcttgctattgagtaacttagtggcggacgggtgagtaacgcgtgagtaacctgcctctcagagggggataacgttctgaaaaggacgctaataccgcatataattacgaagtcgcatgattttgtaatgaaaggagcaatccgctgagag

SEQ ID NO: 3155 - DNA, 225 bp, unidentified
  misc_feature 1..225: note = bacterial strain Ascusb_919 encodes 16S rRNA
  source 1..225: mol_type = genomic DNA
agagtttgatcatggctcaggacgaacgctggcggcgtgcctaacacatgcaagtcgaacggaacgaaaagagcttgctcttggcgtttagtggcggacgggtgagtaacacgtgagtaacctgcctttcagaggggaataatgtctggaaacggacactaataccgcataatgtattttaaccgcatggttgagataccaaaggagcaatccgctgaaagatgg

SEQ ID NO: 3156 - DNA, 225 bp, unidentified
  misc_feature 1..225: note = bacterial strain Ascusb_1184 encodes 16S rRNA
  source 1..225: mol_type = genomic DNA
agagtttgatcatggctcaggatgaacgctagctacaggcttaacacatgcaagtcgaggggcagcgcggagtcagcttgctgactttggcggcgaccggcgaatgggtgagtaacgcgtatccaacctggcctatgctcatggatagcccttagaaatgaggattaatacatgatggtctcccttgatcgcctgagattgggagtaaaggcttgccggcatagg

SEQ ID NO: 3157 - DNA, 225 bp, unidentified
  misc_feature 1..225: note = bacterial strain Ascusb_1429 encodes 16S rRNA
  source 1..225: mol_type = genomic DNA
agagtttgatcctggctcaggatgaacgctagctacaggcttaacacatgcaagtcgaggggcatcagggagaaagcttgctttctttgctggcgaccggcgcacgggtgagtaacgcgtatccaaccttccccccagtagggcatagcccggcgaaagtcggattaataccctatgttgtgtcatgaggacatctgaataacaccaaagatttatcgctggggg

SEQ ID NO: 3158 - DNA, 225 bp, unidentified
  misc_feature 1..225: note = bacterial strain Ascusb_2648 encodes 16S rRNA
  source 1..225: mol_type = genomic DNA
agagtttgatcatggctcaggatgaacgctagctacaggcttaacacatgcaagtcgaggggtaacatgattggagcttgctccgattgatgacgaccggcgcacgggtgagtaacgcgtatccaacctgccccatgctcagggataaccttccgaaagggagcctaatacctgatgttgtgcgacgatggcatcagaattgcactaaagattcatcggcatggg

SEQ ID NO: 3159 - DNA, 225 bp, unidentified
  misc_feature 1..225: note = bacterial strain Ascusb_4927 encodes 16S rRNA
  source 1..225: mol_type = genomic DNA
agagtttgatcatggctcaggatgaacgctagctacaggcttaacacatgcaagtcgaggggcatcaggatcttagcttgctaagattgctggcgaccggcgcacgggtgagtaacgcgtatccaaccttccctgtagtaggggatagcccggagaaatccggattaataccctatgttattcaatgaggacatctgagctgaatcaaaggcttgccgctacagg

SEQ ID NO: 3160 - DNA, 225 bp, unidentified
  misc_feature 1..225: note = bacterial strain Ascusb_10064 encodes 16S rRNA
  source 1..225: mol_type = genomic DNA
agagtttgatcatggctcaggatgaacgctggcggcgtgcataacacattcaagtcgaacggtgaagtgccttcgggcatggatcagtggcggacgggtgagtaacgcgtgagcaacctgccatacagtgggggataacacagggaaacttgtgctaataccgcatgacacattgggatcgcatgtttctgatgtcaaagagcaattgctgtatgatgggctcgc

SEQ ID NO: 3161 - DNA, 225 bp, unidentified
  misc_feature 1..225: note = bacterial strain Ascusb_338 encodes 16S rRNA
  source 1..225: mol_type = genomic DNA
agagtttgatcctggctcaggatgaacgctggcggcgtgcttaacacatgcaagtcgaacgaggttatggcagcggaagttttcggatggaagcagccttaaccgagtggcggacgggtgagtaacgcgtggggaacctgccccattccgggggataccagttggaaacgactgttaataccgcataagcgcacggtatcgcatgatacagtgtgaaaaactccg

SEQ ID NO: 3162 - DNA, 225 bp, unidentified
  misc_feature 1..225: note = bacterial strain Ascusb_509 encodes 16S rRNA
  source 1..225: mol_type = genomic DNA
agagtttgatcatggctcaggatgaacgctggcggcgtgcttaacacatgcaagtcgaacgaagcaccggaccttcgggaccggtgactgagtggcggacgggtgagtaacgcgtgggtaacctgccctgtacagggggataacagttagaaatgactgctaataccgcataagcacacgagggggcatccctttgtgtgaaaaactccggtggtacaggatggg

SEQ ID NO: 3163 - DNA, 225 bp, unidentified
  misc_feature 1..225: note = bacterial strain Ascusb_1421 encodes 16S rRNA
  source 1..225: mol_type = genomic DNA
agagtttgatcatggctcaggatgaacgctggcggcgtgcctaacacatgcaagtcgagcgagatactgttgaacagagattcgtcaacgggatacagtggaaagcggcggacgggtgagtaacgcgtaggcaacctgccccttacacagggatagccattggaaacgatgattaaaacctgatgacacctgaggatgacatcttcctgaggtcaaagatttatc

SEQ ID NO: 3164 - DNA, 225 bp, unidentified
  misc_feature 1..225: note = bacterial strain Ascusb_10114 encodes 16S rRNA
  source 1..225: mol_type = genomic DNA
agagtttgatcctggctcaggatgaacgctggcggcgtgcttaacacatgcaagtcgaacggagtttaccgaatgaagttttcggatggattttgataaacttagtggcggacgggtgagtaacgcgtggggaacctgccccataccgggggacaacagttggaaacgactgctaataccgcataagcgcacggagcggcatcgctttgtgtgaaaaactccggt

SEQ ID NO: 3165 - DNA, 225 bp, unidentified
  misc_feature 1..225: note = bacterial strain Ascusb_4435 encodes 16S rRNA
  source 1..225: mol_type = genomic DNA
agagtttgatcatggctcagaacgaacgctggcggcaggcttaacacatgcaagttgagcgggaatggaaggtagcttgctatttttcatgagagcagcgcactggtgagtaacacgtgggaacatgccttttggtgggggacaacagttggaaacgactgctaataccgcataagccctaagggggaaagatttatcgccaaaagattggcccgcggaagatta

SEQ ID NO: 3166 - DNA, 225 bp, unidentified
  misc_feature 1..225: note = bacterial strain Ascusb_1422 encodes 16S rRNA
  source 1..225: mol_type = genomic DNA
agagtttgatcatggctcaggacgaacgctggcggcgtgcctaacacatgcaagtcgaacggagctaaagagcttgctttttagcttagtggcggacgggtgagtaatgcgtgagcaacctgcctgtcagtgggggataacttccggaaacggacgctaataccgcatatagtacataatccgcatggataagtgtatgaaaggagcaatccgctgatagatggg

SEQ ID NO: 3167 - DNA, 225 bp, unidentified
  misc_feature 1..225: note = bacterial strain Ascusb_1550 encodes 16S rRNA
  source 1..225: mol_type = genomic DNA
agagtttgatcctggctcaggatgaacgctggcggcgcgcctaacacatgcaagtcgaacggttaaagcaccttcgggtgtgtataaagtggcgaacggctgagtaacacgtgggcaacctgcccctcgcaccgggacagcctcgggaaaccgtggttaataccggatacgcccaggagaggacatcccctcctggggaaagccccgacggcgagggatgggccc

SEQ ID NO: 3168 - DNA, 225 bp, unidentified
  misc_feature 1..225: note = bacterial strain Ascusb_2641 encodes 16S rRNA
  source 1..225: mol_type = genomic DNA
agagtttgatcctggctcaggatgaacgctagcggcaggcttaacacatgcaagtcgaggggtaacagggagtagcaatactctgctgacgaccggcgcacgggtgcgtaacgcgtatgcaacctacctgtaacagggggataacggagggaaacttccactaataccccatattgttattctttcgcatgttaggataacgaaagcttcggtggttacggatgg

SEQ ID NO: 3169 - DNA, 225 bp, unidentified
  misc_feature 1..225: note = bacterial strain Ascusb_6650 encodes 16S rRNA
  source 1..225: mol_type = genomic DNA
agagtttgatcatggctcaggataaacgctggcggcgcacataagacatgcaagtcgaacggaagtcgttgtaatgatgtggacgcggacagagaacttgttcgaagaaagtgaaaattgacttacaacaatggctttagtggcggactggtgagtaacgcgtgagcaacctgcctgttagaggggaataacagtgagaaatcattgctaataccgcatatgcca

SEQ ID NO: 3170 - DNA, 225 bp, unidentified
  misc_feature 1..225: note = bacterial strain Ascusb_5433 encodes 16S rRNA
  source 1..225: mol_type = genomic DNA
agagtttgatcatggctcaggatgaacgctagctacaggcttaacacatgcaagtcgaggggcagcatggagtttgcttgcaaactctgatggcgaccggcgcacgggtgagtaacgcgtatccaacctgcccacggccagggaatagcccgctgaaaagcggattaatgccctatggcgtcctttgcagacatctaacgaggactaaaggtttaccggccatgg

SEQ ID NO: 3171 - DNA, 225 bp, unidentified
  misc_feature 1..225: note = bacterial strain Ascusb_7475 encodes 16S rRNA
  source 1..225: mol_type = genomic DNA
agagtttgatcatggctcagaacgaacgctggcggcgcgtcttaagcatgcaagtcgagcggtaagttatagcttgctataacctagagcggcggactggtgagtaacgcgtgggtgacgtacccttgtgacggggacagctcctagaaataggagataataccggatacgctgtatgttgtcagaggacatacaggaaaggttcttttgaatcgcacaaggagc

SEQ ID NO: 3172 - DNA, 225 bp, unidentified
  misc_feature 1..225: note = bacterial strain Ascusb_769 encodes 16S rRNA
  source 1..225: mol_type = genomic DNA
agagtttgatcatggctcaggacgaacgctggcggcgtgcctaacacatgcaagtcgaacggagtaagatccttcggggttttacttagtggcgaacgggtgagtaacgcgtgagcaacctgcctctttgagggggataacaaccggaaacggttgctaataccgcataagaccacactgtcgcatgacagagaggtcaaaggagcaatccgcagagagaggggc

SEQ ID NO: 3173 - DNA, 225 bp, unidentified
  misc_feature 1..225: note = bacterial strain Ascusb_4552 encodes 16S rRNA
  source 1..225: mol_type = genomic DNA
agagtttgatcctggctcaggatgaacgctagctacaggcttaacacatgcaagtcgaggggcagcatgtcggttgcttgcaaccgacgatggcgaccggcgcacgggtgagtaacgcgtatccaaccttccccttagtagggcatagcccggcgaaagtcggattaataccctatgttgttcgtcgaggacatctgaagtgaaccaaagatttatcgctaaggg

SEQ ID NO: 3174 - DNA, 225 bp, unidentified
  misc_feature 1..225: note = bacterial strain Ascusb_3428 encodes 16S rRNA
  source 1..225: mol_type = genomic DNA
agagtttgatcatggctcagaacgaacgctggcggcgcgtcttaagcatgcaagtcgagcgggattacctagcttgctaggtatgagagcggcggactggtgagtaacgcgtgggtgacgtacctttgtgatggggacagctcctagaaataggagataataccgaatacgctgcatattgtcagaggatatgcaggaaaggttcttttgaatcgcacagagagc

SEQ ID NO: 3175 - DNA, 225 bp, unidentified
  misc_feature 1..225: note = bacterial strain Ascusb_3220 encodes 16S rRNA
  source 1..225: mol_type = genomic DNA
agagtttgatcctggctcaggatgaacgctagcggcaggcttaacacatgcaagtcgaggggtaacagggagtagcaatactctgctgacgaccggcgcacgggtgcgtaacgcgtatgcaacctaccctgtacagggggataacggagagaaatttccactaatatcccatggtgtcgaggaaccgcatggtttttcgactaaagcttcggtggtacaggacgg

SEQ ID NO: 3176 - DNA, 225 bp, unidentified
  misc_feature 1..225: note = bacterial strain Ascusb_6702 encodes 16S rRNA
  source 1..225: mol_type = genomic DNA
agagtttgatcatggctcaggatgaacgctggcggcgtgcttaacacatgcaagtcgaacgaagctccatttaagatttcttcggaatgattttatggatgacttagtggcggacgggtgagtaacgcgtgaggaacctgccttgcagtggggaataacagttggaaacgactgctaataccgcataacacggagagatcgcatgttttctccgtcaaagattta

SEQ ID NO: 3177 - DNA, 225 bp, unidentified
  misc_feature 1..225: note = bacterial strain Ascusb_1552 encodes 16S rRNA
  source 1..225: mol_type = genomic DNA
agagtttgatcatggctcaggatgaacgctagctacaggcttaacacatgcaagtcgaggggcagcgagaggaaagcttgctttccttgtcggcgaccggcgcacgggtgagtaacgcgtatccaacctggcccttagtaggggatagcccggcgaaagtcggattaataccctatgttatcctttgaggacatctgatttggattaaaggtttaccgctaaggg

SEQ ID NO: 3178 - DNA, 225 bp, unidentified
  misc_feature 1..225: note = bacterial strain Ascusb_3554 encodes 16S rRNA
  source 1..225: mol_type = genomic DNA
agagtttgatcatggctcaggattaacgctggcggcatgcctaatacatgcaagtcgaatgggtagcttgctatccatggcgaacgggtgagtaacacgtaggtaacctgtctttaagacgaggataacctttggaaacgaaggataatactggataggtcgttatagatcacatgattaaacgattaaagattattatgtcacttagagaggggcctgcggcgc

SEQ ID NO: 3179 - DNA, 225 bp, unidentified
  misc_feature 1..225: note = bacterial strain Ascusb_3840 encodes 16S rRNA
  source 1..225: mol_type = genomic DNA
agagtttgatcatggctcaggacgaacgctggcggcgtgcttaacacatgcaagtcgaacggggataacgttggaagtccttcgggacggaagatgttattcgagtggcggacgggtgagtaacgcgtgagcaatctgtcccagacagggggataacacttggaaacaggtgctaataccgcataagaccacggcatcgcatggtgcgggggtaaaaggtgcgaa

SEQ ID NO: 3180 - DNA, 225 bp, unidentified
  misc_feature 1..225: note = bacterial strain Ascusb_56 encodes 16S rRNA
  source 1..225: mol_type = genomic DNA
agagtttgatcatggctcaggatgaacgctagctacaggcttaacacatgcaagtcgaggggtaacgtgaggaaagcttgctttccttgacgacgaccggcgcacgggtgagtaacgcgtatccaacctgccccagagtcagggataaccttccgaaagggagcctaatacctgatgtagtgcgatgatggcatcagagtttcactaaagatttatcgctctggg

SEQ ID NO: 3181 - DNA, 225 bp, unidentified
  misc_feature 1..225: note = bacterial strain Ascusb_1028 encodes 16S rRNA
  source 1..225: mol_type = genomic DNA
agagtttgatcatggctcaggacgaacgctggcggcacgcttaacacatgcaagtcgaacggagttgaggaggtgcttgcaccatctcaacttagtggcggacgggtgagtaacacgtgagcaacctgcctttgagagtggaatagcttctggaaacggatggtaataccgcatgaaattatctgaccgcatgatcggataatcaaagatttatcgctcaaagat

SEQ ID NO: 3182 - DNA, 225 bp, unidentified
  misc_feature 1..225: note = bacterial strain Ascusb_10113 encodes 16S rRNA
  source 1..225: mol_type = genomic DNA
agagtttgatcctggctcaggatgaatgctggcggcgtgcctaatacatgcaagtcgagcggtaacagggcttcaccgtttccttgacacacctagcgcattatcgtaggtggagagattcgagggaacagtgaagctgctgacgagcggcggacggctgagtaacgcgtgggaacggaccccaaactgagggataactagtcgaaagattagctaataccgcat

SEQ ID NO: 3183 - DNA, 225 bp, unidentified
  misc_feature 1..225: note = bacterial strain Ascusb_2509 encodes 16S rRNA
  source 1..225: mol_type = genomic DNA
agagtttgatcctggctcaggatgaacgctggcggcgtgcttaacacatgcaagtcgaacgaggaataattgatgagatcttcggatggatttgattattccgagtggcggacgggtgagtaacgcgtgggtaacctgccccatacagggggacaacagagggaaacttctgctaataccgcataagcggatcggatggcatcgtccggtccggaaagctccggc

SEQ ID NO: 3184 - DNA, 225 bp, unidentified
  misc_feature 1..225: note = bacterial strain Ascusb_2670 encodes 16S rRNA
  source 1..225: mol_type = genomic DNA
agagtttgatcctggctcagaacgaacgctggcggcgcgtcttaagcatgcaagtcgagcggtaagattggtgcttgcactaatcctagagcggcggactggtgagtaacgcgtgggtgacgtacctttgtgacggggacagctcctagaaataggagataataccggatacgctgcagcatgtcagaggtgctgcaggaaaggatcttttgattcgcacagaga

SEQ ID NO: 3185 - DNA, 225 bp, unidentified
  misc_feature 1..225: note = bacterial strain Ascusb_5570 encodes 16S rRNA
  source 1..225: mol_type = genomic DNA
agagtttgatcatggctcaggatgaacgctagcggcaggcttaacacatgcaagtcgaggggcatcgcgggtagcaatacctggcggcgaccggcggaagggtgagtaacgcgtgagcaacatgccctgtggagggggatagtcactggaaacggtgcgtaataccccgtaacaacaggagaggcatctctccagtttaaaagattcattgtcacaggattggct

SEQ ID NO: 3186 - DNA, 225 bp, unidentified
  misc_feature 1..225: note = bacterial strain Ascusb_9039 encodes 16S rRNA
  source 1..225: mol_type = genomic DNA
agagtttgatcatggctcaggatgaacgctagctacaggcttaacacatgcaagtcgaggggcagcatgatcgaagcttgctttgattgatggcgaccggcgcacgggtgagtaacgcgtatccaaccttccctatagtagaggatagcccggcgaaagtcggattaatactctatgttttccaatgaggacatctgagctggaacaaaggttcaccgctatagg

SEQ ID NO: 3187 - DNA, 225 bp, unidentified
  misc_feature 1..225: note = bacterial strain Ascusb_3892 encodes 16S rRNA
  source 1..225: mol_type = genomic DNA
agagtttgatcatggctcaggatgaacgctggcggcgtgcttaacacatgcaagtcgaacggaactgcttttgaagatttccttcgggaatgattcagttgtagtttagtggcggacgggtgagtaacgcgtgagtaacctgcccttgagagggggataacgttctgaaaaggacgctaataccgcataacgctattgaatcgcatggtttaatagccaaaactc

SEQ ID NO: 3188 - DNA, 225 bp, unidentified
  misc_feature 1..225: note = bacterial strain Ascusb_1686 encodes 16S rRNA
  source 1..225: mol_type = genomic DNA
agagtttgatcatggctcaggatgaacgctagcggcaggcttaacacatgcaagtcgaggggcagcgtggtgtagcaatacaccgacggcgaccggcggaagggtgagtaacgcgtgagcaacatgccaccttcagggggatagtcattggaaacgatgcgtaataccccgtatgcatagaccccacatgggatttatgtgaaagatttatcgggaggtgattgg

SEQ ID NO: 3189 - DNA, 225 bp, unidentified
  misc_feature 1..225: note = bacterial strain Ascusb_1874 encodes 16S rRNA
  source 1..225: mol_type = genomic DNA
agagtttgatcatggctcaggacgaacgctggcggcatgcctaacacatgcaagtcgaacggagttaagagagcttgctcttttaacttagtggcggacgggtgagtaacgcgtgagcaatctgcctttcagtggggaataatgttctgaaaagagcactaataccgcataacgtataatcgccgcatgacggatataccaaagatttatcgctgagagatgagc

SEQ ID NO: 3190 - DNA, 225 bp, unidentified
  misc_feature 1..225: note = bacterial strain Ascusb_3198 encodes 16S rRNA
  source 1..225: mol_type = genomic DNA
agagtttgatcctggctcaggacgaacgctggcggcgtgcttaacacatgcaagtcgaacggggattacggaacggaaggcttcggccggaagaactgtaattccagtggcggacgggtgagtaacgcgtgaacaatctgtcccagacagggggataacacttggaaacaggtgctaataccgcataagaccacagggccgcatggtccaggggtaaaacgggca

SEQ ID NO: 3191 - DNA, 225 bp, unidentified
  misc_feature 1..225: note = bacterial strain Ascusb_3630 encodes 16S rRNA
  source 1..225: mol_type = genomic DNA
agagtttgatcctggctcaggatgaacgctagctacaggcttaacacatgcaagtcgaggggcagcaggattctagcttgctagaattgctggcgaccggcgcacgggtgagtaacgcgtatccaacctggcccttagtagaggatagcccggcgaaagtcggattaatactctatgttctccaatgcgggcatctaatttggagcaaagatttatcgctatggg

SEQ ID NO: 3192 - DNA, 225 bp, unidentified
  misc_feature 1..225: note = bacterial strain Ascusb_4772 encodes 16S rRNA
  source 1..225: mol_type = genomic DNA
agagtttgatcatggctcaggatgaacgctggcggcgtgcctaatacatgcaagtcgaacgagggtgcttgcaccctagtggcgaacgggtgagtaacacgtaggtaacctgcccttaagcttgggatacccagaggaaactttggctaataccggataacaacagagaaggcatcttctttgcttaaaaggccctttcgggtcacttaaggatggacctgcggc

SEQ ID NO: 3193 - DNA, 225 bp, unidentified
  misc_feature 1..225: note = bacterial strain Ascusb_7910 encodes 16S rRNA
  source 1..225: mol_type = genomic DNA
agagtttgatcctggctcaggatgaacgctagcgacaggcctaacacatgcaagtcgaggggcagcgggattgaagcttgctttaattgccggcgaccggcgcacgggtgcgtaacaggtgtgcaatctgtccatagtcggggaatagcccagcgaaagttggattaatgctccatgtgaatcgagaccgcatgattttgatttgaaacgtaaggactatgggtg

SEQ ID NO: 3194 - DNA, 225 bp, unidentified
  misc_feature 1..225: note = bacterial strain Ascusb_344 encodes 16S rRNA
  source 1..225: mol_type = genomic DNA
agagtttgatcatggctcaggatgaacgctagctacaggcttaacacatgcaagtcgagcgggactctttcgggagtctagcggcagacgggtgagtaacacgtatccaacctttcccttactcgggcatagcctctggaaacggagagtaattcccgatgtggtgcacgaatagcattttttgcgcacgaaagattcatcggtaaggggtggggatgcgttcca

SEQ ID NO: 3195 - DNA, 225 bp, unidentified
  misc_feature 1..225: note = bacterial strain Ascusb_404 encodes 16S rRNA
  source 1..225: mol_type = genomic DNA
agagtttgatcctggctcaggatgaacgctggcggcgcgcctaacacatgcaagtcgaacggttaaagcacctccgggtgtgtataaagtggcgaacggctgagtaacacgtgggcaacctgcccctcgctccgggacagcctcgggaaactgggagtaataccggatactccgccacccccgcatgggggaggcgggaaagcccttacggcgagggatgggccc

SEQ ID NO: 3196 - DNA, 225 bp, unidentified
  misc_feature 1..225: note = bacterial strain Ascusb_3670 encodes 16S rRNA
  source 1..225: mol_type = genomic DNA
agagtttgatcctggctcaggatgaacgctggcggcgtgcctaacacatgcaagtcgaacggaccttatctgaacagaggcttcggccaacgagattataaggttagtggcggacgggtgagtaacgcgtggagaacctgcccttcagagggggataacactcagaaatgggtgctaataccgcataagcgcacggtaccgcatggtaccgtgtgaaaaactcag

SEQ ID NO: 3197 - DNA, 225 bp, unidentified
  misc_feature 1..225: note = bacterial strain Ascusb_643 encodes 16S rRNA
  source 1..225: mol_type = genomic DNA
agagtttgatcctggctcaggacgaacgctggcggcgtgcctaacacatgcaagtcgagcggagacacgggaacggaaagcttcggccggaagatcccatgttttagcggcggacgggtgagtaacgcgtgagcaatctgtccttcacagggggataagataccgaaaggtgttctaataccgcataagaccacattcccgcatgggagaggggtcaaaggagca

SEQ ID NO: 3198 - DNA, 225 bp, unidentified
  misc_feature 1..225: note = bacterial strain Ascusb_6315 encodes 16S rRNA
  source 1..225: mol_type = genomic DNA
agagtttgatcatggctcaggatgaacgctagctacaggcttaacacatgcaagtcgaggggcatcatggagtcagcttgctgactttgatggcgaccggcgcacgggtgcgtaacacgtatccaatctgcccgttactcggggatagcctttcgaaagaaagattaatacccgatgttttccgtatgccgcatgacgtacggaacaaagattcatcggtaacgg

SEQ ID NO: 3199 - DNA, 225 bp, unidentified
  misc_feature 1..225: note = bacterial strain Ascusb_3449 encodes 16S rRNA
  source 1..225: mol_type = genomic DNA
agagtttgatcctggctcaggatgaacgctggcggcgtgcctaacacatgcaagtcgaacgaagctttttattcagagacttcggtcaatgagtaaaaatgacttagtggcggacgggtgagtaacgcgtgggcaacctgccctttactgggggacaacagttggaaacgactgctaataccgcataagcgcacagaaccgcatggtacagtgtgaaaagattta

SEQ ID NO: 3200 - DNA, 225 bp, unidentified
  misc_feature 1..225: note = bacterial strain Ascusb_1549 encodes 16S rRNA
  source 1..225: mol_type = genomic DNA
agagtttgatcatggctcaggatgaacgctagctacaggcttaacacatgcaagtcgaggggcagcatgacgatagcttgctattgtcgatggcgaccggcgcacgggtgagtaacgcgtatccaacctgcccattactcaggtatagcccagtgaaaactggattaatccctgatgtggtctcgtgcagacatctaagcgagactaaagtttcaacggtaatgg

SEQ ID NO: 3201 - DNA, 225 bp, unidentified
  misc_feature 1..225: note = bacterial strain Ascusb_6808 encodes 16S rRNA
  source 1..225: mol_type = genomic DNA
agagtttgatcatggctcaggacgaacgctggcggcgtgcctaacacatgcaagtcgagcggggattattgtgatgagagcttcggcaggattcgtggtaattctagcggcggacgggtgagtaacgcgtgaacaatctgtcccggacagggggataacacttggaaacaggtgctaataccgcataagaccacaggatggcatcgtccaggggtcaaaggagaa

SEQ ID NO: 3202 - DNA, 225 bp, unidentified
  misc_feature 1..225: note = bacterial strain Ascusb_8516 encodes 16S rRNA
  source 1..225: mol_type = genomic DNA
agagtttgatcatggctcaggatgaacgctggcggcatgcctaagacatgcaagtcgaacgaggtggcccaatgaaggtggagtgcttgcacaaagctggatttggattcccacctagtggcagacgggtgagtaacacgtgggtgacctacctttaagttggggataacagttggaaacgattgctaataccgaatgtgacataactgtcgtggttatgttgaa

SEQ ID NO: 3203 - DNA, 225 bp, unidentified
  misc_feature 1..225: note = bacterial strain Ascusb_3080 encodes 16S rRNA
  source 1..225: mol_type = genomic DNA
agagtttgatcatggctcaggatgaacgctagcggcaggcttaacacatgcaagtcgaggggcagcgcggaggtagcaatacttctggcggcgaccggcgcaagggtgcgtaacgcgtgagcaacatacccgtatcagggggataagcgatggaaacgtcgtctaataccgcataacaacagagaagacatcttttttgtttgaaagattcgtcggatacggatt

SEQ ID NO: 3204 - DNA, 225 bp, unidentified
  misc_feature 1..225: note = bacterial strain Ascusb_4528 encodes 16S rRNA
  source 1..225: mol_type = genomic DNA
agagtttgatcctggctcaggatgaacgctggcggcgtgcttaacacatgcaagtcgaacggagttttgatgtgagcggaaagtagcttgctatggactaatcttttcaaaacttagtggcggacgggtgagtaacgcgtgggtaacctgccctgtacagggggataacagttggaaacgactgctaacaccgcataacatcgcgagggcgcatgaccttgcgat

SEQ ID NO: 3205 - DNA, 225 bp, unidentified
  misc_feature 1..225: note = bacterial strain Ascusb_3764 encodes 16S rRNA
  source 1..225: mol_type = genomic DNA
agagtttgatcctggctcaggataaacgctggcggcgtgcgtaacacatgcaagttgagcgacgacgtttctgaagtggagacatggaagggcgagcggagcagcggacgggtgagtacaacatgagaagctgtcctgaagtgggggacaacgtctggaaacggacgctaataccccataggccgagaggttaaagccgcaaggcgctttaggaggtgctcgtgt

SEQ ID NO: 3206 - DNA, 225 bp, unidentified
  misc_feature 1..225: note = bacterial strain Ascusb_1411 encodes 16S rRNA
  source 1..225: mol_type = genomic DNA
agagtttgatcatggctcaggatgaacgctagctacaggcttaacacatgcaagtcgaggggcagcatgtcgtgtgcttgcacacgatgatggcgaccggcgcacgggtgagtaacgcgtatccaaccttccctggggtccggaatagcccggtgaaaaccggattaatgccggatgtcgtgcgatgatggcatcagagttgcacgaaaggcttgccgcctcggg

SEQ ID NO: 3207 - DNA, 225 bp, unidentified
  misc_feature 1..225: note = bacterial strain Ascusb_1278 encodes 16S rRNA
  source 1..225: mol_type = genomic DNA
agagtttgatcatggctcaggatgaacgctggcggcatgcctaatacatgcaagtcgaacggaaaccttcgggtttcagtggcgaacgggtgagtaacacgtaggtaacctggccatgtacccgggataatttctggaaacggaaactaaaaccggataggcaggagggaggcatcttccccctgttaaaggagcctcaaagctctggacatggatggacctgcg

SEQ ID NO: 3208 - DNA, 225 bp, unidentified
  misc_feature 1..225: note = bacterial strain Ascusb_4041 encodes 16S rRNA
  source 1..225: mol_type = genomic DNA
agagtttgatcatggctcaggacgaacgctggcggcgtgcttaacacatgcaagtcgaacgaggttattttgatgaaatcttcggatgaaattgaaataaccgagtggcggacgggtgagtaacgcgtgagcaacctgtcttctacagggggataacgctccgaaaggagtgctaataccgcataagaccacggagccgcatggttttggggtcaaaggagaaat

SEQ ID NO: 3209 - DNA, 225 bp, unidentified
  misc_feature 1..225: note = bacterial strain Ascusb_3176 encodes 16S rRNA
  source 1..225: mol_type = genomic DNA
agagtttgatcatggctcaggatgaacgctggcggcgtgcttaacacatgcaagtcgaacgaagcattgttgatgaagttttcggatggaatcaactttgactgagtggcggacgggtgagtaacgcgtgggtaacctgccctgtacagggggataacagttagaaatgactgctaaaaccgcataagcgcacggaaaggcatctttcagtgtgaaaaactccgg

SEQ ID NO: 3210 - DNA, 225 bp, unidentified
  misc_feature 1..225: note = bacterial strain Ascusb_4736 encodes 16S rRNA
  source 1..225: mol_type = genomic DNA
agagtttgatcatggctcaggatgaacgctagctacaggcttaacacatgcaagtcgtggggcagcgtgagggaagcttgcttcccttgacggcgaccggcgcacgggtgagtaacgcgtatccaacctgccatatactcggggatagcccggtgaaaaccgaattaatacccgatgttgtccttagcagacatctaacgaggaccaaagcttcggcggtatatg

SEQ ID NO: 3211 - DNA, 225 bp, unidentified
  misc_feature 1..225: note = bacterial strain Ascusb_2680 encodes 16S rRNA
  source 1..225: mol_type = genomic DNA
agagtttgatcatggctcaggatgaacgctggcggcgtgcttaacacatgcaagtcgagcgaagcatggttgatgttttcggacggatatcgtgactgagcggcggacgggtgagtaacgcgtgggtaacctgcctcacacaggggaataacagttagaaatgactgctaatgccgcataagcgcacgggaccgcatggtcctgtgtgaaaaactccggtggtgt

SEQ ID NO: 3212 - DNA, 225 bp, unidentified
  misc_feature 1..225: note = bacterial strain Ascusb_5145 encodes 16S rRNA
  source 1..225: mol_type = genomic DNA
agagtttgatcatggctcaggacgaacgctggcggcgtgcttaacacatgcaagtcgaacggggatatccgagcggaaggcttcggccggaaggttggatattccagtggcggacgggtgagtaacgcgtgagcaacctgtcccagacagggggataacacttggaaacaggtgctaataccgcataagaccacggggtcacatggcactgaggtaaaaggagga

SEQ ID NO: 3213 - DNA, 225 bp, unidentified
  misc_feature 1..225: note = bacterial strain Ascusb_5705 encodes 16S rRNA
  source 1..225: mol_type = genomic DNA
agagtttgatcatggctcaggatgaacgctagctacaggcttaacacatgcaagtcgaggggcagcattatcgaagcttgctttgatagatggcgaccggcgcacgggtgcgtaacacgtatccaatctacccatggctcagggatagcctttcgaaagaaagattaatacctgatggtctcacatgaagacatctttttgtgagtaaagatttatcggcgatgg

SEQ ID NO: 3214 - DNA, 225 bp, unidentified
  misc_feature 1..225: note = bacterial strain Ascusb_16569 encodes 16S rRNA
  source 1..225: mol_type = genomic DNA
agagtttgatcatggctcaggattaacgctggcggcatgcctaagacatgcaagtcgtacgaggaagcccattgaagttggagtgcttgcacaaagatggatttggtttacttcctagtggcggacgggtgagtaacacgtgggtaatctgcctttaagttggggacaacagttggaaacgattgctaataccgaatacgatttagaaatgatttttctatattg

SEQ ID NO: 3215 - DNA, 225 bp, unidentified
  misc_feature 1..225: note = bacterial strain Ascusb_699 encodes 16S rRNA
  source 1..225: mol_type = genomic DNA
agagtttgatcctggctcaggatgaacgctggcggcgtgcctaacacatgcaagtcgaacgaagcatactccttcgggggtatgactgagtggcggacgggtgagtaacgcgtgggtaacctgccctctacagggggacaacagttagaaatgactgctaataccgcatgagcgcacagggaggcatcttcccgtgtgaaaaactatcggtggtagaggatgggc

SEQ ID NO: 3216 - DNA, 225 bp, unidentified
  misc_feature 1..225: note = bacterial strain Ascusb_6601 encodes 16S rRNA
  source 1..225: mol_type = genomic DNA
agagtttgatcatggctcagattgaacgctggcggcaggcttaatacatgcaagtcgaacggtagcagcaggaaggcttgcctttctggctgacgagtggcggacgggtgagtaatacctgggaaactgcctataagagggggacaacacctggaaacgggtgctaataccgcataagccctgaggggaaaaggatgggaaaccatgcgcttatagatgtgccca

SEQ ID NO: 3217 - DNA, 225 bp, unidentified
  misc_feature 1..225: note = bacterial strain Ascusb_20546 encodes 16S rRNA
  source 1..225: mol_type = genomic DNA
agagtttgatcctggctcaggatgaacgctggcggcgtgcctaacacatgcaagtcgaacgaagcatacgggacggagattcgtcgaagccctgtatgacttagtggcggacgggtgagtaatgtatgagcaacctgcctttcagagggggacaacagttggaaacgactgctaataccgcataacattaccgggtggcatcacctggtaatcaaaggagcaatc

SEQ ID NO: 3218 - DNA, 225 bp, unidentified
  misc_feature 1..225: note = bacterial strain Ascusb_5478 encodes 16S rRNA
  source 1..225: mol_type = genomic DNA
agagtttgatcctggctcaggacgaacgctggcggcgtgcttaacacatgcaagtcgaacgaggctgtattgggagcttgcttttgatacagccgagtggcggacgggtgagtaacgcgtgagcaacctgtctcatacagggggataacgcaccgaaaggtgtgctaataccgcataagaccacagcctcgcatgggggaggggtcaaaggagcgatccggtatg

SEQ ID NO: 3219 - DNA, 225 bp, unidentified
  misc_feature 1..225: note = bacterial strain Ascusb_5581 encodes 16S rRNA
  source 1..225: mol_type = genomic DNA
agagtttgatcctggctcaggatgaacgctagctacaggcttaacacatgcaagtcgaggggcagcgggaaggaagcttgctttctttgccggcgaccggcgcacgggtgagtaacgcgtatccaacctgcccgcggctcagggatagcctcgtgaaaacgagattaatacctgatggtcttgttggttgacatcaactggcaagtaaagatttatcggcagcgg

SEQ ID NO: 3220 - DNA, 225 bp, unidentified
  misc_feature 1..225: note = bacterial strain Ascusb_1808 encodes 16S rRNA
  source 1..225: mol_type = genomic DNA
agagtttgatcctggctcaggatgaacgctggcggcgtgcctaacacatgcaagtcgaacggggtattgtggaaagcggcttcggccaatggaagcgatacttagtggcggacgggtgagtaacgcgtgagcaacctgcctctgaccgggggatagcagctggaaacggctggtaataccgcataagcccacagcaccgcatggtgcagggggaaaaactccggt

SEQ ID NO: 3221 - DNA, 225 bp, unidentified
  misc_feature 1..225: note = bacterial strain Ascusb_1327 encodes 16S rRNA
  source 1..225: mol_type = genomic DNA
agagtttgatcatggctcaggatgaacgctggcggcgtgcttaacacatgcaagtcgaacgaagccaaaaggaagcttgctttctttgaagcttagtggcggacgggtgagtaacgcgtgaggaacctgcccttcagtggggaataacagccggaaacgactgctaataccgcataacgtcgagagaccgcatgatctttcgaccaaaggatttattcgctgaag

SEQ ID NO: 3222 - DNA, 225 bp, unidentified
  misc_feature 1..225: note = bacterial strain Ascusb_3539 encodes 16S rRNA
  source 1..225: mol_type = genomic DNA
agagtttgatcatggctcaggatgaacgctggcggcgtgcttaacacatgcaagtcgaacgggaatcactttttagcttgctaagttgtgattctagtggcggacgggtgagtaacgcgtgggtaacctgccttataccgggggacaacagttggaaacgactgctaataccgcataagcgcacagtatcgcatgatacagtgtgaaaaactccggtggtataag

SEQ ID NO: 3223 - DNA, 225 bp, unidentified
  misc_feature 1..225: note = bacterial strain Ascusb_2161 encodes 16S rRNA
  source 1..225: mol_type = genomic DNA
agagtttgatcctggctcagaacgaacgctggcggcaggcctaacacatgcaagttgaacgggattgacggatagcttgctatttgtcatgagagtagcgcactggtgagtaacacgtgggaacataccttttagtgggggacaacagggggaaacttctgctaataccgcataaaccctgagggggaaaggagcaattcgctaaaagattggcccgcggaagat

SEQ ID NO: 3224 - DNA, 225 bp, unidentified
  misc_feature 1..225: note = bacterial strain Ascusb_3872 encodes 16S rRNA
  source 1..225: mol_type = genomic DNA
agagtttgatcatggctcaggatgaacgctggcggcgtgcctaacacatgcaagtcgaacgaagcacttctaccggagattcgtcgaaggtggatttgacttagtggcggacgggtgagtaatgtatgagcaacctgcctttcagtgggggacaacagttggaaacgactgctaataccgcataatgtacagaaggggcatcccttttgtaccaaaggagcaatt

SEQ ID NO: 3225 - DNA, 225 bp, unidentified
  misc_feature 1..225: note = bacterial strain Ascusb_2515 encodes 16S rRNA
  source 1..225: mol_type = genomic DNA
agagtttgatcatggctcaggacgaacgctggcggcgtgcttaacacatgcaagtcgaacgagggtagatgggagcttgctcctggctatccgagtggcggacgggtgagtaacgcgtgaataatctgtctcatacagggggataacgcatcgaaagatgtgctaataccgcgtaggaccacgatggggcatcccattgaggtgaaaggagcaatccagtatgag

SEQ ID NO: 3226 - DNA, 225 bp, unidentified
  misc_feature 1..225: note = bacterial strain Ascusb_2366 encodes 16S rRNA
  source 1..225: mol_type = genomic DNA
agagtttgatcatggctcaggacgaacgctggcggcgtgcttaacacatgcaagtcgaacggggattagttggttgagagcttcggcaggatactgattaattctagtggcggacgggtgagtaacgcgtgagcaacctgtcccagacagggggataacacttggaaacaggtgctaataccgcataagaccacagcatcacatggtgcaggggtaaaaggagca

SEQ ID NO: 3227 - DNA, 225 bp, unidentified
  misc_feature 1..225: note = bacterial strain Ascusb_3500 encodes 16S rRNA
  source 1..225: mol_type = genomic DNA
agagtttgatcatggctcaggatgaacgctggcggcgtgcttaacacatgcaagtcgaacggaacttttctcccgacaaagcggagagcttgctcgaagtagagtcatttgaaaagtttagtggcggacgggtgagtaacgcgtgggtaacctgccatatacagggggataacacttagaaataggtgctaataccgcataagcctacagaatcgcatgattcag

SEQ ID NO: 3228 - DNA, 225 bp, unidentified
  misc_feature 1..225: note = bacterial strain Ascusb_2249 encodes 16S rRNA
  source 1..225: mol_type = genomic DNA
agagtttgatcatggctcaggatgaacgctggcggcgtgcttaacacatgcaagtcgaacggaggacccttgacggagttttcggacaacagataggaatccttagtggcggacgggtgagtaacgcgtgaggaacctgccttggagaggggaataacacagagaaatttgtgctaataccgcatgatgcagttgggtcgcatggctctgactgccaaagattta

SEQ ID NO: 3229 - DNA, 225 bp, unidentified
  misc_feature 1..225: note = bacterial strain Ascusb_3605 encodes 16S rRNA
  source 1..225: mol_type = genomic DNA
agagtttgatcctggctcaggatgaacgctggcggcgtgcttaatacatgcaagtcgaacgaggtcattgagcttgcttaatgaccgagtggcgaacgggtgagtaatacgtaagcaacctgccctgaagcgggggataacagctggaaacggacgctaataccccatagcagctcagaaggcatcttcttttctctaaagatccgcttggatcacttcaggatg

SEQ ID NO: 3230 - DNA, 225 bp, unidentified
  misc_feature 1..225: note = bacterial strain Ascusb_2114 encodes 16S rRNA
  source 1..225: mol_type = genomic DNA
agagtttgatcatggctcaggatgaacgctagctacaggcttaacacatgcaagtcgaggggcagcatggtcttagcttgctaagactgatggcgaccggcgcacgggtgagtaacgcgtatccaaccttccctatagtagagaatagcccggcgaaagtcggattaatgctctatgttattcaatgcggacatctaatttgaatcaaaggcttgccgctatagg

SEQ ID NO: 3231 - DNA, 225 bp, unidentified
  misc_feature 1..225: note = bacterial strain Ascusb_1230 encodes 16S rRNA
  source 1..225: mol_type = genomic DNA
agagtttgatcctggctcaggatgaacgctggcggcgtgcctaacacatgcaagtcgaacgagactgagatgactaagtcttcggacaaaggaattgactgtcgagtggcggacgggtgagtaacgcgtggataacctgcctcatacagggggataacagagggaaacttctgctaataccgcataagcgcacagtaacgcatgttacagtgtgaaaaactccgg

SEQ ID NO: 3232 - DNA, 225 bp, unidentified
  misc_feature 1..225: note = bacterial strain Ascusb_2434 encodes 16S rRNA
  source 1..225: mol_type = genomic DNA
agagtttgatcatggctcaggatgaacgctagctacaggcttaacacatgcaagtcgaggggcagcagatcgatagcttgctattgatgctggcgaccggcgcacgggtgagtaacgcgtatccaaccttccctatagtagaggatagcccggcgaaagtcggattaatactctatgttttccaatgcagacatctaagttggaacaaaggttcaccgctatagg

SEQ ID NO: 3233 - DNA, 225 bp, unidentified; identical to SEQ ID NO: 2664
  misc_feature 1..225: note = bacterial strain Ascusb_16970 encodes 16S rRNA
  source 1..225: mol_type = genomic DNA

SEQ ID NO: 3234 - DNA, 225 bp, unidentified
  misc_feature 1..225: note = bacterial strain Ascusb_2987 encodes 16S rRNA
  source 1..225: mol_type = genomic DNA
agagtttgatcatggctcaggatgaacgctagcggcaggcttaacacatgcaagtcgaggggcagcgagggtagcaatacctgtcggcgaccggcgaaagggtgagtaacgcgtgagcaacatacccgggaatgggggatagtcattggaaacgatgtgtaataccccataacacatgtcatcgcatgttgatatgttgaaagattcattgatcccggattggct

SEQ ID NO: 3235 - DNA, 225 bp, unidentified
  misc_feature 1..225: note = bacterial strain Ascusb_221 encodes 16S rRNA
  source 1..225: mol_type = genomic DNA
agagtttgatcatggctcaggatgaacgctagctacaggcttaacacatgcaagtcgaggggcagcatggtcttagcttgctaagattgatggcgaccggcgcacgggtgagtaacgcgtatccaaccttccctatagtaggggatagcccgtagaaatgcggattaataccctatgttgtattttgaggacatctgacgaataccaaaggttcaccgctatagg

SEQ ID NO: 3236 - DNA, 225 bp, unidentified
  misc_feature 1..225: note = bacterial strain Ascusb_17658 encodes 16S rRNA
  source 1..225: mol_type = genomic DNA
agagtttgatcctggctcaggatgaacgctggcggcgtgcctaacacatgcaagtcgaacggagatttgacgctgaggagacttcggtcaattcttgttaaatcttagtggcggacgggtgagtaacgcgtgggcaacctgcctcgtactgggggataacagttggaaacgactgttaataccgcataagcgcacgatatcgcatgatacagtgtgaaaaactcc

SEQ ID NO: 3237 - DNA, 225 bp, unidentified
  misc_feature 1..225: note = bacterial strain Ascusb_14232 encodes 16S rRNA
  source 1..225: mol_type = genomic DNA
agagtttgatcctggctcaggacgaacgctggcggcgtgcttaacacatgcaagtcgaacgaggatatgattggaagtccttcggggcggaagatcatattcgagtggcggacgggtgagtaacgcgtgaacaatctgtcccggaatgggggataacacttggaaacaggtgctaataccgcataagaccacactgtcgcatggcagagaggtaaaaggagcaat

SEQ ID NO: 3238 - DNA, 225 bp, unidentified
  misc_feature 1..225: note = bacterial strain Ascusb_1484 encodes 16S rRNA
  source 1..225: mol_type = genomic DNA
agagtttgatcatggctcaggacgaacgctggcggcacgcttaacacatgcaagtcgaacggagttaagaaggagcttgcttcatcttaacttagtggcggacgggtgagtaacacgtgagcaacctgcctttgagattgggatagcttctggaaacggatggtaataccgaataatgttgtgagaccgcatgattttacaaccaaagatttatcgctcaaagat

SEQ ID NO: 3239 - DNA, 225 bp, unidentified
  misc_feature 1..225: note = bacterial strain Ascusb_3643 encodes 16S rRNA
  source 1..225: mol_type = genomic DNA
agagtttgatcatggctcagaacgaacgctggcggcgcgtcttaagcatgcaagtcgagcggtaagatatagcttgctatatcctagagcggcggactggtgagtaacacgtgggtgacatacccctcagaccgggatagctcctagaaataggagataataccagatacgacctatgttgtcagaggacatagaggaaagatgctacggcatcgctgaaggagt

SEQ ID NO: 3240 - DNA, 225 bp, unidentified
  misc_feature 1..225: note = bacterial strain Ascusb_20052 encodes 16S rRNA
  source 1..225: mol_type = genomic DNA
agagtttgatcctggctcaggatgaacgctagctacaggcttaacacatgcaagtcgcggggcagcattgaggttgcttgcaacctcagatggcgaccggcgcacgggtgagtaacgcgtatccaacctcccccttagtagggaatagcccggcgaaagtcggattaatgccctatgttctccttttcgggcatcggtttaggagcaaagattcgtcgctaaggg

SEQ ID NO: 3241 - DNA, 225 bp, unidentified
  misc_feature 1..225: note = bacterial strain Ascusb_5423 encodes 16S rRNA
  source 1..225: mol_type = genomic DNA
agagtttgatcatggctcaggatgaacgctggcggcgtgcctaacacatgcaagtcgaacggagctgtttggatgaagttttcggatggattccttgcagcttagtggcggacgggtgagtaacgcgtggataacctgccttgatccgggggatagcagttggaaacgactggtaataccgcataagcgcacggcatggcatcatgcagtgtgaaaagatttatc

SEQ ID NO: 3242 - DNA, 225 bp, unidentified
  misc_feature 1..225: note = bacterial strain Ascusb_4791 encodes 16S rRNA
  source 1..225: mol_type = genomic DNA
agagtttgatcatggctcaggataaacgctggcggcgcacataagacatgcaagtcgaacggaagtcgtcaggaaacagattgacgatttatctgattgaagttacctgacaatggctttagtggcggactggtgagtaacacgtaagcaacctgcctatcagaggggaataacagtgagaaatcattgctaataccgcataagctagtagtatcgcatgataca

SEQ ID NO: 3243 - DNA, 225 bp, unidentified
  misc_feature 1..225: note = bacterial strain Ascusb_2021 encodes 16S rRNA
  source 1..225: mol_type = genomic DNA
agagtttgatcatggctcaggatgaacgctggcggcgtgcttaacacatgcaagtcgaacgaagcactggcgtctgatctttcgggtgaagaggcctttgactgagtggcggacgggtgagtaacgcgtggggaacctgccccataccgggggacaacagccggaaacggctgctaataccgcataagcgcacggaagcgcatgcttttgtgtgaaaaactccgg

SEQ ID NO: 3244 - DNA, 225 bp, unidentified
  misc_feature 1..225: note = bacterial strain Ascusb_3297 encodes 16S rRNA
  source 1..225: mol_type = genomic DNA
agagtttgatcctggctcaggacgaacgctggcggcgtgcttaacacatgcaagtcgaacggggattagttggttgagagcttcggcaggatactgattaattccagtggcggacgggtgagtaacgcgtgagcaacctgtcccagacagggggataacacttggaaacaggtgctaataccgcataagaccacggggtcacatggcccaggggtaaaaggagca

SEQ ID NO: 3245 - DNA, 225 bp, unidentified; identical to SEQ ID NO: 2345
  misc_feature 1..225: note = bacterial strain Ascusb_20167 encodes 16S rRNA
  source 1..225: mol_type = genomic DNA

SEQ ID NO: 3246 - DNA, 225 bp, unidentified
  misc_feature 1..225: note = bacterial strain Ascusb_17906 encodes 16S rRNA
  source 1..225: mol_type = genomic DNA
agagtttgatcctggctcaggatgaacgctagctacaggcttaacacatgcaagtcgaggggcagcacttcgggtggcgaccggcgcacgggtgagtaacgcgtatgtaacctgcccttgagtgggggatagcccatcgaaagatggattaataccgcataatgccgcggatgaacatttattggcggccaaagatttattgctcagggatggacatgcgtatga

SEQ ID NO: 3247 - DNA, 225 bp, unidentified
  misc_feature 1..225: note = bacterial strain Ascusb_3910 encodes 16S rRNA
  source 1..225: mol_type = genomic DNA
agagtttgatcatggctcaggatgaacgctagctacaggcttaacacatgcaagtcgaggggcatcaggggattagcttgctaatcttgctggcgaccggcgcacgggtgagtaacgcgtatccaaccttccccttagtagggcatagcccggcgaaagtcggattaataccctatgttgtatattgaggacatctgattcatactaaagatttatcgctaaggg

SEQ ID NO: 3248 - DNA, 225 bp, unidentified
  misc_feature 1..225: note = bacterial strain Ascusb_3878 encodes 16S rRNA
  source 1..225: mol_type = genomic DNA
agagtttgatcctggctcaggatgaacgctggcggcgtgcctaacacatgcaagtcgaacgaagcatcttgcccgacaaagtggagtgcttgcacaaagcggagtcaattaagatgacttagtggcggacgggtgagtaacgcgtgggtaacctgccctatacagggggataacagttagaaatgactgctaataccgcataagcgcacagtatcgcatgataca

SEQ ID NO: 3249 - DNA, 225 bp, unidentified
  misc_feature 1..225: note = bacterial strain Ascusb_19302 encodes 16S rRNA
  source 1..225: mol_type = genomic DNA
aggtttgatcctggctcaggacgaacgctggcggcacgcctaacacatgcaagtcgaacggagattttgtttcggcagaatcctagtggcgaacgggtgagtaacgcgtaggcaacctgccctccggccggggacaacactccgaaaggggtgctaataccggatacgaagtctgtgccgcatggtacggatttgaaagatggcctctgtttacaagctatcgcc

SEQ ID NO: 3250 - DNA, 225 bp, unidentified
  misc_feature 1..225: note = bacterial strain Ascusb_2233 encodes 16S rRNA
  source 1..225: mol_type = genomic DNA
agagtttgatcatggctcaggacgaacgctggcggcgtgcctaacacatgcaagtcgaacggacgaagggagcttgctcccctagttagtggcgaacgggtgagtaacgcgtgagcaacctgcctttcagagggggacaacggttggaaacgaccgctaataccgcatgaagcatcggggtcgcatggccttgatgttaaagatttatcgctgaaagatgggctc

SEQ ID NO: 3251 - DNA, 225 bp, unidentified
  misc_feature 1..225: note = bacterial strain Ascusb_4367 encodes 16S rRNA
  source 1..225: mol_type = genomic DNA
agagtttgatcatggctcaggatgaacgctagctacaggcttaacacatgcaagtcgcggggcagcatgttggttgcttgcaaccgatgatggcgaccggcgcacgggtgagtaacgcgtatccaaccttccccatagtagggtacagcccggcgaaagtcggattaatgccctatgttcttcgcagatggcatctgatgtgaagcaaaggtattccgctatggg

SEQ ID NO: 3252 - DNA, 225 bp, unidentified; identical to SEQ ID NO: 2239
  misc_feature 1..225: note = bacterial strain Ascusb_2171 encodes 16S rRNA
  source 1..225: mol_type = genomic DNA

SEQ ID NO: 3253 - DNA, 225 bp, unidentified
  misc_feature 1..225: note = bacterial strain Ascusb_1944 encodes 16S rRNA
  source 1..225: mol_type = genomic DNA
agagtttgatcatggctcaggacgaacgctggcggcgtgcctaacacatgcaagtcgaacggagttattttgaaggatcccttcggggagacggatttttaacttagtggcggacgggtgagtaacgcgtgagtaacctgcctccgagaggggaataacgttctgaaaagaacgctaataccgcataacatattgaagtcgcatggctttgatatcaaagatttt

SEQ ID NO: 3254 - DNA, 225 bp, unidentified
  misc_feature 1..225: note = bacterial strain Ascusb_2619 encodes 16S rRNA
  source 1..225: mol_type = genomic DNA
agagtttgatcatggctcaggacgaacgctggcggcgtgcttaacacatgcaagtcgaacgaggattataggaatgagagcttcggcaggatttccggtaattcgagtggcggacgggtgagtaacgcgtgaacaatctgtcccagacagggggataacacttggaaacaggtgctaataccgcataagaccacggcatcgcatggtgcaggggtaaaaggagcg

SEQ ID NO: 3255 - DNA, 225 bp, unidentified
  misc_feature 1..225: note = bacterial strain Ascusb_2877 encodes 16S rRNA
  source 1..225: mol_type = genomic DNA
agagtttgatcatggctcagaacgaacgctggcggcgcgtcttaagcatgcaagtcgaatggcaagattggtgcttgcaccgatcctagaatggcagactggtgagtaacacgtgggtgacataccctctggatggggacagctgttagaaatagcaggtaataccgaataagcttgtgcaggttagagtggcataaggaaaggtgctccggcaccaccagagga

SEQ ID NO: 3256 - DNA, 225 bp, unidentified
  misc_feature 1..225: note = bacterial strain Ascusb_5266 encodes 16S rRNA
  source 1..225: mol_type = genomic DNA
agagtttgatcctggctcaggatgaacgctggcggcgtgcttaacacatgcaagtcgaacggaggacccctgaacaagttttcggacaagggaagggaatccttagtggcggacgggtgagtaacgcgtgaggaacctgccttggagaggggaataacacagagaaatttgtgctaataccgcatgacgcagtactatcgcatggtagaactgccaaagatttat

SEQ ID NO: 3257 - DNA, 225 bp, unidentified
  misc_feature 1..225: note = bacterial strain Ascusb_3752 encodes 16S rRNA
  source 1..225: mol_type = genomic DNA
agagtttgatcatggctcaggatgaacgctagcggcaggcctaacacatgcaagtcgaggggcagcgcggggtagcaataccctggcggcgaccggcgcacgggtgcgtaacgcgtatacaacctaccctaaacagggggataacggggggaaacctccactaataccccatattgtcgagccatcgcctggtggttcgtcgaaagcttcggcggttctggatgg

SEQ ID NO: 3258 - DNA, 225 bp, unidentified
  misc_feature 1..225: note = bacterial strain Ascusb_2779 encodes 16S rRNA
  source 1..225: mol_type = genomic DNA
agagtttgatcatggctcaggatgaacgctagctacaggcttaacacatgcaagtcgaggggcatcatggtgtgtgcttgcacgcaccgatggcgaccggcgcacgggtgcgtaacacgtatccaacctacccatggctcagggatagccttccgaaagaaagattaatacctgatggtctcgtgtcgggacatcccgttgcgagtaaagattcatcggcgatgg

SEQ ID NO: 3259 - DNA, 225 bp, unidentified
  misc_feature 1..225: note = bacterial strain Ascusb_11196 encodes 16S rRNA
  source 1..225: mol_type = genomic DNA
agagtttgatcatggctcaggataaacgctggcggcgcacataagacatgcaagtcgaacggaagtcgttgtaatgatgtggacatgaacagagaacttgttcaaagggagtgaaaattgacttacaacaatggctttagtggcggactggtgagtaatgtataagtaacctgcctatcagaggggaacaacagttggaaacgactgctaataccgcatatgcca

SEQ ID NO: 3260 - DNA, 225 bp, unidentified
  misc_feature 1..225: note = bacterial strain Ascusb_12977 encodes 16S rRNA
  source 1..225: mol_type = genomic DNA
agagtttgatcatggctcaggatgaacgctagctacaggcttaacacatgcaagtcgaggggcagcattaagttagcttgctaacttagatggcgaccggcgcacgggtgagtaacgcgtatccaaccttccccctgctcagggatagcccgctgaaaggcggattaacacctgatagcttcactagatggcatctgacggtgaataaagtttacggcaagggat

SEQ ID NO: 3261 - DNA, 225 bp, unidentified
  misc_feature 1..225: note = bacterial strain Ascusb_15604 encodes 16S rRNA
  source 1..225: mol_type = genomic DNA
agagtttgatcctggctcaggatgaacgctagcgacaggcctaacacatgcaagtcgaggggcagcacttcgggtggcgaccggcgcacgggtgagtaacgcgtatgtaacctgcccttgagtgtgggatagcccatcgaaagatggattaataccgcataatgccgcggatgaacatttattagcggccaaagatttattgctcagggatggacatgcgtatga

SEQ ID NO: 3262 - DNA, 225 bp, unidentified
  misc_feature 1..225: note = bacterial strain Ascusb_1921 encodes 16S rRNA
  source 1..225: mol_type = genomic DNA
agagtttgatcatggctcaggacgaacgctggcggcgtgcctaacacatgcaagtcgaacggaactctttggatcgagacttcggtcaagtgaaactgagtttagtggcggacgggtgagtaacgcgtgaggaacctgcctcggagtgggggacaacagttggaaacgactgctaataccgcataatgtgctggagggacatccctctggtaccaaagctttatg

SEQ ID NO: 3263 - DNA, 225 bp, unidentified
  misc_feature 1..225: note = bacterial strain Ascusb_3969 encodes 16S rRNA
  source 1..225: mol_type = genomic DNA
agagtttgatcctggctcaggatgaacgctggcggcgcgcctaatacatgcaagtcgaacgggaggtagcaatacctctagtggcgaacgggtgagtaacacgttgggaatctaccccctagaccgggatacccagtcgaaagattggctaataccggatatgatgcatttacacaagtagatgtattgaaagggagctttcaagcttcgcttagggatgaacct

SEQ ID NO: 3264 - DNA, 225 bp, unidentified
  misc_feature 1..225: note = bacterial strain Ascusb_20599 encodes 16S rRNA
  source 1..225: mol_type = genomic DNA
agagtttgatcatggctcaggatgaacgctggcggcgtgcctaatacatgcaagtcgagcgagaatcagggatgtagagattcgtcaaagcggaactgaggaaagcggcggacgggtgagtaacgcgtaggcaacctgcccttagcagagggatagccattggaaacgatgattaaaacctcataatgctgttgaaacacatgttttgacagccaaagatttatc

SEQ ID NO: 3265 - DNA, 225 bp, unidentified
  misc_feature 1..225: note = bacterial strain Ascusb_4206 encodes 16S rRNA
  source 1..225: mol_type = genomic DNA
agagtttgatcctggctcagagttaacgctggcatcgtgcataacacatgcaagtcgaacgggacttagtttgtagcttgctatagattaagtttagtggcagacgggtgagtaatgtataaggaacctacctccgagtggggaataacggtccgaaaggatcgctaataccccataacatattagagaggcatctctctaatatcaaagattcatcgcttggag

SEQ ID NO: 3266 - DNA, 225 bp, unidentified
  misc_feature 1..225: note = bacterial strain Ascusb_1520 encodes 16S rRNA
  source 1..225: mol_type = genomic DNA
agagtttgatcctggctcaggacgaacgctggcggcacgcttaacacatgcaagtcgaacggggttattcggagcttgctttgaataacttagtggcggacgggtgagtaacacgtgagcaatctgcccttaagagggggataccgattggaaacgatcgttaataccgcataagatagtagtatcgcatgatacagctataaaagatttatcgcttaaggatga

SEQ ID NO: 3267 - DNA, 225 bp, unidentified
  misc_feature 1..225: note = bacterial strain Ascusb_3474 encodes 16S rRNA
  source 1..225: mol_type = genomic DNA
agagtttgatcctggctcagaacgaacgctggcggcgcgtcttaagcatgcaagtcgagcggtaagttgtagcttgctacaacctagagcggcggactggtgagtaacgcgtgggtgacgtacccttttgacggggatagctcctagaaataggaggtaataccggataagctcgtatgtgtcagaggcatacgaggaaaggttcttttgaaccgcagaaggaac

SEQ ID NO: 3268 - DNA, 225 bp, unidentified
  misc_feature 1..225: note = bacterial strain Ascusb_896 encodes 16S rRNA
  source 1..225: mol_type = genomic DNA
agagtttgatcatggctcaggatgaacgctggcggcgtgcttaacacatgcaagtcgaacgaggctgcagattggaagttttcggatggaagatgtgcagaccgagtggcggacgggtgagtaacgcgtggggaacctgccccattccgggggataccagttggaaacgactgttaataccgcataagcgcacgggaggacatcctccagtgtgaaaaactgagg

SEQ ID NO: 3269 - DNA, 225 bp, unidentified
  misc_feature 1..225: note = bacterial strain Ascusb_1305 encodes 16S rRNA
  source 1..225: mol_type = genomic DNA
agagtttgatcctggctcaggatgaacgctggcggcgtgcctaacacatgcaagtcgaacggtgatgattgatattttcggatggatttcatcatagtggcggacgggtgagtaacgcgtggataacctgcctcgtactggggaatagcagctggaaacggctggtaataccgcataagcgcacgatgccgcatgacattgtgtgaaaagatttatcggtacgag

SEQ ID NO: 3270 - DNA, 225 bp, unidentified
  misc_feature 1..225: note = bacterial strain Ascusb_723 encodes 16S rRNA
  source 1..225: mol_type = genomic DNA
agagtttgatcatggctcaggacgaacgctggcggcatgcctaacacatgcaagtcgaacggagatttagagagcttgctttttaaatcttagtggcggacgggtgagtaacgcgtgagcaacctacctttcagtggggaataatgttttgaaaaggacactaataccgcataacgtatttaagtcgcatggcatagataccaaaggatttattcgctgagagat

SEQ ID NO: 3271 - DNA, 225 bp, unidentified
  misc_feature 1..225: note = bacterial strain Ascusb_3011 encodes 16S rRNA
  source 1..225: mol_type = genomic DNA
agagtttgatcatggctcaggatgaacgctggcggcgtgcctaacacatgcaagtcgaacggagatagaacgctgtcgagacttcggtcaaaacttgttttatcttagtggcggacgggtgagtaacgcgtggagaacctgcctcgtactgggggataacagttggaaacgactgataataccgcataagcccacgagaccgcatggtcatgagggaaaagattt

SEQ ID NO: 3272 - DNA, 225 bp, unidentified
  misc_feature 1..225: note = bacterial strain Ascusb_834 encodes 16S rRNA
  source 1..225: mol_type = genomic DNA
agagtttgatcctggctcaggatgaacgctggcggcgtgcttaacacatgcaagtcgaacgagggttgccagttgaaattttcggatggaaacaggcaatgcctagtggcggacgggtgagtaacgcgtggggaacctgccccattccgggggataccagttggaaacgactgttaataccgcataagcgcacggaaggacatccttccgtgtgaaaaaccacgg

SEQ ID NO: 3273 - DNA, 225 bp, unidentified
  misc_feature 1..225: note = bacterial strain Ascusb_3300 encodes 16S rRNA
  source 1..225: mol_type = genomic DNA
agagtttgatcatggctcagaacgaacgctggcggcgcgtcttaagcatgcaagtcgagcggtaagattggtgcttgcactaatcctagagcggcggactggtgagtaacgcgtgggtgacgtacctttgtgacggggacagctcctagaaataggagataataccggatacgctgcatgttgtcagaggacatgcaggaaaggatcttttgattcgcacgaaga

SEQ ID NO: 3274 - DNA, 225 bp, unidentified
  misc_feature 1..225: note = bacterial strain Ascusb_1442 encodes 16S rRNA
  source 1..225: mol_type = genomic DNA
agagtttgatcatggctcaggatgaacgctagcggcaggcttaacacatgcaagtcgaggggcagcgcggttgtagcaatacgactggcggcgaccggcgaaagggtgcgtaacgcgtgagcgacatgcccgtcaccggggtataaccgatggaaacgtcgactaatcccccataacatcagaggaggcatcttctttggttgaaattcacggaggtgacggatt

SEQ ID NO: 3275 - DNA, 225 bp, unidentified
  misc_feature 1..225: note = bacterial strain Ascusb_1976 encodes 16S rRNA
  source 1..225: mol_type = genomic DNA
agagtttgatcatggctcaggatgaacgctggcggcgtgcctaacacatgcaagtcgaacggagatatagtagaaagagacttcggtcaatggatgttatatcttagtggcggacgggtgagtaacgcgtggggaacctgccctgtactgggggataacagtgagaaatcactgctaaaaccgcataagcgcacactggcgcatgccagagtgtgaaaaactccg

SEQ ID NO: 3276 - DNA, 225 bp, unidentified
  misc_feature 1..225: note = bacterial strain Ascusb_391 encodes 16S rRNA
  source 1..225: mol_type = genomic DNA
agagtttgatcatggctcaggatgaacgctggcggcgtgcttaacacatgcaagtcgaacggggcacccttgacagaggcttcggccaattgataggaatgcctagtggcggacgggtgagtaacgcgtgagtaacctgcctgggagtggggaataacacatcgaaaggtgtgctaataccgcataacacagtaggatcgcatggttttactgtcaaagatttat

SEQ ID NO: 3277 - DNA, 225 bp, unidentified
  misc_feature 1..225: note = bacterial strain Ascusb_4971 encodes 16S rRNA
  source 1..225: mol_type = genomic DNA
agagtttgatcctggctcaggatgaacgctggcggcgtgcttaacacatgcaagtcgaacgaagcaccctcatccgtggaagggagtagcttgctacgaacggacacacccgagggtgactgagtggcggacgggtgagtaacgcgtgggtaacctgccccatagagggggacaacagttagaaatgactgctaataccgcatagtaatgcagatccgcatgctt

SEQ ID NO: 3278 - DNA, 225 bp, unidentified
  misc_feature 1..225: note = bacterial strain Ascusb_5917 encodes 16S rRNA
  source 1..225: mol_type = genomic DNA
agagtttgatcatggctcaggatgaacgctagcggcaggcttaacacatgcaagtcgaggggcagcgcgggtagcaatacctggcggcgaccggcggaagggtgcgtaacacgtgagcaacttgcccgtcacagggggataagcgctggaaacggtgtctaatatcccataacatatcgtatcgcatggtacgacattgaaaactccggtggtgacggatgggct

SEQ ID NO: 3279 - DNA, 225 bp, unidentified
  misc_feature 1..225: note = bacterial strain Ascusb_472 encodes 16S rRNA
  source 1..225: mol_type = genomic DNA
agagtttgatcatggctcaggatgaacgctggcggcgtgcttaatacatgcaagtcgaacgaagacatctcgccgaagcttgcttcattgagatatcttagtggcggacgggtgagtaacgcgtgggtaacctgccttacacagggggataacagttagaaatgactgctaataccgcataagcgcacattatcgcatgatagagtgtgaaaagatttatcggtg

SEQ ID NO: 3280 - DNA, 225 bp, unidentified
  misc_feature 1..225: note = bacterial strain Ascusb_551 encodes 16S rRNA
  source 1..225: mol_type = genomic DNA
agagtttgatcatggctcaggacgaacgctggcggcacgcttaacacatgcaagtcgaacggagatattttggtttactgagatatcttagtggcggacgggtgagtaacacgtgagcaacctgcctttgagagagggatagcttctggaaacggatggtaatacctcatgacatacttttatcgcatggtagaagtatcaaagatttatcactcagagatgggc

SEQ ID NO: 3281 - DNA, 225 bp, unidentified
  misc_feature 1..225: note = bacterial strain Ascusb_12676 encodes 16S rRNA
  source 1..225: mol_type = genomic DNA
agagtttgatcctggctcaggacgaacgctggcggcgtgcctaacacatgcaagtcgaacggagttatgtcacgaagttcttcggagcggacgatatagcttagtggcggacgggtgagtaacgcgtgagcaacctgcctttcagagggggacaacggttggaaacgaccgctaataccgcatgacatgactggaccgcatgatccggtcatcaaagattttatc

SEQ ID NO: 3282 - DNA, 225 bp, unidentified; identical to SEQ ID NO: 2757
  misc_feature 1..225: note = bacterial strain Ascusb_386 encodes 16S rRNA
  source 1..225: mol_type = genomic DNA

SEQ ID NO: 3283 - DNA, 225 bp, unidentified
  misc_feature 1..225: note = bacterial strain Ascusb_820 encodes 16S rRNA
  source 1..225: mol_type = genomic DNA
agagtttgatcatggctcaggatgaacgctagcggcaggcttaacacatgcaagtcgaggggcagcgcgaggtagcaatactttggcggcgaccggcggaagggtgcgtaacgcgtgagcaacatgcccgtatgagggggatagtcattggaaacgatgcgtaataccccgtaacaacagttttcgcatggagattgtttgaaagattcatcgcatacggattgg

SEQ ID NO: 3284 - DNA, 225 bp, unidentified
  misc_feature 1..225: note = bacterial strain Ascusb_2469 encodes 16S rRNA
  source 1..225: mol_type = genomic DNA
agagtttgatcatggctcaggatgaacgctggcggcgtgcttaacacatgcaagtcgaacggagcttttaaggaacaagacttcggtcaagtgagatttaagcttagtggcggacgggtgagtaacgcgtgagcaacctgcctttcagagggggataacgtttggaaacagacgctaataccgcatgacatagttttttcgcatggagagactatcaaaggagca

SEQ ID NO: 3285 - DNA, 225 bp, unidentified
  misc_feature 1..225: note = bacterial strain Ascusb_3858 encodes 16S rRNA
  source 1..225: mol_type = genomic DNA
agagtttgatcatggctcaggattaacgctggcggcatgcctaatacatgcaagtcgaacgagcagcaatgctagtggcgaacgggtgagtaacacgtaggaaacctgccctttagacgaggataactattggaaacgatagctaaaactggatagtatacaagaaggcatcttcatgtatttaaaggtcctgcaagggaacactaaaggatggtcctgcggaac

SEQ ID NO: 3286 - DNA, 225 bp, unidentified
  misc_feature 1..225: note = bacterial strain Ascusb_1386 encodes 16S rRNA
  source 1..225: mol_type = genomic DNA
agagtttgatcatggctcaggacgaacgctggcggcgtgcttaacacatgcaagtcgaacgaggttataggagagcttgctcgaatatagccgagtggcggacgggtgagtaacgcgtgaacaatctgtctcatacaggggaataacgcatcgaaagatgtgctaataccgcataggaccacggtatcgcatggtactgaggtgaaaggagcaatccggtatgag

SEQ ID NO: 3287 - DNA, 225 bp, unidentified
  misc_feature 1..225: note = bacterial strain Ascusb_2085 encodes 16S rRNA
  source 1..225: mol_type = genomic DNA
agagtttgatcatggctcaggatgaacgctggcggcgtgcctaacacatgcaagtcgaacgaagcatatacggcagaacttttcggagtgaagcggtttatgacttagtggcggacgggtgagtaacgcgtgggcaacctgcccttaaccgggggacaacagttggaaacggctgctaataccgcataagcgcacggaaccgcatggttcagtgtgaaaaattcc

SEQ ID NO: 3288 - DNA, 225 bp, unidentified
  misc_feature 1..225: note = bacterial strain Ascusb_13870 encodes 16S rRNA
  source 1..225: mol_type = genomic DNA
agagtttgatcatggctcaggacgaacgctggcggcgtgcttaacacatgcaagtcgaacggggatcattcagatgagagcttcggcaggaatcgggatgattcgagtggcggacgggtgagtaacgcgtgagcaacctgtcccagacagggggataacacttggaaacaggtgctaataccgcataagaccacggggtcgcatggccctggggtaaaaggagca

SEQ ID NO: 3289 - DNA, 225 bp, unidentified
  misc_feature 1..225: note = bacterial strain Ascusb_5875 encodes 16S rRNA
  source 1..225: mol_type = genomic DNA
agagtttgatcatggctcaggatgaacgctggcggcgtgcctaacacatgcaagtcgagcgagatgcttatgattgaaacttcggttgattgaatgagcggaaagcggcggacgggtgagtaacgcgtaggcaacctgccctcagcagggggatagccattggaaacgatgattaagaccccataatacagacatttcacatgtaatgtctgccaaaggtttatc

SEQ ID NO: 3290 - DNA, 225 bp, unidentified
  misc_feature 1..225: note = bacterial strain Ascusb_3653 encodes 16S rRNA
  source 1..225: mol_type = genomic DNA
agagtttgatcctggctcaggatgaacgctggcggcgtgcctaatacatgcaagtcgagcgagaatcagttgaacagagattcgtcaaagtgatactgaggaaagcggcggacgggtgagtaacgcgtaggcaacctgcccttagcagagggatagccattggaaacgatgattaaaacctcataatgctgagctgacacatgtcagctttgccaaagatttatc

SEQ ID NO: 3291 - DNA, 225 bp, unidentified; identical to SEQ ID NO: 2426
  misc_feature 1..225: note = bacterial strain Ascusb_14287 encodes 16S rRNA
  source 1..225: mol_type = genomic DNA

SEQ ID NO: 3292 - DNA, 225 bp, unidentified
  misc_feature 1..225: note = bacterial strain Ascusb_1551 encodes 16S rRNA
  source 1..225: mol_type = genomic DNA
agagtttgatcatggctcaggatgaacgctggcggcgtgcctaacacatgcaagtcgaacgaagcatcttccttcggggagatgactgagtggcggacgggtgagtaacgcgtgggtaacctgccctttacagggggacaacagtcagaaatgactgctaataccgcatgagcgcacgagggggcatcctcttgtgtgaaaaactgaggtggtaaaggatgggcc

SEQ ID NO: 3293 - DNA, 225 bp, unidentified
  misc_feature 1..225: note = bacterial strain Ascusb_2384 encodes 16S rRNA
  source 1..225: mol_type = genomic DNA
agagtttgatcatggctcaggatgaacgctggcggcgcgcctaacacatgcaagtcgaacggttaaagcaccttcgggtgtgtatagagtggcgaacggctgagtaacacgtgggcaacctgcccctcgcaccggaatagccggcggaaacgccgggtaatgccggatacgccccaggggggacatcctccccgggggaaagcccagacggcgagggatgggccc

SEQ ID NO: 3294 - DNA, 225 bp, unidentified
  misc_feature 1..225: note = bacterial strain Ascusb_5597 encodes 16S rRNA
  source 1..225: mol_type = genomic DNA
agagtttgatcctggctcaggacgaacgctggcggcgtgcctaacacatgcaagtcgaacggagttagcttgaatgaaattttcggattgaattcggttaacttagtggcggacgggtgagtaacgcgtgagtaacctgcccacaagagggggataacgtcttgaaaaagacgctaataccgcataacatatcgaagccgcatgactttgatatcaaaggaggaa

SEQ ID NO: 3295 - DNA, 225 bp, unidentified
  misc_feature 1..225: note = bacterial strain Ascusb_3149 encodes 16S rRNA
  source 1..225: mol_type = genomic DNA
agagtttgatcatggctcaggatgaacgctagctacaggcttaacacatgcaagtcgcggggcagcatggtcttagcttgctaggactgatggcgaccggcgcacgggtgagtaacgcgtatccaacctaccccttagtagggcatagcccggcgaaagtcggattaataccctatgttgtcagtcgaggacatctgaagttgactaaagacttgtcgctaaggg

SEQ ID NO: 3296 - DNA, 225 bp, unidentified
  misc_feature 1..225: note = bacterial strain Ascusb_4331 encodes 16S rRNA
  source 1..225: mol_type = genomic DNA
agagtttgatcatggctcaggataaacgctggcggcgtgcttaacacatgcaagtcgaacggagtattcctcccgagaccaaggaagcttgcttctgaggaatcatttggaatacttagtggcggacgggtgagtaacgcgtgggtaacctgccctatacagggggataacagctggaaacggctgttaataccgcataagcgcacagtatcgcatggtacagtg

SEQ ID NO: 3297 - DNA, 225 bp, unidentified
  misc_feature 1..225: note = bacterial strain Ascusb_16062 encodes 16S rRNA
  source 1..225: mol_type = genomic DNA
agagtttgatcatggctcagaacgaacgctggcggcgcgtcttaagcatgcaagtcgagcggtaagttggaagcttgcttctgacctagagcggcggactggtgagtaacgcgtgggtgatgtacctttgtgacggggacagctgctagaaatagcagataataccggatacgctgcagcatgtcagaggtgctgcaggaaaggatcttttgattcgcacagaga

SEQ ID NO: 3298 - DNA, 225 bp, unidentified
  misc_feature 1..225: note = bacterial strain Ascusb_13890 encodes 16S rRNA
  source 1..225: mol_type = genomic DNA
agagtttgatcatggctcaggatgaacgctggcggcatgcctaagacatgcaagtcgaacgaagtgaccttttgaagcggagtgcttgcacaaagtagataaagattttcacttagtggcgcaagggtgagtaacacgtgggttatctgccttttagactgggataacaattagaaatgattgctaataccggatgataaataagaagatacgttttcttatttt

SEQ ID NO: 3299 - DNA, 225 bp, unidentified
  misc_feature 1..225: note = bacterial strain Ascusb_9421 encodes 16S rRNA
  source 1..225: mol_type = genomic DNA
agagtttgatcctggctcaggatgaacgctagcggcaggcttaacacatgcaagtcgaggggcagcgcggggtagcaatactctggcggcgaccggcgaaagggtgcggaacacgtgagcaacttgcccgtgacagggggataagcgctggaaacggcgtctaatatcccgtaatacagaggagggcatcctcctctgttgaaagctacggtggtcacggatggg

SEQ ID NO: 3300 - DNA, 225 bp, unidentified
  misc_feature 1..225: note = bacterial strain Ascusb_1642 encodes 16S rRNA
  source 1..225: mol_type = genomic DNA
agagtttgatcatggctcagaacgaacgctggcggcgcgtcttaagcatgcaagtcgagcggtaagattggtgcttgcaccgatcctagagcggcggactggtgagtaacgcgtgggtgacgtacccttttgacggggatagctcctagaaataggaggtaataccggataagctcgtatgtgtcagaggcatacgaggaaaggttcttttgaaccgcgaaagga

SEQ ID NO: 3301 - DNA, 225 bp, unidentified
  misc_feature 1..225: note = bacterial strain Ascusb_6078 encodes 16S rRNA
  source 1..225: mol_type = genomic DNA
agagtttgatcctggctcaggatgaacgctagctacaggcttaacacatgcaagtcgaggggcagcatgatcttagcttgctaagattgatggcgaccggcgcacgggtgcgtaacgcgtatccaacctgccgtgtactctgggatagccctctgaaaggaggattaataccggatgtggttgcggagagacatctctctgtaattaaagatttatcggtacacc

SEQ ID NO: 3302 - DNA, 225 bp, unidentified
  misc_feature 1..225: note = bacterial strain Ascusb_7274 encodes 16S rRNA
  source 1..225: mol_type = genomic DNA
agagtttgatcatggctcaggatgaacgctggcggcgtgcctaacacatgcaagtcgaacggagcatagacgctgtgagaagaatcagcttgctgaggaaacgaacttgtttatgcttagtggcggacgggtgagtaacgcgtggataacctggctcacacagggggatagcagttggaaacgactgataataccgcataagcgcacagcatcgcatgatggagt

SEQ ID NO: 3303 - DNA, 225 bp, unidentified
  misc_feature 1..225: note = bacterial strain Ascusb_1340 encodes 16S rRNA
  source 1..225: mol_type = genomic DNA
agagtttgatcatggctcaggattaacgctagcggtatgcctaatacatgcaagtcgagcgggagcagcaatgctctagcggcaaacgggtgagtaatacgtatctaatctaccctttagaaaggaacaacagatcgaaagatttgctaataccttataggacatagatttacatgaaactatgtttaaagttccgttcggaacgctttaggatgagggtgcggc

SEQ ID NO: 3304 - DNA, 225 bp, unidentified
  misc_feature 1..225: note = bacterial strain Ascusb_4958 encodes 16S rRNA
  source 1..225: mol_type = genomic DNA
agagtttgatcatggctcaggatgaacgctggcggcgtgcttaacacatgcaagtcgaacgaagcactggaagcggatttcttcgggatgaagcatcctttgacttagtggcggacgggtgagtaacgcgtgggcaacctgccgtatgcagggggacaacagctggaaacggctgctaataccgcataagcgcacgatgccgcatggcaacgtgtgaaaagattt

SEQ ID NO: 3305 - DNA, 225 bp, unidentified
  misc_feature 1..225: note = bacterial strain Ascusb_794 encodes 16S rRNA
  source 1..225: mol_type = genomic DNA
agagtttgatcatggctcaggatgaacgctagctacaggcttaacacatgcaagtcgaggggcatcgagaggttagcttgctaaccttgtcggcgaccggcgcacgggtgagtaacgcgtatccaaccttccccttagtagggcatagcccgatgaaaatcggattaagaccctatgttcttcgtagatggcatctgaaatgaagcaaaggtttaccgctaaggg

SEQ ID NO: 3306 - DNA, 225 bp, unidentified
  misc_feature 1..225: note = bacterial strain Ascusb_3631 encodes 16S rRNA
  source 1..225: mol_type = genomic DNA
agagtttgatcatggctcaggatgaacgctagctacaggcttaacacatgcaagtcgaggggcagcatgattctagcttgctagaatcgatggcgaccggcgcacgggtgagtaacgcgtatccaaccttccctatagtagaggatagcccggcgaaagtcggattaatactctatgttgttcaatgcggacatctaagttgaaccaaaggcttgccgctatagg

SEQ ID NO: 3307 - DNA, 225 bp, unidentified
  misc_feature 1..225: note = bacterial strain Ascusb_12333 encodes 16S rRNA
  source 1..225: mol_type = genomic DNA
agagtttgatcctggctcaggatgaacgctggcggcatgcctaagacatgcaagtcgaacgaagtgaccttttgaaacgaagtgcttgcacggagcggataaagattttcacttagtggcgcaagggtgagtaacacgtgggttatctgccttttagactgggataacaattagaaatgattgctaataccggatgataaatagaaagatacgtttttctatttt

SEQ ID NO: 3308 - DNA, 225 bp, unidentified
  misc_feature 1..225: note = bacterial strain Ascusb_136 encodes 16S rRNA
  source 1..225: mol_type = genomic DNA
agagtttgatcatggctcaggatgaacgctagctacaggcttaacacatgcaagtcgaggggcagcataacgaaagcttgcttttgttgatggcgaccggcgcacgggtgagtaacgcgtatccaaccttccctatactagaggatagcccggcgaaagtcggattaatactctatgttcttcgtagaagacatctgaaatgaagcaaaggtttaccggtatagg

SEQ ID NO: 3309 - DNA, 225 bp, unidentified
  misc_feature 1..225: note = bacterial strain Ascusb_9570 encodes 16S rRNA
  source 1..225: mol_type = genomic DNA
agagtttgatcctggctcaggatgaacgctagcggcaggcttaacacatgcaagtcgaggggcagcgcggggtagcaataccctggcggcgaccggcgcacgggtgcgtaacgcgtatgcaacctgcccgtaacaggggtataacggggagaaatccccactaatcccccatattgtcctggggccgcatggtcttaggacgaaagccttggtggttacggacgg

SEQ ID NO: 3310 - DNA, 225 bp, unidentified
  misc_feature 1..225: note = bacterial strain Ascusb_2776 encodes 16S rRNA
  source 1..225: mol_type = genomic DNA
agagtttgatcctggctcagaacgaacgctggcggcaggcttaacacatgcaagttgaacgggattgttggatagcttgctatttaacatgagagtagcgcactggtgagtaacacgtgggaacatgcctattggtgggggacaacagttggaaacgactgctaataccgcataagccctaagggggaaagatttattgccgatagattggcccgcggaagatta

SEQ ID NO: 3311 - DNA, 225 bp, unidentified
  misc_feature 1..225: note = bacterial strain Ascusb_1135 encodes 16S rRNA
  source 1..225: mol_type = genomic DNA
agagtttgatcctggctcaggatgaacgctggcggcacgcttaacacatgcaagtcgagcggaaacggatacttcggtaactgttttagcggcggacgggtgagtaacacgtgggtaacctaccctatacagggggataacgtaaagaaatttacgctaataccgcataagccaacagggaggcatcttctggttggaaaagccgagacggtataggatgggccc

SEQ ID NO: 3312 - DNA, 225 bp, unidentified
  misc_feature 1..225: note = bacterial strain Ascusb_3321 encodes 16S rRNA
  source 1..225: mol_type = genomic DNA
agagtttgatcatggctcaggatgaacgctggcggcacgcttaacacatgcaagtcgagcgagggaggggcttcggccccgacctagcggcggacgggtgagtaacacgtgggtaacctaccctacaccgggggataacatatagaaatgtatgctaataccgcataagccaacagggacgcatgttccggttggaaaagttccggcgatgtaggatgggcccgc

SEQ ID NO: 3313 - DNA, 225 bp, unidentified
  misc_feature 1..225: note = bacterial strain Ascusb_15140 encodes 16S rRNA
  source 1..225: mol_type = genomic DNA
agagtttgatcctggctcaggatgaacgctagcggcaggcttaacacatgcaagtcgaggggcagcaggcggtagcaatactgtgctggcgaccggcgcacgggtgcgtaacgcgtatgcaacctacccactacagggggataacggagggaaacttccactaatatcccatggagttgttttttcgcatggagagacaactaaagctacggtggtagtggatgg

SEQ ID NO: 3314 - DNA, 225 bp, unidentified
  misc_feature 1..225: note = bacterial strain Ascusb_1991 encodes 16S rRNA
  source 1..225: mol_type = genomic DNA
agagtttgatcatggctcagaacgaacgctggcggcatggattaggcatgcaagtcgaacgggagcagcaatgctccagtggcgcaagggtgaggaacacgtgaacaacctgccttcgagttggggatagcttctggaaacgggagataataccgaataacatcattttctcgcatggggatttgatcaaagcagcaatgcgcttgaagaggggttcgcgtccca

SEQ ID NO: 3315 - DNA, 225 bp, unidentified
  misc_feature 1..225: note = bacterial strain Ascusb_1001 encodes 16S rRNA
  source 1..225: mol_type = genomic DNA
agagtttgatcatggctcaggatgaacgctggcggcgtgcttaacacatgcaagtcgaacggaaactactcgctgaagcgagcttgctcaattcttgagtagttttagtggcggacgggtgagtaacgcgtgggtaacctgccatgtactgggggacaacagttggaaacgactgctaataccgcataagcgcacaggaccgcatggtctagtgtgaaaaactcc

SEQ ID NO: 3316 - DNA, 225 bp, unidentified
  misc_feature 1..225: note = bacterial strain Ascusb_181 encodes 16S rRNA
  source 1..225: mol_type = genomic DNA
agagtttgatcatggctcaggatgaacgctggcggcgtgcttaacacatgcaagtcgaacgagggttatcggttgaagttttcggatggaaactgataattcctagtggcggacgggtgagtaacgcgtggggaacctgccccattccgggggataccagttggaaacgactgttaataccgcataagcgcacagcattgcatgatgcagtgtgaaaaactccgg

SEQ ID NO: 3317 - DNA, 225 bp, unidentified
  misc_feature 1..225: note = bacterial strain Ascusb_468 encodes 16S rRNA
  source 1..225: mol_type = genomic DNA
agagtttgatcatggctcaggatgaacgctagctacaggcttaacacatgcaagtcgaggggcagcatgagattagcttgctaatcttgatggcgaccggcgcacgggtgagtaacgcgtatccaaccttccccttagtagggcatagcccggcgaaagtcggattaataccctatgttgtatattgaggacatctgatttatactaaagatttatcgctaaggg

SEQ ID NO: 3318 - DNA, 225 bp, unidentified
  misc_feature 1..225: note = bacterial strain Ascusb_1834 encodes 16S rRNA
  source 1..225: mol_type = genomic DNA
agagtttgatcctggctcaggatgaacgctggcggcgtgcttaacacatgcaagtcgaacgaagctcttctaacagatccttcgggtgaagatagaagatgactgagtggcggacgggtgagtaacgcgtgggaaacctgccctatgcagggggataacagttggaaacgactgctaataccgcataagcgcacagcatcgcatggtgcagtgtgaaaagccttt

SEQ ID NO: 3319 - DNA, 225 bp, unidentified
  misc_feature 1..225: note = bacterial strain Ascusb_1508 encodes 16S rRNA
  source 1..225: mol_type = genomic DNA
agagtttgatcatggctcaggatgaacgctggcggcatgcctaatacatgcaagtcgaacgggagtgcttgcactccagtggcgaacgggtgagtaatacataggtaacctgtccttaagacgaggatagcttctagaaatggaagataaaactggataggacatcacaaatcacatgattagatgtttaaaagagcaatctacttaaggaggggcctgtggcgc

SEQ ID NO: 3320 - DNA, 225 bp, unidentified
  misc_feature 1..225: note = bacterial strain Ascusb_3684 encodes 16S rRNA
  source 1..225: mol_type = genomic DNA
agagtttgatcctggctcaggatgaacgctggcggcgtgcttaacacatgcaagtcgaacgaagcaccttgcccgatgatatggagtgcttgcacaaagtggattcaactaaggtgactgagtggcggacgggtgagtaacgcgtgggtaacctaccccagacagggggataacagttagaaatgactgctaacaccgcataagcgcacaggaaggcatcttccg

SEQ ID NO: 3321 - DNA, 225 bp, unidentified
  misc_feature 1..225: note = bacterial strain Ascusb_2132 encodes 16S rRNA
  source 1..225: mol_type = genomic DNA
agagtttgatcctggctcaggatgaacgctggcggcgtgcttaacacatgcaagtcgaacggagtattgacgctgaacgattgactagcttgctaagattgagttcttgttgatacttagtggcggacgggtgagtaacgcgtgggtaacctgccgtatgcagggggacaacagttggaaacgactgctaataccgcatatgcacacagtaaggcatcttacagg

SEQ ID NO: 3322 - DNA, 225 bp, unidentified
  misc_feature 1..225: note = bacterial strain Ascusb_1810 encodes 16S rRNA
  source 1..225: mol_type = genomic DNA
agagtttgatcatggctcaggacgaacgctggcggcacgcttaacacatgcaagtcgaacggggtaaaagagcttgctcttttacttagtggcggacgggtgagtaacacgtgagcaacctacctctgagagcggaatagcttctggaaacggatggtaataccgcataacattgcgaaaccgcatgattttgcaatcaaatgaaattcgctcagagatgggctc

SEQ ID NO: 3323 - DNA, 225 bp, unidentified
  misc_feature 1..225: note = bacterial strain Ascusb_2875 encodes 16S rRNA
  source 1..225: mol_type = genomic DNA
agagtttgatcatggctcaggacgaacgctggcggcacgcttaacacatgcaagtcgaacggtgaaggtgcttcggcaccggatcagtggcggacgggtgagtaacacgtgagcaatctgcctttaagaggggaataacgactggaaacggtcggtaataccgcataatatagagaaaccgcatgatttttctatcaaagattttatcgcttagagatgagctcg

SEQ ID NO: 3324 - DNA, 225 bp, unidentified
  misc_feature 1..225: note = bacterial strain Ascusb_156 encodes 16S rRNA
  source 1..225: mol_type = genomic DNA
agagtttgatcctggctcaggacgaacgctggcggcacgcttaacacatgcaagtcgaacggtgaaatggtgcttgcaccatggatcagtggcggacgggtgagtaacacgtgagcaatctgccttcgggtgggggataccagttggaaacgactgttaataccgcataacatagcgaaaccgcatgattttgctatcaaagatttattgcctgaagatgagctc

SEQ ID NO: 3325 - DNA, 225 bp, unidentified
  misc_feature 1..225: note = bacterial strain Ascusb_6727 encodes 16S rRNA
  source 1..225: mol_type = genomic DNA
agagtttgatcatggctcaggatgaacgctggcggcatgcctaagacatgcaagtcgaacgaagtgacccaacaatgatggagtgcttgcacaaaatctgcgatggatttttcacttagtggcagacgggtgagtaacacgtaagtaatctacctttaagactgggataacgtttggaaacgaacgctaataccggatgattcataattagataactatttatgc

SEQ ID NO: 3326 - DNA, 225 bp, unidentified
  misc_feature 1..225: note = bacterial strain Ascusb_967 encodes 16S rRNA
  source 1..225: mol_type = genomic DNA
agagtttgatcctggctcagagttaacgctggcatcgtgcataacacatgcaagtcgaacgggactttgctttgtagcaatacagagtaaagtttagtggcagacgggtgagtaatgtataaggaacctaccttcgagtggggaataacagtccgaaaggattgctaataccccataacataacctagtggcatcacttagttatcaaagatttatcgcttgaag

SEQ ID NO: 3327 - DNA, 225 bp, unidentified
  misc_feature 1..225: note = bacterial strain Ascusb_8024 encodes 16S rRNA
  source 1..225: mol_type = genomic DNA
agagtttgatcctggctcaggatgaacgctagcggcaggcctaacacatgcaagtcgaggggtaacgcgaggtagcaataccttggcgacgaccggcgcacgggtgcgtaacgcgtatgcaacctgccctgtacagggggataacggggtgaaaatcccactaatatcccatggtgtcgcgaggccgcatggttttgtgactaaagcttcggtggtacaggatgg

SEQ ID NO: 3328 - DNA, 225 bp, unidentified
  misc_feature 1..225: note = bacterial strain Ascusb_1041 encodes 16S rRNA
  source 1..225: mol_type = genomic DNA
agagtttgatcatggctcaggatgaacgctggcggcgtgcttaacacatgcaagtcgaacggactttatatgaagcctagcgattataaagttagtggcggacgggtgagtaacgcgtgggtaacctgccgtatgctgggggacaacagttggaaacgactgctaataccgcataagcgcacagagaggcatctctcagtgtgaaaaactccggtggcatacgat

SEQ ID NO: 3329 - DNA, 225 bp, unidentified
  misc_feature 1..225: note = bacterial strain Ascusb_2694 encodes 16S rRNA
  source 1..225: mol_type = genomic DNA
agagtttgatcatggctcaggatgaacgctggcggcgtgcctaacacatgcaagtcgaacgggactatttgaaagatcttttcggagtgatttcttttagtttagtggcggacgggtgagtaacgcgtggacaacctgcctttcacagggggatagcagctggaaacggctggtaataccgcatacgctcttaagaccgcatgatcttaagaggaaagatttatc

SEQ ID NO: 3330 - DNA, 225 bp, unidentified
  misc_feature 1..225: note = bacterial strain Ascusb_6214 encodes 16S rRNA
  source 1..225: mol_type = genomic DNA
agagtttgatcctggctcaggacgaacgctggcggcgtgcctaacacatgcaagtcgagcggggaccagggaagagcttgctcagaactggtttcagcggcggacgggtgagtaacgcgtgagcaacctgccttcagcagggggataacgcatcgaaagatgtgctaataccgcatgagaccacaccttcacatggaggaggggtcaaaggagcgattcggctga

SEQ ID NO: 3331 - DNA, 225 bp, unidentified; identical to SEQ ID NO: 2702
  misc_feature 1..225: note = bacterial strain Ascusb_18852 encodes 16S rRNA
  source 1..225: mol_type = genomic DNA

SEQ ID NO: 3332 - DNA, 225 bp, unidentified
  misc_feature 1..225: note = bacterial strain Ascusb_1870 encodes 16S rRNA
  source 1..225: mol_type = genomic DNA
agagtttgatcatggctcaggacgaacgctggcggcgtgcctaacacatgcaagtcgaacgaagcacttccgatttgagattcgtcaagaatcggatttgacttagtggcggacgggtgagtaatgcgtgagcaacctgcccttcagagggggacaacagttggaaacgactgctaataccgcataatgtatccgggtggcatcatctggataccaaagatttat

SEQ ID NO: 3333 - DNA, 225 bp, unidentified
  misc_feature 1..225: note = bacterial strain Ascusb_844 encodes 16S rRNA
  source 1..225: mol_type = genomic DNA
agagtttgatcatggctcaggacgaacgctggcggcacgcttaacacatgcaagtcgaacggtgaagtagagcttgctctacggatcagtggcggacgggtgagtaacacgtgagcaatctgcctttaagaggggaatagcaactggaaacggttggtaataccgcataatatacatttaccgcatgatagatgtatcaaagatttatcgcttaaagatgagctc

SEQ ID NO: 3334 - DNA, 225 bp, unidentified
  misc_feature 1..225: note = bacterial strain Ascusb_2496 encodes 16S rRNA
  source 1..225: mol_type = genomic DNA
agagtttgatcatggctcaggatgaacgctggcggcgtgcctaacacatgcaagtcgagcgagaaattgcagattgaaacttcggtcgaaagaagcgatggacagcggcggacgggtgagtaacgcgtaggtaacctaccttaagctgagggatagcctagggaaacctggattaataccacataatgcggaggagtcacatggcttttccgccaaagatttatc

SEQ ID NO: 3335 - DNA, 225 bp, unidentified
  misc_feature 1..225: note = bacterial strain Ascusb_8764 encodes 16S rRNA
  source 1..225: mol_type = genomic DNA
agagtttgatcatggctcaggatgaacgctagcggcaggcttaacacatgcaagtcgcggggcagcgcgggtagcaatacctggcggcgaccggcggaagggtgcgtaacgcgtgagcaacatgcccgtatcagggggataaccgatggaaacgtcgcctaataccccataacaacgagggccgcatgacccatgtttgaaagttacggcggatacggattggct

SEQ ID NO: 3336 - DNA, 225 bp, unidentified
  misc_feature 1..225: note = bacterial strain Ascusb_3963 encodes 16S rRNA
  source 1..225: mol_type = genomic DNA
agagtttgatcctggctcagaacgaacgctggcggcaggcctaacacatgcaagtcgagcgtgaaaggggcttcggccctgagtaaagcggcgcacgggtgagtaacacgtgaataatctgcccctccgaccgggataacagaccgaaaggactgctaataccggataagcccacaagtcaaccgggcgtgcgggaaaagtacgggatccttcgggaccgtatgc

SEQ ID NO: 3337 - DNA, 225 bp, unidentified
  misc_feature 1..225: note = bacterial strain Ascusb_5561 encodes 16S rRNA
  source 1..225: mol_type = genomic DNA
agagtttgatcatggctcaggacgaacgctggcggcgtgcttaacacatgcaagtcgaacgagcctactggagcagcaatggtccggtaagcgagtggcggacgggtgagtaacgcgtgagcaatctgtccatgcgagggggataacatttggaaacagatgctaataccgcataagaccacgaggccgcatggtcatggggtcaaaggagaaatccgcgcatgg

SEQ ID NO: 3338 - DNA, 225 bp, unidentified
  misc_feature 1..225: note = bacterial strain Ascusb_1162 encodes 16S rRNA
  source 1..225: mol_type = genomic DNA
agagtttgatcatggctcaggacgaacgctggcggcgtgcctaacacatgcaagtcgaacggacgagaggagcttgctcctcgagttagtggcgaacgggtgagtaacgcgtgagcaacctgcctttcagagggggacaacggttggaaacgaccgctaataccgcatgaagcattttggtcgcatgatcgggatgccaaagatttatcgctgaaagatgggctc

SEQ ID NO: 3339 - DNA, 225 bp, unidentified
  misc_feature 1..225: note = bacterial strain Ascusb_3649 encodes 16S rRNA
  source 1..225: mol_type = genomic DNA
agagtttgatcctggctcaggatgaacgctggcggcgtgcttaacacatgcaagtcgaacgaagctccttgaacagaggattcgtctgaagtgaaaggatgacttagtggcggacgggtgagtaacgcgtggggaatctgccccgtaccgggggataacacttagaaataggtgctaataccgcataagcgcacggtgtcgcatgacacagtgtgaaaaactccg

SEQ ID NO: 3340 - DNA, 225 bp, unidentified
  misc_feature 1..225: note = bacterial strain Ascusb_5045 encodes 16S rRNA
  source 1..225: mol_type = genomic DNA
agagtttgatcctggctcaggatgaacgctagcgacaggcctaacacatgcaagtcgagcggcagcacctcgggtggcgagcggcgcacgggtgagtaacgcgtatgtaacctgcccatgagtgggggatagcccggtgaaaaccggattaataccgcataataccattattagacatcttagaatggttaaagattcattgctcatggatggacatgcgttgga

SEQ ID NO: 3341 - DNA, 225 bp, unidentified
  misc_feature 1..225: note = bacterial strain Ascusb_11861 encodes 16S rRNA
  source 1..225: mol_type = genomic DNA
agagtttgatcatggctcaggatgaacgctggcggcatgcctaagacatgcaagtcgtacgaggtggcccgtagagttctgtgcttgcacaaaacaatatggatccccacctagtggcgaaagggtgagtaacacgtgggttatctacctcagagactgggataactactggaaacggtagctaataccggatgatatatacaatgatacgttattgtatagtaa

SEQ ID NO: 3342 - DNA, 225 bp, unidentified
  misc_feature 1..225: note = bacterial strain Ascusb_838 encodes 16S rRNA
  source 1..225: mol_type = genomic DNA
agagtttgatcatggctcaggacgaacgctggcggcacgcttaacacatgcaagtcgaacgaacggagatagcttgctatcaaagttagtggcggacgggtgagtaacacgtgagcaatctgcctttaagtggggaataacgattggaaacggtcggtaataccgcataaaatagctgaaccgcatgatttggctatcaaagatttatcgcttaaagatgagctc

SEQ ID NO: 3343 - DNA, 225 bp, unidentified
  misc_feature 1..225: note = bacterial strain Ascusb_7526 encodes 16S rRNA
  source 1..225: mol_type = genomic DNA
agagtttgatcatggctcaggacgaacgctggcggcgtgcttaacacatgcaagtcgaacggggattaatgcggaagcccttcggggtggaaggattaattcgagtggcggacgggtgagtaacgcgtgagcaacctgtcccagacaggggaataacacttggaaacaggtgctaataccgcataagaccacggggtcgcatggctctggggtaaaaggagtaat

SEQ ID NO: 3344 - DNA, 225 bp, unidentified
  misc_feature 1..225: note = bacterial strain Ascusb_2604 encodes 16S rRNA
  source 1..225: mol_type = genomic DNA
agagtttgatcatggctcaggacgaacgctggcggcacgcttaacacatgcaagtcgaacggtgaaaagtagcttgctacttggatcagtggcggacgggtgagtaacacgtgagcaatctgcctctaagtggggaataacgactggaaacggtcggtaataccgcataacatagctgagccgcatgactcggttatcaaagatttatcgcttagagatgagctc

SEQ ID NO: 3345 - DNA, 225 bp, unidentified
  misc_feature 1..225: note = bacterial strain Ascusb_8171 encodes 16S rRNA
  source 1..225: mol_type = genomic DNA
agagtttgatcatggctcaggacgaacgctggcggcgtgcctaacacatgcaagtcgagcggagacacgggaacggaaggcttcggctggaagatcccatgttttagcggcggacgggtgagtaacgcgtgagcaatctgtccttcacagggggataagataccgaaaggtgttctaataccgcataagaccacattcccgcatgggagaggggtcaaaggagta

SEQ ID NO: 3346 - DNA, 225 bp, unidentified
  misc_feature 1..225: note = bacterial strain Ascusb_1889 encodes 16S rRNA
  source 1..225: mol_type = genomic DNA
agagtttgatcatggctcaggatgaacgctagctacaggcttaacacatgcaagtcgaggggcagcatgaagtttgcttgcaaactttgatggcgaccggcgcacgggtgagtaacgcgtatccaaccttccccttagtagggcatagcccggcgaaagtcggattaataccctatgttcttcgtagaggacatctgaaatgaagcaaagacttgtcgctaaggg

SEQ ID NO: 3347 - DNA, 225 bp, unidentified
  misc_feature 1..225: note = bacterial strain Ascusb_7051 encodes 16S rRNA
  source 1..225: mol_type = genomic DNA
agagtttgatcatggctcaggatgaacgctagcggcaggcttaacacatgcaagtcgaggggcagcgagggtagcaatacctgtcggcgaccggcggaagggtgcgtaacgcgtgagcaacatgcccgtatcagggggatagtcattggaaacgatgcgtaataccccataacaacgaggatcacatggtccacgtttgaaagattcatcggatacggattggct

SEQ ID NO: 3348 - DNA, 225 bp, unidentified
  misc_feature 1..225: note = bacterial strain Ascusb_966 encodes 16S rRNA
  source 1..225: mol_type = genomic DNA
agagtttgatcctggctcaggacgaacgctggcggcacgcctaacacatgcaagtcgaacggtgttgatttgagtttacttgaatcaacatagtggcggacgggtgagtaacacgtgagcaacctgccttttggcgagggatagcttctggaaacggatggtaatacctcataatatagcttgatcgcatggtcgggttatcaaagaatttcgccaaaagatggg

SEQ ID NO: 3349 - DNA, 225 bp, unidentified
  misc_feature 1..225: note = bacterial strain Ascusb_725 encodes 16S rRNA
  source 1..225: mol_type = genomic DNA
agagtttgatcctggctcaggatgaacgctagctacaggcttaacacatgcaagtcgaggggcagcatggggtcagcttgctgactccgatggcgaccggcgcacgggtgagtaacgcgtatccaaccttccctatactaggggatagcccggcgaaagtcggattaataccctatgttcttcatagatggcatctgacgtgaagcaaagattcatcggtatagg

SEQ ID NO: 3350 - DNA, 225 bp, unidentified
  misc_feature 1..225: note = bacterial strain Ascusb_1312 encodes 16S rRNA
  source 1..225: mol_type = genomic DNA
agagtttgatcatggctcaggatgaacgctggcggcgtgcctaatacatgcaagtcgaacgcacggaccaagcttgcttgggaagtgagtggcgaacgggtgagtaatacataagcaacctgcccacggagaccgggataacttctggaaacgggaactaagaccggataggtatattgaaggcatcttcgatatattaaaggtgagagacactggtggatgggc

SEQ ID NO: 3351 - DNA, 225 bp, unidentified
  misc_feature 1..225: note = bacterial strain Ascusb_3636 encodes 16S rRNA
  source 1..225: mol_type = genomic DNA
agagtttgatcctggctcaggatgaacgctggcggcgtgcttaacacatgcaagtcgaacggagacaacccaccgagtgaagccttagcttgctttggccgatctcaccgggttatcttagtggcggacgggtgagtaacgcgtggataacctgcctgtatctgggggataacagttagaaatgactgctaataccgcataagcgcacggcaccgcatggtactg

SEQ ID NO: 3352 - DNA, 225 bp, unidentified
  misc_feature 1..225: note = bacterial strain Ascusb_2851 encodes 16S rRNA
  source 1..225: mol_type = genomic DNA
agagtttgatcatggctcaggacgaacgctggcggcgcgcctaacacatgcaagtcgaacggaggtattgagacagaagcttcggcggaagacttaatactttagtggcgaacgggtgagtaacacgtgaggaacctgcctttaagagggggataacacttagaaataggtgctaataccgcataagaccacagagcggcatcgctcaggggtcaaaggaggaat

SEQ ID NO: 3353 - DNA, 225 bp, unidentified
  misc_feature 1..225: note = bacterial strain Ascusb_254 encodes 16S rRNA
  source 1..225: mol_type = genomic DNA
agagtttgatcatggctcaggatgaacgctggcggcgtgcttaacacatgcaagtcgaacgaggttattacagttgaagttttcggatggaaaccgttttaaccgagtggcggacgggtgagtaacgcgtggggaacctgccccattccgggggataccagttggaaacgactgttaataccgcataagcgcacagtaccgcatggtacggtgtgaaaaactccg

SEQ ID NO: 3354 - DNA, 225 bp, unidentified
  misc_feature 1..225: note = bacterial strain Ascusb_8436 encodes 16S rRNA
  source 1..225: mol_type = genomic DNA
agagtttgatcctggctcaggacgaacgctggcggcgtgcttaacacatgcaagtcgaacggggatatatcgggaagggcttcggtctggaaggatgtattcgagtggcggacgggtgagtaacgcgtgaacaatctgtcccagacagggggataacacttggaaacaggtgctaataccgcataagaccacggggtcgcatggctttgaggtaaaaggaggaat

SEQ ID NO: 3355 - DNA, 225 bp, unidentified
  misc_feature 1..225: note = bacterial strain Ascusb_3501 encodes 16S rRNA
  source 1..225: mol_type = genomic DNA
agagtttgatcctggctcaggatgaacgctagctacaggcttaacacatgcaagtcgcggggcagcactgggattgcttgcaatccctggtggcgaccggcgcacgggtgagtaacgcgtatccaacctgccctgcagtggggaacagcccggcgaaagtcggattaatgccccatggcgtcctcggcgggcatctaatgaggactaaaggcttcggccgctgcg

SEQ ID NO: 3356 - DNA, 225 bp, unidentified
  misc_feature 1..225: note = bacterial strain Ascusb_1070 encodes 16S rRNA
  source 1..225: mol_type = genomic DNA
agagtttgatcatggctcaggatgaacgctggcggcgtgcctaacacatgcaagtcgagcggagataaagggtgattcttcggatgaatcctttatcttagcggcggatgggtgagtaacacgtgggtaacctgccctgcacagggggataacagctggaaacggctgttaataccgcatatgcacacgctgccgcatggcagggggtggaaagatttatcggtg

SEQ ID NO: 3357 - DNA, 225 bp, unidentified
  misc_feature 1..225: note = bacterial strain Ascusb_1029 encodes 16S rRNA
  source 1..225: mol_type = genomic DNA
agagtttgatcctggctcaggatgaacgctagctacaggcttaacacatgcaagtcgaggggcagcatacaggtagcttgctatctgtgatggcgaccggcgcacgggtgagtaacgcgtatccaacctggcccatagtagggaacagcccggcgaaagtcggattaatgccctatgttgtttgaagcgggcatctaattcaaaccaaagatttatcgctatggg

SEQ ID NO: 3358 - DNA, 225 bp, unidentified
  misc_feature 1..225: note = bacterial strain Ascusb_5260 encodes 16S rRNA
  source 1..225: mol_type = genomic DNA
agagtttgatcatggctcaggatgaacgctagctacaggcttaacacatgcaagtcgaggggcagcattatcgaagcttgctttgatagatggcgaccggcgcacgggtgagtaacgcgtatccaaccttccccctaccagaggatagcccggcgaaagtcggattaatactctatgttttccttgttgggcatcttatgaggaacaaagactcgtcggtatggg

SEQ ID NO: 3359 - DNA, 225 bp, unidentified
  misc_feature 1..225: note = bacterial strain Ascusb_1855 encodes 16S rRNA
  source 1..225: mol_type = genomic DNA
agagtttgatcatggctcaggacgaacgctggcggcgtgcctaacacatgcaagtcgagcggagatatacttgatgagagcttcggcaggattcgggtatattttagcggcggacgggtgagtaacgcgtgagcaatctgtctcagacagggggataacgcagcgaaagttgcactaataccgcatgagaccacagcatcgcatggtgcaggggtcaaaggagca

SEQ ID NO: 3360 - DNA, 225 bp, unidentified
  misc_feature 1..225: note = bacterial strain Ascusb_2407 encodes 16S rRNA
  source 1..225: mol_type = genomic DNA
agagtttgatcatggctcaggatgaacgctagcggcaggcttaacacatgcaagtcgaggggcatcgcgggtagcaatacctggcggcgaccggcgaaagggtgcggaacacgtgagcaacttgcccgtgacagggggataagcgctggaaacggcgtctaataccccgtaacacaagaggtggcatcgccttttgttgaaagtcttcggatggtcacggatggg

SEQ ID NO: 3361 - DNA, 225 bp, unidentified
  misc_feature 1..225: note = bacterial strain Ascusb_2738 encodes 16S rRNA
  source 1..225: mol_type = genomic DNA
agagtttgatcatggctcaggacgaacgctggcggcatgcctaacacatgcaagtcgaacggagttaaaggagcttgcttctttaacttagtggcggacgggtgagtaacgcgtgagcaacctgcctctgagtgtggaataatgtactgaaaaggacactaataccgcatgacatacacggaccgcatgatctgtgtatcaaagatttatcgctcagagatgggc

SEQ ID NO: 3362 - DNA, 225 bp, unidentified
  misc_feature 1..225: note = bacterial strain Ascusb_1898 encodes 16S rRNA
  source 1..225: mol_type = genomic DNA
agagtttgatcctggctcaggatgaacgctggcggcgtgcttaacacatgcaagtcgaacgaggaataattgatgagatcttcggatggatttagttattccgagtggcggacgggtgagtaacgcgtgggtaacctgccccatacagggggacaacagagggaaacttctgctaataccgcataagcgctttttatggcatcgtaagaagcggaaagctccggc

SEQ ID NO: 3363 - DNA, 225 bp, unidentified
  misc_feature 1..225: note = bacterial strain Ascusb_18214 encodes 16S rRNA
  source 1..225: mol_type = genomic DNA
agagtttgatcctggctcaggatgaacgctggcggcgtgcctaacacatgcaagtcgaacggagtttattcgctgcagaggtttcggccaaagcttgaataaacttagtggcggacgggtgagtaacgcgtgggcaacctgcctcgtactgggggataacagttggaaacgactgttaataccgcataagcgcacggtatcgcatgatacagtgtgaaaaactcc

SEQ ID NO: 3364 - DNA, 225 bp, unidentified
  misc_feature 1..225: note = bacterial strain Ascusb_150 encodes 16S rRNA
  source 1..225: mol_type = genomic DNA
agagtttgatcatggctcaggatgaacgctagctacaggcttaacacatgcaagtcgaggggcagcatgggagttgcttgcaattcctgatggcgaccggcgcacgggtgagtaacgcgtatccaaccttcccctcagtagggcatagcccgtagaaatgcggattaataccctatgcggtccgatgaggacatctgagctggacgaaaggtttaccgctgaggg

SEQ ID NO: 3365 - DNA, 225 bp, unidentified
  misc_feature 1..225: note = bacterial strain Ascusb_1899 encodes 16S rRNA
  source 1..225: mol_type = genomic DNA
agagtttgatcctggctcaggatgaacgctggcggcgtgcttaacacatgcaagtcgaacggagcttagaaggaagcttgctttcatttaagcttagtggcggacgggtgagtaacgcgtgagtaacctgcccttgagaggggaataacatcgagaaatcggtgctaataccgcatgatgtcggaagaccgcatgatctaccgaccaaagatttatcgctcaagg

SEQ ID NO: 3366 - DNA, 225 bp, unidentified
  misc_feature 1..225: note = bacterial strain Ascusb_5919 encodes 16S rRNA
  source 1..225: mol_type = genomic DNA
agagtttgatcatggctcaggacgaacgctggcggcgtgcttaacacatgcaagtcgaacgaggttgttttaaggaaggtttcggctggaattgaaataaccgagtggcggacgggtgagtaacgcgtgagcaacctgtcttctacagggggataacgctccgaaaggagtgctaataccgcataagaccacgaagctgcatggctttgaggtcaaaggagcaat

SEQ ID NO: 3367 - DNA, 225 bp, unidentified
  misc_feature 1..225: note = bacterial strain Ascusb_19172 encodes 16S rRNA
  source 1..225: mol_type = genomic DNA
agagtttgatcatggctcaggatgaacgctagcgacaggcttaacacatgcaagtcgaggggcagcgcggaggtagcaatacttctggcggcgaccggcgcactggtgagtaacacgtatgcgacctgccccggacagggggataaacccgggaaactgggcctaataccccatatgccatgaggatgcatgtcctcttggtgaaagatccgtcggtccgggatg

SEQ ID NO: 3368 - DNA, 225 bp, unidentified
  misc_feature 1..225: note = bacterial strain Ascusb_5914 encodes 16S rRNA
  source 1..225: mol_type = genomic DNA
agagtttgatcatggctcaggatgaacgctagcggcaggcttaacacatgcaagtcgaggggtaacagggcgtagcaatacgccgctgacgaccggcgcacgggtgcgtaacgcgtatacaacctacctgtaacagggggataacggagtgaaaactccactaataccccatattgacgtggtctcgcatgggactgtgtcgaaagcttcggtggttacggatgg

SEQ ID NO: 3369 - DNA, 225 bp, unidentified
  misc_feature 1..225: note = bacterial strain Ascusb_7687 encodes 16S rRNA
  source 1..225: mol_type = genomic DNA
agagtttgatcctggctcaggatgaacgctagcggcaggcttaacacatgcaagtcgaggggcagcgcggaggtagcaatacttctggcggcgaccggcggaagggtgcgtaacgcgtgagcaacatgcccgtggcagggggataagcgatggaaacgtcgtctaagaccccgtaacaacagagttcgcatggattttgtttgaaagcttcggcggccacggatt

SEQ ID NO: 3370 - DNA, 225 bp, unidentified
  misc_feature 1..225: note = bacterial strain Ascusb_4837 encodes 16S rRNA
  source 1..225: mol_type = genomic DNA
agagtttgatcctggctcaggatgaacgctggcggcgtgcctaacacatgcaagtcgaacgaggtcatttgttcttgcgattcgtcaagagaacttctggccgagtggcggatgggtgagtaacgcgtggagaacctgccctcatctgggggataacaactggaaacggttgacaataccgcatagactctggtgctcgcatgagcgtaagagaaaagatttatc

SEQ ID NO: 3371 - DNA, 225 bp, unidentified
  misc_feature 1..225: note = bacterial strain Ascusb_5818 encodes 16S rRNA
  source 1..225: mol_type = genomic DNA
agagtttgatcctggctcaggatgaacgctggcggcgtgcctaatacatgcaagtcgagcgagaagctcgctattgaaacttcggtcgatttagcgagtggaaagcggcggacgggtgagtaacgcgtaggcaacctgccctttgcacagggatagccactggaaacggtgattaatacctgataatgcatctccatcgcctgttggagatgccaaagatttatt

SEQ ID NO: 3372 - DNA, 225 bp, unidentified
  misc_feature 1..225: note = bacterial strain Ascusb_6482 encodes 16S rRNA
  source 1..225: mol_type = genomic DNA
agagtttgatcctggctcaggatgaacgctagctacaggcttaacacatgcaagtcgaggggcatcatgtcggttgcttgcaaccgatgatggcgaccggcgcacgggtgagtaacgcgtatccaaccttccccttagtagggcatagcccgtagaaatgcggattaacaccctatgttcttcatggatggcatctgacgtgaagcaaagtttacgctaagggat

SEQ ID NO: 3373 - DNA, 225 bp, unidentified
  misc_feature 1..225: note = bacterial strain Ascusb_3692 encodes 16S rRNA
  source 1..225: mol_type = genomic DNA
agagtttgatcctggctcaggatgaacgctggcggcgtgcctaacacatgcaagtcgagcgagacgcgacggaacataacttcggttttgggaagtcgctgatagcggcggacgggtgagtaacgcgtgggcaacctgccccttactgggagatagccgagggaaacttcgagtaataccccataacgcatagacgagacatctcgattatgccaaagatttatc

SEQ ID NO: 3374 - DNA, 225 bp, unidentified
  misc_feature 1..225: note = bacterial strain Ascusb_1101 encodes 16S rRNA
  source 1..225: mol_type = genomic DNA
agagtttgatcatggctcagaacgaacgctggtggcgtgtcttatacatgcaagtcgagcgaggcagcaatgccgagcggcgaacgggtgagtaacgcgtaagcaatctgccccatatcaggaaatacccgtgccaacgcgcggttaatgtccaggagagtggccctctgcatggagggttgactagagatttatcggtatgggatgagcttgcgtccgattagc

SEQ ID NO: 3375 - DNA, 225 bp, unidentified
  misc_feature 1..225: note = bacterial strain Ascusb_6119 encodes 16S rRNA
  source 1..225: mol_type = genomic DNA
agagtttgatcctggctcaggacgaacgctggcggcgtgcctaacacatgcaagtcgaacggaactgtttggaaggaatcttcggatgacggaagaacagtttagtggcggacgggtgagtaacgcgtgagtaacctgcctccgagaggggaataacgttctgaaaagaacgctaataccgcataacacatatttgccgcatgacagatatgtcaaagattttat

SEQ ID NO: 3376 - DNA, 225 bp, unidentified
  misc_feature 1..225: note = bacterial strain Ascusb_1338 encodes 16S rRNA
  source 1..225: mol_type = genomic DNA
agagtttgatcatggctcaggatgaacgctggcggcgtgcttaacacatgcaagtcgaacggagccaaggagtgcttgcattcctgaagcttagtggcggacgggtgagtaacgcgtggggaatctgccccgtaccgggggataacacttagaaataggtgctaataccgcataagcgcacggtaccgcatggtacagtgtgaaaaactccggtggtacgggatg

SEQ ID NO: 3377 - DNA, 225 bp, unidentified
  misc_feature 1..225: note = bacterial strain Ascusb_2097 encodes 16S rRNA
  source 1..225: mol_type = genomic DNA
agagtttgatcctggctcaggatgaacgctggcggcgcgcctaacacatgcaagtcgaacggttaaagcaccttcgggtgtgtataaagtggcgaacggctgagtaacacgtgggcaacctgcccctcgcaccgggacagcctcgggaaaccgtggttaataccggatacgccccgcagaggacatcccctgcgggggaaagccccgacggcgagggatgggccc

SEQ ID NO: 3378 - DNA, 225 bp, unidentified
  misc_feature 1..225: note = bacterial strain Ascusb_3298 encodes 16S rRNA
  source 1..225: mol_type = genomic DNA
agagtttgatcatggctcaggatgaacgctagctacaggcttaacacatgcaagtcgaggggcagcatgacgatagcttgctattgtcgatggcgaccggcgcacgggtgagtaacgcgtatccaaccttccccttagtagggcatagcccggcgaaagtcggattaataccctatgttcttcaatgcgggcatctaagttgaagcaaagattcatcgctaaggg

SEQ ID NO: 3379 - DNA, 225 bp, unidentified
  misc_feature 1..225: note = bacterial strain Ascusb_18453 encodes 16S rRNA
  source 1..225: mol_type = genomic DNA
agagtttgatcctggctcaggatgaacgctggcggcatgcctaagacatgcaagtcgaacgaggtggccctttgaaggatgcgtgcttgcacaaatccggaaaaggattttccacctagtggcagacgggtgagtaacacgtgggtgacctacctttaagttggggataacagttggaaacgattgctaataccgaatgtgatataactgtcgtggttatattga

SEQ ID NO: 3380 - DNA, 225 bp, unidentified
  misc_feature 1..225: note = bacterial strain Ascusb_3533 encodes 16S rRNA
  source 1..225: mol_type = genomic DNA
agagtttgatcatggctcaggacgaacgctggcggcacgcttaacacatgcaagtcgaacggtgaagatgcttcggtatcggatcagtggcggacgggtgagtaacacgtgagcaatctgcctttaagtggggaataacatttggaaacggatggtaataccgcataatatagacgaaccgcatgatttgtctatcaaagatttatcgcttaaagatgagctcgc

SEQ ID NO: 3381 - DNA, 225 bp, unidentified
  misc_feature 1..225: note = bacterial strain Ascusb_3537 encodes 16S rRNA
  source 1..225: mol_type = genomic DNA
agagtttgatcatggctcagaacgaacgctggcggcaggtcttaggcatgcaagtcgaacggatgacagagagcttgctctctgaagtcagtggcgcacgagtgagtaacgcgtgggaaactgcccttcactggggaataacgtttggaaacgaacgctaataccgcatacgcccgcaaggggaaagatttatcggtgatggatgtgcccgcgttggattagcca

SEQ ID NO: 3382 - DNA, 225 bp, unidentified
  misc_feature 1..225: note = bacterial strain Ascusb_2559 encodes 16S rRNA
  source 1..225: mol_type = genomic DNA
agagtttgatcatggctcaggatgaacgctagctacaggcttaacacatgcaagtcgaggggcagcatggtcttagcttgctaaggctgatggcgaccggcgcacgggtgagtaacgcgtatccaaccttccccttagtagggcatagcccggcgaaagtcggattaacaccctatgttttccgttgcgggcatctaatatggaacaaagatttatcgctaaggg

SEQ ID NO: 3383 - DNA, 225 bp, unidentified
  misc_feature 1..225: note = bacterial strain Ascusb_2094 encodes 16S rRNA
  source 1..225: mol_type = genomic DNA
agagtttgatcctggctcaggatgaacgctggcggcgtgcttaacacatgcaagtcgaacgaagccaaaaggaagcttgctttctttgaagcttagtggcggacgggtgagtaacgcgtgagaaacctgcccttgagtggggaataacaccgagaaatcggtgctaataccgcataatgtcacgataccgcatgatattgtgaccaaaggatttattcgcttaag

SEQ ID NO: 3384 - DNA, 225 bp, unidentified
  misc_feature 1..225: note = bacterial strain Ascusb_11996 encodes 16S rRNA
  source 1..225: mol_type = genomic DNA
agagtttgatcctggctcaggataaacgctggcggcgtgcttaacacatgcaagtcgaacggagtattcctcccgagaccgaggaagcttgcttctgaagaatcaattggaatacttagtggcggacgggtgagtaacgcgtgggtaacctgcctcacacagggggataacagttggaaacgactgttaataccgcataagcgcacagtatcgcatggtacggtg

SEQ ID NO: 3385 - DNA, 225 bp, unidentified
  misc_feature 1..225: note = bacterial strain Ascusb_11494 encodes 16S rRNA
  source 1..225: mol_type = genomic DNA
agagtttgatcatggctcaggatgaacgctagctacaggcttaacacatgcaagtcgaggggcagcatgatcttagcttgctaagattgatggcgaccggcgcacgggtgagtaacgcgtatccaaccttccctatagtagaggatagcccggcgaaagtcggattaatactctatgttattcaatgcagacatctaagttgaatcaaaggtttaccgctatagg

SEQ ID NO: 3386 - DNA, 225 bp, unidentified
  misc_feature 1..225: note = bacterial strain Ascusb_6257 encodes 16S rRNA
  source 1..225: mol_type = genomic DNA
agagtttgatcctggctcaggatgaacgctagctacaggcttaacacatgcaagtcgaggggcagcaggatcttagcttgctaagattgctggcgaccggcgcacgggtgagtaacgcgtatccaaccttccccttagtagggcatagcccgatgaaaatcggattaataccctatgttcttcgtagaagacatctgacatgaagcaaagattaatcgctaaggg

SEQ ID NO: 3387 - DNA, 225 bp, unidentified
  misc_feature 1..225: note = bacterial strain Ascusb_3785 encodes 16S rRNA
  source 1..225: mol_type = genomic DNA
agagtttgatcatggctcaggacgaacgctggcggcgtgcttaacacatgcaagtcgagcggggacatgagggaataagcttcggcagaaagaatcatgttctagcggcggacgggtgagtaacgcgtgagcaatctgtcccagacagggggataacacttggaaacaggtgctaataccgcataagaccacgaggcggcatcgtcttggggtaaaaggggagac

SEQ ID NO: 3388 - DNA, 225 bp, unidentified
  misc_feature 1..225: note = bacterial strain Ascusb_2080 encodes 16S rRNA
  source 1..225: mol_type = genomic DNA
agagtttgatcatggctcaggagaaacgctggcggcgcacataagacatgcaagtcgaacggaatttagtcgaatgtttacatgagacgaaaatttagtggcggacgggtgagtaacacgtgagcaacctaccttaaggcgggggataacattgagaaatcagtgctaataccgcataaaactgtaagaggacatcctcatacagtcaaaggagtaatccaccat

SEQ ID NO: 3389 - DNA, 225 bp, unidentified
  misc_feature 1..225: note = bacterial strain Ascusb_21116 encodes 16S rRNA
  source 1..225: mol_type = genomic DNA
agagtttgatcctggctcaggataaacgctggcggcgcacataagacatgcaagtcgaacgaaagccgttttaaattaaatgattggatgtgaggacttgtccaagttgaaatgaatttagtttaaaacatatgactttagtggcggactggtgagtaacgcgtgagcaacctgcctgttagaggggaataccagtgagaaatcactgctaataccgcatatgct

SEQ ID NO: 3390 - DNA, 225 bp, unidentified
  misc_feature 1..225: note = bacterial strain Ascusb_5201 encodes 16S rRNA
  source 1..225: mol_type = genomic DNA
agagtttgatcctggctcaggatgaacgctagcggcaggcttaacacatgcaagtcgaggggcagcgggttgtagcaatacaatgccggcgaccggcgaaagggtgagtaacgcgtgagcaacatgcccgatactggaggatagtcgatggaaacgtcgcgtaatactccgtaacaacagagaccgcatggtttttgtttaatagatttatcggtatcggattgg

SEQ ID NO: 3391 - DNA, 225 bp, unidentified
  misc_feature 1..225: note = bacterial strain Ascusb_1080 encodes 16S rRNA
  source 1..225: mol_type = genomic DNA
agagtttgatcatggctcaggacaaacgctggcggcgtgcctaacacatgcaagtcgaacgaagcactgcggaaagagacttcggtcaattgaagctttgacttagtggcggacgggtgagtaatgcatgagcaacctgccctggagagggggacaacagctggaaacggctgctaataccgcatgatgttgcggggaggcatcttcctgcaaccaaagatttat

SEQ ID NO: 3392 - DNA, 225 bp, unidentified
  misc_feature 1..225: note = bacterial strain Ascusb_3703 encodes 16S rRNA
  source 1..225: mol_type = genomic DNA
agagtttgatcatggctcaggacgaacgctggcggcacgcctaacacatgcaagtcgaacggtgttaatttggtttactgaattgacatagtggcggacgggtgagtaacacgtgagcaacctgccttcaagtgagggatagcttctggaaacggatggtaataccttataacataatcttatcgcatggtgagattatcaaagatttatcgcttgaagatgggc

SEQ ID NO: 3393 - DNA, 225 bp, unidentified
  misc_feature 1..225: note = bacterial strain Ascusb_2505 encodes 16S rRNA
  source 1..225: mol_type = genomic DNA
agagtttgatcatggctcaggacgaacgctggcggcgtgcttaacacatgcaagtcgaacgaggttatgtttcggaaggcttcggctggaagaggcataaccgagtggcggacgggtgagtaacgcgtgagcaacctgtcttctacagggggataacggtccgaaaggattgctaataccgcataagaccacggtaccgcatggtattgaggtcaaaggagagat

SEQ ID NO: 3394 - DNA, 225 bp, unidentified
  misc_feature 1..225: note = bacterial strain Ascusb_301 encodes 16S rRNA
  source 1..225: mol_type = genomic DNA
agagtttgatcatggctcaggatgaacgctagctacaggcttaacacatgcaagtcgaggggcagcatgaggtcagcttgctgactttgatggcgaccggcgcacgggtgagtaacgcgtatccaaccttccccatagtagggtatagcccgtagaaatgcggattaatcccctatgtcctccgaagatgccatcagatttggagcaaagatttatcgctatggg

SEQ ID NO: 3395 - DNA, 225 bp, unidentified
  misc_feature 1..225: note = bacterial strain Ascusb_11066 encodes 16S rRNA
  source 1..225: mol_type = genomic DNA
agagtttgatcctggctcaggacgaacgctggcggcgtgcttaacacatgcaagtcgtgcgaggatatgattggaaggtcttcggaccggaagatcgtatccgagcggcggacgggtgagtaacgcgtgagcaacctgccttcaacagggggataacgcatcgaaagatgtgctaataccgcgtaagaccacggcatcacatggtgcaggggtcaaaggagcaat

SEQ ID NO: 3396 - DNA, 225 bp, unidentified
  misc_feature 1..225: note = bacterial strain Ascusb_6723 encodes 16S rRNA
  source 1..225: mol_type = genomic DNA
agagtttgatcatggctcaggacgaacgctggcggcgtgcttaacacatgcaagtcgagcggagattgattccggaaggttttcggaccggaagggagcaatttgagcggcggacgggtgagtaacgcgtgagcgatctgtcccatacagggggataacacttggaaacaggtgctaataccgcataagaccacggatctgcatggatcaggggtaaaaggagaa

SEQ ID NO: 3397 - DNA, 225 bp, unidentified
  misc_feature 1..225: note = bacterial strain Ascusb_1308 encodes 16S rRNA
  source 1..225: mol_type = genomic DNA
agagtttgatcatggctcaggatgaacgctagctacaggcttaacacatgcaagtcgcggggcatcaggagagaagcttgcttttcttgctggcgaccggcgcacgggtgagtaacgcgtatccaaccttccccttagtagggcatagcccggcgaaagtcggattaataccctatgttgtcgtttgaagacatctgaagacgattaaagattcatcgctaaggg

SEQ ID NO: 3398 - DNA, 225 bp, unidentified
  misc_feature 1..225: note = bacterial strain Ascusb_6742 encodes 16S rRNA
  source 1..225: mol_type = genomic DNA
agagtttgatcatggctcaggataaacgctggcggcgtgcttaacacatgcaagtcgaacggagtggttctcccgaagcgtgagggtgcttgcacctgaacaattcatttgaatcacttagtggcggacgggtgagtaacgcgtgggaaacctgccctatactgggggatagcagttggaaacgactgataataccgcataagcgcacagtatcgcatggtacag

SEQ ID NO: 3399 - DNA, 225 bp, unidentified
  misc_feature 1..225: note = bacterial strain Ascusb_2121 encodes 16S rRNA
  source 1..225: mol_type = genomic DNA
agagtttgatcctggctcaggatgaacgctagcggcaggcttaacacatgcaagtcgaggggtaacagggagtagcaatactctgctgacgaccggcgcacgggtgcgtaacgcgtatgcaacctacctgtaacaggggtataacggagagaaatttccactaattccccatattgttattctttcgcatgttaggataacgaaagcttcggtggttacggatgg

SEQ ID NO: 3400 - DNA, 225 bp, unidentified
  misc_feature 1..225: note = bacterial strain Ascusb_4208 encodes 16S rRNA
  source 1..225: mol_type = genomic DNA
agagtttgatcatggctcaggatgaacgctggcggcgtgcctaatacatgcaagtcgagcgaggtagcttgctacctagcggcgaacgggtgagtaacacgtaggtaacctgcctttgagactgggatacccggacgaaagttcggctaataccggataacaacggagatggcatcttctccgcttgaaaggtgcgtttgcaccactcttagatggacctgcggc

SEQ ID NO: 3401 - DNA, 225 bp, unidentified
  misc_feature 1..225: note = bacterial strain Ascusb_3980 encodes 16S rRNA
  source 1..225: mol_type = genomic DNA
agagtttgatcatggctcaggatgaacgctggcggcgtgcttaacacatgcaagtcgaacggagtattgacgctgacgagtagagtagcttgctacgaagcaaatcttgttgatacttagtggcggacgggtgagtaacgcgtgggtaacctgccatatacagggggataacacttagaaataggtgctaataccgcataagcgcacggtatcgcatgatacagt

SEQ ID NO: 3402 - DNA, 225 bp, unidentified
  misc_feature 1..225: note = bacterial strain Ascusb_1379 encodes 16S rRNA
  source 1..225: mol_type = genomic DNA
agagtttgatcatggctcaggatgaacgctagctacaggcttaacacatgcaagtcgaggggcagcagggcgatagcttgctattgttgctggcgaccggcgcacgggtgagtaacgcgtatccaaccttccccttactagaggatagcccggcgaaagtcggattaatactctatgttctccttagagggcatctgacgaggagcaaagaaatatcggtaaggg

SEQ ID NO: 3403 - DNA, 225 bp, unidentified; identical to SEQ ID NO: 2308
  misc_feature 1..225: note = bacterial strain Ascusb_4900 encodes 16S rRNA
  source 1..225: mol_type = genomic DNA

SEQ ID NO: 3404 - DNA, 225 bp, unidentified
  misc_feature 1..225: note = bacterial strain Ascusb_2422 encodes 16S rRNA
  source 1..225: mol_type = genomic DNA
agagtttgatcatggctcagaacgaacgctggcggcgcgtcttaagcatgcaagtcgagcggtaagatagagcttgctctatcctagagcggcggactggtgagtaacgcgtgggtgacgtacccttgtgacggggacagctcctagaaataggagataataccggatacgctgtgcattgtcagaggatgtacaggaaaggatcttttgatccgcacgaggagc

SEQ ID NO: 3405 - DNA, 225 bp, unidentified
  misc_feature 1..225: note = bacterial strain Ascusb_1914 encodes 16S rRNA
  source 1..225: mol_type = genomic DNA
agagtttgatcctggctcaggacgaacgctggcggcgtgcttaacacatgcaagtcgaacgaggattacgagattgagagcttcggcaggatagatcgtaattcgagtggcggacgggtgagtaacgcgtgagcaatctgtcccagacaggggaataacacttggaaacaggtgctaataccgcataagaccacagtatcgcatggtacagaggtaaaaggagca

SEQ ID NO: 3406 - DNA, 225 bp, unidentified
  misc_feature 1..225: note = bacterial strain Ascusb_5804 encodes 16S rRNA
  source 1..225: mol_type = genomic DNA
agagtttgatcatggctcaggatgaacgctggcggcatgcctaagacatgcaagtcgaacgagacgacctcaagaagactgagtgcttgcacgaagttggaaagagatcatcgtctagtggcagacgggtgagtaacacgtgggtaacctacctaaaagctggggataacagttggaaacgactgctaataccgaataagatattcgtattgaaagaagccttta

SEQ ID NO: 3407 - DNA, 225 bp, unidentified
  misc_feature 1..225: note = bacterial strain Ascusb_3349 encodes 16S rRNA
  source 1..225: mol_type = genomic DNA
agagtttgatcatggctcaggatgaacgctggcggcgtgcctaatacatgcaagtcgagcgaggtagcttgctacctagcggcgaacgggtgagtaacacgtaggtaacctgcctttgagactgggatacccgagggaaacttcggctaataccggataacaacggggatggcatcatctccgcttgaaaggtgcgtttgcaccactcttagatggacctgcggc

SEQ ID NO: 3408 - DNA, 225 bp, unidentified
  misc_feature 1..225: note = bacterial strain Ascusb_1329 encodes 16S rRNA
  source 1..225: mol_type = genomic DNA
agagtttgatcatggctcaggatgaacgctagctacaggcttaacacatgcaagtcgaggggcagcatattggtagcttgctactaatgatggcgaccggcgcacgggtgagtaacgcgtatccaaccttccctatactagaggatagcccggcgaaagtcggattaatactctatgttcttcgtagatgacatctgaaatgaagcaaagatttatcggtatagg

SEQ ID NO: 3409 - DNA, 225 bp, unidentified
  misc_feature 1..225: note = bacterial strain Ascusb_5587 encodes 16S rRNA
  source 1..225: mol_type = genomic DNA
agagtttgatcctggctcaggatgaacgctagcgacaggcttaacacatgcaagtcgaggggcagcgcgagggtagcaatacctttggcggcgaccggcgcactggtgagtaacacgtatgcgacctgccccggacagggggataaacccgggaaactgggcctaataccccatatgccctaaggatgcatgtccttcgggtgaaagatccgtcggtccgggatg

SEQ ID NO: 3410 - DNA, 225 bp, unidentified
  misc_feature 1..225: note = bacterial strain Ascusb_394 encodes 16S rRNA
  source 1..225: mol_type = genomic DNA
agagtttgatcatggctcaggatgaacgctggcggcgtgcttaacacatgcaagtcgagcgaagctcctttgttgatttcttcggattgaaacaaaggatgactgagcggcggacgggtgagtaacgcgtggagaacctgccccgtaccgggggataacagttagaaatgactgctaataccgcataagcgcacactatcgcatgatagagtgtgaaaaactccg

SEQ ID NO: 3411 - DNA, 225 bp, unidentified
  misc_feature 1..225: note = bacterial strain Ascusb_3246 encodes 16S rRNA
  source 1..225: mol_type = genomic DNA
agagtttgatcctggctcaggataaacgctggcggcgtgcttaacacatgcaagtcgaacggagtaattctcccgaagattgaagaagcttgcttctgaaagattcatttgaattacttagtggcggacgggtgagtaacgcgtgggaaacctgccctatactgggggatagcagttggaaacgactgataataccgcataagcgcacagctttgcatgaagcag

SEQ ID NO: 3412 - DNA, 225 bp, unidentified
  misc_feature 1..225: note = bacterial strain Ascusb_4789 encodes 16S rRNA
  source 1..225: mol_type = genomic DNA
agagtttgatcatggctcaggacgaacgctggcggcgtgcctaacacatgcaagtcgaacggagatcaggagcttgcttctgatcttagtggcggacgggtgagtaacgcgtgagtaacctgccttgcagagggggatagccattggaaacgatggataataccgcataacgtatgttgatcgcatggttgatataccaaaggagcaatccgctgtaagatggac

SEQ ID NO: 3413 - DNA, 225 bp, unidentified
  misc_feature 1..225: note = bacterial strain Ascusb_3490 encodes 16S rRNA
  source 1..225: mol_type = genomic DNA
agagtttgatcatggctcaggacgaacgctggcggcacgcttaacacatgcaagtcgaacggagttaattgagcttgcttaattaacttagtggcggacgggtgagtaacacgtgagcaatctgccttacggtgggggatagcagttggaaacgactgataataccgcataacataacgggaccgcatgattctgttatcaaagattcattgccgtaagatgagc

SEQ ID NO: 3414 - DNA, 225 bp, unidentified
  misc_feature 1..225: note = bacterial strain Ascusb_17165 encodes 16S rRNA
  source 1..225: mol_type = genomic DNA
agagtttgatcctggctcaggatgaacgctggcggcatgcctaagacatgcaagtcgtacgaggcgtccttttgaaacagagtgcttgcacaaagtagataaagatttcgcctagtggcgcaagggtgagtaacacgtgggttatctgccttggagactggaataacaattggaaacgattgctaatgccggatgatatataagatgatacgttgtcttatagta

SEQ ID NO: 3415 - DNA, 225 bp, unidentified
  misc_feature 1..225: note = bacterial strain Ascusb_2704 encodes 16S rRNA
  source 1..225: mol_type = genomic DNA
agagtttgatcatggctcagaacgaacgctggcggcaggcctgaggcatgcaagtcgaacgagaaagtgtagcaatacacgagtagagtggcgcacgggtgagtaatatatgggaatctgcccagaagtggggaataacagttggaaacgactgctaataccgcatacgccggaaacgggaaagatttatcgcttttggatgagcccatattggattagcttgtt

SEQ ID NO: 3416 - DNA, 225 bp, unidentified
  misc_feature 1..225: note = bacterial strain Ascusb_3678 encodes 16S rRNA
  source 1..225: mol_type = genomic DNA
agagtttgatcatggctcaggatgaacgctagctacaggcttaacacatgcaagtcgaggggcagcatggtcttagcttgctaagactgatggcgaccggcgcacgggtgagtaacgcgtatccaaccttccccatagtagggcatagcccggcgaaagtcggattaacaccctatgttctcctttgcaggcatctaacgaggagcaaagattcatcgctatggg

SEQ ID NO: 3417 - DNA, 225 bp, unidentified
  misc_feature 1..225: note = bacterial strain Ascusb_7221 encodes 16S rRNA
  source 1..225: mol_type = genomic DNA
agagtttgatcatggctcaggatgaacgctagcggcaggcttaacacatgcaagtcgaggggtaacgcggggtagcaatactctggcgacgaccggcgcacgggtgcgtaacgcgtatgcaacctaccttgtacagggggataacggagtgaaaattccactaatatcccatagtgttggagaatcgcatggttttccaactaaagcttcggtggtacaagatgg

SEQ ID NO: 3418 - DNA, 225 bp, unidentified
  misc_feature 1..225: note = bacterial strain Ascusb_20847 encodes 16S rRNA
  source 1..225: mol_type = genomic DNA
agagtttgatcatggctcaggacgaacgctggcggcgtgcttaacacatgcaagtcgaacggggatcatttggatgagagcttcggcaggattccgggtgattctagtggcggacgggtgagtaacgcgtgagcaacctgtcccagacagggggataacacttggaaacaggtgctaataccgcataagaccacagcaccacatggtgcgggggtaaaaggtgca

SEQ ID NO: 3419 - DNA, 225 bp, unidentified
  misc_feature 1..225: note = bacterial strain Ascusb_2557 encodes 16S rRNA
  source 1..225: mol_type = genomic DNA
agagtttgatcatggctcaggatgaacgctagcggcaggcttaacacatgcaagtcgaggggcagcgcgaggtagcaatactttggcggcgaccggcggaagggtgcgtaacgcgtgagcaacttgcccgtatctgggacataaccggtggaaacgccgactaatttcccataacaacagggatgacatcttccttgtttgaaagcttcggtggatacggatggg

SEQ ID NO: 3420 - DNA, 225 bp, unidentified
  misc_feature 1..225: note = bacterial strain Ascusb_1671 encodes 16S rRNA
  source 1..225: mol_type = genomic DNA
agagtttgatcatggctcaggatgaacgctggcggcgtgcttaacacatgcaagtcgaacggagtttagagaatgaagttttcggatggatttctttaaacttagtggcggacgggtgagtaacgcgtggggaacctgccccataccgggggacaacagttggaaacgactgctaataccgcataagcgcacggtgtggcatcacacagtgtgaaaaactccggt

SEQ ID NO: 3421 - DNA, 225 bp, unidentified
  misc_feature 1..225: note = bacterial strain Ascusb_1738 encodes 16S rRNA
  source 1..225: mol_type = genomic DNA
agagtttgatcatggctcaggacgaacgctggcggcatgcctaacacatgcaagtcgaacggagtttaagaagcttgctttttaaacttagtggcggacgggtgagtaacgcgtgagcaacctgcctttcagtggggaataatattctgaaaagagtactaataccgcataatgtacggataacgcatgttaaccgtaccaaagatttatcgctgagagatgggc

SEQ ID NO: 3422 - DNA, 225 bp, unidentified
  misc_feature 1..225: note = bacterial strain Ascusb_3141 encodes 16S rRNA
  source 1..225: mol_type = genomic DNA
agagtttgatcctggctcaggatgaacgctggcggcgtgcctaacacatgcaagtcgaacggagatttaacgctgatgaagcttcggcagaatcttgttaaatcttagtggcggacgggtgagtaacgcgtgggcaacctgcctcgtactgggggataacagttggaaacgactgttaataccgcataagcgcacagtgtcgcatgacacggtgtgaaaaactcc

SEQ ID NO: 3423 - DNA, 225 bp, unidentified
  misc_feature 1..225: note = bacterial strain Ascusb_1842 encodes 16S rRNA
  source 1..225: mol_type = genomic DNA
agagtttgatcctggctcaggacgaacgctggcggcacgcctaacacatgcaagtcgaacggtgttttgggggcttgctcctaaaacatagtggcggacgggtgagtaacacgtgagcaacctgccttttggcgagggatagcttctggaaacggatggtaatacctcataatatagctttaccgcatggtatagctatcaaagaatttcgccaaaagatgggct

SEQ ID NO: 3424 - DNA, 225 bp, unidentified
  misc_feature 1..225: note = bacterial strain Ascusb_3454 encodes 16S rRNA
  source 1..225: mol_type = genomic DNA
agagtttgatcatggctcaggatgaacgctagcggcaggcttaacacatgcaagtcgaggggcagcgggttgtagcaatacaatgccggcgaccggcgaaagggtgagtaacgcgtgagcaacgtgccttcatcagggggatagtcgatggaaacgtcgtgtaataccccgtaacacataggaccgcatggttttatgttgaaagatttattggatggagatcgg

SEQ ID NO: 3425 - DNA, 225 bp, unidentified
  misc_feature 1..225: note = bacterial strain Ascusb_17158 encodes 16S rRNA
  source 1..225: mol_type = genomic DNA
agagtttgatcctggctcaggacgaacgctggcggcatgcctaacacatgcaagtcgaacggagttaagagagcttgctcttttaacttagtggcggacgggtgagtaacgcgtgagcaatctgcctttcagtggggaataatgttctgaaaagagcactaataccgcatgatgtacagtgaccgcatgatcattgtaccaaagatttatcgctgagagatgagc

SEQ ID NO: 3426 - DNA, 225 bp, unidentified
  misc_feature 1..225: note = bacterial strain Ascusb_333 encodes 16S rRNA
  source 1..225: mol_type = genomic DNA
agagtttgatcctggctcaggatgaacgctggcggcgtgcctaacacatgcaagtcgagcggagataatgggagattcttcggatgatctcactatcttagcggcggatgggtgagtaacacgtgggtaacctgccctgcacagggggataacagctggaaacggctgttaataccgcatatgcacacgctgccgcatggcagagggtggaaagatttatcggtg

SEQ ID NO: 3427 - DNA, 225 bp, unidentified
  misc_feature 1..225: note = bacterial strain Ascusb_2467 encodes 16S rRNA
  source 1..225: mol_type = genomic DNA
agagtttgatcatggctcaggatgaacgctggcggcgtgcttaatacatgcaagtcgaacggagttgttttaatcatgatgtagcttgctatggattgattttttcaacttagtggcggacgggtgagtaacgcgtgggtaacctgccctgtacagggggataacggctggaaacggccgctaaaaccgcataacgtcggaataccgcatgatgttccggccaaa

SEQ ID NO: 3428 - DNA, 225 bp, unidentified
  misc_feature 1..225: note = bacterial strain Ascusb_223 encodes 16S rRNA
  source 1..225: mol_type = genomic DNA
agagtttgatcatggctcaggatgaacgctagctacaggcttaacacatgcaagtcgaggggcagcgagaggaaagcttgctttccttgtcggcgaccggcgcacgggtgagtaacgcgtatccaaccttccccttagtagggcatagcccggcgaaagtcggattaataccctatgttttccaatgaggacatctgagctggaacaaagatttatcgctaaggg

SEQ ID NO: 3429 - DNA, 225 bp, unidentified
  misc_feature 1..225: note = bacterial strain Ascusb_14452 encodes 16S rRNA
  source 1..225: mol_type = genomic DNA
agagtttgatcctggctcaggatgaacgctagctacaggcttaacacatgcaagtcgaggggcagcatgttggttgcttgcaaccaatgatggcgaccggcgcacgggtgcgtaacgcgtatccaatctgccctgtgctcggggatagccttgcgaaagtaagattaacacccgatggtctccctggcccgcatggtccttggagtaaagttacacggcacggga

SEQ ID NO: 3430 - DNA, 225 bp, unidentified
  misc_feature 1..225: note = bacterial strain Ascusb_4925 encodes 16S rRNA
  source 1..225: mol_type = genomic DNA
agagtttgatcatggctcaggacgaacgctggcggcgtgcctaacacatgcaagtcgagcggggatatactggatgagagcttcggcaggattccggtatattctagcggcggacgggtgagtaacgcgtgaacaatctgtcccggacagggggataacacttggaaacaggtgctaataccgcataagaccacagggcggcatcgtccaggggtcaaaggagaa

SEQ ID NO: 3431 - DNA, 225 bp, unidentified
  misc_feature 1..225: note = bacterial strain Ascusb_1750 encodes 16S rRNA
  source 1..225: mol_type = genomic DNA
agagtttgatcatggctcaggatgaacgctagctacaggcttaacacatgcaagtcgaggggcatcattgggatagcttgctatttcagatggcgaccggcgcacgggtgagtaacgcgtatccaaccttccccttagtagggcatagcccggcgaaagtcggattaataccctatgttgtatattgaggacatctgatttataccaaagatttatcgctaaggg

SEQ ID NO: 3432 - DNA, 225 bp, unidentified
  misc_feature 1..225: note = bacterial strain Ascusb_2884 encodes 16S rRNA
  source 1..225: mol_type = genomic DNA
agagtttgatcatggctcaggatgaacgctagctacaggcttaacacatgcaagtcgaggggcagcatggtcttagcttgctaagactgatggcgaccggcgcacgggtgagtaacgcgtatccaacctggccctcagtaggggatagcccggcgaaagtcggattaataccctatgttctccgaagaagacatctgatttggagcaaagattcatcgctgaggg

SEQ ID NO: 3433 - DNA, 225 bp, unidentified
  misc_feature 1..225: note = bacterial strain Ascusb_3661 encodes 16S rRNA
  source 1..225: mol_type = genomic DNA
agagtttgatcctggctcaggatgaacgctggcggcgtgcttaacacatgcaagtcgaacgaagcacctggtttgatttcttcggaatgaggaccttgtgacttagtggcggacgggtgagtaacgcgtgggcaatctgccccataccgggggacaacagttggaaacgactgctaataccgcataagcgcacgaggccgcatggccctgtgtgaaaaactccgg

SEQ ID NO: 3434 - DNA, 225 bp, unidentified
  misc_feature 1..225: note = bacterial strain Ascusb_2098 encodes 16S rRNA
  source 1..225: mol_type = genomic DNA
agagtttgatcctggctcaggataaacgctggcggcgtgcttaacacatgcaagtcgaacggagtacttctcccgagaccgaggaagcttgcttccaaagaatcatttgaagtacttagtggcggacgggtgagtaacgcgtgggtaacctgcctcacacagggggataacagttggaaacgactgttaataccgcataagcgcacagtatcgcatgatacagtg

SEQ ID NO: 3435 - DNA, 225 bp, unidentified
  misc_feature 1..225: note = bacterial strain Ascusb_1607 encodes 16S rRNA
  source 1..225: mol_type = genomic DNA
agagtttgatcatggctcaggacgaacgctggcggcacgcttaacacatgcaagtcgaacggtgaagagtagcttgctactcggatcagtggcggacgggtgagtaacacgtgagcaatctgcctctaagtggggaataacgtttggaaacggacggtaataccgcataacatacacgaaccgcatgatttgtgtatcaaagatttatcgcttagagatgagctc

SEQ ID NO: 3436 - DNA, 225 bp, unidentified
  misc_feature 1..225: note = bacterial strain Ascusb_3352 encodes 16S rRNA
  source 1..225: mol_type = genomic DNA
agagtttgatcatggctcaggatgaacgctggcggcgtgcttaacacatgcaagtcgagcgagaaatcgggaaatgaagcttcggtagatttgaacgatggaaagcggcggacgggtgagtaacacgtgggaaacctgccttttgcagagggacagccgagggaaacttcgattaatacctcataacgcatcatcgtcgcatggcggagatgccaaagatttatc

SEQ ID NO: 3437 - DNA, 225 bp, unidentified
  misc_feature 1..225: note = bacterial strain Ascusb_3973 encodes 16S rRNA
  source 1..225: mol_type = genomic DNA
agagtttgatcatggctcaggatgaacgctggcggcgtgcctaacacatgcaagtcgaacggggttaagggaaattttcggatggaacttaacttagtggcggacgggtgagtaacgcgtggataacctgcctcgcactgggggatagcagctggaaacggctggtaataccgcataagaccacgatgccgcatggcattggggtaaaagatttatcggtgtgag

SEQ ID NO: 3438 - DNA, 225 bp, unidentified
  misc_feature 1..225: note = bacterial strain Ascusb_1626 encodes 16S rRNA
  source 1..225: mol_type = genomic DNA
agagtttgatcatggctcaggatgaacgctagcgacaggcctaacacatgcaagtcgagcggcagcacctcgggtggcgagcggcgcacgggtgagtaacgcgtatgtaacctgcccatgagtgggggatagcccggtgaaaaccggattaataccccatgacaccattttctgacatcattcaatggttaaagattcattgctcatggatggacatgcgttgga

SEQ ID NO: 3439 - DNA, 225 bp, unidentified
  misc_feature 1..225: note = bacterial strain Ascusb_3354 encodes 16S rRNA
  source 1..225: mol_type = genomic DNA
agagtttgatcatggctcaggacgaacgctggcggcgtgcttaacacatgcaagtcgaacggaactattatggaaaatcttcggatgggaagttttagtttagtggcgaacgggtgagtaacgcgtgaggaacctgcctttcagagggggacaacagttggaaacgactgctaataccgcataacatgttttcttcgcatgaagggaacatcaaagattttatcg

SEQ ID NO: 3440 - DNA, 225 bp, unidentified
  misc_feature 1..225: note = bacterial strain Ascusb_14905 encodes 16S rRNA
  source 1..225: mol_type = genomic DNA
agagtttgatcctggctcaggatgaacgctagctacaggcttaacacatgcaagtcgaggggcagcattgggatagcttgctattccagatggcgaccggcgcacgggtgagtaacgcgtatccaaccttccccatagtagggcatagcccgtagaaatgcggattaataccctatgttttccgaggatgacatctgattcggaacaaaggttcaccgctatggg

SEQ ID NO: 3441 - DNA, 225 bp, unidentified
  misc_feature 1..225: note = bacterial strain Ascusb_6876 encodes 16S rRNA
  source 1..225: mol_type = genomic DNA
agagtttgatcatggctcaggatgaacgctagctacaggcttaacacatgcaagtcgaggggcagcatggtcttagcttgctaagaccgatggcgaccggcgcacgggtgagtaacgcgtatccaacctcccccacagtagcggatagcccggcgaaagtcggattaatacgctatgaggtgcagtattggcatcatggccgcacgaaagatttatcgctgtggg

SEQ ID NO: 3442 - DNA, 225 bp, unidentified
  misc_feature 1..225: note = bacterial strain Ascusb_5120 encodes 16S rRNA
  source 1..225: mol_type = genomic DNA
agagtttgatcatggctcagaacgaacgctggcggcgcgtcttaagcatgcaagtcgagcggtaagatagtagcttgctactgtcctagagcggcggactggtgagtaacgcgtgggtgacgtaccctgaggacggggatagcctgtggaaacacagggtaataccggataagctcgtatgtgtcagaggcatacgaggaaaggttcttttgaaccgccttagga

SEQ ID NO: 3443 - DNA, 225 bp, unidentified
  misc_feature 1..225: note = bacterial strain Ascusb_21445 encodes 16S rRNA
  source 1..225: mol_type = genomic DNA
agagtttgatcatggctcaggataaacgctggcggcgcacataagacatgcaagtcgaacggaagtcgttatatctgaaatggaaatggactgagaacttgttcaaagaaagttgaagtagattttataacaatggctttagtggcggactggtgagtaacgcgtgagcaacctgcctattagaggggaataacagtgagaaatcattgctaataccgcatatgc

SEQ ID NO: 3444 - DNA, 225 bp, unidentified
  misc_feature 1..225: note = bacterial strain Ascusb_3070 encodes 16S rRNA
  source 1..225: mol_type = genomic DNA
agagtttgatcatggctcaggacgaacgctggcggcgtgcttaacacatgcaagtcgaacgagattaagttggaagcttgcttttaacttagtcgagtggcggacgggtgagtaacgcgtgaataatctgtcctatacagggggataacgcatcgaaagatgtgctaataccgcgtaggaccacagcatcgcatggtgcaggggtgaaaggagcaatccagtata

SEQ ID NO: 3445 - DNA, 225 bp, unidentified
  misc_feature 1..225: note = bacterial strain Ascusb_2293 encodes 16S rRNA
  source 1..225: mol_type = genomic DNA
agagtttgatcctggctcaggacgaacgctggcggcgcgcctaacacatgcaagtcgaacggacgaagggagcttgctccccgagttagtggcggacgggtgagtaacacgtgagcaacctgcctttcagagggggacaacagttggaaacgactgctaataccgcataacgtggcttgggggcatccccgggctaccaaagatttatcgctgaaagatgggctc

SEQ ID NO: 3446 - DNA, 225 bp, unidentified
  misc_feature 1..225: note = bacterial strain Ascusb_4492 encodes 16S rRNA
  source 1..225: mol_type = genomic DNA
agagtttgatcatggctcaggattaacgctggcggcatgcctaatacatgcaagtcgaatggtagcaataccatggcgaacgggtgagtaacacgtaggtaacctgtctttaagacgaggataaccgatggaaacgtcggataatactcgataggtaatctgagggcatctttagattattaaagatttatcacttagagaggggcctgcggcgcattagctaga

SEQ ID NO: 3447 - DNA, 225 bp, unidentified
  misc_feature 1..225: note = bacterial strain Ascusb_4062 encodes 16S rRNA
  source 1..225: mol_type = genomic DNA
agagtttgatcctggctcaggatgaacgctagctacaggcttaacacatgcaagtcgaggggtaacatgattggagcttgctccgattgatgacgaccggcgcacgggtgagtaacgcgtatccaacctgccccatgctcagggataaccttccgaaagggagcctaatacctgatgttgtgcgacgatggcatcagaattgcacgaaagattcatcggcatggg

SEQ ID NO: 3448 - DNA, 225 bp, unidentified
  misc_feature 1..225: note = bacterial strain Ascusb_858 encodes 16S rRNA
  source 1..225: mol_type = genomic DNA
agagtttgatcatggctcaggatgaacgctagctacaggcttaacacatgcaagtcgaggggcagcatgaagtttgcttgcaaactttgatggcgaccggcgcacgggtgagtaacgcgtatccaacctggcccgcagtagggaacagcccggcgaaagtcggattaatgccctatgtcttcctttgcaggcatccaatgaggaagaaagatttatcgctgcggg

SEQ ID NO: 3449 - DNA, 225 bp, unidentified
  misc_feature 1..225: note = bacterial strain Ascusb_7216 encodes 16S rRNA
  source 1..225: mol_type = genomic DNA
agagtttgatcctggctcaggataaacgctggcggcgcacataagacatgcaagtcgaacggaagtcgttatactgattttgatatgaacggagaacttgttcaaagggacttgaggaagatttataacaatggctttagtggcggactggtgagtaacgcgtgagcaacctgcctattagaggggaacaacagttagaaatgactgctaataccgcatatgcct

SEQ ID NO: 3450 - DNA, 225 bp, unidentified
  misc_feature 1..225: note = bacterial strain Ascusb_3890 encodes 16S rRNA
  source 1..225: mol_type = genomic DNA
agagtttgatcctggctcagaacgaacgctggcggcaggcttaacacatgcaagttgaacgggatttgtatggtgcttgcactagacaatgagagtagcgcactggtgagtaacacgtgggaacatgccttgaagtgggggacaacagttggaaacgactgctaataccgcatacgccctaagggggaaagatttatcgctttaagattggcccgcggaagatta

SEQ ID NO: 3451 - DNA, 225 bp, unidentified
  misc_feature 1..225: note = bacterial strain Ascusb_20940 encodes 16S rRNA
  source 1..225: mol_type = genomic DNA
agagtttgatcctggctcagaacgaacgctggcggcgcgtcttaagcatgcaagtcgagcggtaagatggaagcttgcttctatcctagagcggcggactggtgagtaacgcgtgggtgacgtacccttgtgacggggacagctcctagaaataggagataataccggatacgctgagtgttgtcagaggacattcaggaaaggaacttttgttccgcacgagga

SEQ ID NO: 3452 - DNA, 225 bp, unidentified
  misc_feature 1..225: note = bacterial strain Ascusb_2744 encodes 16S rRNA
  source 1..225: mol_type = genomic DNA
agagtttgatcatggctcaggatgaacgctagctacaggcttaacacatgcaagtcgaggggcagcatgaagtttgcttgcaaactttgatggcgaccggcgcacgggtgagtaacgcgtatccaaccttccccttagtagggcatagcccggcgaaagtcggattaataccctatgttattcgtagaggacatctgaaatgaatcaaaggtttaccgctaaggg

SEQ ID NO: 3453 - DNA, 225 bp, unidentified
  misc_feature 1..225: note = bacterial strain Ascusb_120 encodes 16S rRNA
  source 1..225: mol_type = genomic DNA
agagtttgatcatggctcaggatgaacgctagctacaggcttaacacatgcaagtcgaggggcagcattatcgaagcttgctttgatagatggcgaccggcgcacgggtgagtaacgcgtatccaaccttccccttagtagggcatagcccgtagaaatgcggattaataccctatgttgtattatgaggacatctgaaagataccaaaggtttaccgctaaggg

SEQ ID NO: 3454 - DNA, 225 bp, unidentified
  misc_feature 1..225: note = bacterial strain Ascusb_4982 encodes 16S rRNA
  source 1..225: mol_type = genomic DNA
agagtttgatcatggctcaggatgaacgctagctacaggcttaacacatgcaagtcgaggggcatcgcggggaggcttcggccaccctggcggcgaccggcgaatgggtgagtaacacgtatccaacctgccccgtaccgggggatagccctccgaaaggagaattaataccccatgtctcggtccgcgacatcccggtccgaggaaaggttcgccggtacggga

SEQ ID NO: 3455 - DNA, 225 bp, unidentified
  misc_feature 1..225: note = bacterial strain Ascusb_2111 encodes 16S rRNA
  source 1..225: mol_type = genomic DNA
agagtttgatcatggctcaggatgaacgctagctacaggcttaacacatgcaagtcgaggggcatcagggatctagcttgctagatctgctggcgaccggcgcacgggtgagtaacgcgtatccaaccttccccatagtagaggatagcccggtgaaaatcggattaatactctatgttgtataacgaggacatctgaattataccaaaggtttaccgctatggg

SEQ ID NO: 3456 - DNA, 225 bp, unidentified
  misc_feature 1..225: note = bacterial strain Ascusb_4043 encodes 16S rRNA
  source 1..225: mol_type = genomic DNA
agagtttgatcatggctcaggacgaacgctggcggcacgcttaacacatgcaagtcgaacggagaatatttggtttactaagtattcttagtggcggacgggtgagtaacacgtgagcaacctgcctttgagagagggatagcttctggaaacggatggtaatacctcataacatatttgaagggcatcctttaaatatcaaagatttatcacttaaagatgggc

SEQ ID NO: 3457 - DNA, 225 bp, unidentified
  misc_feature 1..225: note = bacterial strain Ascusb_1187 encodes 16S rRNA
  source 1..225: mol_type = genomic DNA
agagtttgatcctggctcaggatgaacgctggcggcgtgcctaacacatgcaagtcgagcggagtcataagcagattcttcggatgatatttatgacttagcggcggatgggtgagtaacacgtgggtaatctgccctgcacagggggataacagctggaaacggctgttaataccgcatatgcacacgttatcgcatgatagagtgtggaaagattcatcggtg

SEQ ID NO: 3458 - DNA, 225 bp, unidentified
  misc_feature 1..225: note = bacterial strain Ascusb_3926 encodes 16S rRNA
  source 1..225: mol_type = genomic DNA
agagtttgatcatggctcaggacgaacgctggcggcacgcttaacacatgcaagtcgaacggagtttatcggagcttgctttggtaaacttagtggcggacgggtgagtaacacgtgagcaatctgcctttcagagggggatagcagttggaaacgactgataataccgcataatatagtagaatcgcatgatttaactatcaaagatttatcgctgaaagatga

SEQ ID NO: 3459 - DNA, 225 bp, unidentified
  misc_feature 1..225: note = bacterial strain Ascusb_3006 encodes 16S rRNA
  source 1..225: mol_type = genomic DNA
agagtttgatcatggctcaggatgaacgctggcggcgtgcctaatacatgcaagtcgaacgggtgcagcaatgtaccagtggcgaacgggtgagtaacacgttggtgacctgccccaaagatgggaatatcacctggaaacgggtggcaaaaccgaataagcttgaccgagttagagaaagtcaagtaaaagcgaaagctactttgggaggggcctgcggcccat

SEQ ID NO: 3460 - DNA, 225 bp, unidentified
  misc_feature 1..225: note = bacterial strain Ascusb_6224 encodes 16S rRNA
  source 1..225: mol_type = genomic DNA
agagtttgatcctggctcaggataaacgctggcggcgcacataagacatgcaagtcgaacggaagtcgttgtaatgaaatcaaaaagaacggagaacttgttcgaaggaaatggagatagacttacaacaatggctttagtggcggactggtgagtaacacgtaagcaacctgcctgttagaggggaacaacagttagaaatgactgctaataccgcatatgcct

SEQ ID NO: 3461 - DNA, 225 bp, unidentified
  misc_feature 1..225: note = bacterial strain Ascusb_12565 encodes 16S rRNA
  source 1..225: mol_type = genomic DNA
agagtttgatcctggctcaggataaacgctggcggcgcacataagacatgcaagtcgaacggaagtcgttataattgattttgagtgaaagatttatccggaacgatgatgattttataacaatggctttagtggcggactggtgagtaacgcgtaagcaatctgcctatcagaggggaataacagtgagaaatcattgctaataccgcatatgccatgaacatc

SEQ ID NO: 3462 - DNA, 225 bp, unidentified
  misc_feature 1..225: note = bacterial strain Ascusb_7394 encodes 16S rRNA
  source 1..225: mol_type = genomic DNA
agagtttgatcctggctcaggatgaacgctggcggcgtgcttaatacatgcaagtcgaacgaagcacttacgacagatcccctcggggtgaagatgtttgtgacttagtggcggacgggtgagtaacgcgtgggtaacctgcctcatgcagggggataacagttagaaatgactgctaataccgcataagcgcacggattcgcatgtttctgtgtgaaaagattt

SEQ ID NO: 3463 - DNA, 225 bp, unidentified
  misc_feature 1..225: note = bacterial strain Ascusb_2272 encodes 16S rRNA
  source 1..225: mol_type = genomic DNA
agagtttgatcatggctcaggatgaacgctagctacaggcttaacacatgcaagtcgcggggcatcacggcagcggtttaccgttgctggtggcgaccggcgcacgggtgagtaacgcgtatccaacctgcccctcagtagggaatagcccggcgaaagtcggattaatgccctatgttattcgttgaggacatctgaagtgaatcaaagacttgtcgctgaggg

SEQ ID NO: 3464 - DNA, 225 bp, unidentified
  misc_feature 1..225: note = bacterial strain Ascusb_2189 encodes 16S rRNA
  source 1..225: mol_type = genomic DNA
agagtttgatcctggctcaggatgaacgctggcggcgtgcttaacacatgcaagtcgaacgaagctactttttacgatcccttcggggtgacgagttgtagacttagtggcggacgggtgagtaacgcgtgggtaacctgccgtatgcagggggacaacagttggaaacgactgctaataccgcataagcgcacgataccgcatggtaaagtgtgaaaagattta

SEQ ID NO: 3465 - DNA, 225 bp, unidentified
  misc_feature 1..225: note = bacterial strain Ascusb_3965 encodes 16S rRNA
  source 1..225: mol_type = genomic DNA
agagtttgatcctggctcaggataaacgctggcggcgtgcttaacacatgcaagtcgaacggagtattcctcccgaagattgaagaagcttgcttctgattgattcatttggaatacttagtggcggacgggtgagtaacgcgtgggtaacctgcctcacactgggggatagcagttggaaacgactgataataccgcataagcacacagtatcgcatgatacag

SEQ ID NO: 3466 - DNA, 225 bp, unidentified
  misc_feature 1..225: note = bacterial strain Ascusb_2634 encodes 16S rRNA
  source 1..225: mol_type = genomic DNA
agagtttgatcctggctcaggatgaacgctagctacaggcttaacacatgcaagtcgaggggcagcattgagatagcttgctatttcagatggcgaccggcgcacgggtgagtaacgcgtatccaaccttccctatagtagagaatagcccggcgaaagtcggattaatgctctatgttgttcaatgcggacatctaagttgaaccaaaggtttaccgctatagg

SEQ ID NO: 3467 - DNA, 225 bp, unidentified
  misc_feature 1..225: note = bacterial strain Ascusb_7867 encodes 16S rRNA
  source 1..225: mol_type = genomic DNA
agagtttgatcctggctcaggatgaacgctagcggcaggcttaacacatgcaagtcgaggggcagcgggttgtagcaatacaatgccggcgaccggcgaaagggtgagtaacgcgtgagcaacgtgccttcatcagggggatagtcgatggaaacgtcgtgtaataccccgtaacactgtttatcgcatggcagacagttgaaagatttattggatggagatcgg

SEQ ID NO: 3468 - DNA, 225 bp, unidentified
  misc_feature 1..225: note = bacterial strain Ascusb_211 encodes 16S rRNA
  source 1..225: mol_type = genomic DNA
agagtttgatcatggctcaggatgaacgctagctacaggcttaacacatgcaagtcgaggggcagcataacgaaagcttgcttttgttgatggcgaccggcgcacgggtgagtaacgcgtatccaaccttccctatagtagagaatagcccggcgaaagtcgaattaatgctctatgttcttctttgatggcatctgacgagaagcaaaggttcaccgctatagg

SEQ ID NO: 3469 - DNA, 225 bp, unidentified
  misc_feature 1..225: note = bacterial strain Ascusb_5396 encodes 16S rRNA
  source 1..225: mol_type = genomic DNA
agagtttgatcatggctcaggacgaacgctggcggcgtgcctaacacatgcaagtcgaacggagctgtttcacgaaggtcttcggattggacgagacagcttagtggcggacgggtgagtaacgcgtgagcaacctgcctttcagagggggacaacggttggaaacgaccgctaataccgcatgaagcaatcggatcgcatgatctggctgtcaaagattatatc

SEQ ID NO: 3470 - DNA, 225 bp, unidentified
  misc_feature 1..225: note = bacterial strain Ascusb_563 encodes 16S rRNA
  source 1..225: mol_type = genomic DNA
agagtttgatcatggctcaggacgaacgctggcggcgtgcctaacacatgcaagtcgagcggagttacagagcggaaagcttcggccggaaggtttgtaacttagcggcggacgggtgagtaacgcgtgagcaacctgtcctctacagggggataagacagcgaaagttgttctaataccgcataagaccacaggatcacatggtccaggggtcaaaggagcaat

SEQ ID NO: 3471 - DNA, 225 bp, unidentified
  misc_feature 1..225: note = bacterial strain Ascusb_12705 encodes 16S rRNA
  source 1..225: mol_type = genomic DNA
agagtttgatcatggctcaggatgaacgctagcgacaggcctaacacatgcaagtcgaggggcagcgagccgtagcaatacggtgtcggcgaccggcgaatgggtgagtaacgcgtatgcaacctttccgcaaaacggggatagccttccgaaaggaagattaatacctgatggtcttgccggaccgcatggtttggcaagtaaaaatttattgattgcgggtgg

SEQ ID NO: 3472 - DNA, 225 bp, unidentified
  misc_feature 1..225: note = bacterial strain Ascusb_4131 encodes 16S rRNA
  source 1..225: mol_type = genomic DNA
agagtttgatcatggctcaggatgaacgctggcggcgtgcttaacacatgcaagtcgaacggacttatattgaaagtttcggccggatatataagttagtggcggacgggtgagtaacgcgtgggtaacctgccttacaccgggggataacagttggaaacgactgctaataccgcataagaccacagtaccgcatggtacaggggtaaaagttccggcgatgta

SEQ ID NO: 3473 - DNA, 225 bp, unidentified
  misc_feature 1..225: note = bacterial strain Ascusb_3615 encodes 16S rRNA
  source 1..225: mol_type = genomic DNA
agagtttgatcatggctcaggatgaacgctagcggcaggcttaacacatgcaagtcgaggggtaacggggcgtagcaatacgctgccgacgaccggcgcacgggtgcgtaacgcgtatgcaacctaccttgtacagggggataacggagagaaatttccactaatatcccatggtgttggagaatcgcatgtttctccgactaaagcttcggtggtacaagatgg

SEQ ID NO: 3474 - DNA, 225 bp, unidentified
  misc_feature 1..225: note = bacterial strain Ascusb_714 encodes 16S rRNA
  source 1..225: mol_type = genomic DNA
agagtttgatcatggctcaggacgaacgctggcggcgtgcctaacacatgcaagtcgagcggggaccagggaagagcttgctcagaactggttccagcggcggacgggtgagtaacgcgtgagcaacctgccttcagcagggggataacgcatcgaaagatgtgctaataccgcatgagaccacaccttcacatggaggaggggtcaaaggagcaatccggctga

SEQ ID NO: 3475 - DNA, 225 bp, unidentified
  misc_feature 1..225: note = bacterial strain Ascusb_3607 encodes 16S rRNA
  source 1..225: mol_type = genomic DNA
agagtttgatcctggctcaggatgaacgctagctacaggcttaacacatgcaagtcgaggggcagcggggtcttagcttgctaagactgccggcgaccggcgcacgggtgagtaacgcgtatccaaccttccccttagtagggcatagcccgtagaaatgcggattaataccctatgttcttcgtcgatggcctctgaagtgaagcaaaggtttaccgctaaggg

SEQ ID NO: 3476 - DNA, 225 bp, unidentified
  misc_feature 1..225: note = bacterial strain Ascusb_4561 encodes 16S rRNA
  source 1..225: mol_type = genomic DNA
agagtttgatcctggctcaggatgaacgctggcggcgtgcctaatacatgcaagtcgaacgggtgcagcaatgcattagtggcgaacgggtgagtaacacgttggtgacctgccccaaagatgggaatatcacctggaaacgggtggcaaaaccgaataagcttggctcagtcagagaaggccaagtaaaagcgaaagctactttgggaggggcctgcggcccat

SEQ ID NO: 3477 - DNA, 225 bp, unidentified
  misc_feature 1..225: note = bacterial strain Ascusb_3589 encodes 16S rRNA
  source 1..225: mol_type = genomic DNA
agagtttgatcatggctcaggatgaacgctggcggcgtgcctaacacatgcaagtcgaacggaaccggttttaaagatttcttcggaatgatttgttaccggtttagtggcggacgggtgagtaacgcgtgagtaacctgcccttgagagggggataacgccctgaaaagagcgctaataccgcataacattattgagtcgcatggctcggtaatcaaaactccg

SEQ ID NO: 3478 - DNA, 225 bp, unidentified
  misc_feature 1..225: note = bacterial strain Ascusb_552 encodes 16S rRNA
  source 1..225: mol_type = genomic DNA
agagtttgatcatggctcaggatgaacgctggcggcgtgcctaacacatgcaagtcgaacggactttacattgaatgagacttcggttgaaggatttgtaaagttagtggcggacgggtgagtaacgcgtggagaacctgccctgtacagggggataacaatcagaaatgattgctaaaaccgcataagcgcacagtaccgcatggtacagtgtgaaaaactccg

SEQ ID NO: 3479 - DNA, 225 bp, unidentified
  misc_feature 1..225: note = bacterial strain Ascusb_1235 encodes 16S rRNA
  source 1..225: mol_type = genomic DNA
agagtttgatcatggctcaggatgaacgctggcggcgtgcctaacacattcaagtcgaacgaactgtagaaatacagtgagtggcggacgggtgagtaacgcgtaagcaatctgcctttgtgtgtggaataacaaccggaaacagttgctaataccgcataacgcataggagtcgcatggctcttatgccaaagatttatcgcacgaagatgagcttgcgtccga

SEQ ID NO: 3480 - DNA, 225 bp, unidentified
  misc_feature 1..225: note = bacterial strain Ascusb_5085 encodes 16S rRNA
  source 1..225: mol_type = genomic DNA
agagtttgatcctggctcaggatgaacgctggcggcgtgcttaacacatgcaagtcgaacggagcctagcgagtgcttgcacttgcgaaagcttagtggcggacgggtgagtaacgcgtgggtaacctgccctgtactgggggataacagtcggaaacgactgctaataccgcataagcccacatgaccgcatggtcgagggggaaaaactccggtggtacagga

SEQ ID NO: 3481 - DNA, 225 bp, unidentified
  misc_feature 1..225: note = bacterial strain Ascusb_6736 encodes 16S rRNA
  source 1..225: mol_type = genomic DNA
agagtttgatcctggctcaggatgaacgctagctacaggcttaacacatgcaagtcgaggggcagcatttgagtagcttgctactcaagatggcgaccggcgcacgggtgagtaacgcgtatccaaccttccccttagtagcggatagcccggcgaaagtcggattaatacgctatgttcttcgtcgaggacatctgaagtgaagtaaagacatagtcgctaagg

SEQ ID NO: 3482 - DNA, 225 bp, unidentified
  misc_feature 1..225: note = bacterial strain Ascusb_6123 encodes 16S rRNA
  source 1..225: mol_type = genomic DNA
agagtttgatcatggctcaggatgaacgctagctacaggcttaacacatgcaagtcgaggggcagcatgggattagcttgctaatcctgatggcgaccggcgcacgggtgagtaacgcgtatccaaccttccccctgctcagggatagcccgctgaaaggcggattaatacctgatggcttcactagatggcatctgacggtgaataaagtttacggcaagggat

SEQ ID NO: 3483 - DNA, 225 bp, unidentified
  misc_feature 1..225: note = bacterial strain Ascusb_3320 encodes 16S rRNA
  source 1..225: mol_type = genomic DNA
agagtttgatcctggctcaggatgaacgctggcggcatgcctaacacatgcaagtcgaacggagctagaaggaaagcttgcttttattttagcttagtggcggacgggtgagtaacgcgtgagaaacctgccctgaagtggggaataacaccgagaaatcggtgctaataccgcataatgtcggagatccgcatgtttttccgaccaaaggatttattcgcttta

SEQ ID NO: 3484 - DNA, 225 bp, unidentified
  misc_feature 1..225: note = bacterial strain Ascusb_4355 encodes 16S rRNA
  source 1..225: mol_type = genomic DNA
agagtttgatcatggctcaggatgaacgctagctacaggcttaacacatgcaagtcgaggggcagcatgagatcagcttgctgatcttgatggcgaccggcgcacgggtgagtaacgcgtatccaaccttccccctgctcagggatagcccgctgaaaggcggattaacacctgatagcttcactagatggcatctgacggtgaataaaggcttacggcaaggga

SEQ ID NO: 3485 - DNA, 225 bp, unidentified
  misc_feature 1..225: note = bacterial strain Ascusb_2300 encodes 16S rRNA
  source 1..225: mol_type = genomic DNA
agagtttgatcatggctcaggatgaacgctggcggcgtgcctaacacatgcaagtcgagcgagaagttcatgatgaaatcttcggaagacggattgagcggaaagcggcggacgggtgagtaacgcgtaggtaacctgccctgtacaaagggatagccactggaaacggtgattaataccttatgataccggacagccacatggttgaccggtcaaagatttatc

SEQ ID NO: 3486 - DNA, 225 bp, unidentified
  misc_feature 1..225: note = bacterial strain Ascusb_19458 encodes 16S rRNA
  source 1..225: mol_type = genomic DNA
agagtttgatcctggctcaggatgaacgctagctacaggcttaacacatgcaagtcgaggggcagcatgatcgaagcttgctttgattgatggcgaccggcgcacgggtgagtaacgcgtatccaaccttccctatagtagagaatagcccggcgaaagtcggattaatgctctatgttgtatttagaagacatctgaagaataccaaaggtttaccgctatagg

SEQ ID NO: 3487 - DNA, 225 bp, unidentified
  misc_feature 1..225: note = bacterial strain Ascusb_2143 encodes 16S rRNA
  source 1..225: mol_type = genomic DNA
agagtttgatcatggctcaggatgaacgctagctacaggcttaacacatgcaagtcgaggggcagcaggacgatagcttgctattgttgctggcgaccggcgcacgggtgagtaacgcgtatccaaccttccccttagtagggcatagcccggcgaaagtcggattaatcccctatgttgtccgacgatggcatcagaattggactaaagatttatcgctaaggg

SEQ ID NO: 3488 - DNA, 225 bp, unidentified
  misc_feature 1..225: note = bacterial strain Ascusb_1287 encodes 16S rRNA
  source 1..225: mol_type = genomic DNA
agagtttgatcatggctcagaacgaacgctggtggcgtgtcttatacatgcaagtcgagcggggcagcaatgcccagcggcgaacgggtgagtaacgcgtaagcaatctgccccatatcaggaaatacccgtgccaacgcgcggttaatgtccaggagagtggccttccgcatgggaggttgactagagattcatcggtatgggatgagcttgcgtccgattagc

SEQ ID NO: 3489 - DNA, 225 bp, unidentified
  misc_feature 1..225: note = bacterial strain Ascusb_935 encodes 16S rRNA
  source 1..225: mol_type = genomic DNA
agagtttgatcatggctcaggatgaacgctggcggcgtgcttaacacatgcaagtcgaacggagatatgcgctgattgaagcttcggcagatttcttgcatatcttagtggcggacgggtgagtaacgcgtgggtaacctgccttataccgggggataacacttagaaataggtgctaataccgcataagcgcacgacaccgcatggtgatgtgtgaaaaactcc

SEQ ID NO: 3490 - DNA, 225 bp, unidentified
  misc_feature 1..225: note = bacterial strain Ascusb_4042 encodes 16S rRNA
  source 1..225: mol_type = genomic DNA
agagtttgatcctggctcaggacgaacgctggcggcgtgcctaacacatgcaagtcgaacggggattttgtttcggcagaatcctagtggcgaacgggtgagtaacgcgtaggcaacctgccccccggattgggacaacaccccgaaaggggtgctaataccggatacgaagtaactatcgcatggtggttacttgaaagatggcctctacatgtaagctatcgc

SEQ ID NO: 3491 - DNA, 225 bp, unidentified
  misc_feature 1..225: note = bacterial strain Ascusb_1962 encodes 16S rRNA
  source 1..225: mol_type = genomic DNA
agagtttgatcctggctcaggatgaacgctggcggcgtgcttaacacatgcaagtcgaacgaagcacttaaacagatttcttcggattgaagtttttgtgacttagtggcggacgggtgagtaacgcgtggataacctgcctgtatctgggggataacagttagaaatgactgctaataccgcataagcgcacgagaccgcatggtcatgtgtgaaaaactccgg

SEQ ID NO: 3492 - DNA, 225 bp, unidentified
  misc_feature 1..225: note = bacterial strain Ascusb_1673 encodes 16S rRNA
  source 1..225: mol_type = genomic DNA
agagtttgatcatggctcaggacgaacgctggcggcacgcttaacacatgcaagtcgaacggagctattttgagtttacttggagtagcttagtggcggacgggtgagtaacacgtgagcaacctgcctttgagagagggatagcttctggaaacggatggtaatacctcataacatattcttagggcatcctttggatatcaaagatttatcactcaaagatgg

SEQ ID NO: 3493 - DNA, 225 bp, unidentified
  misc_feature 1..225: note = bacterial strain Ascusb_2439 encodes 16S rRNA
  source 1..225: mol_type = genomic DNA
agagtttgatcctggctcaggatgaacgctagctacaggcttaacacatgcaagtcgaggggcatcagggtctgtgcttgcacagattgctggcgaccggcgcacgggtgagtaacgcgtatccaaccttccccttagtagaggatagcccggcgaaagtcggattaatactctatgttgttcaatgcggacatctaagttgaaccaaaggtttaccgctaaggg

SEQ ID NO: 3494 - DNA, 225 bp, unidentified
  misc_feature 1..225: note = bacterial strain Ascusb_13587 encodes 16S rRNA
  source 1..225: mol_type = genomic DNA
agagtttgatcatggctcaggattaacgctggcggcatgcctaagacatgcaagtcgaacgaagtgccccaatgagaatggaatgaaatctgagagcttgctcaaaggtggaatgaagtaggatttggattctgcacttagtggcgaacgggtgagtaacacgtgggttatctgccttcaagctggggataacagttagaaatgactgctaataccgaatgtgct

SEQ ID NO: 3495 - DNA, 225 bp, unidentified
  misc_feature 1..225: note = bacterial strain Ascusb_887 encodes 16S rRNA
  source 1..225: mol_type = genomic DNA
agagtttgatcatggctcaggacgaacgctggcggcacgcttaacacatgcaagtcgaacgagcgaaagagtgcttgcactctctagctagtggcggacgggtgagtaacacgtgagcaatctgcctttcggtgggggataccatttggaaacgaatgttaataccccataacatagaggatccgcatggattttctatcaaaggtttactgccggaagatgagc

SEQ ID NO: 3496 - DNA, 225 bp, unidentified
  misc_feature 1..225: note = bacterial strain Ascusb_10969 encodes 16S rRNA
  source 1..225: mol_type = genomic DNA
agagtttgatcatggctcaggatgaacgctggcggcgtgcctaatacatgcaagtcgaacgaggcggaagggagcttgctcctggaaacctagtggcgaacgggtgagtaacacgtaggtaacctgcccttaagcttgggatacccagaggaaactttggctaataccggataacaacagaggaggcatctcctttgcttgaaaggccctttacggggtcactta

SEQ ID NO: 3497 - DNA, 225 bp, unidentified
  misc_feature 1..225: note = bacterial strain Ascusb_6485 encodes 16S rRNA
  source 1..225: mol_type = genomic DNA
agagtttgatcctggctcaggatgaacgctggcggcgtgcttaacacatgcaagtcgaacgagggataggatgaagttttcggacgaattcctattccgagtggcggacgggtgagtaacgcgtgggtaacctgccctgtacagggggataacagttggaaacgactgttaataccgcataagaccacagtgccgcatggcacaggggtaaaaactccggtggta

SEQ ID NO: 3498 - DNA, 225 bp, unidentified
  misc_feature 1..225: note = bacterial strain Ascusb_4670 encodes 16S rRNA
  source 1..225: mol_type = genomic DNA
agagtttgatcatggctcaggatgaacgctggcggcgtgcttaacacatgcaagtcgaacgaagcatatcagatgaagttttcggatggattcaggtatgactgagtggcggacgggtgagtaacgcgtgggtaacctgcctcacacagggggacaacagttggaaacggctgctaataccgcataagcgcacaggaccgcatggtctggtgtgaaaaactccgg

SEQ ID NO: 3499 - DNA, 225 bp, unidentified
  misc_feature 1..225: note = bacterial strain Ascusb_4803 encodes 16S rRNA
  source 1..225: mol_type = genomic DNA
agagtttgatcatggctcagaacgaacgctggcggcgcgtcttaagcatgcaagtcgaatggcaagataagagcttgctcttatcctagaatggcggactggtgagtaacgcgtgggtgacgtacctcttggatggggatagctactggaaacagtagataataccgaataagctgcatggatttagaggccatgcaggaaagcagcttttgctgcaccgagaga

SEQ ID NO: 3500 - DNA, 225 bp, unidentified
  misc_feature 1..225: note = bacterial strain Ascusb_2835 encodes 16S rRNA
  source 1..225: mol_type = genomic DNA
agagtttgatcctggctcaggatgaacgctagcggcaggcttaacacatgcaagtcgaggggcagcgtgggtagcaatacctgacggcgaccggcgaaagggtgagtaacgcgtgagcaacatacccgggaacgggggatagtcattggaaacgatgtgtaataccccataacacatgtcatcgcatgttgatatgttgaaagattcattgattccggattggct

SEQ ID NO: 3501 - DNA, 225 bp, unidentified
  misc_feature 1..225: note = bacterial strain Ascusb_3335 encodes 16S rRNA
  source 1..225: mol_type = genomic DNA
agagtttgatcatggctcaggacaaacgctggcggcgtgcctaacacatgcaagtcgaacggacccttcggggttagtggcagacgggtgagtaacacgtaggtaatgtaccttctcgctggggatacctacccgaaagggtggttaataccgaatggtctcgcgctgcggcatcgcggtgcgagtaaagtgttttagcgcgagaggatcagcctgcgggccatc

SEQ ID NO: 3502 - DNA, 225 bp, unidentified
  misc_feature 1..225: note = bacterial strain Ascusb_13798 encodes 16S rRNA
  source 1..225: mol_type = genomic DNA
agagtttgatcctggctcaggacgaacgctggcggcgtgcctaacacatgcaagtcgaacggaactactttgaaggattccttcgggatgacggatttttagtttagtggcggacgggtgagtaacgcgtgagtaacctgcctttgagagggggataacgttctgaaaagaacgctaataccgcatgacgcagagaaaccgcatggtaattctgtcaaagatttt

SEQ ID NO: 3503 - DNA, 225 bp, unidentified
  misc_feature 1..225: note = bacterial strain Ascusb_865 encodes 16S rRNA
  source 1..225: mol_type = genomic DNA
agagtttgatcctggctcaggacgaacgctggcggcacgcctaacacatgcaagtcgaacggacgagaaggagcttgcttcttcaagttagtggcggacgggtgagtaacacgtgagcaacctgcctttgagagggggatagcttctggaaacggatggtaataccccataacatacatttttcgcatggagagtgtatcaaatgaatttcgctcgaagatgggc

SEQ ID NO: 3504 - DNA, 225 bp, unidentified
  misc_feature 1..225: note = bacterial strain Ascusb_640 encodes 16S rRNA
  source 1..225: mol_type = genomic DNA
agagtttgatcatggctcaggacgaacgctggcggcatgcctaacacatgcaagtcgaacgaagttaaagagcttgctttttaacttagtggcggacgggtgagtaacgcgtgagcaacctgcctttcagtggggaataatacttcgaaaggagtactaataccgcataacgtatgacggtcgcatgactgacataccaaagatttatcgctgagagatgggctc

SEQ ID NO: 3505 - DNA, 225 bp, unidentified
  misc_feature 1..225: note = bacterial strain Ascusb_375 encodes 16S rRNA
  source 1..225: mol_type = genomic DNA
agagtttgatcatggctcaggatgaacgctggcggcgtgcttaacacatgcaagtcgaacggagatgtttacgacagaggcttcggccgattgaatttacatcttagtggcggacgggtgagtaacgcgtgggcaacctgccgtatgcagggggacaacagctggaaacggctgctaataccgcataagcgcacagcaccgcatggtgcagtgtgaaaagattta

SEQ ID NO: 3506 - DNA, 225 bp, unidentified
  misc_feature 1..225: note = bacterial strain Ascusb_5967 encodes 16S rRNA
  source 1..225: mol_type = genomic DNA
agagtttgatcatggctcaggatgaacgctggcggcgtgcctaacacatgcaagtcgaacgaagctctttagacggaggtttcggccaaagcctgaagatgactgagtggcggacgggtgagtaacgcgtgggcaacctgccccattatgggggatagcagttggaaacgactggtaataccgcataagcgcacggtaaggcatcttacagtgtgaaaagattta

SEQ ID NO: 3507 - DNA, 225 bp, unidentified
  misc_feature 1..225: note = bacterial strain Ascusb_9116 encodes 16S rRNA
  source 1..225: mol_type = genomic DNA
agagtttgatcctggctcaggatgaacgctggcggcgtgcctaacacatgcaagtcgaacggtgatgatttgatattttcggatggattttcatcatagtggcggacgggtgagtaacgcgtggataacctgcctcgtactggggaatagcagctggaaacggctggtaataccgcataagcgcacgatgccgcatggcattgtgtgaaaagatttatcggtacg

SEQ ID NO: 3508 - DNA, 225 bp, unidentified
  misc_feature 1..225: note = bacterial strain Ascusb_18236 encodes 16S rRNA
  source 1..225: mol_type = genomic DNA
agagtttgatcctggctcaggatgaacgctagctacaggcttaacacatgcaagtcgaggggcagcatgaacttagcttgctaagtttgatggcgaccggcgcacgggtgagtaacgcgtatccaaccttccccccagtagggcatagcccggcgaaagtcggattaataccctatgttcttcgtagaggacatctgaaatgaagcaaagatttatcgctggggg

SEQ ID NO: 3509 - DNA, 225 bp, unidentified
  misc_feature 1..225: note = bacterial strain Ascusb_1064 encodes 16S rRNA
  source 1..225: mol_type = genomic DNA
agagtttgatcatggctcaggataaacgctggcggcgcacataagacatgcaagtcgaacgaacttaactcattcttatagattgagagcggttagtggcggactggtgagtaatgtataagtaacctgcctatcagaggggaacaacagttggaaacgactgctaataccgcatatgccataagaatcacatggttcaagtgggaaaggagcaatccgctgata

SEQ ID NO: 3510 - DNA, 225 bp, unidentified
  misc_feature 1..225: note = bacterial strain Ascusb_4624 encodes 16S rRNA
  source 1..225: mol_type = genomic DNA
agagtttgatcctggctcaggatgaacgctagctacaggcttaacacatgcaagtcgaggggtaacattggctgagcttgctcagccagatgacgaccggcgcacgggtgagtaacgcgtatccaacctgcccatgggtcagggataaccttccgaaagggagcctaatacctgatgcagtgagaagaaggcctctgattttcacgaaagacatttgtcgccgat

SEQ ID NO: 3511 - DNA, 225 bp, unidentified
  misc_feature 1..225: note = bacterial strain Ascusb_1068 encodes 16S rRNA
  source 1..225: mol_type = genomic DNA
agagtttgatcatggctcaggatgaacgctagcggcaggcttaacacatgcaagtcgaggggcagcgcggggtagcaatactctggcggcgaccggcggaagggtgcgtaacgcgtgagcaacatgcccgtggcagggggataagcgatggaaacgtcgtctaagaccccgtaacaacagagtccgcatggattttgtttgaaagcttcggcggccacggattgg

SEQ ID NO: 3512 - DNA, 225 bp, unidentified
  misc_feature 1..225: note = bacterial strain Ascusb_3379 encodes 16S rRNA
  source 1..225: mol_type = genomic DNA
agagtttgatcatggctcaggatgaacgctagcggcaggcttaacacatgcaagtcgaggggcagcgggtgtagcaatacatgccggcgaccggcgaaagggtgagtaacgcgtgagcaacatacccgttggtgggggataggaggtggaaacgccttgtaataccccatatgatattgaatggcatcatttagtattgaaagattgattgccaacggattggtt

SEQ ID NO: 3513 - DNA, 225 bp, unidentified
  misc_feature 1..225: note = bacterial strain Ascusb_1961 encodes 16S rRNA
  source 1..225: mol_type = genomic DNA
agagtttgatcatggctcaggacgaacgctggcggcacgcctaacacatgcaagtcgaacggagattacttagcttgctttgtaatcttagtggcggacgggtgagtaacacgtgagcaacctgcctctgagagagggatagcttctggaaacggatggtaatacctcataacatacattgaccgcatgatcgatgtatcaaagatttatcactcagagatgggc

SEQ ID NO: 3514 - DNA, 225 bp, unidentified
  misc_feature 1..225: note = bacterial strain Ascusb_4210 encodes 16S rRNA
  source 1..225: mol_type = genomic DNA
agagtttgatcctggctcaggatgaacgctggcggcgtgcttaacacatgcaagtcgaacggagtatctctcccgagactaaggaagcttgcttccgaggaatcatttgagatacttagtggcggacgggtgagtaacgcgtgggtaacctgcctcacacagggggataacagttggaaacgactgttaataccgcataagcgcacggtaccgcatggtacagtg

SEQ ID NO: 3515 - DNA, 225 bp, unidentified
  misc_feature 1..225: note = bacterial strain Ascusb_1317 encodes 16S rRNA
  source 1..225: mol_type = genomic DNA
agagtttgatcatggctcaggacgaacgctggcggcgtgcctaacacatgcaagtcgaacggagtctttcaagcttgcttaaaagacttagtggcggacgggtgagtaacgcgtggggaacctgcctttcagagggggataacgttctgaaaagaacgctaataccgcataacgtatcgagaccgcatgattttgataccaaaggagcaatccgctgaaagatgg

SEQ ID NO: 3516 - DNA, 225 bp, unidentified
  misc_feature 1..225: note = bacterial strain Ascusb_538 encodes 16S rRNA
  source 1..225: mol_type = genomic DNA
agagtttgatcatggctcaggatgaacgctggcggcgtgcctaacacatgcaagtcgaacggaccttataatgacagagacttcggtcgacgaagttttaaggttagtggcggacgggtgagtaacgcgtggagaacctgccctgtactgggggataacagtgagaaattactgctaataccgcataagcgcacgggaccgcatggtcctgagtgaaaaactccg

SEQ ID NO: 3517 - DNA, 225 bp, unidentified
  misc_feature 1..225: note = bacterial strain Ascusb_5444 encodes 16S rRNA
  source 1..225: mol_type = genomic DNA
agagtttgatcctggctcaggacgaacgctggcggcgtgcttaacacatgcaagtcgaacgaggttatgttgaggaaggcttcggctggaatcgatataaccgagtggcggacgggtgagtaacgcgtgagcaacctgtcttacacagggggataacactccgaaaggagcgctaataccgcataggaccacggggtcgcatgattctgaggtgaaaggagcaat

SEQ ID NO: 3518 - DNA, 225 bp, unidentified
  misc_feature 1..225: note = bacterial strain Ascusb_1617 encodes 16S rRNA
  source 1..225: mol_type = genomic DNA
agagtttgatcatggctcaggatgaacgctagctacaggcttaacacatgcaagtcgaggggcagcatgaaagttgcttgcaacttttgatggcgaccggcgcacgggtgagtaacgcgtatccaaccttccccatactagaggatagcccggcgaaagtcggattaatactctatgttgtatttagaggacatctgaagaataccaaaggtttaccggtatggg

SEQ ID NO: 3519 - DNA, 225 bp, unidentified
  misc_feature 1..225: note = bacterial strain Ascusb_4074 encodes 16S rRNA
  source 1..225: mol_type = genomic DNA
agagtttgatcatggctcaggataaacgctggcggcgcacataagacatgcaagtcgaacggaagccgttataaatgaaacggattgaagatttatcagattgaagtagattttataacaatgactttagtggcggactggtgagtaacgcgtgagcaacctgcctattagaggggaataacagtgagaaatcattgctaataccgcataagcttgtaggaatgc

SEQ ID NO: 3520 - DNA, 225 bp, unidentified
  misc_feature 1..225: note = bacterial strain Ascusb_6786 encodes 16S rRNA
  source 1..225: mol_type = genomic DNA
agagtttgatcatggctcaggacgaacgctggcggcgtgcttaacacatgcaagtcgaacgaagcttgatgattgaacccttcggggtgatttctgatatgactgagtggcggacgggtgagtaacgcgtgaggaacctgcctttcagagggggacaacatttggaaacgaatgctaataccgcataacattaccgagtggcatcgcttggtaatcaaagattta

SEQ ID NO: 3521 - DNA, 225 bp, unidentified
  misc_feature 1..225: note = bacterial strain Ascusb_2432 encodes 16S rRNA
  source 1..225: mol_type = genomic DNA
agagtttgatcatggctcagaacgaacgctggcggcaggcttaacacatgcaagttgaacgggatttgcttagtgcttgcaccaagcaatgagagtagcgcactggtgagtaacacgtgggaacatgccttttggtgggggacaacaggaggaaacttctgctaataccgcataagccctgagggggaaagaattattgccgaaagattggcccgcggaagatta

SEQ ID NO: 3522 - DNA, 225 bp, unidentified
  misc_feature 1..225: note = bacterial strain Ascusb_4447 encodes 16S rRNA
  source 1..225: mol_type = genomic DNA
agagtttgatcatggctcaggatgaacgctagcgacaggcctaacacatgcaagtcgaggggcagcgggggagcaatcctgccggcgaccggcgcacgggtgagtaacgcgtatgtaacctgcccatgagtgggggatagcccagcgaaagctggattaataccgcatgaaaccgtttgaagacatctgataatggttaaagatttattgctcatggatggacat

SEQ ID NO: 3523 - DNA, 225 bp, unidentified
  misc_feature 1..225: note = bacterial strain Ascusb_5750 encodes 16S rRNA
  source 1..225: mol_type = genomic DNA
agagtttgatcatggctcaggatgaacgctggcggcatgcctaatacatgcaagtcgaacggatggattagtacttgtactatgaagtcagtggcgaacgggtgagtaacacatgaacaacctacccctttgactgggataacgttttgaaaagaacgctaataccggataggtgatcttaaggcatcttgagatcattaaaggtgggctacaccacattgggat

SEQ ID NO: 3524 - DNA, 225 bp, unidentified
  misc_feature 1..225: note = bacterial strain Ascusb_13972 encodes 16S rRNA
  source 1..225: mol_type = genomic DNA
agagtttgatcatggctcaggatgaacgctggcggcgtgcttaacacatgcaagtcgaacgaagcactttacttgatctcttcggagtgattgttctgtgactgagtggcggacgggtgagtaacgcgtgggtaacctgccttgtacaggggaataacagttggaaacgactgctaataccgcataagcgcacaggaccgcatggtctggtgtgaaaaactccgg

SEQ ID NO: 3525 - DNA, 225 bp, unidentified
  misc_feature 1..225: note = bacterial strain Ascusb_5722 encodes 16S rRNA
  source 1..225: mol_type = genomic DNA
agagtttgatcatggctcaggacgaacgctggcggcgtgcttaacacatgcaagtcgaacgaggatatggttggaagtccttcgggatggaagatcatattcgagtggcggacgggtgagtaacgcgtgaacaatctgtcccggaatgggggataacacttggaaacaggtgctaataccgcataagaccacactgtcgcatggcagaggggtaaaaggaggaat

SEQ ID NO: 3526 - DNA, 225 bp, unidentified
  misc_feature 1..225: note = bacterial strain Ascusb_1145 encodes 16S rRNA
  source 1..225: mol_type = genomic DNA
agagtttgatcctggctcaggatgaacgctggcggcgtgcctaatacatgcaagtcgagcgagaatctattgaacagagattcgtcaaagtgaaatagaggaaagcggcggacgggtgagtaacgcgtaggcaacctgcccttagcagagggatagccattggaaacgatgattaaaacctcataatgctgtagagtcacatgtctttgcagccaaagatttatc

SEQ ID NO: 3527 - DNA, 225 bp, unidentified
  misc_feature 1..225: note = bacterial strain Ascusb_1206 encodes 16S rRNA
  source 1..225: mol_type = genomic DNA
agagtttgatcctggctcagaacgaacgctggcggcaggcttaacacatgcaagttgaacgggattcattagtagcttgctattgatgatgagagtggcgcacgggtgagtaatacgtgggaacgtacctagtagttcggaacaactgatggaaacgtcagctaataccggataagccctgagggggaaagatttattgctattagaacggcccgcggcagatta

SEQ ID NO: 3528 - DNA, 225 bp, unidentified
  misc_feature 1..225: note = bacterial strain Ascusb_6353 encodes 16S rRNA
  source 1..225: mol_type = genomic DNA
agagtttgatcctggctcaggacgaacgctggcggcgtgcttaacacatgcaagtcgaacgaagcttgatttcggatttcttcggaatgaagaatgatatgacttagtggcggacgggtgagtaacgcgtgagtaacctgcctttcagagtggaataacgtttggaaacgaacgctaataccgcataacatcacgatgtcgcatggcaatgtgatcaaagattta

SEQ ID NO: 3529 - DNA, 225 bp, unidentified
  misc_feature 1..225: note = bacterial strain Ascusb_5105 encodes 16S rRNA
  source 1..225: mol_type = genomic DNA
agagtttgatcctggctcaggacgaacgctggcggcgtgcttaacacatgcaagtcgaacggggattaccgagcggaaggcttcggccggaaggttggtaattccagtggcggacgggtgagtaacgcgtgaacaatctgtcccagacaggggaataacacttggaaacaggtgctaataccgcatgagaccacggggtcgcatggcccaggggtaaaaggagca

SEQ ID NO: 3530 - DNA, 225 bp, unidentified
  misc_feature 1..225: note = bacterial strain Ascusb_4368 encodes 16S rRNA
  source 1..225: mol_type = genomic DNA
agagtttgatcctggctcagaacgaacgctggcggcgcgtcttaagcatgcaagtcgagcggtaagttggaagcttgcttctaacctagagcggcggactggtgagtaacgcgtgggtgacgtacccttgtgacggggacagctggtagaaatatcagataataccggatacgctgagtgttgtcagaggacactcaggaaaggaacttttgttccgcacgagga

SEQ ID NO: 3531 - DNA, 225 bp, unidentified
  misc_feature 1..225: note = bacterial strain Ascusb_2451 encodes 16S rRNA
  source 1..225: mol_type = genomic DNA
agagtttgatcatggctcaggataaacgctggcggcgtgcctaatacatgcaagtcgatcgctggagttctagcttgctagagcgaaggagaggcgaacgggtgagtaatacataagcaacctgcccacgaagactgggataatttctggaaacggggactaataccggataggtggcttgatcgcatgatcgagtcattaaagattcaaagcactggtggatgg

SEQ ID NO: 3532 - DNA, 225 bp, unidentified
  misc_feature 1..225: note = bacterial strain Ascusb_1382 encodes 16S rRNA
  source 1..225: mol_type = genomic DNA
agagtttgatcatggctcaggatgaacgctagctacaggcttaacacatgcaagtcgaggggcatcaggaatctagcttgctagatttgctggcgaccggcgcacgggtgagtaacgcgtatccaaccttccccttagtagggcatagcccggcgaaagtcggattaataccctatgttatccgaagaagacatctgaattggattaaagatttatcgctaaggg

SEQ ID NO: 3533 - DNA, 225 bp, unidentified
  misc_feature 1..225: note = bacterial strain Ascusb_9707 encodes 16S rRNA
  source 1..225: mol_type = genomic DNA
agagtttgatcatggctcaggatgaacgctggcggcgtgcctaacacatgcaagtcgaacggatttttctcgctgacgagacttcggtcaaatcttgagaaaagttagtggcggacgggtgagtaacgcgtgggcaacctgcctcatactgggggataacagttggaaacgactgttaataccgcataagcgcacagcatcgcatgatgcagtgtgaaaaactcc

SEQ ID NO: 3534 - DNA, 225 bp, unidentified
  misc_feature 1..225: note = bacterial strain Ascusb_549 encodes 16S rRNA
  source 1..225: mol_type = genomic DNA
agagtttgatcatggctcaggatgaacgctagctacaggcttaacacatgcaagtcgaggggcagcatgagcttagcttgctaagcttgatggcgaccggcgcacgggtgagtaacgcgtatccaaccttccccttagtagggcatagcccggtgaaaatcggattaataccctatgttcttcacagcggacatctaacgtgaagcaaaggttcaccgctaaggg

SEQ ID NO: 3535 - DNA, 225 bp, unidentified
  misc_feature 1..225: note = bacterial strain Ascusb_932 encodes 16S rRNA
  source 1..225: mol_type = genomic DNA
agagtttgatcatggctcaggacgaacgctggcggcacgcctaacacatgcaagtcgaacggagatacattagcttgcttttgtatcttagtggcggacgggtgagtaacacgtgagcaacctgcctctgagagagggatagcttctggaaacggatggtaatacctcataacgtagtagaaccgcatgattttactaccaaagatttatcactcagagatgggc

SEQ ID NO: 3536 - DNA, 225 bp, unidentified
  misc_feature 1..225: note = bacterial strain Ascusb_3452 encodes 16S rRNA
  source 1..225: mol_type = genomic DNA
agagtttgatcatggctcaggatgaacgctggcggcgtgcctaacacatgcaagtcgaacggggttataacgctgaggagacttcggtcaaatcttgttgtaacttagtggcggacgggtgagtaacgcgtggataacctgccatacacagggggataacagttagaaatgactgctaataccgcataagcgcccgagggggcatcctctcgagtgaaaagcgaa

SEQ ID NO: 3537 - DNA, 225 bp, unidentified
  misc_feature 1..225: note = bacterial strain Ascusb_9025 encodes 16S rRNA
  source 1..225: mol_type = genomic DNA
agagtttgatcatggctcaggatgaatgctggcggcgtgcctaatacatgcaagtcgagcggtaacagggcttcaccgtgttcttgacgcacttggccattgagcaagtagctgatttcgagagcacagtgaagctgctgacgagcggcggacggctgagtaacgcgtgggaacggaccccaaactgagggataactactcgaaagagtggctaataccgcatgt

SEQ ID NO: 3538 - DNA, 225 bp, unidentified
  misc_feature 1..225: note = bacterial strain Ascusb_9385 encodes 16S rRNA
  source 1..225: mol_type = genomic DNA
agagtttgatcctggctcaggatgaatgctggcggcgtgcctaatacatgcaagtcgagcggtaacagggggtctcaccgtttccttgacacacctagcgctttatcgtaggtagtgcaaattcgagggaacagtgagaccctgctgacgagcggcggacggctgagtaacgcgtgggaacggaccccaaactgagggataactagtcgaaagattagctaatac

SEQ ID NO: 3539 - DNA, 225 bp, unidentified
  misc_feature 1..225: note = bacterial strain Ascusb_5051 encodes 16S rRNA
  source 1..225: mol_type = genomic DNA
agagtttgatcctggctcaggatgaacgctggcggcgtgcttaacacatgcaagtcgaacggggcgcctaggaaggagacttcggtcaacggattaggttgcctagtggcggacgggtgagtaacgcgtgaggaacctgccttggagtggggaataacagttagaaatagctgctaataccgcataatgcatttaggtcgcatggccttgatgccaaagatttat

SEQ ID NO: 3540 - DNA, 225 bp, unidentified
  misc_feature 1..225: note = bacterial strain Ascusb_2879 encodes 16S rRNA
  source 1..225: mol_type = genomic DNA
agagtttgatcctggctcaggatgaacgctggcggcgtgcttaacacatgcaagtcgaacggaggacccttgaaggagttttcggacaacggataggaatccttagtggcggacgggtgagtaacgcgtgaggaacctgccttggagaggggaataacacagagaaatttgtgctaataccgcataacgcagtcatatcgcatggtaagactgccaaagatttta

SEQ ID NO: 3541 - DNA, 225 bp, unidentified
  misc_feature 1..225: note = bacterial strain Ascusb_371 encodes 16S rRNA
  source 1..225: mol_type = genomic DNA
agagtttgatcatggctcaggacgaacgctggcggcgtgcttaacacatgcaagtcgaacgaggttaattgaaggaagtcttcggatggaatttggttaaccgagtggcggacgggtgagtaacgcgtgaggaacctgtcttctacagggggataacggtccgaaaggattgctaataccgcataagaccacgaggccgcatggtcatgaggtcaaaggagaaat

SEQ ID NO: 3542 - DNA, 225 bp, unidentified
  misc_feature 1..225: note = bacterial strain Ascusb_8946 encodes 16S rRNA
  source 1..225: mol_type = genomic DNA
agagtttgatcctggctcaggatgaacgctagctacaggcttaacacatgcaagtcgaggggtaacatgattggagcttgctccgattgatgacgaccggcgcacgggtgagtaacgcgtatccaacctgccccatgctcagggataaccttccgaaagggagcctaatacctgatgttgtgctttgatggcatcagacgagcacgaaagattcatcggcatggg

SEQ ID NO: 3543 - DNA, 225 bp, unidentified
  misc_feature 1..225: note = bacterial strain Ascusb_5821 encodes 16S rRNA
  source 1..225: mol_type = genomic DNA
agagtttgatcatggctcaggatgaacgctagcggcaggcttaacacatgcaagtcgaggggcagcggggtgtagcaatacactgccggcgaccggcgcacgggtgcgtaacgcgtatgcaacctacccgtaacaggggtataacggagtgaaaattccactaatcccccatattgtcattctttcgcatgttgggatgacgaaagcattctgtggttacggacg

SEQ ID NO: 3544 - DNA, 225 bp, unidentified
  misc_feature 1..225: note = bacterial strain Ascusb_8962 encodes 16S rRNA
  source 1..225: mol_type = genomic DNA
agagtttgatcctggctcaggatgaacgctggcggcatgcctaagacatgcaagtcgaacgagacgaccttaagaaagctgcgtgcttgcacaaagctggaagaagatcatcgtctagtggcagacgggtgagtaacacgtgggtaacctaccttcaagttggggataacagttggaaacgattgctaataccgaataagatattcgtattgaaagaagccttta

SEQ ID NO: 3545 - DNA, 225 bp, unidentified
  misc_feature 1..225: note = bacterial strain Ascusb_9920 encodes 16S rRNA
  source 1..225: mol_type = genomic DNA
agagtttgatcatggctcaggataaacgctggcggcgcacataagacatgcaagtcgaacggaagtcgttatactgattttgaaatgaacggagaacttgttcaaagggacttgatgaagatttataacaatggctttagtggcggactggtgagtaacacgtaagcaacctgcctgttagaggggaacaacagttagaaatgactgctaataccgcatatgcca

SEQ ID NO: 3546 - DNA, 225 bp, unidentified
  misc_feature 1..225: note = bacterial strain Ascusb_5421 encodes 16S rRNA
  source 1..225: mol_type = genomic DNA
agagtttgatcatggctcaggatgaacgctagctacaggcttaacacatgcaagtcgaggggcatcatggtggtagcttgctaccgctgatggcgaccggcgcacgggtgagtaacacgtatccaacctgccttgagctcagggatagccctctgaaaggaggattaatacctgatgtggttgtcagctgacatcagctttcaattaaagatttatcggctcatg

SEQ ID NO: 3547 - DNA, 225 bp, unidentified
  misc_feature 1..225: note = bacterial strain Ascusb_3821 encodes 16S rRNA
  source 1..225: mol_type = genomic DNA
agagtttgatcatggctcaggatgaacgctagcggcaggcttaacacatgcaagtcgaggggcagcaggctgtagcaatacagtgctggcgaccggcgcaagggcgtgtaacgcgtatgcaacctacctcataacagggggataacccgaggaaacccggactaataccccgtatagtcacgatcccgcatggggttgtgacgaaagattcatcggttggagatg

SEQ ID NO: 3548 - DNA, 225 bp, unidentified
  misc_feature 1..225: note = bacterial strain Ascusb_3613 encodes 16S rRNA
  source 1..225: mol_type = genomic DNA
agagtttgatcctggctcagaacgaacgctggcggcgcgtcttaagcatgcaagtcggacggcaagagaagtgcttgcacttctcctagagtggcggactggtgagtaacaggtgggtgacatacccttcagatggggatagccggtagaaataccgggtaataccgaatacgctcgtacatctcggaagtgtacgaggaaaggagctacggcttcgctgttgga

SEQ ID NO: 3549 - DNA, 225 bp, unidentified
  misc_feature 1..225: note = bacterial strain Ascusb_4530 encodes 16S rRNA
  source 1..225: mol_type = genomic DNA
agagtttgatcatggctcagaacgaacgctggcggcgcgtcttaagcatgcaagtcgagcggtaagattggtgcttgcactaatcctagagcggcggactggtgagtaacgcgtgggtgacgtacctttgtgacggggacagctgatagaaatatcagataataccggatacgctgtatgttgtcagagggcatacaggaaaggatcttttgattcgcacaaaga

SEQ ID NO: 3550 - DNA, 225 bp, unidentified
  misc_feature 1..225: note = bacterial strain Ascusb_2368 encodes 16S rRNA
  source 1..225: mol_type = genomic DNA
agagtttgatcatggctcaggacgaacgctggcggcacgcttaacacatgcaagtcgaacggtgaagatagcttgctatcggatcagtggcggacgggtgagtaacacgtgagcaatctgcctttaagtggggaataacatttggaaacgaatgataataccgcataatatacaagagccgcatgacttttgtatcaaagatttatcgcttaaagatgagctcgc

SEQ ID NO: 3551 - DNA, 225 bp, unidentified
  misc_feature 1..225: note = bacterial strain Ascusb_9492 encodes 16S rRNA
  source 1..225: mol_type = genomic DNA
agagtttgatcatggctcaggatgaacgctggcggcgtgcttaacacatgcaagtcgagcgaggcagcaatgccgagcggcgaacgggtgagtaacgcgtaagcaatctgccccatatcaggaaatacccgtgccaacgcgcggttaatgtccaggagagtggccctctgcatggagggttgactagagatttatcggtatgggatgagcttgcgtccgattagc

SEQ ID NO: 3552 - DNA, 225 bp, unidentified
  misc_feature 1..225: note = bacterial strain Ascusb_1483 encodes 16S rRNA
  source 1..225: mol_type = genomic DNA
agagtttgatcatggctcaggatgaacgctggcggcgtgcctaacacatgcaagtcgaacggaactgcttttgaagactccttcgggacgaatcgttagtagtttagtggcggacgggtgagtaacgcgtgagtaacctgcccttgagagggggataacgttctgaaaaggacgctaataccgcataacattgcgaagtcgcatggctttgcaatcaaaactccg

SEQ ID NO: 3553 - DNA, 225 bp, unidentified
  misc_feature 1..225: note = bacterial strain Ascusb_4705 encodes 16S rRNA
  source 1..225: mol_type = genomic DNA
agagtttgatcatggctcaggatgaacgctggcggcgtgcctaacacatgcaagtcgaacgaagcaagagagcttgctctcttgacttagtggcggacgggtgagtaacgcgtgagtaacctgcccttcagagggggacaacagttggaaacgactgctaataccgcataagaccacgctaccgcatggtagaggggtcaaaggagcaatccgctgaaggatgga

SEQ ID NO: 3554 - DNA, 225 bp, unidentified
  misc_feature 1..225: note = bacterial strain Ascusb_8745 encodes 16S rRNA
  source 1..225: mol_type = genomic DNA
agagtttgatcatggctcaggacgaacgctggcggcgtgcttaacacatgcaagtcgaacgagaatctgtggatagaggtttcggccaattgaagcagaggaaagtggcggacgggtgagtaacgcgtgaggaacctgcctttcagagggggacaacagttggaaacgactgctaataccgcatgatgcataggggtcgcatggctcttatgccaaagatttatc

SEQ ID NO: 3555 - DNA, 225 bp, unidentified
  misc_feature 1..225: note = bacterial strain Ascusb_2610 encodes 16S rRNA
  source 1..225: mol_type = genomic DNA
agagtttgatcctggctcaggacgaacgctggcggcgtgcctaacacatgcaagtcgagcggggacttaccgaatgaaagcttcggccggatttcagcaagttctagcggcggacgggtgagtaacgcgtgagcaatctgtctcagacagggggataacgcagcgaaagttgcactaataccgcatgagaccacagagccacatggcttaggggtcaaaggagca

SEQ ID NO: 3556 - DNA, 225 bp, unidentified
  misc_feature 1..225: note = bacterial strain Ascusb_6194 encodes 16S rRNA
  source 1..225: mol_type = genomic DNA
agagtttgatcctggctcaggacgaacgctggcggcgtgcttaacacatgcaagtcgaacgagggtatttagggagcttgcttcctggatagccgagtggcgaacgggtgagtaacgcgtgagcaacctgtctcacacagggggataacgcaccgaaaggtgtgctaataccgcataagaccacagggggacatcctccaggggtcaaaggaggaatccggtgtg

SEQ ID NO: 3557 - DNA, 225 bp, unidentified
  misc_feature 1..225: note = bacterial strain Ascusb_3338 encodes 16S rRNA
  source 1..225: mol_type = genomic DNA
agagtttgatcctggctcaggacgaacgctggcggcacgcttaacacatgcaagtcgaacggagatacattgagtttacttagtgtatcttagtggcggacgggtgagtaacacgtgagcaacctgcctttgagagagggatagcttctggaaacggatggtaatacctcataacgtagttggatcgcatgatctgactaccaaagatttatcactcaaagatgg

SEQ ID NO: 3558 - DNA, 225 bp, unidentified
  misc_feature 1..225: note = bacterial strain Ascusb_20271 encodes 16S rRNA
  source 1..225: mol_type = genomic DNA
agagtttgatcctggctcaggataaacgctggcggcgcacataagacatgcaagtcgaacggaagtcgttgtaatgatgttgacatgaacggagaacttgttcaaagagagtgaagattgacttacaacaatggctttagtggcggactggtgagtaatgtataagtaacctgcctatcagaggggaacaacagttggaaacgactgctaataccgcatatgcca

SEQ ID NO: 3559 - DNA, 225 bp, unidentified
  misc_feature 1..225: note = bacterial strain Ascusb_1575 encodes 16S rRNA
  source 1..225: mol_type = genomic DNA
agagtttgatcatggctcaggatgaacgctagctacaggcttaacacatgcaagtcgaggggtaacgacagcgaaagcttgcttttgctgggcgacgaccggcgaatgggtgagtaacgcgtatccaacctgccgcaaagtagggcacagccttgcgaaagtaagattaatgccctatgtgctgtgatgaggacatctgaattgcagtaaaggttcaccgctttg

SEQ ID NO: 3560 - DNA, 225 bp, unidentified
  misc_feature 1..225: note = bacterial strain Ascusb_358 encodes 16S rRNA
  source 1..225: mol_type = genomic DNA
agagtttgatcctggctcaggatgaacgctggcggcgtgcctaacacatgcaagtcgagcggagatgttgagagatccttcgggtgatttcttcatcttagcggcggatgggtgagtaacacgtgggtaacctgccctgcacagggggataacagctggaaacggctgttaataccgcatatgcacacgctgccgcatggcagggggtggaaagatttatcggtg

SEQ ID NO: 3561 - DNA, 225 bp, unidentified
  misc_feature 1..225: note = bacterial strain Ascusb_5489 encodes 16S rRNA
  source 1..225: mol_type = genomic DNA
agagtttgatcctggctcagaacgaacgctggcggcgcgtcttaagcatgcaagtcgagcgtgattgaatagcttgctattcatgaaagcggcggactggtgagtaacgcgtgggtgacgtaccctttggatggggatagctcctagaaataggagataataccgaataagctgcatgttgtcagaggacatgcaggaaaggaacatatgttccgccgaaggagc

SEQ ID NO: 3562 - DNA, 225 bp, unidentified
  misc_feature 1..225: note = bacterial strain Ascusb_250 encodes 16S rRNA
  source 1..225: mol_type = genomic DNA
agagtttgatcatggctcaggatgaacgctagctacaggcttaacacatgcaagtcgaggggcagcgggaagttagcttgctaactttgccggcgaccggcgcacgggtgagtaacgcgtatccaaccttccccttagtagggcatagcccgtagaaatgcggattaataccctatgttattcgtcgaggacatctgaagtgaatcaaaggtttaccgctaaggg

SEQ ID NO: 3563 - DNA, 225 bp, unidentified
  misc_feature 1..225: note = bacterial strain Ascusb_2302 encodes 16S rRNA
  source 1..225: mol_type = genomic DNA
agagtttgatcctggctcaggatgaacgctggcggcgtgtttaacacatgcaagtcgagcgagaagctttccagtagattcttcggatgatacaggattgcggaaagcggcggacgggtgagtaacgcgtaggcaacctgccccctgcagagggatagcctcgggaaaccgggattaaaacctcataatgcggcaccgagacatctcggagccgccaaagattta

SEQ ID NO: 3564 - DNA, 225 bp, unidentified
  misc_feature 1..225: note = bacterial strain Ascusb_3250 encodes 16S rRNA
  source 1..225: mol_type = genomic DNA
agagtttgatcatggctcagaacgaacgctggtggcgtgtcttatacatgcaagtcgagcgaggcagcaatgccgagcggcgaacgggtgagtaacgcgtaagcaatctgccccatatcaggaaatacccgtgccaacgcgcggttaatgtccaggagagtggctagctgcatggctggttgactagagatttatcggtatgggatgagcttgcgtccgattagc

SEQ ID NO: 3565 - DNA, 225 bp, unidentified
  misc_feature 1..225: note = bacterial strain Ascusb_5736 encodes 16S rRNA
  source 1..225: mol_type = genomic DNA
agagtttgatcctggctcaggacgaacgctggcggcgtgcttaacacatgcaagtcgaacggggatcatttggatgagagcttcggcaggattccgggtgattctagtggcggacgggtgagtaacgcgtgagcaatctgtcccagacagggggataacacttggaaacaggtgctaataccgcataagaccacggggccacatggtccaggggtaaaaggagaa

SEQ ID NO: 3566 - DNA, 225 bp, unidentified
  misc_feature 1..225: note = bacterial strain Ascusb_1963 encodes 16S rRNA
  source 1..225: mol_type = genomic DNA
agagtttgatcctggctcaggatgaacgctagctacaggcttaacacatgcaagtcgaggggcagcaggacgatagcttgctattgtcgctggcgaccggcgcacgggtgagtaacgcgtatccaaccttccccgtagtaggggatagcccggcgaaagtcggattaataccctatgttcttcaatgcggacatctaagttgaagcaaaggttcaccgctatggg

SEQ ID NO: 3567 - DNA, 225 bp, unidentified
  misc_feature 1..225: note = bacterial strain Ascusb_1888 encodes 16S rRNA
  source 1..225: mol_type = genomic DNA
agagtttgatcatggctcaggatgaacgctggcggcgtgcctaacacatgcaagtcgaacgaggttacttaagttggagattcgtcaaagacttttttaaccgagtggcggatgggtgagtaacgcgtggagaacctgcccttatcagggggataacaactggaaacggttgacaataccgcatacgctccaatagccgcatggcctttggaggaaagatttatc

SEQ ID NO: 3568 - DNA, 225 bp, unidentified
  misc_feature 1..225: note = bacterial strain Ascusb_1871 encodes 16S rRNA
  source 1..225: mol_type = genomic DNA
agagtttgatcatggctcaggatgaacgctggcggcacgcctaacacatgcaagtcgaacggagtttaagagagcttgcttttttaaacttagtggcggacgggtgagtaacacgtgagcaacctgcctttcagagagggatagcttctggaaacggatggtaatacctcataacatacgttgatggcatcattaatgtatcaaagatttatcgctgaaagatgg

SEQ ID NO: 3569 - DNA, 225 bp, unidentified
  misc_feature 1..225: note = bacterial strain Ascusb_3276 encodes 16S rRNA
  source 1..225: mol_type = genomic DNA
agagtttgatcatggctcaggatgaacgctagctacaggcttaacacatgcaagtcgaggggcagcgggaagatagcttgctatctttgccggcgaccggcgcacgggtgagtaacacgtatccaacctgccgtcagcttggggatagccctctgaaaggaggattaatacccgatgtggttgtgttcctgcatggggatgcaattaaagattcatcggctgtcg

SEQ ID NO: 3570 - DNA, 225 bp, unidentified
  misc_feature 1..225: note = bacterial strain Ascusb_1628 encodes 16S rRNA
  source 1..225: mol_type = genomic DNA
agagtttgatcatggctcaggacgaacgctggcggcgtgcctaacacatgcaagtcgaacggagttaccaagaatttcggtttgaagtaacttagtggcggacgggtgagtaacgcgtgagtaacctgcctagaagagggggataacgttctgaaaagaacgctaataccgcataacgtataagtttcgcatggaatttataccaaaggagtaatccgcttttag

SEQ ID NO: 3571 - DNA, 225 bp, unidentified
  misc_feature 1..225: note = bacterial strain Ascusb_18804 encodes 16S rRNA
  source 1..225: mol_type = genomic DNA
agagtttgatcctggctcaggatgaacgctagctacaggcttaacacatgcaagtcgaggggcagcgtgtacaggtgcttgcaccagtatgacggcgaccggcgcacgggtgagtaacgcgtatccaacctgccatatactcgggtatagcccggtgaaaaccgaattaacccccgatagtgtcctttgcaggcatctaattaggactaaagtttacggtatatg

SEQ ID NO: 3572 - DNA, 225 bp, unidentified
  misc_feature 1..225: note = bacterial strain Ascusb_9789 encodes 16S rRNA
  source 1..225: mol_type = genomic DNA
agagtttgatcctggctcaggacgaacgctggcggcgtgcttaacacatgcaagtcgaacgaggttgattgagaagcttgctttttgagataccgagtggcaaacgggtgagtaacgcgtagacaacctgccgtgaagatggggacaacagatcgaaaggtctgctaataccgaatgttgtagatcctccgcatgaaggattcactaaaggtgccctctgtatat

SEQ ID NO: 3573 - DNA, 225 bp, unidentified
  misc_feature 1..225: note = bacterial strain Ascusb_822 encodes 16S rRNA
  source 1..225: mol_type = genomic DNA
agagtttgatcatggctcaggatgaacgctggcggcgtgcttaacacatgcaagtcgaacgagctgcgcggactgaagttttcggatggatggctgcgtacgcgagtggcggacgggtgagtaacgcgtggggaacctgccccattccgggggataccagttggaaacgactgttaataccgcataagcgcacggtaccgcatggtacagtgtgaaaaactccgg

SEQ ID NO: 3574 - DNA, 225 bp, unidentified
  misc_feature 1..225: note = bacterial strain Ascusb_11560 encodes 16S rRNA
  source 1..225: mol_type = genomic DNA
agagtttgatcatggctcaggacgaacgctggcggcacgcctaacacatgcaagtcgaacggtgaatttggtgcttgcactgaattcatagtggcggacgggtgagtaacacgtgagcaacctgccttcaagtgagggatagcttctggaaacggatggtaataccttataaaatatatttgtcgcatggcatatatatcaaagatttattgcttgaagatgggc

SEQ ID NO: 3575 - DNA, 225 bp, unidentified
  misc_feature 1..225: note = bacterial strain Ascusb_14579 encodes 16S rRNA
  source 1..225: mol_type = genomic DNA
agagtttgatcatggctcaggatgaacgctggcggcgtgcttaatacatgcaagtcgaacgaagatttttcgccgaagtttacttcattgaaaaatcttagtggcggacgggtgagtaacgcgcgggtaacctgccttacacagggggataacagttagaaatgactgctaataccgcataagcgcacagtatcgcatgatacagtgtgaaaaactccggtggtg

SEQ ID NO: 3576 - DNA, 225 bp, unidentified
  misc_feature 1..225: note = bacterial strain Ascusb_2256 encodes 16S rRNA
  source 1..225: mol_type = genomic DNA
agagtttgatcatggctcaggacgaacgctggcggcatgcctaacacatgcaagtcgaacggagcttgaggagcttgcttttcaagcttagtggcggacgggtgagtaacgcgtgagcaacctgcctctgagtgtggaataatgtactgaaaaggacactaataccgcatgaaatgtagctgtcgcatgacagtaacatcaaagatttatcgctcagagatgggc

SEQ ID NO: 3577 - DNA, 225 bp, unidentified
  misc_feature 1..225: note = bacterial strain Ascusb_17990 encodes 16S rRNA
  source 1..225: mol_type = genomic DNA
agagtttgatcatggctcagaacgaacgctggcggcgcgtcttaagcatgcaagtcgagcggtaagatgccttcgggtatcctagagcggcggactggtgagtaacacgtagatgacgcacccttctgacggggatagcctgtggaaacacagggtaataccggataagcccgtggggattggaagcttacggggaaaggaactattgttccgcgggaggagcgg

SEQ ID NO: 3578 - DNA, 225 bp, unidentified
  misc_feature 1..225: note = bacterial strain Ascusb_1705 encodes 16S rRNA
  source 1..225: mol_type = genomic DNA
agagtttgatcatggctcaggatgaacgctggcggcgtgcctaacacatgcaagtcgagcggagatatatgtctaagagacttcggtcaaattaattatatcttagcggcggatgggtgaggaacgcgtggagaacctgcccttcacagggggataacagctggaaacggctgttaataccgcatatgctcacagcaccgcatggtgcagggaggaaagccgaga

SEQ ID NO: 3579 - DNA, 225 bp, unidentified
  misc_feature 1..225: note = bacterial strain Ascusb_628 encodes 16S rRNA
  source 1..225: mol_type = genomic DNA
agagtttgatcctggctcaggacgaacgctggcggcgtgcttcatacatgcaagtcgaacgataaggccccttcgggggtacataagtggcggacgggtgagtaatatgtagagaatctgccttcaagcgggggacaacagagggaaacttctgctaataccccatatgagcgtacctgcgatggtattcttgaaagctccggcgcttggagatgagtctgcatc

SEQ ID NO: 3580 - DNA, 225 bp, unidentified
  misc_feature 1..225: note = bacterial strain Ascusb_1717 encodes 16S rRNA
  source 1..225: mol_type = genomic DNA
agagtttgatcatggctcagaacgaacgctggcggcgcgtcttaagcatgcaagtcgaacggcaagattggtgcttgcaccgatcctagagtggcggactggtgagtaacacgtgggtgacgtaccctctgaatggggatagccggtagaaataccggataataccgaataaccttgcacctttagagtggtgtaagaaaaggagcttcggcttcgtcggaggaa

SEQ ID NO: 3581 - DNA, 225 bp, unidentified
  misc_feature 1..225: note = bacterial strain Ascusb_2120 encodes 16S rRNA
  source 1..225: mol_type = genomic DNA
agagtttgatcatggctcaggatgaacgctggcggcgtgcctaacacatgcaagtcgaacggagttatgacgccgaggagacttcggtcaaatcatgttgtaacttagtggcggacgggtgagtaacgcgtggataacctgccatatacagggggataacagttagaaatgactgctaataccgcataagcgcacggaaacgcatgtttcagtgtgaaaaactcc

SEQ ID NO: 3582 - DNA, 225 bp, unidentified
  misc_feature 1..225: note = bacterial strain Ascusb_9216 encodes 16S rRNA
  source 1..225: mol_type = genomic DNA
agagtttgatcatggctcaggatgaacgctagctacaggcttaacacatgcaagtcgaggggcagcatgagattagcttgctaatcttgatggcgaccggcgcacgggtgagtaacgcgtatccaaccttccccctgctcagggatagcccggtgaaaaccggattaagacctgatagtttcactagatggcatctgacggtgaataaaggtttcggcatgggat

SEQ ID NO: 3583 - DNA, 225 bp, unidentified
  misc_feature 1..225: note = bacterial strain Ascusb_11323 encodes 16S rRNA
  source 1..225: mol_type = genomic DNA
agagtttgatcctggctcaggatgaacgctagctacaggcttaacacatgcaagtcgaggggcagcagggcaatagcttgctattgttgctggcgaccggcgcacgggtgagtaacgcgtatccaacctggcccacagtagggaacagcccggcgaaagtcggattaatgccctatgttttcctttgagagcatttgaggaggaacaaagattcatcgctatggg

SEQ ID NO: 3584 - DNA, 225 bp, unidentified
  misc_feature 1..225: note = bacterial strain Ascusb_1618 encodes 16S rRNA
  source 1..225: mol_type = genomic DNA
agagtttgatcctggctcaggataaacgctggcggcgtgcttaacacatgcaagtcgaacgagactgcctggaaaattacttcggtatgcttctgggatttgtcgagtggcggacgggtgagtaacgcgtgagtaacctgccttggagtgggggataacagttagaaatgactgctaataccgcataagcgcacgaaatcgcatgattttgtgtgaaaaactccg

SEQ ID NO: 3585 - DNA, 225 bp, unidentified
  misc_feature 1..225: note = bacterial strain Ascusb_13474 encodes 16S rRNA
  source 1..225: mol_type = genomic DNA
agagtttgatcatggctcaggacgaacgctggcggcgtgcttaacacatgcaagtcgaacggggattagttggttgagagcttcggcaggataccggttaattcgagtggcggacgggtgagtaacgcgtgagcaacctgtcccagacagggggataacacttggaaacaggtgctaataccgcataagaccacagtaggacatcctagaggggtaaaaggagca

SEQ ID NO: 3586 - DNA, 225 bp, unidentified
  misc_feature 1..225: note = bacterial strain Ascusb_10458 encodes 16S rRNA
  source 1..225: mol_type = genomic DNA
agagtttgatcatggctcaggatgaacgctggcggcatgcctaagacatgcaagtcgaacgagacgaccttaagaagactgagtgcttgcacgaagttggaagaagatcatcgtctagtggcagacgggtgagtaacacgtgggtaacctacctttaagttggggataacagttggaaacgacagctaataccgaatgagatattcgtattgaaagaagccttta

SEQ ID NO: 3587 - DNA, 225 bp, unidentified
  misc_feature 1..225: note = bacterial strain Ascusb_6383 encodes 16S rRNA
  source 1..225: mol_type = genomic DNA
agagtttgatcctggctcaggatgaacgctggcggcgcgcttaacacatgcaagtcgaacggttaaagccccttcgggggtgcataaagtggcgaacggctgagtaacacgtgggcaacctgccccccgcaccgggatagcctcgggaaaccgtgggtaataccggatactccctccctgccgcatggctgggaggggaaatgcgtacacggcgggggatgggcc

SEQ ID NO: 3588 - DNA, 225 bp, unidentified
  misc_feature 1..225: note = bacterial strain Ascusb_3013 encodes 16S rRNA
  source 1..225: mol_type = genomic DNA
agagtttgatcatggctcaggatgaacgctagctacaggcttaacacatgcaagtcgcggggcagcatggagtcagcttgctgactttgatggcgaccggcgcacgggtgagtaacgcgtatccaacctgcctgtatctccggcatagcccgccgaaaggcgaattaattccggatgatatcttttgacggcatcggattaggattaaaggagcaatccggatac

SEQ ID NO: 3589 - DNA, 225 bp, unidentified
  misc_feature 1..225: note = bacterial strain Ascusb_3938 encodes 16S rRNA
  source 1..225: mol_type = genomic DNA
agagtttgatcatggctcaggatgaacgctggcggcgtgcataacacattcaagtcgaacgaagcgcagagacggaagtccttcggggcggaagattctgtgacttagtggcggacgggtgagtaacgcgtgagcaacctgcctgtgatagagggataacacatggaaacgtgtgctaataccacatgaggcgcagatatcgcatggtgactgcgttaaagaatt

SEQ ID NO: 3590 - DNA, 225 bp, unidentified
  misc_feature 1..225: note = bacterial strain Ascusb_16139 encodes 16S rRNA
  source 1..225: mol_type = genomic DNA
agagtttgatcatggctcaggatgaacgctggcggcatgcctaagacatgcaagtcgaacgaagtggcccaatgaagagaacgagcttgctcaatcttggatttggattcccacttagtggcgcaagggtgagtaacacgtgggtaatctgccttcgagtctggaataacagttagaaatgattgctaatgccggataatatggagaacgatacgtcattcttta

SEQ ID NO: 3591 - DNA, 225 bp, unidentified
  misc_feature 1..225: note = bacterial strain Ascusb_6000 encodes 16S rRNA
  source 1..225: mol_type = genomic DNA
agagtttgatcctggctcaggatgaacgctagcggcaggcttaacacatgcaagtcgaggggcagcgggttgtagcaatacaatgccggcgaccggcggaagggtgcgtaacgcgtgaacaatctgcccgtatccggggcataagcgatggaaacgtcgtctaatatcccataacaacgagggccgcatgacccatgtttgaaagattcgtcggatacggatgag

SEQ ID NO: 3592 - DNA, 225 bp, unidentified
  misc_feature 1..225: note = bacterial strain Ascusb_9175 encodes 16S rRNA
  source 1..225: mol_type = genomic DNA
agagtttgatcctggctcagaacgaacgctggcagcgtggattaggcatgcaagtcgaacgggatcggggaggcagcaatgtcgccccgtgagagtggcggaagggcgaggaacacgtgggcaacctgtctctgaggtggggaaaaccgctggaaacggcggctaataccgaatgtagcgcccgctcgcatgagcggagcgccaaagggggcgaaagctccccct

SEQ ID NO: 3593 - DNA, 225 bp, unidentified
  misc_feature 1..225: note = bacterial strain Ascusb_4413 encodes 16S rRNA
  source 1..225: mol_type = genomic DNA
agagtttgatcatggctcaggatgaacgctagctacaggcttaacacatgcaagtcgaggggcatcgcgggagttgcttgcaacttctggcggcgaccggcgcacgggtgagtaacgcgtatccaacctgccctttactacggtatagcccagcgaaagttggattaatcccgtatgttgtcgcgcgatggcatctgatcgcgacgaaaggttcaccggtagagg

SEQ ID NO: 3594 - DNA, 225 bp, unidentified
  misc_feature 1..225: note = bacterial strain Ascusb_916 encodes 16S rRNA
  source 1..225: mol_type = genomic DNA
agagtttgatcctggctcaggatgaacgctggcggcgtgcttaacacatgcaagtcgagcgaagcactggtttgaatttcttcggattgacgaacctttgactgagcggcggacgggtgagtaacgcgtggggaacctgccccataccgggggataacagacggaaacgtctgctaataccgcataagcgcacgaagcggcatcgttttgtgtgaaaaactccgg

SEQ ID NO: 3595 - DNA, 225 bp, unidentified
  misc_feature 1..225: note = bacterial strain Ascusb_9659 encodes 16S rRNA
  source 1..225: mol_type = genomic DNA
agagtttgatcatggctcaggatgaacgctggtggcgtgtcttatacatgcaagtcgagcgaggcagcaatgccgagcggcgaacgggtgagtaacgcgtaagcaatctgccccatatcaggaaatacccgtgccaacgcgcggttaatgtccaggagagtggccttctgcatggaaggttgactagagatttatcggtatgggatgagcttgcgtccgattagc

SEQ ID NO: 3596 - DNA, 225 bp, unidentified
  misc_feature 1..225: note = bacterial strain Ascusb_1234 encodes 16S rRNA
  source 1..225: mol_type = genomic DNA
agagtttgatcctggctcaggatgaacgctggcggcgtgcctaacacatgcaagtcgagcggagtacagaatgaagcttgctttgatctgtacttagcggcggatgggtgaggaacgcgtgggcaacctgcccttcacagggggataacagatggaaacgcctgttaataccgcatatgctcacagcaccgcatggtgcagggaggaaagccgagacggtgaagg

SEQ ID NO: 3597 - DNA, 225 bp, unidentified
  misc_feature 1..225: note = bacterial strain Ascusb_3758 encodes 16S rRNA
  source 1..225: mol_type = genomic DNA
agagtttgatcatggctcaggatgaacgctagcgacaggcctaacacatgcaagtcgaggggcagcgcggggaaagcttgcttttcctggcggcgaccggcgcacgggtgcgtaacaggtgtgcaatctgtccatagtcgggggatagcccggcgaaagccgaattaatactccatgtgtcacgaaggggcatccctttgtgatgaaacgtaaggactatgggtg

SEQ ID NO: 3598 - DNA, 225 bp, unidentified
  misc_feature 1..225: note = bacterial strain Ascusb_971 encodes 16S rRNA
  source 1..225: mol_type = genomic DNA
agagtttgatcatggctcaggatgaacgctggcggcgtgcttaacacatgcaagttgaacgaaggtacgggatgaggcttcggcggaatcttgtatacttagtagcggacgggtgagtaacgcgtgggcaacctgccctgtacagggggacaacagctggaaacggctgctaataccgcataagcgcacagcaccgcatggtgccgtgtgaaaagcgcaacggta

SEQ ID NO: 3599 - DNA, 225 bp, unidentified
  misc_feature 1..225: note = bacterial strain Ascusb_355 encodes 16S rRNA
  source 1..225: mol_type = genomic DNA
agagtttgatcatggctcaggatgaacgctggcggcgtgcctaacacatgcaagtcgagcgggaatctgttgattgagacttcggtggattgatgcagaggatagcggcggacgggtgagtaacgcgtaggtaacctgccccttacacagggatagcctcgggaaactgggattaatacctgataatgcgatggagtcacatggctttatcgccaaagatttatc

SEQ ID NO: 3600 - DNA, 225 bp, unidentified
  misc_feature 1..225: note = bacterial strain Ascusb_2212 encodes 16S rRNA
  source 1..225: mol_type = genomic DNA
agagtttgatcctggctcaggatgaacgctagctacaggcttaacacatgcaagtcgaggggcatcaggacgatagcttgctattgttgctggcgaccggcgcacgggtgagtaacgcgtatccaaccttccccatagtaggggatagcccggcgaaagtcggattaatactctatgttcttcaatgcggacatctaatttgaagcaaagatttatcgctatggg

SEQ ID NO: 3601 - DNA, 225 bp, unidentified
  misc_feature 1..225: note = bacterial strain Ascusb_14185 encodes 16S rRNA
  source 1..225: mol_type = genomic DNA
agagtttgatcctggctcaggatgaacgctagctacaggcttaacacatgcaagtcgaggggtaacattggctgagcttgctcagccagatgacgaccggcgcacgggtgagtaacgcgtatccaacctgcccatgggtcagggataaactcccgaaagggagcctaatacctgatgttatgagaagaaggcctctgattttcacgaaagacttcggtcgccgat

SEQ ID NO: 3602 - DNA, 225 bp, unidentified
  misc_feature 1..225: note = bacterial strain Ascusb_16164 encodes 16S rRNA
  source 1..225: mol_type = genomic DNA
agagtttgatcctggctcaggatgaacgctggcggcgtgcttaacacatgcaagtcgaacggaacttttctcccgacgaagcggagagcttgctcaatgctaagtcatttgaaaagtttagtggcggacgggtgagtaacgcgtgggtaacctgccatatacagggggataacacttagaaataggtgctaataccgcataagcgcacagtaccgcatggtacag

SEQ ID NO: 3603 - DNA, 225 bp, unidentified
  misc_feature 1..225: note = bacterial strain Ascusb_4585 encodes 16S rRNA
  source 1..225: mol_type = genomic DNA
agagtttgatcatggctcaggatgaacgctggcggcgtgcctaacacatgcaagtcgaacgaagcacttttaccggagattcgtcgaaggtgaatttgacttagtggcggacgggtgagtaatgtatgagcaacctgcctttcagtgggggacaacagttggaaacgactgctaataccgcataacgtacagagggggcatcccttttgtaccaaaggagtaatt

SEQ ID NO: 3604 - DNA, 225 bp, unidentified
  misc_feature 1..225: note = bacterial strain Ascusb_9466 encodes 16S rRNA
  source 1..225: mol_type = genomic DNA
agagtttgatcatggctcaggatgaacgctagcggcaggcttaacacatgcaagtcgaggggtaacagagggtagcaataccctgctgacgaccggcgcacgggtgcgtaacgcgtatgcaacctacctgtaacaggggaataacggagtgaaaattccactaataccccatattgttattctttcgcatgttaggataacgaaagcttcggtggttacggatgg

SEQ ID NO: 3605 - DNA, 225 bp, unidentified
  misc_feature 1..225: note = bacterial strain Ascusb_3357 encodes 16S rRNA
  source 1..225: mol_type = genomic DNA
agagtttgatcatggctcaggatgaacgctggcggcgtgcttaacacatgcaagtcgaacggaactgcttttgaagattttcttcggaaatgattcagttgtagtttagtggcggacgggtgagtaacgcgtgagtaacctgcccttgagagggggataacgttctgaaaaggacgctaataccgcataacattattgagtcgcatggcttgataatcaaaactc

SEQ ID NO: 3606 - DNA, 225 bp, unidentified
  misc_feature 1..225: note = bacterial strain Ascusb_6686 encodes 16S rRNA
  source 1..225: mol_type = genomic DNA
agagtttgatcatggctcaggatgaacgctagcggcaggcttaacacatgcaagtcgaggggcagcgcggaagtagcaatacttttggcggcgaccggcgcaagggtgcgtaacgcgtgagcgacatgcccgtaaccgggggataaccgatggaaacgtcgcctaaccccccataacactggaggttgcatgattttcagttgaaaactttggtggttacggatt

SEQ ID NO: 3607 - DNA, 225 bp, unidentified
  misc_feature 1..225: note = bacterial strain Ascusb_2695 encodes 16S rRNA
  source 1..225: mol_type = genomic DNA
agagtttgatcatggctcaggatgaacgctagcgacaggcctaacacatgcaagtcgaggggcagcgcgggagaagcttgcttttcctggcggcgaccggcgcacgggtgcgtaacaggtgtgcaatctgtcctataccggggcatagcccagcgaaagttggattaattctccatgtgaaacgaagccgcatgactttgttttgaaacgtaagggtatagggtg

SEQ ID NO: 3608 - DNA, 225 bp, unidentified
  misc_feature 1..225: note = bacterial strain Ascusb_7846 encodes 16S rRNA
  source 1..225: mol_type = genomic DNA
agagtttgatcatggctcaggatgaacgctggcggcgtgcctaatacatgcaagtcgagcgagaatctgatgacttgagattcgtcaatatgattcagaggaaagcggcggacgggtgagtaacgcgtaggcaacctgcccttagcagagggatagccattggaaacgatgattaaaacctcataatgctcttggaacacatgctctgagagccaaagatttatc

SEQ ID NO: 3609 - DNA, 225 bp, unidentified
  misc_feature 1..225: note = bacterial strain Ascusb_13151 encodes 16S rRNA
  source 1..225: mol_type = genomic DNA
agagtttgatcatggctcaggattaacgctggcggcatgcctaagacatgcaagtcgaacgaagagccccattgagaatggaaataaactgaagagcttgctcggatgtggaaataaataggatttggattctgctcttagtggcgaacgggtgagtaacacgtgggttacctgccttcaagctggggataacagctagaaatggttgctaataccgaatgtgct

SEQ ID NO: 3610 - DNA, 225 bp, unidentified
  misc_feature 1..225: note = bacterial strain Ascusb_4889 encodes 16S rRNA
  source 1..225: mol_type = genomic DNA
agagtttgatcctggctcaggacgaacgctggcggcgtgcttaacacatgcaagtcgaacgaggatcatggagagcttgcttgaaatgattcgagtggcggacgggtgagtaacgcgtgaataatctgtcctatacagggggataacgcatcgaaagatgtgctaataccgcgtaggaccacggtgaggcatctcactgaggtgaaaggagtaatccagtatagg

SEQ ID NO: 3611 - DNA, 225 bp, unidentified
  misc_feature 1..225: note = bacterial strain Ascusb_131 encodes 16S rRNA
  source 1..225: mol_type = genomic DNA
agagtttgatcctggctcaggatgaacgctggcggcgtgcttaacacatgcaagtcgaacggggtttacgagaagcttgctttttgtaaacctagtggcggacgggtgagtaacgcgtgagtaacctgccttagactgggggataacacttagaaataggtgctaataccgcataagcgcacagtatcgcatgatacagtgtgaaaaactccggtggtctaagat

SEQ ID NO: 3612 - DNA, 225 bp, unidentified
  misc_feature 1..225: note = bacterial strain Ascusb_2965 encodes 16S rRNA
  source 1..225: mol_type = genomic DNA
agagtttgatcatggctcaggatgaacgctagcgacaggcctaacacatgcaagtcgaggggcagcgcgggagaagcttgcttttcctggcggcgaccggcgcacgggtgcgtaacaggtgtgcaatctgtcctataccggggcatagcccagcgaaagttggattaactccccatgtgtcactgagccgcatgacttagtgatgaaacgttagggtatagggtg

SEQ ID NO: 3613 - DNA, 225 bp, unidentified
  misc_feature 1..225: note = bacterial strain Ascusb_3258 encodes 16S rRNA
  source 1..225: mol_type = genomic DNA
agagtttgatcatggctcaggatgaacgctagcggcaggcttaacacatgcaagtcgaggggcagcgtggagtagcaatactctgacggcgaccggcgaaagggtgagtaacgcgtgagcaacatgcccgatagagggggatagtcattggaaacgatgcgtaataccccgtaacattcggaaccgcatgattctgaattgaaagatttattgctatcggattgg

SEQ ID NO: 3614 - DNA, 225 bp, unidentified
  misc_feature 1..225: note = bacterial strain Ascusb_1706 encodes 16S rRNA
  source 1..225: mol_type = genomic DNA
agagtttgatcatggctcaggatgaacgctggcggcgtgcttaacacatgcaagtcgagcgaagcattttcgctgatttcttcggattgaagcggatctgacttagcggcggacgggtgagtaacgcgtggggaacctgccccataccgggggataacagttagaaatgactgctaataccgcataagcgcacacggaggcatctccgagtgtgaaaaactccgg

SEQ ID NO: 3615 - DNA, 225 bp, unidentified
  misc_feature 1..225: note = bacterial strain Ascusb_7103 encodes 16S rRNA
  source 1..225: mol_type = genomic DNA
agagtttgatcatggctcaggatgaacgctggcggcgtgcctaacacatgcaagtcgaacggaactgcatttgaagattccttcgggatgattcgtttgtagtttagtggcggacgggtgagtaacgcgtgagtaacctgcccttcagagggggataacgttctgaaaaggacgctaataccgcataacactgttttatcgcatgatagaacagtcaaaactcag

SEQ ID NO: 3616 - DNA, 225 bp, unidentified
  misc_feature 1..225: note = bacterial strain Ascusb_1658 encodes 16S rRNA
  source 1..225: mol_type = genomic DNA
agagtttgatcctggctcaggatgaacgctggcggcgtgcctaacacatgcaagtcgaacgggactatttcagatcttttcggagtgatgatctagtttagtggcggacgggtgagtaacgcgtggacaacctgcctctcactgggggatagcagctggaaacggctggtaataccgcatgcgttcaatgtgccgcatgacacattgaagaaagatttatcggtg

SEQ ID NO: 3617 - DNA, 225 bp, unidentified
  misc_feature 1..225: note = bacterial strain Ascusb_6222 encodes 16S rRNA
  source 1..225: mol_type = genomic DNA
agagtttgatcatggctcaggatgaacgctagcggcaggcctaacacatgcaagtcgaggggcagcagggcgtagcaatacgctgctggcgaccggcgcacgggtgcgtaacgcgtatgcaacctacccataacagggggataacggagtgaaaattccactaataccccgtattgccacatagtcgcatggcttagtggcgaaagccttcgggtggttatggat

SEQ ID NO: 3618 - DNA, 225 bp, unidentified
  misc_feature 1..225: note = bacterial strain Ascusb_4663 encodes 16S rRNA
  source 1..225: mol_type = genomic DNA
agagtttgatcctggctcaggacgaacgctggcggcgtgcttaacacatgcaagtcgagcggagacatgtaacggaaagcttcggctggaagatatatgttttagcggcggacgggtgagtaacgcgtgagcaacctgtccttcacagggggataagataccgaaaggtgttctaataccgcataagaccacaatgtcgcatggcgaaggggtcaaaggagcaat

SEQ ID NO: 3619 - DNA, 225 bp, unidentified
  misc_feature 1..225: note = bacterial strain Ascusb_7209 encodes 16S rRNA
  source 1..225: mol_type = genomic DNA
agagtttgatcatggctcaggatgaacgctagctacaggcttaacacatgcaagtcgaggggcatcaggacgatagcttgctattgttgctggcgaccggcgcacgggtgagtaacgcgtatccaaccttccccttagtagcggatagcccggcgaaagtcggattaatacgctatgttatccgaagaggacatctgaattggattaaagattgatcgctaaggg

SEQ ID NO: 3620 - DNA, 225 bp, unidentified
  misc_feature 1..225: note = bacterial strain Ascusb_16319 encodes 16S rRNA
  source 1..225: mol_type = genomic DNA
agagtttgatcctggctcaggatgaacgctggcggcgtgcctaatacatgcaagtcgaacgagggtgcttgcaccctagtggcgaacgggtgagtaacacgtaggtaacctgcccttaagcttgggatacccagaggaaactttggctaataccggataacaacagagaaggcatcttctttgcttgaaaggcccttcacggggtcacttaaggatggacctgcg

SEQ ID NO: 3621 - DNA, 225 bp, unidentified
  misc_feature 1..225: note = bacterial strain Ascusb_4348 encodes 16S rRNA
  source 1..225: mol_type = genomic DNA
agagtttgatcatggctcagaacgaacgctggcggcgcgtcttaagcatgcaagtcgagcgggagtacctagcttgctaggtatgagagcggcggactggtgagtaacgcgtgggtgacgtaccctccggacggggatagctcctagaaataggaggtaataccggatacggtgtatgttgtcagaggacatacaggaaagcagcctttgctgcgccggaggagc

SEQ ID NO: 3622 - DNA, 225 bp, unidentified
  misc_feature 1..225: note = bacterial strain Ascusb_20487 encodes 16S rRNA
  source 1..225: mol_type = genomic DNA
agagtttgatcatggctcaggatgaacgctagctacaggcttaacacatgcaagtcgaggggcagcattgggatagcttgctattccagatggcgaccggcgcacgggtgagtaacgcgtatccaaccttccccgtagtagggcacagcccggcgaaagtcggattaattccctatgttgtttgatgcggacatctaattcaaaccaaagatttatcgctatggg

SEQ ID NO: 3623 - DNA, 225 bp, unidentified
  misc_feature 1..225: note = bacterial strain Ascusb_3117 encodes 16S rRNA
  source 1..225: mol_type = genomic DNA
agagtttgatcatggctcaggatgaacgctggcggcgcgcctaacacatgcaagtcgaacggcgacggggcttcggcccctgaacagtggcggacgggtgagtaacgcgtgagtaacctgccccggtgagcggaataacgtccggaaacagacgctaataccgcatgacacatacttctggcatcgggagtatgtcaaagaattatcgcaccgggatggactcgc

SEQ ID NO: 3624 - DNA, 225 bp, unidentified
  misc_feature 1..225: note = bacterial strain Ascusb_2982 encodes 16S rRNA
  source 1..225: mol_type = genomic DNA
agagtttgatcctggctcaggatgaacgctggcggcgtgcttaatacatgcaagtcgaacgaagcacttatgacagatcccctcggggtgaagacgtttgtgacttagtggcggacgggtgagtaacgcgtgggtaacctgccttatgcagggggataacagttagaaatgactgctaataccgcataagcgcacggcaccgcatggtgcagtgtgaaaagattt

SEQ ID NO: 3625 - DNA, 225 bp, unidentified
  misc_feature 1..225: note = bacterial strain Ascusb_3203 encodes 16S rRNA
  source 1..225: mol_type = genomic DNA
agagtttgatcatggctcaggacgaacgctggcggcgtgcctaacacatgcaagtcgaacggagttgctgaggatttcggtttgaagcaacttagtggcggacgggtgagtaacgcgtgagtaacctgccgatgagagggggataacgttctgaaaagaacgctaataccgcataacgtatcgaagccgcatgactttgataccaaaggagcaatccgctcattg

SEQ ID NO: 3626 - DNA, 225 bp, unidentified
  misc_feature 1..225: note = bacterial strain Ascusb_9392 encodes 16S rRNA
  source 1..225: mol_type = genomic DNA
agagtttgatcatggctcaggataaacgctggcggcgtgcctaatacatgcaagtcgatcgctggagctccagcttgctggagcgaaggagaggcgaacgggtgagtaatacataagcaacctgcccacgaagactgggataattcctggaaacggggactaataccggataggcagcgtgatcgcatgatcgtgctgttaaagattcaaagcactggtggatgg

SEQ ID NO: 3627 - DNA, 225 bp, unidentified
  misc_feature 1..225: note = bacterial strain Ascusb_5018 encodes 16S rRNA
  source 1..225: mol_type = genomic DNA
agagtttgatcatggctcaggatgaacgctggcggcgtgcctaacacatgcaagtcgagcgggaatcgacggacagaagcttcggcagacggaagttgaggagagcggcggacgggtgagtaacgcgtaggtaacctaccttatgcacagggatagccccgggaaactggaattaatacctgatgaagcggtgaagtcacatggctttatcgccaaagatttatc

SEQ ID NO: 3628 - DNA, 225 bp, unidentified
  misc_feature 1..225: note = bacterial strain Ascusb_3635 encodes 16S rRNA
  source 1..225: mol_type = genomic DNA
agagtttgatcatggctcaggatgaacgctggcggcgtgcctaatacatgcaagtcgagcgagaagaaagaaaatgaagcttcggtagatttttctttccgaaagcggcggacgggtgagtaacgcgtaggcaacctgccccttgcacagggatagccattggaaacgatgattaatacctgataacgctgagagaatgcatattcattcagccaaagatttatc

SEQ ID NO: 3629 - DNA, 225 bp, unidentified
  misc_feature 1..225: note = bacterial strain Ascusb_4648 encodes 16S rRNA
  source 1..225: mol_type = genomic DNA
agagtttgatcctggctcaggacgaacgctggcggcgtgcttaacacatgcaagtcgaacggggattatgagaatgagagcttcggcaggattttttataattctagtggcggacgggtgagtaacgcgtgagcaacctgtcccagacagggggataacacttggaaacaggtgctaataccgcataagaccacggggagacatctacctggggtaaaaggtgca

SEQ ID NO: 3630 - DNA, 225 bp, unidentified
  misc_feature 1..225: note = bacterial strain Ascusb_3654 encodes 16S rRNA
  source 1..225: mol_type = genomic DNA
agagtttgatcatggctcaggacgaacgctggcggcgtgcctaacacatgcaagtcgaacggagataatttggatgaagatttcggttggattccgttttatcttagtggcggacgggtgagtaacgcgtgagtaacctgccgacgagagtggaataacgttctgaaaagaacgctaataccgcataacatagagggacggcatcgtccttctatcaaagatttt

SEQ ID NO: 3631 - DNA, 225 bp, unidentified
  misc_feature 1..225: note = bacterial strain Ascusb_6309 encodes 16S rRNA
  source 1..225: mol_type = genomic DNA
agagtttgatcctggctcaggatgaacgctagcgacaggcctaacacatgcaagtcgagcggcagcacctcgggtggcgagcggcgcacgggtgagtaacgcgtatgtaacctgcccatgagtggggaatagcccggtgaaaaccggattaatgccccatgacaccggaatttgacatcttataccggttaaagattcattgctcatggatggacatgcgttgga

SEQ ID NO: 3632 - DNA, 225 bp, unidentified
  misc_feature 1..225: note = bacterial strain Ascusb_1036 encodes 16S rRNA
  source 1..225: mol_type = genomic DNA
agagtttgatcatggctcaggatgaacgctagctacaggcttaacacatgcaagtcgaggggcagcattgagatagcttgctatttcagatggcgaccggcgcacgggtgagtaacgcgtatccaaccttccccatagtagaggatagcccggcgaaagtcggattaatactctatgttgttcaatgcggacatctaagttgaaccaaaggtttaccgctatggg

SEQ ID NO: 3633 - DNA, 225 bp, unidentified
  misc_feature 1..225: note = bacterial strain Ascusb_1463 encodes 16S rRNA
  source 1..225: mol_type = genomic DNA
agagtttgatcctggctcaggacgaacgctggcggcgtgcctaacacatgcaagtcgaacggagctgtttcacgaaggtcttcggattggacgagacagcttagtggcggacgggtgagtaacgcgtgagcaacctgcctttcagagggggacaacggttggaaacgaccgctaataccgcatgaagcaatcggaccgcatgatctggttgccaaagattttatc

SEQ ID NO: 3634 - DNA, 225 bp, unidentified
  misc_feature 1..225: note = bacterial strain Ascusb_399 encodes 16S rRNA
  source 1..225: mol_type = genomic DNA
agagtttgatcatggctcaggatgaacgctggcggcgtgcttaacacatgcaagtcgaacgggacttgagaattgaagtactcgtatggattttcttaagtttagtggcggacgggtgagtaacgcgtgggcaacctgccgtatgcagggggacaacagctggaaacggctgctaataccgcataagcgcacagcaccgcatggtgcagtgtgaaaagatttatc

SEQ ID NO: 3635 - DNA, 225 bp, unidentified
  misc_feature 1..225: note = bacterial strain Ascusb_824 encodes 16S rRNA
  source 1..225: mol_type = genomic DNA
agagtttgatcctggctcaggatgaacgctggcggcgtgcttaacacatgcaagtcgaacggttaaagcccccctcggggggtgcataaagtggcgaacgggtgagtaacacgtgggcaacctgcccctcacaccgggataacacggtgaaaaccgtgctaataccggatactccgcgaccgtggcatctcggtcgcgggaaagcccaggcggtgagggatgggc

SEQ ID NO: 3636 - DNA, 225 bp, unidentified
  misc_feature 1..225: note = bacterial strain Ascusb_6669 encodes 16S rRNA
  source 1..225: mol_type = genomic DNA
agagtttgatcctggctcaggatgaacgctggcggcgtgcttaacacatgcaagtcgaacggacatgtaacaccgctgttgatctagcttgctattgacgcagcaccgttgcatgttagtggcggacgggtgagtaacgcgtgggtaacctgcctttatccgggggataacagttagaaatgactgctaataccgcataagcgcacgagggggcatccttttgtg

SEQ ID NO: 3637 - DNA, 225 bp, unidentified
  misc_feature 1..225: note = bacterial strain Ascusb_5208 encodes 16S rRNA
  source 1..225: mol_type = genomic DNA
agagtttgatcatggctcaggatgaacgctggcggcgtgcctaatacatgcaagtcgagcgagaaatccttgattgactcttcggatgatttcatggatggaaagcggcggacgggtgagtaacgcgtaggcaacctgccccttgcacagggatagccactggaaacggtgattaatacctgataatgcagttcagtagcatttcagaactgccaaagatttatc

SEQ ID NO: 3638 - DNA, 225 bp, unidentified
  misc_feature 1..225: note = bacterial strain Ascusb_13335 encodes 16S rRNA
  source 1..225: mol_type = genomic DNA
agagtttgatcatggctcaggatgaacgctggcggcgtgcttaacacatgcaagtcgaacgaagctcctatcatgatttcttcggaatgacttttaggatgacttagtggcggacgggtgagtaacgcgtgaggaacctgcctcgcagtggggaataacagttggaaacgactgctaataccgcataacgcaaagagatcgcatgttttctttgccaaagattta

SEQ ID NO: 3639 - DNA, 225 bp, unidentified
  misc_feature 1..225: note = bacterial strain Ascusb_3083 encodes 16S rRNA
  source 1..225: mol_type = genomic DNA
agagtttgatcatggctcaggatgaacgctggcggcgtgcttaacacatgcaagtcgaacgaagcattaggtttgatttcttcggattgaagaccatatgacttagtggcggacgggtgagtaacgcgtgggcaatctgccccataccgggggacaacagttggaaacgactgctaataccgcataagcgcacggcatcgcatggtgcagtgtgaaaaactccgg

SEQ ID NO: 3640 - DNA, 225 bp, unidentified
  misc_feature 1..225: note = bacterial strain Ascusb_7073 encodes 16S rRNA
  source 1..225: mol_type = genomic DNA
agagtttgatcatggctcaggacgaacgctggcggcgtgcttaacacatgcaagtcgaacgaggttattttgatgagatcttcggaaggattcggaataaccgagtggcggacgggtgagtaacgcgtgagcaacctgtcttacacagggggataacgctccgaaaggagtgctaataccgcataggaccacgatgctgcatggcattggggtgaaaggagcaat

SEQ ID NO: 3641 - DNA, 225 bp, unidentified
  misc_feature 1..225: note = bacterial strain Ascusb_6290 encodes 16S rRNA
  source 1..225: mol_type = genomic DNA
agagtttgatcctggctcaggatgaacgctggcggcgtgcctaatacatgcaagtcgagcgagaatctgatgatctgcgattcgtcaaagagaatcagaggaaagcggcggacgggtgagtaacgcgtaggcaacctgcccttagcagagggatagccattggaaacgatgattaaaacctcataatgctgttgagacacatgtttcgacagccaaagatttatc

SEQ ID NO: 3642 - DNA, 225 bp, unidentified
  misc_feature 1..225: note = bacterial strain Ascusb_3305 encodes 16S rRNA
  source 1..225: mol_type = genomic DNA
agagtttgatcatggctcaggatgaacgctagctacaggcctaacacatgcaagtcgaggggcagcagatcgaaagcttgcttttgatgctggcgaccggcgaatgggtgagtcacgcgtgtccaacctgccctgtgcccggggatagcccttggaaatgaggattaacacccgataggtggcgcttccgcatggcggcgccatgaaaccgacacaggatgggga

SEQ ID NO: 3643 - DNA, 225 bp, unidentified
  misc_feature 1..225: note = bacterial strain Ascusb_1282 encodes 16S rRNA
  source 1..225: mol_type = genomic DNA
agagtttgatcatggctcaggatgaacgctggcggcgtgcctaatacatgcaagtcgaacggcagtagcaatactgtagtggcgaacgggtgagtaacacgttggtgacctgccccaaagatgggaatatcacctggaaacgggtggcaaaaccgaataagctcgagggagttagagagccttgagtaaaagcgtaagctactttgggaggggcctgcggcccat

SEQ ID NO: 3644 - DNA, 225 bp, unidentified
  misc_feature 1..225: note = bacterial strain Ascusb_6545 encodes 16S rRNA
  source 1..225: mol_type = genomic DNA
agagtttgatcctggctcagaacgaacgctggcggcaggcctaacacatgcaagtcgagcgtgaaaggggcttcggccctgagtaaagcggcgcacgggtgagtaacacgtgaataatctgcccttgagaccgggataacagaccgaaaggactgctaataccggataagcccacagaccaaccgggtgtgtgagaaaagagcgggaatcttcggatccgttcac

SEQ ID NO: 3645 - DNA, 225 bp, unidentified
  misc_feature 1..225: note = bacterial strain Ascusb_3550 encodes 16S rRNA
  source 1..225: mol_type = genomic DNA
agagtttgatcctggctcaggatgaacgctggcggcgtgcctaacacatgcaagtcgaacggggttgagcagaaattttcggatggaagctcaacttagtggcggacgggtgagtaacgcgtggataacctgcctcacacagggggatagcagctggaaacggctggtaataccgcataagaccacagtgccgcatggcacaggggtaaaagatttatcggtgtg

SEQ ID NO: 3646 - DNA, 225 bp, unidentified
  misc_feature 1..225: note = bacterial strain Ascusb_2900 encodes 16S rRNA
  source 1..225: mol_type = genomic DNA
agagtttgatcatggctcaggatgaacgctggcggcgtgcttaacacatgcaagtcgaacgaagcactgaagaatggagattcgtcaaagttcttctttgactgagtggcgaacgggtgagtaatgcgtgagcaacctgcccttcagagggggacaacagttggaaacgactgctaataccgcatgacgtgtttggaaggcatcttcgggacaccaaaggagaaa

SEQ ID NO: 3647 - DNA, 225 bp, unidentified
  misc_feature 1..225: note = bacterial strain Ascusb_2563 encodes 16S rRNA
  source 1..225: mol_type = genomic DNA
agagtttgatcatggctcaggacgaacgctggcggcgtgcctaacacatgcaagtcgaacggagcgaaagcagcttgctgctggagcttagtggcggacgggtgagtaacacgtgagtaacctgcctttcagaggggaataatgtttggaaacggacactaataccgcataacatacaatcaacgcatgttgaatgtatcaaaggagcaatccgctgaaagatgg

SEQ ID NO: 3648 - DNA, 225 bp, unidentified
  misc_feature 1..225: note = bacterial strain Ascusb_2765 encodes 16S rRNA
  source 1..225: mol_type = genomic DNA
agagtttgatcatggctcaggacgaacgctggcggcacgcctaacacatgcaagtcgaacggagattgcttagcttgctatgcgatcttagtggcggacgggtgagtaacacgtgagcaacctgcctctgagagagggatagcttctggaaacggatggtaatacctcataatgtagtgaaaccgcatgattttgctaccaaagatttatcactcagagatgggc

SEQ ID NO: 3649 - DNA, 225 bp, unidentified
  misc_feature 1..225: note = bacterial strain Ascusb_2001 encodes 16S rRNA
  source 1..225: mol_type = genomic DNA
agagtttgatcatggctcaggatgaacgctagcggcaggcttaacacatgcaagtcgaggggcagcggagagtagcaatactctgccggcgaccggcgaaagggtgcgtaacgcgtgagcaacttgcccgtatccgggacataagcggtggaaacgccgtctaatttcccataacaacgagggccgcatgacccatgtttgaaagatccgtcggatacggatggg

SEQ ID NO: 3650 - DNA, 225 bp, unidentified
  misc_feature 1..225: note = bacterial strain Ascusb_5071 encodes 16S rRNA
  source 1..225: mol_type = genomic DNA
agagtttgatcctggctcaggatgaacgctagctacaggcttaacacatgcaagtcgcggggcatcgcatggggcggcaacgtccctggcggcgaccggcggatgggtgagtaacgcgtatccaacctggccccctctccgggacagcccctcgaaagagggattaataccggatgttccctttatgccgcatggcgtgatgggcaaaggcttcggtcggaaggg

SEQ ID NO: 3651 - DNA, 225 bp, unidentified
  misc_feature 1..225: note = bacterial strain Ascusb_18075 encodes 16S rRNA
  source 1..225: mol_type = genomic DNA
agagtttgatcctggctcaggatgaacgctggcggcgtgcttaacacatgcaagtcgaacggagcatattttctgatttcttcggactgaaggagatatgacttagtggcggacgggtgagtaacgcgtgggcaacctgcctcacacagggggacaacagttggaaacgactgctaataccgcataagcgcacagtaccgcatggtacagtgtgaaaagccgaga

SEQ ID NO: 3652 - DNA, 225 bp, unidentified
  misc_feature 1..225: note = bacterial strain Ascusb_6117 encodes 16S rRNA
  source 1..225: mol_type = genomic DNA
agagtttgatcatggctcaggatgaacgctagcggcaggcttaacacatgcaagtcgaggggcagcgggtccagcaatggatgccggcgaccggcgcaagggtgcgtaacgcgtgagcgacatgcccgtgaccgggggataaccgatggaaacgtcgcctaaccccccatatgattatccatcgcatggtggatgattgaaaaccgtggtggtcacggattggct

SEQ ID NO: 3653 - DNA, 225 bp, unidentified
  misc_feature 1..225: note = bacterial strain Ascusb_176 encodes 16S rRNA
  source 1..225: mol_type = genomic DNA
agagtttgatcatggctcaggatgaacgctggcggcgtgcttaacacatgcaagtcgaacgaggctgcattgcggaagttttcggatggaagcgatgttgaccgagtggcggacgggtgagtaacgcgtggggaacctgccccattccgggggataccagttggaaacgactgttaataccgcataagcgcacagtgagacatctcacagtgtgaaaaactgagg

SEQ ID NO: 3654 - DNA, 225 bp, unidentified
  misc_feature 1..225: note = bacterial strain Ascusb_12861 encodes 16S rRNA
  source 1..225: mol_type = genomic DNA
agagtttgatcctggctcaggatgaacgctggcggcgtgcttaacacatgcaagtcgaacggagatatgcgctgattgaagcttcggcagaaatcatgtatctcttagtggcggacgggtgagtaacgcgtgggtaacctgccttataccgggggataacacttagaaataggtgctaataccgcataagcgcacgacaccgcatggtgatgtgtgaaaaactcc

SEQ ID NO: 3655 - DNA, 225 bp, unidentified
  misc_feature 1..225: note = bacterial strain Ascusb_5974 encodes 16S rRNA
  source 1..225: mol_type = genomic DNA
agagtttgatcatggctcaggacgaacgctggcggcgtgcttaacacatgcaagtcgaacggagttaagcgctggtctgatgctagcttgctagtggatttccttgcttaacttagtggcggacgggtgagtaacgcgtgagtaacctgcccttcagtggggaataacgccctgaaaagagcgctaataccgcataacatacagttgtcgcatggcagttgtatc

SEQ ID NO: 3656 - DNA, 225 bp, unidentified
  misc_feature 1..225: note = bacterial strain Ascusb_4116 encodes 16S rRNA
  source 1..225: mol_type = genomic DNA
agagtttgatcatggctcaggattaacgctggcggcatgcctaatacatgcaagtcgaacgagcagcaatgctagtggcgaacgggtgagtaacacgtagggaacctgccctttagacgaggataactactggaaacggtggctaaaactggatagtatacaagaaggcatcttcgtgtatttaaaggtcctgcaagggaacgctaaaggatggtcctgcggagc

SEQ ID NO: 3657 - DNA, 225 bp, unidentified
  misc_feature 1..225: note = bacterial strain Ascusb_2952 encodes 16S rRNA
  source 1..225: mol_type = genomic DNA
agagtttgatcctggctcaggatgaacgctggcggcgtgcctaacacatgcaagtcgaacgaagcatcgcgcccgggaaagtggagtgcttgcacaaagcggacccaattgtgatgacttagtggcggacgggtgagtaacgcgtgggtaacctgccgtatgcagggggataacagttagaaatgactgctaataccgcataagcgcacagcttcgcatggagca

SEQ ID NO: 3658 - DNA, 225 bp, unidentified
  misc_feature 1..225: note = bacterial strain Ascusb_2474 encodes 16S rRNA
  source 1..225: mol_type = genomic DNA
agagtttgatcatggctcaggatgaacgctggcggcgtgcttaacacatgcaagtcgaacggacttgttccgctgtaagacgacgtgcttgcattgaatcttacttggaacaagttagtggcggacgggtgagtaacgcgtggggaacctgcctgtatctgggggataacagttagaaatgactgctaataccgcataagcgcacactgtcgcatgacagagtgt

SEQ ID NO: 3659 - DNA, 225 bp, unidentified
  misc_feature 1..225: note = bacterial strain Ascusb_1756 encodes 16S rRNA
  source 1..225: mol_type = genomic DNA
agagtttgatcctggctcaggatgaacgctggcggcgtgcttaacacatgcaagtcgaacgagcgagttcccttcgggggacaagcgagtggcggacgggtgagtaacgcgtgggtaacctgcctcatacagggggataacagtcagaaataactgctaataccgcataagcgcacagtaccgcatggtacagtgtgaaaagctccggcggtatgagatggaccc

SEQ ID NO: 3660 - DNA, 225 bp, unidentified
  misc_feature 1..225: note = bacterial strain Ascusb_2650 encodes 16S rRNA
  source 1..225: mol_type = genomic DNA
agagtttgatcctggctcaggacgaacgctggcggcgtgcttaacacatgcaagtcgaacgaggattacgagattgagagcttcggcaggatagatcgtaattcgagtggcggacgggtgagtaacgcgtgagcaatctgtcccagacaggggaataacacttggaaacaggtgctaataccgcataagaccacggggaggcatcttcctggggtaaaaggagta

SEQ ID NO: 3661 - DNA, 225 bp, unidentified
  misc_feature 1..225: note = bacterial strain Ascusb_3092 encodes 16S rRNA
  source 1..225: mol_type = genomic DNA
agagtttgatcatggctcaggatgaacgctagctacaggcttaacacatgcaagtcgaggggtaacattggcggagcttgctctgccagatgacgaccggcgcacgggtgagtaacgcgtatccaacctgcccatgggtcagggataaactcccgaaagggagcctaatacctgatgttgtgagaagaaggcctctgattttcacgaaagacttcggtcgccgat

SEQ ID NO: 3662 - DNA, 225 bp, unidentified
  misc_feature 1..225: note = bacterial strain Ascusb_15152 encodes 16S rRNA
  source 1..225: mol_type = genomic DNA
agagtttgatcatggctcaggacgaacgctggcggcgtgcctaacacatgcaagtcgaacggggattttgtttcggcagaatcctagtggcgaacgggtgagtaacgcgtaggcaacctgccctccggccggggacaacactccgaaaggggtgctaataccggatacgaagtctgtgccgcatggtacggatttgaaagatggcctctgtttacaagctatcgc

SEQ ID NO: 3663 - DNA, 225 bp, unidentified
  misc_feature 1..225: note = bacterial strain Ascusb_4226 encodes 16S rRNA
  source 1..225: mol_type = genomic DNA
agagtttgatcatggctcaggacgaacgctggcggcgtgcttaacacatgcaagtcgaacggggatatgtttgatgagagcttcggcaggaatcggatgtattctagtggcggacgggtgagtaacgcgtgagcaacctgtcccagacagggggataacacttggaaacaggtgctaataccgcataagaccacagcatcacatggtgcaggggtaaaaggtgga

SEQ ID NO: 3664 - DNA, 225 bp, unidentified
  misc_feature 1..225: note = bacterial strain Ascusb_2357 encodes 16S rRNA
  source 1..225: mol_type = genomic DNA
agagtttgatcatggctcaggatgaacgctggcggcgtgcttaatacatgcaagtcgaacgaagcgcttacagccgatcccttcggggtgaagcagtttgtgacttagtggcggacgggtgagtaacgcgtgggtaacctgccttatgcagggggataacagttagaaatggctgctaataccgcataagcgcacggcaccgcatggtggagtgtgaaaagattt

SEQ ID NO: 3665 - DNA, 225 bp, unidentified
  misc_feature 1..225: note = bacterial strain Ascusb_7938 encodes 16S rRNA
  source 1..225: mol_type = genomic DNA
agagtttgatcatggctcaggatgaacgctggcggcatgcctaagacatgcaagtcgaacgagatggccttttgaaaactgcgtacttgtacaaagttggattaagattttccatctagtggcagacgggtgagtaatacataagtaatctacctcagagactgggataacgtttggaaacgaacgctaataccggatgattcttcttacacaagtaagaatgct

SEQ ID NO: 3666 - DNA, 225 bp, unidentified
  misc_feature 1..225: note = bacterial strain Ascusb_3444 encodes 16S rRNA
  source 1..225: mol_type = genomic DNA
agagtttgatcatggctcaggatgaacgctggcggcgtgcttaatacatgcaagtcgaacgaagcacttacgacagatcccctcggggtgaagatgtttgtgacttagtggcggacgggtgagtaacgcgtgggtaacctgcctcatgcagggggataacagttagaaatgactgctaataccgcataagcgcacgtgaccgcatggtcgagtgtgaaaagattt

SEQ ID NO: 3667 - DNA, 225 bp, unidentified
  misc_feature 1..225: note = bacterial strain Ascusb_2890 encodes 16S rRNA
  source 1..225: mol_type = genomic DNA
agagtttgatcctggctcaggacgaacgctggcggcgtgcctaacacatgcaagtcgaacgagcgcacgggagcttgctcctgtgctgcgagtggcggacgggtgagtaacgcgtgaggaacctgcccttaagagggggataacgtccggaaacggacgctaataccgcataacatgtcgggatcgcatgattctgatatcaaaggagcaatccgcttaaggatg

SEQ ID NO: 3668 - DNA, 225 bp, unidentified
  misc_feature 1..225: note = bacterial strain Ascusb_7150 encodes 16S rRNA
  source 1..225: mol_type = genomic DNA
agagtttgatcatggctcaggatgaacgctagctacaggcttaacacatgcaagtcgaggggcagcatggtggtagcttgctaccaccgatggcgaccggcgcacgggtgagtaacacgtatccaacctgccgtcagcttggggatagccctctgaaaggaggattaatacccgatgtggttgttggctgacatcagccttcaattaaagatttatcggctgtcg

SEQ ID NO: 3669 - DNA, 225 bp, unidentified
  misc_feature 1..225: note = bacterial strain Ascusb_2951 encodes 16S rRNA
  source 1..225: mol_type = genomic DNA
agagtttgatcatggctcaggacgaacgctggcggcgcgcttaacacatgcaagtcgaacggagcttgaacgagcgtcttcggacaatcgatcaaacttagtggcggacgggtgagtaacgcgtgagcaaccggtcctgaagagggggacaacattgagaaatcaatgctaataccgcgtaagaccacactgcggcatcgcagaggggtcaaaggagagatccgc

SEQ ID NO: 3670 - DNA, 225 bp, unidentified
  misc_feature 1..225: note = bacterial strain Ascusb_6768 encodes 16S rRNA
  source 1..225: mol_type = genomic DNA
agagtttgatcatggctcaggatgaacgctagcggcaggcttaacacatgcaagtcgaggggcatcgcggggtagcaatactctggcggcgaccggcgaaagggtgagtaacgcgtgagcaacattccgctttcagggggatagtcattggaaacgatgcgtaataccccgtatgacttatgcaggcatctgcgtaagttgaaagatttatcgggaggcgattgg

SEQ ID NO: 3671 - DNA, 225 bp, unidentified
  misc_feature 1..225: note = bacterial strain Ascusb_548 encodes 16S rRNA
  source 1..225: mol_type = genomic DNA
agagtttgatcatggctcagaacgaacgctggtggcgtgtcttatacatgcaagtcgagcggtgcagcaatgcatagcggcgaacgggtgagtaacgcgtaagcaatctgccccatgcccgggaatagccgtgccaacgcgcgggtaataccggatatagtggctccctgcatagggggttgacgaaagatttatcggcatgggatgagcttgcgtccgattagc

SEQ ID NO: 3672 - DNA, 225 bp, unidentified
  misc_feature 1..225: note = bacterial strain Ascusb_2534 encodes 16S rRNA
  source 1..225: mol_type = genomic DNA
agagtttgatcatggctcaggatgaacgctggcggcgtgcctaacacatgcaagtcgaacggggtatacgcgctgatgatcgaagtgcttgcatagagagaatcttgtgtatacttagtggcggacgggtgagtaacgtgtggataacctggtccatccagggggatagcagctggaaacggctggtaataccgcataagcgcacagtaaggcatcttacagtgt

SEQ ID NO: 3673 - DNA, 225 bp, unidentified
  misc_feature 1..225: note = bacterial strain Ascusb_2535 encodes 16S rRNA
  source 1..225: mol_type = genomic DNA
agagtttgatcctggctcaggacgaacgctggcggcgtgcttaacacatgcaagtcgaacgagaatcaccggaaggagttttcggacaacggaaggtgaggacagtggcggacgggtgagtaacgcgtgaggaacctgcctctcagagggggacaacagttggaaacgactgctaataccgcataacgcagcggagtcgcatggctctgctgccaaagatttatc

SEQ ID NO: 3674 - DNA, 225 bp, unidentified; identical to SEQ ID NO: 2967
  misc_feature 1..225: note = bacterial strain Ascusb_2598 encodes 16S rRNA
  source 1..225: mol_type = genomic DNA

SEQ ID NO: 3675 - DNA, 225 bp, unidentified
  misc_feature 1..225: note = bacterial strain Ascusb_1478 encodes 16S rRNA
  source 1..225: mol_type = genomic DNA
agagtttgatcatggctcaggacgaacgctggcggcatgcctaacacatgcaagtcgaacggaactaaggggcttgccctttagtttagtggcggacgggtgagtaacgcgtgagcaacctgcctttcagtggggaataatatcctgaaaagggtactaataccgcataacgtaacgagatcgcatggttttgttaccaaagatttatcgctgagagatgggctc

SEQ ID NO: 3676 - DNA, 225 bp, unidentified
  misc_feature 1..225: note = bacterial strain Ascusb_1672 encodes 16S rRNA
  source 1..225: mol_type = genomic DNA
agagtttgatcctggctcaggatgaacgctagctacaggcttaacacatgcaagtcgaggggcagcatgatcaaagcttgctttgattgatggcgaccggcgcacgggtgagtaacgcgtatccaaccttccctatagtagtggatagcccggcgaaagtcggattaatacactatgttattcaacgaggacatctgaaatgaatcaaaggtttaccgctatagg

SEQ ID NO: 3677 - DNA, 225 bp, unidentified
  misc_feature 1..225: note = bacterial strain Ascusb_2916 encodes 16S rRNA
  source 1..225: mol_type = genomic DNA
agagtttgatcatggctcaggatgaacgctagctacaggcttaacacatgcaagtcgaggggcatcgagaagttagcttgctaactttgtcggcgaccggcgcacgggtgagtaacgcgtatccaaccttccccttagtaggggatagcccggcgaaagtcggattaataccctatgttatccgaagaggacatctgaattggatcaaaggtttaccgctaaggg

SEQ ID NO: 3678 - DNA, 225 bp, unidentified
  misc_feature 1..225: note = bacterial strain Ascusb_15862 encodes 16S rRNA
  source 1..225: mol_type = genomic DNA
agagtttgatcctggctcaggatgaacgctggcggcatgcctaagacatgcaagtcgtacgagaaggcccactgaaattaatcgaaattggagtgcttgcacaataatggactttggtggaagtggattttccttcgagtggcaaacgggtgagtaacacgtgggttacctacctctaagacggggataccaattggaaacgattgttaataccggatgtgctct

SEQ ID NO: 3679 - DNA, 225 bp, unidentified
  misc_feature 1..225: note = bacterial strain Ascusb_908 encodes 16S rRNA
  source 1..225: mol_type = genomic DNA
agagtttgatcatggctcaggatgaacgctagctacaggcttaacacatgcaagtcgaggggcagcatgatcttagcttgctaagattgatggcgaccggcgcacgggtgagtaacgcgtatccaaccttccccttagtagggcatagcccgtagaaatgcggattaataccctatgttgtatattgaggacatctgatttataccaaaggttcaccgctaaggg

SEQ ID NO: 3680 - DNA, 225 bp, unidentified
  misc_feature 1..225: note = bacterial strain Ascusb_3503 encodes 16S rRNA
  source 1..225: mol_type = genomic DNA
agagtttgatcctggctcaggatgaacgctggcggcgtgcttaacacatgcaagtcgaacgaagctccggacgtggaggcttcggccaaagcagaaggaagacttagtggcggacgggtgagtaacgcgtgggtaacctgccatatacagggggataacagttagaaatgactgctaataccgcataagcgcacactgaggcatctcagggtgtgaaaagctcag

SEQ ID NO: 3681 - DNA, 225 bp, unidentified
  misc_feature 1..225: note = bacterial strain Ascusb_16454 encodes 16S rRNA
  source 1..225: mol_type = genomic DNA
agagtttgatcatggctcaggatgaacgctggcggcgtgcctaacacatgcaagtcgaacggattttgctcgcagcagagacttcggtcgaagcttgagtaaagttagtggcggacgggtgagtaacgcgtgggcaacctgcctcatactgggggataacagttggaaacgactgttaataccgcataagcgcacagtgtcgcatgacacagtgtgaaaaactcc

SEQ ID NO: 3682 - DNA, 225 bp, unidentified
  misc_feature 1..225: note = bacterial strain Ascusb_9994 encodes 16S rRNA
  source 1..225: mol_type = genomic DNA
agagtttgatcctggctcaggacgaacgctggcggcgtgcctaacacatgcaagtcgagcggggatagattggatgagagcttcggcaggattctgatttattctagcggcggacgggtgagtaacgcgtgaacgatctgtcccagacagggggataacacttggaaacaggtgctaataccgcataagaccacgtagctgcatggctatgaggtaaaaggagcg

SEQ ID NO: 3683 - DNA, 225 bp, unidentified
  misc_feature 1..225: note = bacterial strain Ascusb_5823 encodes 16S rRNA
  source 1..225: mol_type = genomic DNA
agagtttgatcctggctcaggatgaacgctagctacaggcctaacacatgcaagtcgaggggcagcatggagcttgcttgcaagctctgatggcgaccggcgaatgggtgagtcacgcgtgtccaacctgccccgcgcccggggatagcccttggaaatgaggattaagacccgatacgtgcgttgtccgcatggacgtcgcatgaaaccaggcacgggatgggg

SEQ ID NO: 3684 - DNA, 225 bp, unidentified
  misc_feature 1..225: note = bacterial strain Ascusb_6965 encodes 16S rRNA
  source 1..225: mol_type = genomic DNA
agagtttgatcatggctcaggatgaacgctggcggcgtgcctaacacatgcaagtcgagcgagaaatgctcaagtagagattcgtcaaagcgagagcatggacagcggcggacgggtgagtaacgcgtaggtaacctgccttgagctgcgggatagcctagggaaacctggattaataccacataatgcggaggagtcacatggctttttcgccaaagattcatc

SEQ ID NO: 3685 - DNA, 225 bp, unidentified
  misc_feature 1..225: note = bacterial strain Ascusb_326 encodes 16S rRNA
  source 1..225: mol_type = genomic DNA
agagtttgatcctggctcaggacgaacgctggcggcacgcttaacacatgcaagtcgaacgagcgaaaggtgcttgcacctctagctagtggcggacgggtgagtaacacgtgagcaatctgcctttcggtgggggataccaattggaaacgattgttaataccccataacataacgaagccgcatgactttgttatcaaagatttattgccggaagatgagctc

SEQ ID NO: 3686 - DNA, 225 bp, unidentified
  misc_feature 1..225: note = bacterial strain Ascusb_3817 encodes 16S rRNA
  source 1..225: mol_type = genomic DNA
agagtttgatcatggctcaggatgaacgctggcggcgtgcttaacacatgcaagtcgaacggagttatgatgtgtgagggatttagcttgctattgaccaaacttttcataacttagtggcggacgggtgagtaacgcgtgggtaacctgccttatacagggggataacagtcggaaacgactgctaataccgcataagcgcacagtatcgcatgatacagtgtg

SEQ ID NO: 3687 - DNA, 225 bp, unidentified
  misc_feature 1..225: note = bacterial strain Ascusb_4405 encodes 16S rRNA
  source 1..225: mol_type = genomic DNA
agagtttgatcctggctcaggatgaacgctggcggcgtgcctaacacatgcaagtcgaacggagattagacgctgacgagacttcggtcaaatcttgtttaatcttagtggcggacgggtgagtaacgcgtgggcaacctgcctcgtaccgggggatagcagttggaaacgactgataataccgcataagcgcacggtatcgcatgatacagtgtgaaaaactcc

SEQ ID NO: 3688 - DNA, 225 bp, unidentified
  misc_feature 1..225: note = bacterial strain Ascusb_4895 encodes 16S rRNA
  source 1..225: mol_type = genomic DNA
agagtttgatcctggctcaggatgaacgctagcgacaggcttaacacatgcaagtcgaggggcagcatgggaggtggcaacaccacccgatggcgaccggcgcactggtgagtaacacgtatgcaacctgccccctacaggggaataacccagagaaatttggcctaatgccccgtagtcctccgtgccgcatggcgtggaggggaaagatccgtcggtagggga

SEQ ID NO: 3689 - DNA, 225 bp, unidentified
  misc_feature 1..225: note = bacterial strain Ascusb_3689 encodes 16S rRNA
  source 1..225: mol_type = genomic DNA
agagtttgatcatggctcaggatgaacgctagcggcaggcttaacacatgcaagtcgaggggcagcgagggtagcaatacctgtcggcgaccggcggaagggtgcgtaacgcgtgagcaacttgcccgtatcagggggataagcgttggaaacgacgtctaataccccataacaacagaccccgcatgaggtttgtttgaaagcttcggtggatacggataggct

SEQ ID NO: 3690 - DNA, 225 bp, unidentified
  misc_feature 1..225: note = bacterial strain Ascusb_3837 encodes 16S rRNA
  source 1..225: mol_type = genomic DNA
agagtttgatcatggctcaggatgaacgctagcggcaggcttaacacatgcaagtcgaggggcatcgcggtgtagcaatacactggcggcgaccggcgaaagggtgagtaacgcgtgagcaacatacccggcactgggggatagtcattggaaacgatgcgtaataccccgtaacacaaggagcggcatcgcttcatgttaagagatttatcgataccggattgg

SEQ ID NO: 3691 - DNA, 225 bp, unidentified
  misc_feature 1..225: note = bacterial strain Ascusb_882 encodes 16S rRNA
  source 1..225: mol_type = genomic DNA
agagtttgatcctggctcaggatgaacgctagcgacaggcttaacacatgcaagtcgaggggcagcgcgagggtagcaatacctttggcggcgaccggcgcactggtgagtaacacgtatgcgacctgccccggacagggggataaacccgggaaactgggcctaataccccatacgccccagaatcgcatggttttggggtgaaagatccgtcggtccgggatg

SEQ ID NO: 3692 - DNA, 225 bp, unidentified
  misc_feature 1..225: note = bacterial strain Ascusb_9646 encodes 16S rRNA
  source 1..225: mol_type = genomic DNA
agagtttgatcatggctcaggatgaacgctagctacaggcttaacacatgcaagtcgaggggcagcatgatcttagcttgctaaggttgatggcgaccggcgcacgggtgagtaacgcgtatccaaccttccctatagtagaggatagcccggcgaaagtcggattaatactctatgttttccaatgcagacatctaaaatggaacaaaggtttaccgctatagg

SEQ ID NO: 3693 - DNA, 225 bp, unidentified
  misc_feature 1..225: note = bacterial strain Ascusb_2536 encodes 16S rRNA
  source 1..225: mol_type = genomic DNA
agagtttgatcatggctcaggatgaacgctagcgacaggcctaacacatgcaagtcgagcggcagcacctcgggtggcgagcggcgcacgggtgagtaacgcgtatgtaacctgcccatgagtgggggatagcccggtgaaaaccggattaataccgcataataccattattagacatcttagaatggttaaagattcattgctcatggatggacatgcgttgga

SEQ ID NO: 3694 - DNA, 225 bp, unidentified
  misc_feature 1..225: note = bacterial strain Ascusb_3776 encodes 16S rRNA
  source 1..225: mol_type = genomic DNA
agagtttgatcctggctcaggatgaacgctggcggcgtgcctaacacatgcaagtcgaacgaagcactttagcggaaccttcgggggaagctgttgtgactgagtggcggacgggtgagtaacgcgtgggtaacctgccctgtacagggggataacagccggaaatggctgctaataccgcataagcgcactgatggtagcattaccaggtgtgaaaaactccgg

SEQ ID NO: 3695 - DNA, 225 bp, unidentified
  misc_feature 1..225: note = bacterial strain Ascusb_4680 encodes 16S rRNA
  source 1..225: mol_type = genomic DNA
agagtttgatcctggctcaggatgaacgctagctacaggcttaacacatgcaagtcgtggggcagcatggggtttgcttgcaaactctgatggcgaccggcgcacgggtgagtaacgcgtatccaacctggcccttagtaggggatagcccggcgaaagtcggattaataccctatgttttccaatgcagacatctaaaatggaacaaaggcttgccgctaaggg

SEQ ID NO: 3696 - DNA, 225 bp, unidentified
  misc_feature 1..225: note = bacterial strain Ascusb_3908 encodes 16S rRNA
  source 1..225: mol_type = genomic DNA
agagtttgatcctggctcaggatgaacgctggcggcgtgcttaacacatgcaagtcgaacgaagcacatatttctgatttcttcggactgaagagatttgtgacttagtggcggacgggtgagtaacgcgtgggcaacctgcctcacactgggggacaacagttggaaacgactgctaataccgcataagcgcacactgatgcatatcagagtgtgaaaaactcc

SEQ ID NO: 3697 - DNA, 225 bp, unidentified
  misc_feature 1..225: note = bacterial strain Ascusb_6642 encodes 16S rRNA
  source 1..225: mol_type = genomic DNA
agagtttgatcatggctcaggatgaacgctagctacaggcttaacacatgcaagtcgaggggcagcataagattagcttgctaatcttgatggcgaccggcgcacgggtgagtaacgcgtatccaaccttccccctgctcagggatagcccgctgaaaggcggattaacacctgatagcttcactagatggcatctgacggtgaataaagataacggcaagggat

SEQ ID NO: 3698 - DNA, 225 bp, unidentified
  misc_feature 1..225: note = bacterial strain Ascusb_1740 encodes 16S rRNA
  source 1..225: mol_type = genomic DNA
agagtttgatcatggctcagaacgaacgctggcggcatggattaggcatgcaagtcgaacgggagcagcaatgctccagtggcgcaagggtgaggaacacgtgaacaacctgccttcgagttggggatagcttctggaaacgggagataataccgaataacatcatttggtcgcatgaccggatgatcaaagcagcaatgcgcttgaagaggggttcgcgtccca

SEQ ID NO: 3699 - DNA, 225 bp, unidentified
  misc_feature 1..225: note = bacterial strain Ascusb_6173 encodes 16S rRNA
  source 1..225: mol_type = genomic DNA
agagtttgatcctggctcaggatgaacgctggcggcgtgcctaacacatgcaagtcgaacggggttatggtgaagttttcggacagaagcataacttagtggcggacgggtgagtaacgcgtggataacctgcctcgcacagggggatagcagctggaaacggctgataataccgcataagaccacgggaccgcatggtcctgtggtaaaagatttatcggtgcg

SEQ ID NO: 3700 - DNA, 225 bp, unidentified
  misc_feature 1..225: note = bacterial strain Ascusb_4476 encodes 16S rRNA
  source 1..225: mol_type = genomic DNA
agagtttgatcctggctcaggatgaacgctggcggcgtgcttaacacatgcaagtcgaacggagtattgacgctgatgagcggagagcttgctcaaagcaaatcttgttgatacttagtggcggacgggtgagtaacgcgtgggtaacctgccatgtacagggggataacacttagaaataggtgctaataccgcataagcctacaggatcgcatgatccagtaa

SEQ ID NO: 3701 - DNA, 225 bp, unidentified
  misc_feature 1..225: note = bacterial strain Ascusb_1096 encodes 16S rRNA
  source 1..225: mol_type = genomic DNA
agagtttgatcctggctcaggacgaacgctggcggcatgcctaacacatgcaagtcgaacggagttttggagcttgctccaaaactcagtggcggacgggtgagtaacgcgtgagtaacctgcctttcagtggggaataatattctgaaaagagtactaataccgcataatatacagaagtcgcatggcttttgtatcaaagatttattgctgagagatggactc

SEQ ID NO: 3702 - DNA, 225 bp, unidentified
  misc_feature 1..225: note = bacterial strain Ascusb_281 encodes 16S rRNA
  source 1..225: mol_type = genomic DNA
agagtttgatcatggctcaggatgaacgctggcggcgtgcctaacacatgcaagtcgaacggagatatatttgacagagacttcggtcaatagattatatatcttagtggcggacgggtgagtaacgcgtggggaacctgccctgtactgggggataacagtgagaaatcactgctaaaaccgcataagcgcacactggcgcatgccagagtgtgaaaaactccg

SEQ ID NO: 3703 - DNA, 225 bp, unidentified
  misc_feature 1..225: note = bacterial strain Ascusb_16639 encodes 16S rRNA
  source 1..225: mol_type = genomic DNA
agagtttgatcctggctcaggatgaacgctagctacaggcttaacacatgcaagtcgaggggaaacggcattttagcttgctaagatggacgtcgaccggcgaatgggtgagtaacgcgtatccaaccttccgttaagtagggaatagccttgcgaaagtaagattaatgccctatgtggtgttttgaggacatctgaagagcaccaaaggtttaccgcttaacg

SEQ ID NO: 3704 - DNA, 225 bp, unidentified
  misc_feature 1..225: note = bacterial strain Ascusb_3012 encodes 16S rRNA
  source 1..225: mol_type = genomic DNA
agagtttgatcatggctcaggatgaacgctggcggcgtgcctaacacatgcaagtcgaacggggttaagacgctgatgatggaagtgcttgcacggaaagaatcttgttttaacttagtggcggacgggtgagtaacgtgtggataacctggcccatacagggggatagcagctggaaacggctgataataccgcataagcgcacaacatcgcatgatgcagtgt

SEQ ID NO: 3705 - DNA, 225 bp, unidentified
  misc_feature 1..225: note = bacterial strain Ascusb_3620 encodes 16S rRNA
  source 1..225: mol_type = genomic DNA
agagtttgatcatggctcaggacgaacgctggcggcgtgcttcaaacatgcaagtcgaacggagtttgagggagcttgctcccgagaacttagtggcggacgggtgagtaacgcgtgagcaatctggctattacagggggataacacttggaaacgagtgctaataccgcgtatgaccacaacctggcatcgggaaggggtgaaaggagaaatccggtaatagat

SEQ ID NO: 3706 - DNA, 225 bp, unidentified
  misc_feature 1..225: note = bacterial strain Ascusb_1007 encodes 16S rRNA
  source 1..225: mol_type = genomic DNA
agagtttgatcatggctcaggataaacgctggcggcgtgcttaacacatgcaagtcgaacggagttatttccttcggggaataacttagtggcggacgggtgagtaacgcgtgggtaacctgccctgcagagggggacaacagctggaaacggctgctaataccgcatacgccggagggatcgcatgattcttccgggaaagattcatcgctgcaggatggaccc

SEQ ID NO: 3707 - DNA, 225 bp, unidentified
  misc_feature 1..225: note = bacterial strain Ascusb_304 encodes 16S rRNA
  source 1..225: mol_type = genomic DNA
agagtttgatcatggctcaggatgaacgctggcggcgtgcttaacacatgcaagtcgaacgaggctatacggcggaagttttcggatggaagcggtatagaccgagtggcggacgggtgagtaacgcgtggggaacctgccccattccgggggataccagttggaaacgactgttaataccgcataagcgcacggaaggacatccttcagtgtgaaaaactgagg

SEQ ID NO: 3708 - DNA, 225 bp, unidentified
  misc_feature 1..225: note = bacterial strain Ascusb_1000 encodes 16S rRNA
  source 1..225: mol_type = genomic DNA
agagtttgatcatggctcaggataaacgctggcggcgcacataagacatgcaagtcgaacgaacttaatcctttagtttactataggaagcggttagtggcggactggtgagtaacgcgtaagcaatctgcctatcagaggggaacaacagtgagaaatcactgctaataccgcatatgctgtgagtatggcatcgtacaaacaggaaaggagcaatccgctgat

SEQ ID NO: 3709 - DNA, 225 bp, unidentified
  misc_feature 1..225: note = bacterial strain Ascusb_818 encodes 16S rRNA
  source 1..225: mol_type = genomic DNA
agagtttgatcatggctcaggacgaacgctggcggcacgcttaacacatgcaagtcgaacggagtttttgagagcttgcttttaaaaacttagtggcggacgggtgagtaacacgtgagcaatctgcctttcagagggggatagcagttggaaacgactgataataccgcataatatatacggaccgcatgatctgtatatcaaagatttatcgctgaaagatga

SEQ ID NO: 3710 - DNA, 225 bp, unidentified
  misc_feature 1..225: note = bacterial strain Ascusb_6576 encodes 16S rRNA
  source 1..225: mol_type = genomic DNA
agagtttgatcctggctcagggttaacgctggcatcgtgcataacacatgcaagtcgaacgggactttgctttgtagcaatacagagtaaagtttagtggcagacgggtgagtaatgtataagaaatccacctccgagtggggaataacagtccgaaaggattgctaataccccataacataataaagcggcatcgctttattatcaaagatttatcgcttggag

SEQ ID NO: 3711 - DNA, 225 bp, unidentified
  misc_feature 1..225: note = bacterial strain Ascusb_3865 encodes 16S rRNA
  source 1..225: mol_type = genomic DNA
agagtttgatcatggctcaggatgaacgctagctacaggcttaacacatgcaagtcgaggggcatcagggtctgtgcttgcacagattgctggcgaccggcgcacgggtgagtaacgcgtatccaaccttccccttagtagaggatagcccggcgaaagtcggattaatactctatgttgttcaatgcggacatctaagttgaaccaaaggtttaccgctaaggg

SEQ ID NO: 3712 - DNA, 225 bp, unidentified
  misc_feature 1..225: note = bacterial strain Ascusb_1245 encodes 16S rRNA
  source 1..225: mol_type = genomic DNA
agagtttgatcatggctcaggacgaacgctggcggcacgcctaacacatgcaagtcgaacggagatttgagagcttgctcttaaatcttagtggcggacgggtgagtaacacgtgagcaacctgcctctgagagagggatagcttctggaaacggatggtaatacctcataacgtagtttagccgcatgactgaactaccaaagatttatcactcagagatgggc

SEQ ID NO: 3713 - DNA, 225 bp, unidentified
  misc_feature 1..225: note = bacterial strain Ascusb_3813 encodes 16S rRNA
  source 1..225: mol_type = genomic DNA
agagtttgatcatggctcaggacgaacgctggcggcgtgcctaacacatgcaagtcgaacggagatgcattgaatgaagatttcggttggatttcgatacatcttagtggcggacgggtgagtaacgcgtgagtaacctgccgatgagagtggaataacgttctgaaaaggacgctaataccgcataatgtagagcggccgcatgaccattctaccaaagatttt

SEQ ID NO: 3714 - DNA, 225 bp, unidentified
  misc_feature 1..225: note = bacterial strain Ascusb_4335 encodes 16S rRNA
  source 1..225: mol_type = genomic DNA
agagtttgatcatggctcaggatgaacgctggcggcgtgcctaacacatgcaagtcgaacggagcagttccttcgggagctgcttagtggcggacgggtgagtaacgcgtgagcaacctgcccttcagagggggacaacagttggaaacgactgctaataccgcatgatgtatccgggaggcatcttctggataccaaagatttatcgctgaaggatgggctcgc

SEQ ID NO: 3715 - DNA, 225 bp, unidentified
  misc_feature 1..225: note = bacterial strain Ascusb_2297 encodes 16S rRNA
  source 1..225: mol_type = genomic DNA
agagtttgatcatggctcaggatgaacgctggcggcgtgcttaacacatgcaagtcgaacggagtttagagagcttgctctttaaacttagtggcggacgggtgagtaacgcgtgggtaacctgcctttcactgggggataacagttagaaatgactgctaataccgcataagcgcacgggacggcatcgtctagtgtgaaaaactccggtggtgaaagatggac

SEQ ID NO: 3716 - DNA, 225 bp, unidentified
  misc_feature 1..225: note = bacterial strain Ascusb_4162 encodes 16S rRNA
  source 1..225: mol_type = genomic DNA
agagtttgatcctggctcaggacgaacgctggcggcgtgcctaacacatgcaagtcgaacggacgaggggagcttgctccccgagttagtggcgaacgggtgagtaacgcgtgagcaacctgcctttcagagggggacaacggttggaaacgaccgctaataccgcatgatgcatttgaaccgcatgatttgaatgccaaagatttatcgctgaaagatgggctc

SEQ ID NO: 3717 - DNA, 225 bp, unidentified
  misc_feature 1..225: note = bacterial strain Ascusb_471 encodes 16S rRNA
  source 1..225: mol_type = genomic DNA
agagtttgatcctggctcaggatgaacgctagctacaggcttaacacatgcaagtcgaggggtaacatggcgggagcttgctcctgccgatgacgaccggcgcacgggtgagtaacgcgtatccaacctgcccctgagtcggggataaccttccgaaagggagcctaatacccgatgttgtgcgaagaaggcatctgatttgcaccaaagatttatcgctcaggg

SEQ ID NO: 3718 - DNA, 225 bp, unidentified
  misc_feature 1..225: note = bacterial strain Ascusb_815 encodes 16S rRNA
  source 1..225: mol_type = genomic DNA
agagtttgatcctggctcaggatgaacgctggcggcgtgcttaacacatgcaagtcgaacgaagcatttttgatgaagttttcggatggaattagagatgactgagtggcggacgggtgagtaacgcgtgggcaacctgccgtatacagggggacaacagttggaaacgactgctaataccgcataagcgcacggtctcgcatgggacagtgtgaaaaactccgg

SEQ ID NO: 3719 - DNA, 225 bp, unidentified
  misc_feature 1..225: note = bacterial strain Ascusb_3667 encodes 16S rRNA
  source 1..225: mol_type = genomic DNA
agagtttgatcctggctcaggatgaacgctggcggcgtgcctaatacatgcaagtcgaacggcagcagcaatgctgtagtggcgaacgggtgagtaacacgttggtgacctgccccaaagatgggaatatcacctggaaacgggtggcaaaaccgaataagcttatcatagttagagagtgataagtaaaagcgaaagctactttgggaggggcctgcggcccat

SEQ ID NO: 3720 - DNA, 225 bp, unidentified
  misc_feature 1..225: note = bacterial strain Ascusb_6307 encodes 16S rRNA
  source 1..225: mol_type = genomic DNA
agagtttgatcctggctcaggacgaacgctggcggcgtgcttcatacatgcaagtcgaacgagaagctgacttcggtcagtggaaagtggcggacgggtgagtaatatgtagagaatctgcccttgagtgggggacaacagagggaaacttctgctaataccccatatgagcttagttgaaatactaatcttgaaaactccggtgctcaaggatgagtctgcatc

SEQ ID NO: 3721 - DNA, 225 bp, unidentified
  misc_feature 1..225: note = bacterial strain Ascusb_4829 encodes 16S rRNA
  source 1..225: mol_type = genomic DNA
agagtttgatcctggctcaggatgaacgctggcggcgtgcctaacacatgcaagtcgaacggagttatgaagacgatttcttcggattgaatcttcctaacttagtggcggacgggtgagtaacgcgtggataacctgccttgcacagggggatagcagttggaaacgactgataataccgcataagaccacggtaccgcatggtacagaggtaaaagatttatc

SEQ ID NO: 3722 - DNA, 225 bp, unidentified
  misc_feature 1..225: note = bacterial strain Ascusb_9316 encodes 16S rRNA
  source 1..225: mol_type = genomic DNA
agagtttgatcatggctcaggatgaacgctggcggcgtgcttaacacatgcaagtcgaggggcatcgggagagtagcttgctattcttgccggcgaccggcgcacgggtgagtaacgcgtatccaacctaccccatacaagaggatagcccggcgaaagtcggattaatactctatgtagtacgatgaaggcatctgagttgtatgaaaggtttcttccggtatg

SEQ ID NO: 3723 - DNA, 225 bp, unidentified
  misc_feature 1..225: note = bacterial strain Ascusb_2122 encodes 16S rRNA
  source 1..225: mol_type = genomic DNA
agagtttgatcatggctcagaacgaacgctggcggcaggcctaaaacatgcaagttgaacggctgtagcaatacagcagtagcgcaagggtgagtaatgtatgggaacgtatcttttggtggggaatattctttggaaacgaagagcaataccgcataagccctacgggggaaagatttatcgccgattgagcggcccatattggattagctagttggttaggta

SEQ ID NO: 3724 - DNA, 225 bp, unidentified
  misc_feature 1..225: note = bacterial strain Ascusb_1161 encodes 16S rRNA
  source 1..225: mol_type = genomic DNA
agagtttgatcatggctcaggataaacgctggcggcgtgcctaatacatgcaagtcgatcgctggaattcaagcttgcttgaatgaaggagaggcgaacgggtgagtaatacataagcaacctgcccacgaagactgggataattcctggaaacggggactaataccggataggcaataatgacgcatgtcaatattgttaaaggttaaaaacactggtggatgg

SEQ ID NO: 3725 - DNA, 225 bp, unidentified; identical to SEQ ID NO: 2558
  misc_feature 1..225: note = bacterial strain Ascusb_10976 encodes 16S rRNA
  source 1..225: mol_type = genomic DNA

SEQ ID NO: 3726 - DNA, 225 bp, unidentified
  misc_feature 1..225: note = bacterial strain Ascusb_2880 encodes 16S rRNA
  source 1..225: mol_type = genomic DNA
agagtttgatcatggctcaggattaacgctggcggcgtgcttaacacatgcaagtcgaacggggtatgaggcttcggccttatacttagtggcggacgggtgagtaacgcgtgggcaacctgccctgtaccgggggacaacagctggaaacggctgctaataccgcataagcgcacgaaaccgcatggttttgtgtgaaaagatttatcagtacaggatgggccc

SEQ ID NO: 3727 - DNA, 225 bp, unidentified
  misc_feature 1..225: note = bacterial strain Ascusb_4527 encodes 16S rRNA
  source 1..225: mol_type = genomic DNA
agagtttgatcctggctcaggatgaacgctggcggcgtgcctaatacatgcaagtcgagcgagaaacttcaaaatgaatcttcggaggacttttgaagcggaaagcggcggacgggtgagtaacgcgtaggcaacctgccctttgcacagggatagccaccggaaacggtgattaatacctgataacacatgagcttcgcatggagcatatgtcaaagatttatc

SEQ ID NO: 3728 - DNA, 225 bp, unidentified
  misc_feature 1..225: note = bacterial strain Ascusb_5859 encodes 16S rRNA
  source 1..225: mol_type = genomic DNA
agagtttgatcctggctcaggatgaacgctagctacaggcttaacacatgcaagtcgaggggcagcatgttgtgtgcttgcacacaatgatggcgaccggcgcacgggtgagtaacgcgtatccaacctggccctcagtagggaatagcccggcgaaagtcggattaatgccctatgttctcctttgcgggcatctaatgaggaggaaagatttatcgctggggg

SEQ ID NO: 3729 - DNA, 225 bp, unidentified
  misc_feature 1..225: note = bacterial strain Ascusb_5764 encodes 16S rRNA
  source 1..225: mol_type = genomic DNA
agagtttgatcatggctcaggacgaacgctggcggcgtgcctaacacatgcaagtcgagcggtccgcaaggatagcggcgaacgggtgagtaacgcgtaagcaatctgccccgcatattgggatagccgtgccaacgcgcggataataccgaataacgtggccccggacatccggggttgacgaaagattcatcgatgcgggatgagcttgcgtccgattagcta

SEQ ID NO: 3730 - DNA, 225 bp, unidentified
  misc_feature 1..225: note = bacterial strain Ascusb_14570 encodes 16S rRNA
  source 1..225: mol_type = genomic DNA
agagtttgatcctggctcaggatgaacgctggcggcatgcctaagacatgcaagtcgtacgagaaggcccactgaaattaatcgaaattggagtgcttgcacaaagatggactttggtggatgtggaatttccttcgagtggcaaacgggtgagtaacacgtgggttacctacctctaagacggggataccaattggaaacgattgttaataccggatgtgttct

SEQ ID NO: 3731 - DNA, 225 bp, unidentified
  misc_feature 1..225: note = bacterial strain Ascusb_4270 encodes 16S rRNA
  source 1..225: mol_type = genomic DNA
agagtttgatcatggctcaggatgaacgctagctacaggcttaacacatgcaagtcgaggggcagcatgagggtagcaatacccttgatggcgaccggcgcacgggtgcgtaacacgtatccaatctacccatggctctgggatagcctttcgaaagaaagattaataccggatggtctcacctaaagacatcttttagtgagtaaagatttatcggcgatggat

SEQ ID NO: 3732 - DNA, 225 bp, unidentified
  misc_feature 1..225: note = bacterial strain Ascusb_16891 encodes 16S rRNA
  source 1..225: mol_type = genomic DNA
agagtttgatcctggctcaggatgaacgctagcggcaggcttaacacatgcaagtcgaggggcagcaggcggtagcaataccgtgctggcgaccggcgcacgggtgcgtaacgcgtatgcaacttacccactacagggggataacggagggaaacttccactaatatcccatggagttgttttttcgcatggagagacaactaaagctacggtggtagtggatgg

SEQ ID NO: 3733 - DNA, 225 bp, unidentified
  misc_feature 1..225: note = bacterial strain Ascusb_385 encodes 16S rRNA
  source 1..225: mol_type = genomic DNA
agagtttgatcatggctcaggatgaacgctggcggcgtgcttaacacatgcaagtcgaacggagttaacgaggagcttgctcctttttaacttagtggcggacgggtgagtaacgcgtgggtaatctgcctcatacagggggataacagttagaaatgactgctaacaccgcataacatagcggaaccgcatgattctgctatcaaatatttataggtatgagat

SEQ ID NO: 3734 - DNA, 225 bp, unidentified
  misc_feature 1..225: note = bacterial strain Ascusb_5244 encodes 16S rRNA
  source 1..225: mol_type = genomic DNA
agagtttgatcatggctcaggataaacgctggcggcgtgcataacacattcaagtcgaacgaagcactttcgaacgagacttcggtcaagtttggatttgacttagtggcggacgggtgagtaacgcgtgagcaatctgccttggggtgcgggataacgtcgggaaactgacgctaataccgcatgacgcacggacatcgcatggtgaccgtgccaaagatatat

SEQ ID NO: 3735 - DNA, 225 bp, unidentified
  misc_feature 1..225: note = bacterial strain Ascusb_4385 encodes 16S rRNA
  source 1..225: mol_type = genomic DNA
agagtttgatcatggctcaggatgaacgctagcgacaggcctaacacatgcaagtcgagcggcagcacctcgggtggcgagcggcgcacgggtgagtaacgcgtatgtaacctgcccatgagtgggggatagcccggtgaaaaccggattaataccgcataataccgatatatgacatcttagattggttaaagattcattgctcatggatggacatgcgttgga

SEQ ID NO: 3736 - DNA, 225 bp, unidentified
  misc_feature 1..225: note = bacterial strain Ascusb_3447 encodes 16S rRNA
  source 1..225: mol_type = genomic DNA
agagtttgatcatggctcagattgaacgctggcggcaggcttaatacatgcaagtcgaacggtagcagcaggaaagcttgcttttctggctgacgagtggcggacgggtgagtaatacctgggaaactgcctataagagggggacaacacctggaaacgggtgctaataccgcataaaccctgaggggaaaaggatgggaaaccatgcgcttatagatgtgccca

SEQ ID NO: 3737 - DNA, 225 bp, unidentified
  misc_feature 1..225: note = bacterial strain Ascusb_2580 encodes 16S rRNA
  source 1..225: mol_type = genomic DNA
agagtttgatcctggctcaggatgaacgctggcggcgtgcttaacacatgcaagtcgaacggaacttttctcccgatgaagcggagtgcttgcacaaagtggaatcatttgaaaagtttagtggcggacgggtgagtaacgcgtgggtaacctgccatatacagggggataacacttagaaataggtgctaataccgcataagcgcacggagtcgcatgaccctg

SEQ ID NO: 3738 - DNA, 225 bp, unidentified
  misc_feature 1..225: note = bacterial strain Ascusb_3271 encodes 16S rRNA
  source 1..225: mol_type = genomic DNA
agagtttgatcatggctcaggatgaacgctggcggcgtgcttaacacatgcaagtcgaacggagctgttccggacgcctagggcttcggccacgggcagaagggacaacttagtggcggacgggtgagtaacgcgtgggcaacctgcctttttccgggggataacacagggaaacctgtgctaataccgcataaagtcatctgaggacatcctctaatgaccaaa

SEQ ID NO: 3739 - DNA, 225 bp, unidentified
  misc_feature 1..225: note = bacterial strain Ascusb_2316 encodes 16S rRNA
  source 1..225: mol_type = genomic DNA
agagtttgatcatggctcaggatgaacgctggcggcgtgtttaacacatgcaagtcgagcgagaagcttctcagtggattcttcggatgacacagagttgcggaaagcggcggacgggtgagtaacgcgtaggcaacctgccccctgcagagggatagcctcgggaaaccgggattaaaacctcataatgcggaaccgggacatcccggatccgccaaagattta

SEQ ID NO: 3740 - DNA, 225 bp, unidentified
  misc_feature 1..225: note = bacterial strain Ascusb_2656 encodes 16S rRNA
  source 1..225: mol_type = genomic DNA
agagtttgatcatggctcaggatgaacgctggcggcgtgcctaacacatgcaagtcgagcgagaagctcatgaccaatacttcggttgcgtgattgagtggaaagcggcggacgggtgagtaacgcgtaggcaacctgccccttgcagagggatagcctcgggaaaccgggattaaaacctcataatgtgtctgtgagacatctcatagacgccaaagatttatc

SEQ ID NO: 3741 - DNA, 225 bp, unidentified
  misc_feature 1..225: note = bacterial strain Ascusb_17545 encodes 16S rRNA
  source 1..225: mol_type = genomic DNA
agagtttgatcctggctcaggatgaacgctggcggcatgcctaagacatgcaagtcgtacgagatgtccttttgaaatggagtgcttgcacaaagtggataaagatttcatctagtggcgcaagggtgagtaacacgtgggttatctgccttgaagactggaataacagctggaaacggttgctaatgccggatgatatataagatgatacgtcttcttatagta

SEQ ID NO: 3742 - DNA, 225 bp, unidentified
  misc_feature 1..225: note = bacterial strain Ascusb_3353 encodes 16S rRNA
  source 1..225: mol_type = genomic DNA
agagtttgatcctggctcaggacgaacgctggcggcgtgcctaacacatgcaagtcgaacggaactgttatgattgattcttcggatgattgaatttcagtttagtggcggacgggtgagtaacgcgtgagtaacctgccttcgagaggggaataacgttctgaaaagatcgctaataccgcataacatagtgatgtcgcatggcaatgctatcaaagattttat

SEQ ID NO: 3743 - DNA, 225 bp, unidentified
  misc_feature 1..225: note = bacterial strain Ascusb_528 encodes 16S rRNA
  source 1..225: mol_type = genomic DNA
agagtttgatcatggctcaggatgaacgctggcggcgtgtttaacacatgcaagtcgagcgagatgtttctcagtagattcttcggatgatacagagttacggaaagcggcggacgggtgagtaacgcgtaggcaacctgccccttgcagagggatagcctcgggaaaccgggattaaaacctcataatgcggcactgagacatctcagagccgccaaagattta

SEQ ID NO: 3744 - DNA, 225 bp, unidentified
  misc_feature 1..225: note = bacterial strain Ascusb_5015 encodes 16S rRNA
  source 1..225: mol_type = genomic DNA
agagtttgatcctggctcaggacgaacgctggcggcgtgcttaacacatgcaagtcgaacgaggttattttgatgagatcttcggatggattcggaataaccgagtggcggacgggtgagtaacgcgtgagcaacctgtcttacacagggggataacgctccgaaaggagtgctaataccgcataggaccacggtgctgcatggcattgaggtgaaaggagcaat

SEQ ID NO: 3745 - DNA, 225 bp, unidentified
  misc_feature 1..225: note = bacterial strain Ascusb_3978 encodes 16S rRNA
  source 1..225: mol_type = genomic DNA
agagtttgatcatggctcaggatgaacgctagcgacaggcctaacacatgcaagtcgaggggcagcgcggaaatagtttactagttctggcggcgaccggcgcacgggtgcgtaacaggtgtgcaatctgtccatagtcggggaatagcccaccgaaaggtgaattaatgctccatgtgagtgaaagccgcatgacttttacttaaaacgtaaggactatgggtg

SEQ ID NO: 3746 - DNA, 225 bp, unidentified
  misc_feature 1..225: note = bacterial strain Ascusb_7684 encodes 16S rRNA
  source 1..225: mol_type = genomic DNA
agagtttgatcctggctcaggatgaacgctagcggcaggcttaacacatgcaagtcgaggggcatcgcgggtagcaatacctggcggcgaccggcgaaagggtgagtaacgcgtgagcaacatgcccgtatgtgggggatagtcgatggaaacgtcgcgtaataccccgtaacataagttctcgcatggggatttattgaaagattaattgcatacggattggct

SEQ ID NO: 3747 - DNA, 225 bp, unidentified
  misc_feature 1..225: note = bacterial strain Ascusb_2187 encodes 16S rRNA
  source 1..225: mol_type = genomic DNA
agagtttgatcatggctcaggatgaacgctggcggcgtgcctaacacatgcaagtcgagcgagatgctgttgaacagagattcgtcaacgggattcagcggaaagcggcggacgggtgagtaacgcgtaggcaacctgccccttacacagggatagccattggaaacgatgattaaaacctgatgacaccaagagatgacatctttttttggtcaaagatttatc

SEQ ID NO: 3748 - DNA, 225 bp, unidentified
  misc_feature 1..225: note = bacterial strain Ascusb_2009 encodes 16S rRNA
  source 1..225: mol_type = genomic DNA
agagtttgatcatggctcaggatgaacgctggcggcgtgcctaacacatgcaagtcgaacgaagcactgcggatagaggcttcggccaattgaagctttgacttagtggcggacgggtgagtaacacgtgagcaacctgcccttcagtgggggacaacagctggaaacggctgctaataccgcataatgtatattggaggcatctccggtataccaaagatttat

SEQ ID NO: 3749 - DNA, 225 bp, unidentified
  misc_feature 1..225: note = bacterial strain Ascusb_9333 encodes 16S rRNA
  source 1..225: mol_type = genomic DNA
agagtttgatcatggctcaggatgaacgctggcggcgtgcctaacacatgcaagtcgaacggagatttaacgctgatgaggcttcggcggattcttgttaaatcttagtggcggacgggtgagtaacgcgtgggcaacctgcctcgtactgggggataacagttggaaacgactgttaataccgcataagcgcacggtgtcgcatgacacagtgtgaaaaactcc

SEQ ID NO: 3750 - DNA, 225 bp, unidentified
  misc_feature 1..225: note = bacterial strain Ascusb_500 encodes 16S rRNA
  source 1..225: mol_type = genomic DNA
agagtttgatcatggctcaggatgaacgctggcggcgtgcttaacacatgcaagtcgaacgaagcactgggaatgaagttttcggacagatttccctttgacttagtggcggacgggtgagtaacgcgtgggcaacctgccgtatgcagggggacaacagttggaaacggctgctaataccgcataagcgcacggtaccgcatggtacagtgtgaaaagatttat

SEQ ID NO: 3751 - DNA, 225 bp, unidentified
  misc_feature 1..225: note = bacterial strain Ascusb_1100 encodes 16S rRNA
  source 1..225: mol_type = genomic DNA
agagtttgatcatggctcaggatgaacgctggcggcgtgcttaacacatgcaagtcgaacgaagcacttaagatgatttcttcggattgaattttttgtgacttagtggcggacgggtgagtaacgcgtgggcaacctgcctctgtctgggggataacagttagaaatgactgctaataccgcataagcgcacatttccgcatggaagagtgtgaaaaacgttag

SEQ ID NO: 3752 - DNA, 225 bp, unidentified
  misc_feature 1..225: note = bacterial strain Ascusb_2057 encodes 16S rRNA
  source 1..225: mol_type = genomic DNA
agagtttgatcatggctcaggatgaacgctggcggcgtgcttaacacatgcaagtcgaacgggcttattttggaagcttgcttttgagataagttagtggcggacgggtgagtaacgcgtgggtaacctaccctgtgcagggggatagcagctggaaacggctgataaaaccgcataacacggcgatgccgcatggcaatgccgtcaaatatttataggcacagg

SEQ ID NO: 3753 - DNA, 225 bp, unidentified
  misc_feature 1..225: note = bacterial strain Ascusb_7292 encodes 16S rRNA
  source 1..225: mol_type = genomic DNA
agagtttgatcatggctcaggatgaacgctagctacaggcttaacacatgcaagtcgaggggcagcatgtcggttgcttgcaaccgatgatggcgaccggcgcacgggtgagtaacgcgtatccaaccttccctgcagtaaggaacagcccggcgaaagtcggattaatgccttatgttctccgaagcgggcatctaactcggaggaaagatttatcgctgcagg

SEQ ID NO: 3754 - DNA, 225 bp, unidentified
  misc_feature 1..225: note = bacterial strain Ascusb_1676 encodes 16S rRNA
  source 1..225: mol_type = genomic DNA
agagtttgatcatggctcaggacgaacgctggcggcgtgcttaacacatgcaagtcgaacgaggttaatgtgaggaagtcttcggatggaatcgtgttaaccgagtggcggacgggtgagtaacgcgtgagcaacctgtcttctacagggggataacactccgaaaggagcgctaataccgcataagaccacggtttcgcatgggactgaggtcaaaggagcaat

SEQ ID NO: 3755 - DNA, 225 bp, unidentified
  misc_feature 1..225: note = bacterial strain Ascusb_3318 encodes 16S rRNA
  source 1..225: mol_type = genomic DNA
agagtttgatcatggctcaggatgaacgctagctacaggcttaacacatgcaagtcgaggggcatcatgacgatagcttgctattgttgatggcgaccggcgcacgggtgagtaacgcgtatccaaccttccccttagtagggcatagcccggcgaaagtcggattaataccctatgttattcgtagaggacatctgaaatgaatcaaagattaatcgctaaggg

SEQ ID NO: 3756 - DNA, 225 bp, unidentified
  misc_feature 1..225: note = bacterial strain Ascusb_2148 encodes 16S rRNA
  source 1..225: mol_type = genomic DNA
agagtttgatcatggctcaggatgaacgctagctacaggcttaacacatgcaagtcgaggggcagcatggtcaaagcttgctttgactgatggcgaccggcgcacgggtgagtaacgcgtatccaaccttccccttagtagggcatagcccggtgaaaatcggattaataccctatgttgttttctgcagacatctaatgaaaaccaaagattcatcgctaaggg

SEQ ID NO: 3757 - DNA, 225 bp, unidentified
  misc_feature 1..225: note = bacterial strain Ascusb_3121 encodes 16S rRNA
  source 1..225: mol_type = genomic DNA
agagtttgatcctggctcaggatgaacgctagctacaggcttaacacatgcaagtcgaggggcagcgggaagttagcttgctaactttgccggcgaccggcgcacgggtgagtaacgcgtatccaaccttccccttagtagggcatagcccgtagaaatgcggattaataccctatgttgtatattgatgacatctgatttataccaaaggttcaccgctaaggg

SEQ ID NO: 3758 - DNA, 225 bp, unidentified
  misc_feature 1..225: note = bacterial strain Ascusb_20193 encodes 16S rRNA
  source 1..225: mol_type = genomic DNA
agagtttgatcatggctcaggatgaacgctggcggcatgcctaagacatgcaagtcgtacgaggttgcctgttgaagtttggtgcttgcattaaacggattcagatcacaacctagtggcgaaagggtgagtaacacgtgagttatctacctcagagactggaataactattggaaacgatagctaatgccggatgatatatacaatgatacgttattgtatagt

SEQ ID NO: 3759 - DNA, 225 bp, unidentified
  misc_feature 1..225: note = bacterial strain Ascusb_9153 encodes 16S rRNA
  source 1..225: mol_type = genomic DNA
agagtttgatcctggctcaggacaaacgctggcggcgtgcctaacacatgcaagtcgaacggagtataggccttcgggcttatacttagtggcggacgggtgagtaacgcgtgagcaacctgcccttcagtgggggacaacagctggaaacggctgctaataccgcataacgtaccggggtggcatcattccggtaccaaagatttattgctgaaggatgggctc

SEQ ID NO: 3760 - DNA, 225 bp, unidentified
  misc_feature 1..225: note = bacterial strain Ascusb_314 encodes 16S rRNA
  source 1..225: mol_type = genomic DNA
agagtttgatcatggctcaggatgaacgctggcggcgtgtttaacacatgcaagtcgagcgagaagctcatgacagatacttcggttgatggattgagtggaaagcggcggacgggtgagtaacgcgtaggcaacctgccccgtgcagagggatagcctcgggaaaccgggattaaaacctcataatgcgcaaccgagacatctcggatgcgccaaagatttatc

SEQ ID NO: 3761 - DNA, 225 bp, unidentified
  misc_feature 1..225: note = bacterial strain Ascusb_239 encodes 16S rRNA
  source 1..225: mol_type = genomic DNA
agagtttgatcatggctcaggatgaacgctggcggcgtgcttaacacatgcaagtcgaacgaggttattacagcggaagttttcggatggaagcagttttaaccgagtggcggacgggtgagtaacgcgtgggaaacctgccctattccgggggataccagttggaaacgactgttaataccgcataagcgcacggtgccgcatggtacagtgtgaaaaactccg

SEQ ID NO: 3762 - DNA, 225 bp, unidentified
  misc_feature 1..225: note = bacterial strain Ascusb_1777 encodes 16S rRNA
  source 1..225: mol_type = genomic DNA
agagtttgatcatggctcaggatgaacgctggcggcgtgcttaacacatgcaagtcgaacggaacagaagttttcggatttctgtttagtggcggacgggtgagtaacgcgtgggtaacctgcctcgaactgggggataacggttggaaacgaccgctaataccgcataagcccacagtaccgcatggtacagagggaaaagatttatcggtttgagatggaccc

SEQ ID NO: 3763 - DNA, 225 bp, unidentified
  misc_feature 1..225: note = bacterial strain Ascusb_110 encodes 16S rRNA
  source 1..225: mol_type = genomic DNA
agagtttgatcatggctcaggatgaacgctggcggcgtgcttaacacatgcaagtcgaacgagcacttcggtgcgagtggcggacgggtgagtaacgcgtgggtaacctgccctatacaggggaataacagagagaaatctctgctaatgccgcataagcgcacggcactgcatggtgctgtgtgaaaagctccggcggtataggatggacccgcgtctgattag

SEQ ID NO: 3764 - DNA, 225 bp, unidentified; identical to SEQ ID NO: 3326
  misc_feature 1..225: note = bacterial strain Ascusb_14965 encodes 16S rRNA
  source 1..225: mol_type = genomic DNA

SEQ ID NO: 3765 - DNA, 225 bp, unidentified
  misc_feature 1..225: note = bacterial strain Ascusb_3757 encodes 16S rRNA
  source 1..225: mol_type = genomic DNA
agagtttgatcatggctcagaacgaacgctggtggcgtgtcttatacatgcaagtcgagcgaggcagcaatgccgagcggcgaacgggtgagtaacgcgtaagcaatctgccccatatcaggaaatacccgtgccaacgcgcggttaatgtccaggagagtggccctccgcatggagggctgactagagatttatcggtatgggatgagcttgcgtccgattagc

SEQ ID NO: 3766 - DNA, 225 bp, unidentified
  misc_feature 1..225: note = bacterial strain Ascusb_1880 encodes 16S rRNA
  source 1..225: mol_type = genomic DNA
agagtttgatcctggctcagagttaacgctggcatcgtgcataacacatgcaagtcgaacgggactttgcgctgtagcaatacagtgtaaagtttagtggcagacgggtgagtaatgtatgggaaatctaccttcgagtggggaataacggcccgaaagggttgctaataccccataacatttctaggtggcatcaccaagaaatcaaagatttatcgcttgaag

SEQ ID NO: 3767 - DNA, 225 bp, unidentified
  misc_feature 1..225: note = bacterial strain Ascusb_1368 encodes 16S rRNA
  source 1..225: mol_type = genomic DNA
agagtttgatcatggctcaggatgaacgctagctacaggcttaacacatgcaagtcgaggggcagcatgatcgaagcttgctttgattgatggcgaccggcgcacgggtgagtaacgcgtatccaaccttccctatagtagaggatagcccggcgaaagtcggattaatactctatgttttccaatgcagacatctaagttggaacaaaggttcaccgctatagg

SEQ ID NO: 3768 - DNA, 225 bp, unidentified
  misc_feature 1..225: note = bacterial strain Ascusb_213 encodes 16S rRNA
  source 1..225: mol_type = genomic DNA
agagtttgatcatggctcaggatgaacgctggcggcgtgcttaacacatgcaagtcgaacggagtatgttaaccgagaccttcgggtctcacctgatatacttagtggcggacgggtgagtaacgcgtgagcaaccaaccttatgcagagggataacaattagaaatgattgctaatacctcataagaccacgctatcgcatggtaaagtgggaaaaactccggt

SEQ ID NO: 3769 - DNA, 225 bp, unidentified
  misc_feature 1..225: note = bacterial strain Ascusb_1890 encodes 16S rRNA
  source 1..225: mol_type = genomic DNA
agagtttgatcatggctcaggacgaacgctggcggcgtgcctaacacatgcaagtcgagcggagacacgggacttcggttctgtgtttcagcggcggacgggtgagtaacgcgtgagcaatctgtcccattcaccgggataacaactggaaacagttgctaataccgggcgagaccacagcaccgcatggtggaggggtagaagggataccggagtggggtgagc

SEQ ID NO: 3770 - DNA, 225 bp, unidentified
  misc_feature 1..225: note = bacterial strain Ascusb_2370 encodes 16S rRNA
  source 1..225: mol_type = genomic DNA
agagtttgatcctggctcaggatgaacgctggcggcgtgcctaacacatgcaagtcgaacggagtatatgcgctgatgatcgaagtgcttgcatagagagaatcttgcatatacttagtggcggacgggtgagtaacgtgtggataacctggtccatccagggggatagcagctggaaacggctggtaataccgcataagcgcacagcagggcatcctgcggtgt

SEQ ID NO: 3771 - DNA, 225 bp, unidentified
  misc_feature 1..225: note = bacterial strain Ascusb_7352 encodes 16S rRNA
  source 1..225: mol_type = genomic DNA
agagtttgatcctggctcaggatgaacgctagctacaggcttaacacatgcaagtcgaggggcagcgggaaggaagcttgctttctttgccggcgaccggcgcacgggtgagtaacgcgtatccaacctgcccgcggctcagggatagcctcgtgaaaacgagattaatacctgatggtcttggatgctgacatcggtttccaagtaaagatttatcggcagcgg

SEQ ID NO: 3772 - DNA, 225 bp, unidentified
  misc_feature 1..225: note = bacterial strain Ascusb_17795 encodes 16S rRNA
  source 1..225: mol_type = genomic DNA
agagtttgatcctggctcaggatgaacgctggcggcatgcctaagacatgcaagtcgaacgaggtggcccattgaaggatgcgtgcttgcacaaatctggatttggattcccacctagtggcagacgggtgagtaacacgtgggtgacctacctttaagctggggataacagttagaaatgattgctaataccgaataagatataggagtcaatcttatattgaa

SEQ ID NO: 3773 - DNA, 225 bp, unidentified
  misc_feature 1..225: note = bacterial strain Ascusb_10700 encodes 16S rRNA
  source 1..225: mol_type = genomic DNA
agagtttgatcctggctcaggatgaacgctagctacaggcttaacacatgcaagtcgaggggcagcatggaggttgcttgcaacttctgatggcgaccggcgcacgggtgagtaacgcgtatccaaccttccccctagtagggtccagcccggcgaaagtcggattaataccctatgttcttcaatgatgacatcaggattgaagcaaagattcatcgctagtgg

SEQ ID NO: 3774 - DNA, 225 bp, unidentified
  misc_feature 1..225: note = bacterial strain Ascusb_9020 encodes 16S rRNA
  source 1..225: mol_type = genomic DNA
agagtttgatcatggctcaggatgaacgctagctacaggcttaacacatgcaagtcgaggggcagcatggagtttgcttgcaaactctgatggcgaccggcgaatgggtgagtaacgcgtatccaacctgccctgtgcccgggaatagcccttggaaacgaggattaacgcccgatggcgtgcgatgaccgcatgggaaatgcactaaatggaaaggcacgggat

SEQ ID NO: 3775 - DNA, 225 bp, unidentified
  misc_feature 1..225: note = bacterial strain Ascusb_529 encodes 16S rRNA
  source 1..225: mol_type = genomic DNA
agagtttgatcatggctcaggatgaacgctggcggcgcgcctaacacatgcaagtcgaacggttaaagcacctccgggtgtgtataaagtggcgaacggctgagtaacacgtgggcaacctgcccctcgctccgggacagcctcgggaaactgggagtaataccggatactccgccacccccgcatgggggaggcgggaaagctccgacggcgagggatgggccc

SEQ ID NO: 3776 - DNA, 225 bp, unidentified
  misc_feature 1..225: note = bacterial strain Ascusb_19742 encodes 16S rRNA
  source 1..225: mol_type = genomic DNA
agagtttgatcctggctcaggatgaacgctagctacaggcttaacacatgcaagtcgaggggcagcgagaaggaagcttgctttctttgtcggcgaccggcgcacgggtgagtaacgcgtatccaaccttccccttagtagggcatagcccgtagaaatgcggattaataccctatgttattcgtcgaggacatctgaagtgaatcaaaggtttaccgctaaggg

SEQ ID NO: 3777 - DNA, 225 bp, unidentified
  misc_feature 1..225: note = bacterial strain Ascusb_15723 encodes 16S rRNA
  source 1..225: mol_type = genomic DNA
agagtttgatcctggctcaggatgaacgctagctacaggcttaacacatgcaagtcgaggggcagcatgaaggaagcttgcttcctttgatggcgaccggcgcacgggtgagtaacgcgtatccaaccttccccctagcagggcatagcccgtagaaatgcggattaacaccctatgttgtgttttgaggacatctgacgaacactaaaggcttgacgctagggg

SEQ ID NO: 3778 - DNA, 225 bp, unidentified
  misc_feature 1..225: note = bacterial strain Ascusb_9379 encodes 16S rRNA
  source 1..225: mol_type = genomic DNA
agagtttgatcctggctcaggatgaacgctagcgacaggcctaacacatgcaagtcgaggggcagcgcgggagaagcttgcttttcctggcggcgaccggcgcacgggtgcgtaacaggtgtgcaatctgtccatagtcggggaatagcccagcgaaagttggattaatgctccatgtgaagagaagccgcatgacttttctttgaaacgtaaggactatgggtg

SEQ ID NO: 3779 - DNA, 225 bp, unidentified
  misc_feature 1..225: note = bacterial strain Ascusb_13361 encodes 16S rRNA
  source 1..225: mol_type = genomic DNA
agagtttgatcatggctcaggatgaacgctggcggcatgcctaagacatgcaagtcgtacgagacgaccctttgaaatggagtgcttgcacaaagtggattaggattttcgtctagtggcgcaagggtgagtaacacgtgggtaatctgccttggagactggaataacaattagaaatgattgctaatgccggatgatatataaaaggatacgttcttttatagt

SEQ ID NO: 3780 - DNA, 225 bp, unidentified
  misc_feature 1..225: note = bacterial strain Ascusb_11373 encodes 16S rRNA
  source 1..225: mol_type = genomic DNA
agagtttgatcatggctcaggacgaacgctggcggcgtgcctaacacatgcaagtcgaacggacgaggggagcttgctccccaagttagtggcggacgggtgagtaacacgtgagcaacctgcccttcggagggggacaacagcgggaaactgctgctaataccgcataacgtatcctggaggcatctccgggataccaaagattttatcgccgaaggatgggct

SEQ ID NO: 3781 - DNA, 225 bp, unidentified
  misc_feature 1..225: note = bacterial strain Ascusb_6130 encodes 16S rRNA
  source 1..225: mol_type = genomic DNA
agagtttgatcctggctcaggatgaacgctagctacaggcttaacacatgcaagtcgaggggtaacatgattggagcttgctccgattgatgacgaccggcgcacgggtgagtaacgcgtatccaacctgccccatgctctgggataaccttccgaaagggagcctaataccggatgttgtgcgacgatggcatcagaattgcacgaaagattcatcggcatggg

SEQ ID NO: 3782 - DNA, 225 bp, unidentified
  misc_feature 1..225: note = bacterial strain Ascusb_1454 encodes 16S rRNA
  source 1..225: mol_type = genomic DNA
agagtttgatcctggctcaggacgaacgctggcggcatgcctaacacatgcaagtcgaacggagcagttccttcggggactacttagtggcgaacgggtgagtaacgcgtgagcaacctgcctcggcgagggggataacacttggaaacaggtgctaataccgcataagaccacactgtcgcatgacagaggggtcaaaggagcaatccgcgctgagaggggctc

SEQ ID NO: 3783 - DNA, 225 bp, unidentified
  misc_feature 1..225: note = bacterial strain Ascusb_1059 encodes 16S rRNA
  source 1..225: mol_type = genomic DNA
agagtttgatcatggctcaggatgaacgctagcggcaggcttaacacatgcaagtcgaggggcagcggggagtagcaatactctgccggcgaccggcgaaagggtgcgtaacgcgtgagcaacttgcccgtatctgggacataagcgatggaaacgccgtctaatttcccataacaacagaggccgcatgacctttgtttgaaagatccgtcggatacggatggg

SEQ ID NO: 3784 - DNA, 225 bp, unidentified
  misc_feature 1..225: note = bacterial strain Ascusb_5317 encodes 16S rRNA
  source 1..225: mol_type = genomic DNA
agagtttgatcctggctcagaacgaacgctggcggcgcgttttaagcatgcaagtcgagcggcagcagcaatgcgagagcggcggacgggtgagtaacacgtgggtaatctgccctccggtcgggaatagcctgtggaaacacaggataataccggatgcgatggtcctcacacaagtgagggtcaggaaaggagccaaggctccgccggaggatgagcccgcgt

SEQ ID NO: 3785 - DNA, 225 bp, unidentified
  misc_feature 1..225: note = bacterial strain Ascusb_1629 encodes 16S rRNA
  source 1..225: mol_type = genomic DNA
agagtttgatcatggctcaggatgaacgctggcggcgtgcctaacacatgcaagtcgaacggagatcttatggacagaggcttcggccaaaggaagtttgatcttagtggcggacgggtgagtaacgcgtggggaacctgccccataccgggggataacagatagaaatgtctgctaataccgcataagcgcacgaggtcgcatgaccctgtgtgaaaaactccg

SEQ ID NO: 3786 - DNA, 225 bp, unidentified
  misc_feature 1..225: note = bacterial strain Ascusb_1590 encodes 16S rRNA
  source 1..225: mol_type = genomic DNA
agagtttgatcatggctcaggacgaacgctggcggcgtgcctaacacatgcaagtcgaacggggttcttgcggaagtccttcggggcggaagcttgaacttagtggcgaacgggtgagtaacgcgtgagcaacctgcctttcagagggggacaacagttggaaacgactgctaataccgcatgacacattgagaccgcatgattttaatgtcaaagatttatcgc

SEQ ID NO: 3787 - DNA, 225 bp, unidentified
  misc_feature 1..225: note = bacterial strain Ascusb_5667 encodes 16S rRNA
  source 1..225: mol_type = genomic DNA
agagtttgatcatggctcaggataaacgctggcggcgtgcctaatacatgcaagtcgtacgctggaagaccaagcttgcttggtttgaaggagtggcgaacgggtgagtaatacataagcaacctgcccacgaagactgggataattcttggaaacgaggactaataccggataggtcatcgggaggcatcttctgatgattaaaggtgagaaacactggtggat

SEQ ID NO: 3788 - DNA, 225 bp, unidentified
  misc_feature 1..225: note = bacterial strain Ascusb_4163 encodes 16S rRNA
  source 1..225: mol_type = genomic DNA
agagtttgatcatggctcaggatgaacgctagctacaggcttaacacatgcaagtcgaggggcagcgggagagtagcttgctactcttgccggcgaccggcgcacgggtgcgtaacgcgtatccaacctgccgtgtacttggggatagccctctgaaaggaggattaatacccgatgtggtcatttgaagacatcttcttatgattaaagatttatcggtacacc

SEQ ID NO: 3789 - DNA, 225 bp, unidentified
  misc_feature 1..225: note = bacterial strain Ascusb_6066 encodes 16S rRNA
  source 1..225: mol_type = genomic DNA
agagtttgatcatggctcaggatgaacgctagctacaggcttaacacatgcaagtcgaggggcagcatagggtttgcttgcaaactctgatggcgaccggcgcacgggtgagtaacgcgtatccaacctgcccacggccagggaatagcccgctgaaaagcggattaatgccctatggcgtcctttgaaggcatctgacggggactaaagctttggcggccgtgg

SEQ ID NO: 3790 - DNA, 225 bp, unidentified
  misc_feature 1..225: note = bacterial strain Ascusb_4983 encodes 16S rRNA
  source 1..225: mol_type = genomic DNA
agagtttgatcctggctcaggatgaacgctggcggcgtgcttaacacatgcaagttgaacgaaggtatcggatgaggcttcggcggattctgatatacttagtagcggacgggtgagtaacgcgtgggcaacctgccctgtacagggggacaacagctggaaacggctgctaataccgcataagcgcacagcaccgcatggtgccgtgtgaaaagcgcaacggta

SEQ ID NO: 3791 - DNA, 225 bp, unidentified
  misc_feature 1..225: note = bacterial strain Ascusb_511 encodes 16S rRNA
  source 1..225: mol_type = genomic DNA
agagtttgatcatggctcaggatgaacgctggcggcgtgcttaacacatgcaagtcgaacgggaattactttttagcttgctaagttgtaattctagtggcggacgggtgagtaacgcgtgggtaacctgccttataccgggggacaacagttggaaacggctgctaataccgcataagcgcacagtttcgcatgaaacagtgtgaaaaactccggtggtataag

SEQ ID NO: 3792 - DNA, 225 bp, unidentified
  misc_feature 1..225: note = bacterial strain Ascusb_3124 encodes 16S rRNA
  source 1..225: mol_type = genomic DNA
agagtttgatcatggctcaggatgaacgctggcggcgtgcttaacacatgcaagtcgaacggagaacattcgctgaagcgagcttgctcaattcttgaatgttcttagtggcggacgggtgagtaacgcgtgggtaacctgcccattaccgggggacaacagttggaaacggctgctaataccgcataagcgcacagtttcgcatgaaacggtgtgaaaaactcc

SEQ ID NO: 3793 - DNA, 225 bp, unidentified
  misc_feature 1..225: note = bacterial strain Ascusb_7360 encodes 16S rRNA
  source 1..225: mol_type = genomic DNA
agagtttgatcatggctcaggatgaacgctggcggcgtgcctaacacatgcaagtcgaacgaagcatacgggacggagattcgtcgaagccctgtatgacttagtggcggacgggtgagtaatgtatgagcaacctgcctttcagagggggacaacagttggaaacgactgctaataccgcataatgtatttgggtggcatcacctggataccaaaggagcaatc

SEQ ID NO: 3794 - DNA, 225 bp, unidentified
  misc_feature 1..225: note = bacterial strain Ascusb_4344 encodes 16S rRNA
  source 1..225: mol_type = genomic DNA
agagtttgatcatggctcaggatgaacgctagcggcaggcttaacacatgcaagtcgaggggcagcgcgggagtagcaatacttctggcggcgaccggcgcaagggtgcgtaacgcgtgagcgacatgcccgtgaccgggggataaccgatggaaacgtcgcctaaccccccatacgatcatacaccgcatggtgtctgattgaaaaccctggtggtcacggatt

SEQ ID NO: 3795 - DNA, 225 bp, unidentified
  misc_feature 1..225: note = bacterial strain Ascusb_9952 encodes 16S rRNA
  source 1..225: mol_type = genomic DNA
agagtttgatcctggctcaggatgaacgctggcggcgtgcttaacacatgcaagttgtgcggtttcttttgaatgagacttcggtggattttggaagagatagcagcggacgggtgagtaaagcacaaggacgtgccctgaggcgggggacaactacgggaaaccgtagctaataccccgtaagccgagaggtgaaagcagcaatgcgccgaaggagcgacttgt

SEQ ID NO: 3796 - DNA, 225 bp, unidentified
  misc_feature 1..225: note = bacterial strain Ascusb_1902 encodes 16S rRNA
  source 1..225: mol_type = genomic DNA
agagtttgatcatggctcaggatgaacgctagcggcaggcttaacacatgcaagtcgaggggtaacagggagtagcaatactctgctgacgaccggcgcacgggtgcgtaacgcgtatgcaacctaccctgtacagggggataacggagagaaatttccactaatatcccatggtgtcggagaaccgcatggttttcggactaaagcttcggtggtacaggacgg

SEQ ID NO: 3797 - DNA, 225 bp, unidentified
  misc_feature 1..225: note = bacterial strain Ascusb_10919 encodes 16S rRNA
  source 1..225: mol_type = genomic DNA
agatttgatcatggctcagattgaacgctggcggcaggcctaatacatgcaagtcgaacggtaacatggaagtagcaatacttttgatgacgagtggcggacgggtgagtaatatttgggaatctacctatcagagggggatagcaactggaaacggttgataagaccgcgtacgctctgaggaggaaagtaatgggatcgaaagaccattagctgatagatgag

SEQ ID NO: 3798 - DNA, 225 bp, unidentified
  misc_feature 1..225: note = bacterial strain Ascusb_1788 encodes 16S rRNA
  source 1..225: mol_type = genomic DNA
agagtttgatcatggctcaggatgaacgctggcggcgtgcttaatacatgcaagtcgaacgaagcactttcagcagatcccttcggggtgaagccggttgtgacttagtggcggacgggtgagtaacgcgtgggtaacctgccttatacagggggataacagctggaaacgactgctaataccccataagcgcacggcaccgcatgatgcagtgtgaaaagattt

SEQ ID NO: 3799 - DNA, 225 bp, unidentified
  misc_feature 1..225: note = bacterial strain Ascusb_3081 encodes 16S rRNA
  source 1..225: mol_type = genomic DNA
agagtttgatcatggctcaggacgaacgctggcggcgtgcctaacacatgcaagtcgaacggagcgaaagcagcttgctgctggagcttagtggcggacgggtgagtaacacgtgagcaacctgcctttcagaggggaataatgtttggaaacggacactaataccgcataatatatttttactgcatggtaagagatatcaaaggagcaatccgctgaaagatg

SEQ ID NO: 3800 - DNA, 225 bp, unidentified
  misc_feature 1..225: note = bacterial strain Ascusb_5791 encodes 16S rRNA
  source 1..225: mol_type = genomic DNA
agagtttgatcatggctcaggatgaacgctagctacaggcttaacacatgcaagtcgaggggcatcagggagaaagcttgctttctttgctggcgaccggcgcacgggtgagtaacgcgtatccaaccttccccccagtagggcatagcccggcgaaagtcggattaataccctatgttcttcgtagaggacatctgaaatgaagcaaaggtttaccgctagggg

SEQ ID NO: 3801 - DNA, 225 bp, unidentified
  misc_feature 1..225: note = bacterial strain Ascusb_2209 encodes 16S rRNA
  source 1..225: mol_type = genomic DNA
agagtttgatcctggctcaggatgaacgctagctacaggcttaacacatgcaagtcgaggggcagcagggaggaagcttgctttctttgctggcgaccggcgcacgggtgagtaacgcgtatccaaccttccccttagtagaggatagcccggcgaaagtcggattaatactctatgttcttcacatgaggcatcgaacgtgaagcaaaggcttgccgctaaggg

SEQ ID NO: 3802 - DNA, 225 bp, unidentified
  misc_feature 1..225: note = bacterial strain Ascusb_2924 encodes 16S rRNA
  source 1..225: mol_type = genomic DNA
agagtttgatcatggctcagaacgaacgctggcggcgcgtcttaagcatgcaagtcgagcggtaagtcgggagcttgctcctgacctagagcggcggactggtgagtaacgcgtgggtgacgtacctttgtgacggggatagctcctagaaataggagataataccggatacgctgcatgttgtcagaggacatgcaggaaaggatcttttgattcgcacagaga

SEQ ID NO: 3803 - DNA, 225 bp, unidentified
  misc_feature 1..225: note = bacterial strain Ascusb_16747 encodes 16S rRNA
  source 1..225: mol_type = genomic DNA
agagtttgatcatggctcaggatgaatgctggcggcgtgcctaatacatgcaagtcgagcggtaacagggcttcaccgtttccttgacacacctagcgcatatatcgtaggttggttcgattcgagggaacagtgaagctgctgacgagcggcggacggctgagtaacgcgtgggaacgtaccccaaactgagggataactagtcgaaagattagctaataccgc

SEQ ID NO: 3804 - DNA, 225 bp, unidentified
  misc_feature 1..225: note = bacterial strain Ascusb_19634 encodes 16S rRNA
  source 1..225: mol_type = genomic DNA
agagtttgatcatggctcaggatgaacgctggcggcatgcctaagacatgcaagtcgtacgaagtgacccattgaagtggagtgcttgcacaaagcggatttggattttcacttagtggcgcaagggtgagtaacacgtgggttatctgccttggagactggaataacaattagaaatgattgctaatgccggatgatatgtaagaggatacgttctcttatagt

SEQ ID NO: 3805 - DNA, 225 bp, unidentified
  misc_feature 1..225: note = bacterial strain Ascusb_898 encodes 16S rRNA
  source 1..225: mol_type = genomic DNA
agagtttgatcatggctcaggacgaacgctggcggcgtgcttcatacatgcaagtcgaacgagaagttaccttcgggtaatggaaagtggcggacgggtgagtaatgtgtagagaatctgccctagagcgggggacaaccgttggaaacgacagctaataccccatatgagcgtagctgagatgctattcttgaaaactccggtgctctgggatgagtctgcatc

SEQ ID NO: 3806 - DNA, 225 bp, unidentified
  misc_feature 1..225: note = bacterial strain Ascusb_4649 encodes 16S rRNA
  source 1..225: mol_type = genomic DNA
agagtttgatcctggctcaggatgaacgctagctacaggcttaacacatgcaagtcgaggggcagcatgttggttgcttgcaaccaatgatggcgaccggcgcacgggtgagtaacgcgtatccaacctggcccttagtaggggatagcccggcgaaagtcggattaatgccctatgttcttcaatgcgggcatctaagttgaagcaaagattgatcgctaaggg

SEQ ID NO: 3807 - DNA, 225 bp, unidentified
  misc_feature 1..225: note = bacterial strain Ascusb_16089 encodes 16S rRNA
  source 1..225: mol_type = genomic DNA
agagtttgatcctggctcaggatgaacgctggcggcgtgcctaacacatgcaagtcgaacggagattaaacgctgatgaggcttcggcggaatcttgtttaatcttagtggcggacgggtgagtaacgcgtgggcaacctgcctcatactgggggataacagctggaaacgactgttaataccgcataagcgcacagcatcgcatgatgcagtgtgaaaaactct

SEQ ID NO: 3808 - DNA, 225 bp, unidentified
  misc_feature 1..225: note = bacterial strain Ascusb_7155 encodes 16S rRNA
  source 1..225: mol_type = genomic DNA
agagtttgatcatggctcaggatgaacgctagctacaggcttaacacatgcaagtcgaggggcatcatggagtttgcttgcaaactctgatggcgaccggcgcacgggtgagtaacgcgtatccaaccttccccctagtagggcatagcccggcgaaagtcggattaacaccctatgttttccaatgaggacatctgagctggaacaaagattcatcgctagggg

SEQ ID NO: 3809 - DNA, 225 bp, unidentified
  misc_feature 1..225: note = bacterial strain Ascusb_4076 encodes 16S rRNA
  source 1..225: mol_type = genomic DNA
agagtttgatcatggctcaggatgaacgctggcggcgtgcctaacacatgcaagtcgaacgaagcattgcgcccgacgaagaggagtgcttgcacaaatcggagtcaattgtgatgacttagtggcggacgggtgagtaacgcgtgggtaacctgccttatacagggggataacagttagaaatgactgctaataccgcataagcgcacagcatcgcatgatgca

SEQ ID NO: 3810 - DNA, 225 bp, unidentified
  misc_feature 1..225: note = bacterial strain Ascusb_6157 encodes 16S rRNA
  source 1..225: mol_type = genomic DNA
agagtttgatcctggctcaggacgaacgctggcggcgtgcctaacacatgcaagtcgagcggaggttatttgcggaggcttcggccaaaggaaataattctcagcggcggacgggtgagtaacgcgtgagcaacctgtccctcacagggggataagacagcgaaagttgttctaataccgcatgagaccacggtgggacatcccacaggggtcaaaggagcaatc

SEQ ID NO: 3811 - DNA, 225 bp, unidentified
  misc_feature 1..225: note = bacterial strain Ascusb_5204 encodes 16S rRNA
  source 1..225: mol_type = genomic DNA
agagtttgatcctggctcaggatgaacgctggcggcgtgcctaacacatgcaagtcgaacgggactgtttagtgacgatttcggtctgatctttacagtttagtggcggacgggtgagtaacgcgtggataacctgcctttcacagggggatagcagctggaaacggctggtaataccgcatacgctctttttaccgcatggtggagagaggaaagatttatcgg

SEQ ID NO: 3812 - DNA, 225 bp, unidentified
  misc_feature 1..225: note = bacterial strain Ascusb_6015 encodes 16S rRNA
  source 1..225: mol_type = genomic DNA
agagtttgatcatggctcaggatgaacgctagctacaggcttaacacatgcaagtcgaggggcagcatgatcttagcttgctaagattgatggcgaccggcgcacgggtgagtaacgcgtatccaaccttccccttagtagaggatagcccggcgaaagtcggattaatactctatgttgtttgaagcggacatctaaatcaaaccaaagattttatcgctaagg

SEQ ID NO: 3813 - DNA, 225 bp, unidentified
  misc_feature 1..225: note = bacterial strain Ascusb_434 encodes 16S rRNA
  source 1..225: mol_type = genomic DNA
agagtttgatcatggctcaggatgaacgctggcggcacgcttaacacatgcaagtcgagcggaaacggatacttcggtatctgttttagcggcggacgggtgagtaacacgtgggtaacctaccctatacagggggataacgtaaagaaatttacgctaataccgcataagccaacagggaggcatcttctggttggaaaagccgagacggtataggatgggccc

SEQ ID NO: 3814 - DNA, 225 bp, unidentified
  misc_feature 1..225: note = bacterial strain Ascusb_8244 encodes 16S rRNA
  source 1..225: mol_type = genomic DNA
agagtttgatcctggctcaggatgaacgctagctacaggcttaacacatgcaagtcgaggggcagcatgaagtttgcttgcaaactttgatggcgaccggcgcacgggtgagtaacgcgtatccaaccttccccttactagggaatagcccggcgaaagtcggattaatgccctatgttctccttcgcgggcatctaacgaggagcaaagattcatcggtaaggg

SEQ ID NO: 3815 - DNA, 225 bp, unidentified
  misc_feature 1..225: note = bacterial strain Ascusb_4286 encodes 16S rRNA
  source 1..225: mol_type = genomic DNA
agagtttgatcatggctcaggatgaacgctagcgacaggcctaacacatgcaagtcgaggggcagcgcggaagtagcttgctatttctggcggcgaccggcgcacgggtgcgtaacaggtgtgcaatctgtccatagtcggggaatagcccagcgaaagttggattaaagctccatgtgtcacgaagccgcatgacattgtgatgaaacgtaaggactatgggtg

SEQ ID NO: 3816 - DNA, 225 bp, unidentified
  misc_feature 1..225: note = bacterial strain Ascusb_3946 encodes 16S rRNA
  source 1..225: mol_type = genomic DNA
agagtttgatcctggctcaggatgaacgctggcggcgcgcttaacacatgcaagtcgaacggttaaagcacctccgggtgtgcataaagtggcgaacggctgagtaacacgtgggcaacctgccccccgcaccgggatagcctcgggaaaccgtgggtaataccggatactccgccacccccgcatgggggaggcgggaaagcgtacacggcgggggatgggccc

SEQ ID NO: 3817 - DNA, 225 bp, unidentified
  misc_feature 1..225: note = bacterial strain Ascusb_1489 encodes 16S rRNA
  source 1..225: mol_type = genomic DNA
agagtttgatcatggctcaggatgaacgctagctacaggcttaacacatgcaagtcgaggggcagcgggaagaaagcttgctttctttgccggcgaccggcgcacgggtgagtaacgcgtatccaacctggcccttagtaggggatagcccggcgaaagtcggattaataccctatgttcttcgtagaagacatctgaaatgaagcaaagatttatcgctaaggg

SEQ ID NO: 3818 - DNA, 225 bp, unidentified
  misc_feature 1..225: note = bacterial strain Ascusb_4840 encodes 16S rRNA
  source 1..225: mol_type = genomic DNA
agagtttgatcatggctcaggatgaacgctagctacaggcttaacacatgcaagtcgaggggcagcatgagggtagcaatacctttgatggcgaccggcgcacgggtgcgtaacacgtatccaatctacccatggctcgggaatagcctttcgaaagaaagattaatgcccgatggtctgtgattgagacatctcgattacagtaaagatttatcggcgatggat

SEQ ID NO: 3819 - DNA, 225 bp, unidentified
  misc_feature 1..225: note = bacterial strain Ascusb_2860 encodes 16S rRNA
  source 1..225: mol_type = genomic DNA
agagtttgatcctggctcaggatgaacgctagcgacaggcctaacacatgcaagtcgagcggcagcacctcgggtggcgagcggcgcacgggtgagtaacgcgtatgtaacctgcccatgagtgggggatagcccggtgaaaaccggattaataccgcataataccgatatatgacatcttagatcggttaaagattcattgctcatggatggacatgcgttgga

SEQ ID NO: 3820 - DNA, 225 bp, unidentified
  misc_feature 1..225: note = bacterial strain Ascusb_5956 encodes 16S rRNA
  source 1..225: mol_type = genomic DNA
agagtttgatcctggctcaggatgaacgctggcggcgtgcctaatacatgcaagtcgaacgagggtgcttgcaccctagtggcgaacgggtgagtaacacgtaggtaacctgccctttagtttgggatacccagaggaaactttggctaataccggatatgaatttaagaggcatctcttgaatttgaaaggagcgtttgctccgctttaggatggacctgcggc

SEQ ID NO: 3821 - DNA, 225 bp, unidentified
  misc_feature 1..225: note = bacterial strain Ascusb_2852 encodes 16S rRNA
  source 1..225: mol_type = genomic DNA
agagtttgatcctggctcaggatgaacgctggcggcgtgcctaacacatgcaagtcgagcggagttatatgttgattcttcggatgattcctataacttagcggcggatgggtgagtaacacgtgggtaatctgccctgcactgggggataacagttggaaacgactgttaataccgcatatgcacacggggccgcatggccctgggtggaaagattcatcggtg

SEQ ID NO: 3822 - DNA, 225 bp, unidentified
  misc_feature 1..225: note = bacterial strain Ascusb_8619 encodes 16S rRNA
  source 1..225: mol_type = genomic DNA
agagtttgatcatggctcagaacgaacgctggcggcgcgtcttaagcatgcaagtcgaatggcaagatctgtgcttgcacagatcctagaatggcggactggtgagtaacgcgtgggtgacgtacctcttggatggggatagctcctggaaacaggagataataccgaataagctgcatggatttagaggccatgcaggaaagcagcttttgctgcgccgagaga

SEQ ID NO: 3823 - DNA, 225 bp, unidentified
  misc_feature 1..225: note = bacterial strain Ascusb_6373 encodes 16S rRNA
  source 1..225: mol_type = genomic DNA
agagtttgatcatggctcaggataaacgctggcaccatgcctaatacatgcatgtcgtacgagagtccttcgggactcgagtggcaaatgggtgagtaacacgtaaggaacttcccctagcgacgaggataacggttggaaacgactgctaatactggatagtacatcggaccgcatgatctgatgtttaaaggcccgtttgggtcacgctaggatggccttgcg

SEQ ID NO: 3824 - DNA, 225 bp, unidentified
  misc_feature 1..225: note = bacterial strain Ascusb_3698 encodes 16S rRNA
  source 1..225: mol_type = genomic DNA
agagtttgatcatggctcaggatgaacgctagcggcaggcttaacacatgcaagtcgaggggcagcgcgggtagcaatacctggcggcgaccggcgaaagggtgcggaacacgtgagcaacttgcccgtgacagggggataagcgctggaaacggcgtctaataccccgtaacacaagggatggcatcgtcctttgttgaaagtcttcggatggtcacggatggg

SEQ ID NO: 3825 - DNA, 225 bp, unidentified
  misc_feature 1..225: note = bacterial strain Ascusb_430 encodes 16S rRNA
  source 1..225: mol_type = genomic DNA
agagtttgatcctggctcaggatgaacgctagcgacaggcctaacacatgcaagtcgaggggcagcgcggaagtagcttgctatttctggcggcgaccggcgcacgggtgcgtaacaggtgtgcaatctgtccatagtcggggaatagcccagcgaaagctgaattaacactccatgtgtcacgaagccgcatgactttgtgatgaaacgtaaggactatgggtg

SEQ ID NO: 3826 - DNA, 225 bp, unidentified
  misc_feature 1..225: note = bacterial strain Ascusb_21325 encodes 16S rRNA
  source 1..225: mol_type = genomic DNA
agagtttgatcctggctcaggatgaacgctagctacaggcttaacacatgcaagtcgaggggcagcatgggagtagcttgctactcttgatggcgaccggcgcacgggtgcgtaacacgtatccaatctacccatggctcgggaatagcctttcgaaagaaagattaatgcccgatggtctgtcagtgagacatctcgcaggcagtaaagattaatcggcgatgg

SEQ ID NO: 3827 - DNA, 225 bp, unidentified
  misc_feature 1..225: note = bacterial strain Ascusb_2404 encodes 16S rRNA
  source 1..225: mol_type = genomic DNA
agagtttgatcctggctcaggatgaacgctagcgacaggcctaacacatgcaagtcgagcggcagcacctcgggtggcgagcggcgcacgggtgagtaacgcgtatgtaacctgcccatgagtgggggatagcccggtgaaaaccggattaataccccatgataccattattagacatcttagaatggttaaagattcattgctcatggatggacatgcgttgga

SEQ ID NO: 3828 - DNA, 225 bp, unidentified
  misc_feature 1..225: note = bacterial strain Ascusb_594 encodes 16S rRNA
  source 1..225: mol_type = genomic DNA
agagtttgatcatggctcaggatgaacgctagctacaggcttaacacatgcaagtcgaggggtaacattggctgagcttgctcagccagatgacgaccggcgcacgggtgagtaacgcgtatccaacctgcccatgggtcaggaataaccttccgaaagggagcctaatacctgatgcagtgagaagaaggcctctgattttcacgaaagacttcggtcgccgat

SEQ ID NO: 3829 - DNA, 225 bp, unidentified
  misc_feature 1..225: note = bacterial strain Ascusb_1796 encodes 16S rRNA
  source 1..225: mol_type = genomic DNA
agagtttgatcctggctcaggatgaacgctggcggcaggcttaatacatgcaagtcgaacggtaaggccgagtgtagcaatacacgaggtacacgagtggcgcacgggtgcgtaacgcgtatgcaacctgcccctgaccgggacaaaacagctggaaacggctgctaatatcccatggttaccgaggagggcatcctcctttgtataaagattcattggtcgggg

SEQ ID NO: 3830 - DNA, 225 bp, unidentified
  misc_feature 1..225: note = bacterial strain Ascusb_4687 encodes 16S rRNA
  source 1..225: mol_type = genomic DNA
agagtttgatcctggctcaggatgaacgctggcggcgtgcctaatacatgcaagtcgaacggcagtagcaatactgtagtggcgaacgggtgagtaacacgttggtgacctgccccaaagatgggaatatcacctggaaacgggtggcaaaaccgaataagcttggccgagttagagaaagtcaagtaaaagagcaatctactttgggaggggcctgcggcccat

SEQ ID NO: 3831 - DNA, 225 bp, unidentified
  misc_feature 1..225: note = bacterial strain Ascusb_2672 encodes 16S rRNA
  source 1..225: mol_type = genomic DNA
agagtttgatcctggctcagaacgaacgctggcggcgcgtcttaagcatgcaagtcggacggcagggcaccttcgggtgtccgagagtggcgaacgggtgagtaacacgtaagtgatctgccctgcagttggggatagcctgtggaaacacagggtaataccggatgagatgtcaatgattgaactatgacatgaaagtggctatggccacgctgcaggatgagc

SEQ ID NO: 3832 - DNA, 225 bp, unidentified
  misc_feature 1..225: note = bacterial strain Ascusb_814 encodes 16S rRNA
  source 1..225: mol_type = genomic DNA
agagtttgatcatggctcaggacgaacgctggcggcgtgcctaacacatgcaagtcgaacggagatatttttgattgagatttcggttgattgaagaaatatcttagtggcggacgggtgagtaacgcgtgagtaacctgcccataagagggggataacgttctgaaaagaacgctaataccgcataacatattcaaatcgcatgatttgaatatcaaaggagca

SEQ ID NO: 3833 - DNA, 225 bp, unidentified
  misc_feature 1..225: note = bacterial strain Ascusb_2328 encodes 16S rRNA
  source 1..225: mol_type = genomic DNA
agagtttgatcctggctcaggatgaacgctggcggcgtgcttaacacatgcaagtcgaacgagctgcacggacggaagttttcggatggaagaccgtgtacgcgagtggcggacgggtgagtaacgcgtggggaacctgccctgttccgggggataccagttggaaacgactgttaataccgcataagcgcacggtaccgcatggtacagtgtgaaaaactccgg

SEQ ID NO: 3834 - DNA, 225 bp, unidentified
  misc_feature 1..225: note = bacterial strain Ascusb_2059 encodes 16S rRNA
  source 1..225: mol_type = genomic DNA
agagtttgatcctggctcaggatgaacgctggcggcgtgcttaacacatgcaagtcgaacggagccaaaaggaagcttgctttctttgaagcttagtggcggacgggtgagtaacgcgtgagcaacctgcccttcagtggggaataacacagagaaatctgtgctaataccgcataacgtctctttgccgcatgacagagagaccaaaggatttattcgctgaag

SEQ ID NO: 3835 - DNA, 225 bp, unidentified
  misc_feature 1..225: note = bacterial strain Ascusb_3868 encodes 16S rRNA
  source 1..225: mol_type = genomic DNA
agagtttgatcctggctcaggatgaacgctagctacaggcttaacacatgcaagtcgaggggcagcatggagtcagcttgctgactttgatggcgaccggcgcacgggtgcgtaacacgtatccaatctacccatggctcgggaatagcctttcgaaagaaagattaatgcccgatggtcttacggagagacatctctctgtaagtaaagatttatcggcgatgg

SEQ ID NO: 3836 - DNA, 225 bp, unidentified
  misc_feature 1..225: note = bacterial strain Ascusb_3913 encodes 16S rRNA
  source 1..225: mol_type = genomic DNA
agagtttgatcatggctcaggatgaacgctggcggcgtgcttaacacatgcaagtcgaacgaagcattcagatcggaacttttcggagtgaagaactttatgacttagtggcggacgggtgagtaacgcgtgggcaacctgccttttaccgggggacaacagttggaaacgactgctaataccgcataagcgcacggtaccgcatggtacagtgtgaaaaactcc

SEQ ID NO: 3837 - DNA, 225 bp, unidentified
  misc_feature 1..225: note = bacterial strain Ascusb_1333 encodes 16S rRNA
  source 1..225: mol_type = genomic DNA
agagtttgatcatggctcaggatgaacgctggcggcgtgcttaacacatgcaagtcgaacgaagctccttgaactgaagattcgtctgatgggataggaagacttagtggcggacgggtgagtaacgcgtgggtaacctgccgtatacagggggataacagttagaaatgactgctaataccgcataagcgcacagtaaggcatcttacagtgtgaaaaactccg

SEQ ID NO: 3838 - DNA, 225 bp, unidentified
  misc_feature 1..225: note = bacterial strain Ascusb_2463 encodes 16S rRNA
  source 1..225: mol_type = genomic DNA
agagtttgatcctggctcaggatgaacgctggcggcgtgcctaacacatgcaagtcgagcgagaagctgttgaacagagattcgtcaacgggatacagcggaaagcggcggacgggtgagtaacgcgtaggcaacctgccccttacacagggatagccattggaaacgatgattaaaacctgatgacaccggaagatgacatcttcatccggtcaaagatttatc

SEQ ID NO: 3839 - DNA, 225 bp, unidentified
  misc_feature 1..225: note = bacterial strain Ascusb_5459 encodes 16S rRNA
  source 1..225: mol_type = genomic DNA
agagtttgatcctggctcaggacgaacgctggcggcgtgcttaacacatgcaagtcgaacgaggatatactgaacggagggcttcggttcaaagggaggtatattcgagtggcggacgggtgagtaacgcgtgagcaatctgtcccagacagggggataacacttggaaacaggtgctaataccgcataagaccacagtatcgcatggtacaggggtaaaaggag

SEQ ID NO: 3840 - DNA, 225 bp, unidentified
  misc_feature 1..225: note = bacterial strain Ascusb_429 encodes 16S rRNA
  source 1..225: mol_type = genomic DNA
agagtttgatcatggctcaggatgaacgctagctacaggcttaacacatgcaagtcgaggggcagcacggagactgcttgcagtctctggtggcgaccggcggatgggtgagtaacgcgtatccaacctgcccgtgacccggggacagccttccgaaaggaagattaatacccgatgttccggcgtgcgcgcatgcgctgcgccggcaaagtttttctgcggtga

SEQ ID NO: 3841 - DNA, 225 bp, unidentified
  misc_feature 1..225: note = bacterial strain Ascusb_1562 encodes 16S rRNA
  source 1..225: mol_type = genomic DNA
agagtttgatcatggctcaggatgaacgctggcggcgtgcttaacacatgcaagtcgaacgagcgagttcccttcggggaatgagcgagtggcggacgggtgagtaacgcgtgggtaacctgcctcatacagggggataacagtcagaaatgactgctaataccgcataagcgcacagtactgcatggtacagtgtgaaaagctccggcggtatgagatggaccc

SEQ ID NO: 3842 - DNA, 225 bp, unidentified
  misc_feature 1..225: note = bacterial strain Ascusb_2906 encodes 16S rRNA
  source 1..225: mol_type = genomic DNA
agagtttgatcatggctcaggatgaacgctggcggcgtgcttaacacatgcaagtcgaacggactttagaatgaagcttgcgatttctaaagttagtggcggacgggtgagtaacgcgtgggtaacctgccttataccgggggataacacttagaaataggtgctaataccgcataagcgcacagtttcgcatgaaacagtgtgaaaaactccggtggtataaga

SEQ ID NO: 3843 - DNA, 225 bp, unidentified
  misc_feature 1..225: note = bacterial strain Ascusb_9477 encodes 16S rRNA
  source 1..225: mol_type = genomic DNA
agagtttgatcatggctcaggatgaacgctagcggcaggcttaacacatgcaagtcgaggggcagcggggtgtagcaatacactgccggcgaccggcgcacgggtgcgtaacgcgtatgcaacctgccccgcacagggggataacggagagaaatttccactaatatcccatggcgtattgagaccgcatggtcttgatactaaagcttcggtggtgcgggatgg

SEQ ID NO: 3844 - DNA, 225 bp, unidentified
  misc_feature 1..225: note = bacterial strain Ascusb_15382 encodes 16S rRNA
  source 1..225: mol_type = genomic DNA
agagtttgatcatggctcaggatgaacgctggcggcgtgcctaacacatgcaagtcgaacaaagcatacgggacggagattcgtcgaagccctgtatgacttagtggcggacgggtgagtaatgtatgagcaacctgcctttcagagggggacaacagttggaaacgactgctaataccacataatgtatttgggtggcatcacttgaataccaaaggagcaatc

SEQ ID NO: 3845 - DNA, 225 bp, unidentified
  misc_feature 1..225: note = bacterial strain Ascusb_2919 encodes 16S rRNA
  source 1..225: mol_type = genomic DNA
agagtttgatcatggctcaggacgaacgctggcggcgtgcctaacacatgcaagtcgaacggactgattcccttcggggatgaaagttagtggcggatgggtgagtaacgcgtgaggaacctgcctctcagagggggataacgtttggaaacgaacgctaataccgcataacgcttttgtaccgcatgatacggaagccaaaggagcaatccgctgagagatggc

SEQ ID NO: 3846 - DNA, 225 bp, unidentified
  misc_feature 1..225: note = bacterial strain Ascusb_8108 encodes 16S rRNA
  source 1..225: mol_type = genomic DNA
agagtttgatcatggctcaggacgaacgctggcggcatggattaggcatgcaagtcgaacggggccctccggggcccagtggcggaagggtgagtaacacgtgagcaacccgcccccaaggccggaacaagcgctggaaacggcgtctgaaaccggatgaggacccccctcgcatgtggggtcgtccaaatattcataccctggggatgggctcgcggcccatta

SEQ ID NO: 3847 - DNA, 225 bp, unidentified
  misc_feature 1..225: note = bacterial strain Ascusb_6799 encodes 16S rRNA
  source 1..225: mol_type = genomic DNA
agagtttgatcctggctcaggatgaatgctggcggcgtgcctaatacatgcaagtcgagcggtaacagggtttcaccgtttccttgacactctacgacatggtctagaggcagaattcgagggaacagtgaaactgctgacgagcggcggacggctgagtaacgcgtgggaacggaccccaaactgagggataacgcaccgaaaggtgtgctaataccgcatgtg

SEQ ID NO: 3848 - DNA, 225 bp, unidentified
  misc_feature 1..225: note = bacterial strain Ascusb_3164 encodes 16S rRNA
  source 1..225: mol_type = genomic DNA
agagtttgatcatggctcaggacgaacgctggcggcgtgcctaacacatgcaagtcgaacgaagctccatgatatgagattcgtcaaattgattggatgacttagtggcggacgggtgagtaatgcgtgagcaacctgcccttcggagggggacaacagttggaaacgactgctaataccgcatgatgtatcgtgaaggcatcttcgtgataccaaagatttatc

SEQ ID NO: 3849 - DNA, 225 bp, unidentified
  misc_feature 1..225: note = bacterial strain Ascusb_10986 encodes 16S rRNA
  source 1..225: mol_type = genomic DNA
agagtttgatcatggctcagaacgaacgccggcggcgcgtcttaagcatgcaagtcgggcgggattgaggggcttgctcctcatgagagcggcggactggtgagtaacgcgtgggcgacgtaccccctgcaccgggacagccggcagaaatgccgggtgatacgggatgagctcttaccctgcggtggggtgagaggaaagcggctacggccgcggcaggggaac

SEQ ID NO: 3850 - DNA, 225 bp, unidentified
  misc_feature 1..225: note = bacterial strain Ascusb_6289 encodes 16S rRNA
  source 1..225: mol_type = genomic DNA
agagtttgatcatggctcaggataaacgctggcggcgcacataagacatgcaagtcgaacggacttaactcattcttttagattgagagcggttagtggcggactggtgagtaacacgtaagcaacctgcctattagaggggaataacaatgagaaatcattgctaataccgcataagctgataatatcgcatgatatagtcagaaaaggagcaatccgctaata

SEQ ID NO: 3851 - DNA, 225 bp, unidentified
  misc_feature 1..225: note = bacterial strain Ascusb_9998 encodes 16S rRNA
  source 1..225: mol_type = genomic DNA
agagtttgatcctggctcagagttaacgctggcatcgtgcataacacatgcaagtcgaacgggacttagttttgtagcaatacagaattaagtttagtggcagacgggtgagtaatgtataaggaatctaccttcgagtggggaataacagtccgaaaggattgctaataccccataacataatcaagtggcatcacttgattatcaaagatttatcgcttgaag

SEQ ID NO: 3852 - DNA, 225 bp, unidentified
  misc_feature 1..225: note = bacterial strain Ascusb_106 encodes 16S rRNA
  source 1..225: mol_type = genomic DNA
agagtttgatcatggctcaggatgaacgctggcggcgtgcctaacacatgcaagtcgaacgggactatcaagtgatgttttcggactgaactttttagtttagtggcggacgggtgagtaacgcgtggacaacctgcctctcactgggggatagcagctggaaacggctggtaataccgcatgcgttcaatgtgccgcatgacacattgaagaaagatttatcgg

SEQ ID NO: 3853 - DNA, 225 bp, unidentified
  misc_feature 1..225: note = bacterial strain Ascusb_8774 encodes 16S rRNA
  source 1..225: mol_type = genomic DNA
agagtttgatcctggctcaggacgaacgctggcggcgtgcctaacacatgcaagtcgaacgaagctccggatctgatccttcgggtgaagtgaaggaagacttagtggcggacgggtgagtaacgcgtgagcaacctgcctttcagagggggataacagttggaaacgactgctaataccgcataacataagatcatcgcatggtggttttatcaaagctgaggc

SEQ ID NO: 3854 - DNA, 225 bp, unidentified
  misc_feature 1..225: note = bacterial strain Ascusb_17279 encodes 16S rRNA
  source 1..225: mol_type = genomic DNA
agagtttgatcctggctcaggacgaacgctggcggcgcgcttaacacatgcaagtcgaacggagcttgaacgagcgtcttcggacaaacgtttaaacttagtggcggacgggtgagtaacgcgtgagcaaccggtcctgaagagggggacaacattgagaaatcaatgctaataccgcgtaagaccacactgcggcatcgcagaggggtcaaaggagagatccgc

SEQ ID NO: 3855 - DNA, 225 bp, unidentified
  misc_feature 1..225: note = bacterial strain Ascusb_2411 encodes 16S rRNA
  source 1..225: mol_type = genomic DNA
agagtttgatcctggctcaggatgaacgctggcggcgtgcctaacacatgcaagtcgaacgaagcatttctgctgaaccttcgggtgatgcggatttgactgagtggcggacgggtgagtaacgcgtgggtaacctgccctgtacagggggataacagccagaaatggctgctaataccgcataagcgcaggccgtggcatcatggtctgcggaaaactccggtg

SEQ ID NO: 3856 - DNA, 225 bp, unidentified
  misc_feature 1..225: note = bacterial strain Ascusb_115 encodes 16S rRNA
  source 1..225: mol_type = genomic DNA
agagtttgatcatggctcaggatgaacgctagctacaggcttaacacatgcaagtcgaggggcagcattgggatagcttgctattccagatggcgaccggcgcacgggtgagtaacgcgtatccaaccttccctatagtagagaatagcccggcgaaagtcggattaatgctctatgttgtgttttgaggacatctgacgaacaccaaaggttcaccgctatagg

SEQ ID NO: 3857 - DNA, 225 bp, unidentified
  misc_feature 1..225: note = bacterial strain Ascusb_76 encodes 16S rRNA
  source 1..225: mol_type = genomic DNA
agagtttgatcatggctcaggacgaacgctggcggcgtgcttaacacatgcaagtcgagcgatgaagttccttcgggaatggattagcggcggacgggtgagtaacacgtgggtaacctaccttatagtggggaatagcctttcgaaaggaagattaataccgcataagattgtagtttcgcatgaaatagcaattaaaggagcaattcgctataagatggaccc

SEQ ID NO: 3858 - DNA, 225 bp, unidentified
  misc_feature 1..225: note = bacterial strain Ascusb_4374 encodes 16S rRNA
  source 1..225: mol_type = genomic DNA
agagtttgatcatggctcaggatgaacgctggcggcgtgcttaacacatgcaagtcgaacgaggttacttattacgatcccttcggggtgacgatttttaaccgagtggcggacgggtgagtaacgcgtgggcaacctgccccatacagggggataacagttggaaacgactgacaataccgcataagcgcacgatctcgcatgggattgtgtgaaaaactccgg

SEQ ID NO: 3859 - DNA, 225 bp, unidentified
  misc_feature 1..225: note = bacterial strain Ascusb_8421 encodes 16S rRNA
  source 1..225: mol_type = genomic DNA
agagtttgatcatggctcaggacgaacgctggcggcgtgcctaacacatgcaagtcgaacgggggttttgcttcggtagaaccttagtggcgaacgggtgagtaacgcgtaggcaacctgccccccggattgggacaacaccccgaaaggggtgctaataccggatacgaagatagcaccgcatggtgatattttgaaagatggcctctacaggtaagctatcgc

SEQ ID NO: 3860 - DNA, 225 bp, unidentified
  misc_feature 1..225: note = bacterial strain Ascusb_2383 encodes 16S rRNA
  source 1..225: mol_type = genomic DNA
agagtttgatcatggctcaggatgaacgctggcggcgtgcctaatacatgcaagtcgagcgagaaatgtccgattgagacttcggtggatttcggacatggaaagcggcggacgggtgagtaacgcgtaggcaacctgccctttgcacagggatagccactggaaacggtgattaatacctgataatgcatctccatcgcctgttggagatgccaaagatttatt

SEQ ID NO: 3861 - DNA, 225 bp, unidentified
  misc_feature 1..225: note = bacterial strain Ascusb_2226 encodes 16S rRNA
  source 1..225: mol_type = genomic DNA
agagtttgatcctggctcaggatgaacgctggcggcgtgcctaacacatgcaagtcgaacggagtatatgcgcagatgatcgaagtgcttgcatagagagaatcatgtgtatacttagtggcggacgggtgagtaacgtgtggataacctggtccatccagggggatagcagcgggaaactgctgataataccgcataagcgcacagtaaggcatcttacagtgt

SEQ ID NO: 3862 - DNA, 225 bp, unidentified
  misc_feature 1..225: note = bacterial strain Ascusb_383 encodes 16S rRNA
  source 1..225: mol_type = genomic DNA
agagtttgatcctggctcaggatgaacgctagctacaggcttaacacatgcaagtcgaggggcagcgagaaggaagcttgctttctttgtcggcgaccggcgcacgggtgagtaacgcgtatccaaccttccccttagtagggcatagcccggcgaaagtcggattaacaccctatgttttccgaagatggcatctgatttggaataaagatttatcgctaaggg

SEQ ID NO: 3863 - DNA, 225 bp, unidentified
  misc_feature 1..225: note = bacterial strain Ascusb_3469 encodes 16S rRNA
  source 1..225: mol_type = genomic DNA
agagtttgatcctggctcaggatgaacgctagctacaggcctaacacatgcaagtcgcggggcagcatggattctgcttgcagtatccgatggcgaccggcgcacgggtgagtaacgcgtatccaacctgcctccatgcagggcacagcccggcgaaagtcggattaattccctatgccctccctcgcggacatccaatggggaggaaaggcttcggccgcatgg

SEQ ID NO: 3864 - DNA, 225 bp, unidentified
  misc_feature 1..225: note = bacterial strain Ascusb_12352 encodes 16S rRNA
  source 1..225: mol_type = genomic DNA
agagtttgatcatggctcaggatgaacgctagctacaggcttaacacatgcaagtcgaggggcagcgctggggttgcttgcaacccctggcggcgaccggcggatgggtgagtaacgcgtatccaacctgccccgtgcccggggacagcccttagaaatgaggattaacccccgatggcgtggtcatgccgcatggtgtttccactaaaccggcacgggatgggg

SEQ ID NO: 3865 - DNA, 225 bp, unidentified
  misc_feature 1..225: note = bacterial strain Ascusb_12625 encodes 16S rRNA
  source 1..225: mol_type = genomic DNA
agagtttgatcatggctcaggatgaatgctggcggcgtgcctaatacatgcaagtcgagcggtaacagggcttcaccgtttccttgacacacctagcgcattatcgtaggttggttagattcgagggaacagtgaagctgctgacgagcggcggacggctgagtaacgcgtgggaacggaccccaaactgagggataactagtcgaaagattagctaataccgca

SEQ ID NO: 3866 - DNA, 225 bp, unidentified
  misc_feature 1..225: note = bacterial strain Ascusb_12320 encodes 16S rRNA
  source 1..225: mol_type = genomic DNA
agagtttgatcatggctcaggatgaacgctggcggcatgcctaagacatgcaagtcgaacgaagtggcccaatgacgattgagtgcttgcacaagatttgatttggattttccacttagtggcgcaagggtgagtaacacgtaggttatctgccttcgagtctggaataacagttagaaatgattgctaatgccggattacatataaagcgatacgttactttat

SEQ ID NO: 3867 - DNA, 225 bp, unidentified
  misc_feature 1..225: note = bacterial strain Ascusb_9555 encodes 16S rRNA
  source 1..225: mol_type = genomic DNA
agagtttgatcatggctcaggatgaatgctggcggcgtgcctaatacatgcaagtcgagcggtaacagggcttcaccgtttccttgacacacctagcgctatatcgtaggttggttagattcgagggaacagtgaagctgctgacgagcggcggacggctgagtaacgcgtgggaacggaccccaaagtgagggataactagtcgaaagattagctaataccgca

SEQ ID NO: 3868 - DNA, 225 bp, unidentified
  misc_feature 1..225: note = bacterial strain Ascusb_4057 encodes 16S rRNA
  source 1..225: mol_type = genomic DNA
agagtttgatcatggctcaggatgaacgctggcggcatgcctaacacatgcaagtcgaacggagctatgatggagcttgcttttttatagcttagtggcggacgggtgagtaacgcgtgaggaatctgccctcgagtggggaataacaccgagaaatcggtgctaataccgcataacgtctttggatcgcatgttctgaagaccaaaggatttattcgcttgagg

SEQ ID NO: 3869 - DNA, 225 bp, unidentified
  misc_feature 1..225: note = bacterial strain Ascusb_1219 encodes 16S rRNA
  source 1..225: mol_type = genomic DNA
agagtttgatcatggctcaggatgaacgctagctacaggcttaacacatgcaagtcgaggggcagcgggaggaaagcttgctttccttgccggcgaccggcgaatgggtgagtaacacgtatccaacctgcccccgaccgggggatagccctccgaaaggagaattaacaccccatgggtgtccgcgcggcatcgcgcggccatgaaaggctacggtcggggatg

SEQ ID NO: 3870 - DNA, 225 bp, unidentified
  misc_feature 1..225: note = bacterial strain Ascusb_417 encodes 16S rRNA
  source 1..225: mol_type = genomic DNA
agagtttgatcatggctcaggatgaacgctagcgacaggcctaacacatgcaagtcgaggggcagcgggattgaagcttgctttaattgccggcgaccggcgcacgggtgcgtaacaggtgtgcaatctgtccatagtcggggaatagcccagcgaaagctgaattaatactccatgtgaatcgaagccgcatgactttgatttgaaacgcaaggactatgggtg

SEQ ID NO: 3871 - DNA, 225 bp, unidentified
  misc_feature 1..225: note = bacterial strain Ascusb_2802 encodes 16S rRNA
  source 1..225: mol_type = genomic DNA
agagtttgatcatggctcaggatgaacgctagctacaggcttaacacatgcaagtcgaggggcagcaggaatctagcttgctagatttgctggcgaccggcgcacgggtgagtaacgcgtatccaacctggcccttagtagggaatagcccggcgaaagtcggattaatgccctatgttctccgaagaaggcatctgaaatggagtaaagattgatcgctaaggg

SEQ ID NO: 3872 - DNA, 225 bp, unidentified
  misc_feature 1..225: note = bacterial strain Ascusb_1704 encodes 16S rRNA
  source 1..225: mol_type = genomic DNA
agagtttgatcatggctcaggatgaacgctggcggcatgcctaacacatgcaagtcgaacggagttgaggagtagcttgctatgaatcaacttagtggcggacgggtgagtaacgcgtgagtaacctgcctcttagagggggataacgttctgaaaaggacgctaataccgcatataattacgaaatcgcatggttttgtaatgaaaggagcaatccgctaagag

SEQ ID NO: 3873 - DNA, 225 bp, unidentified
  misc_feature 1..225: note = bacterial strain Ascusb_6272 encodes 16S rRNA
  source 1..225: mol_type = genomic DNA
agagtttgatcctggctcaggatgaacgctagctacaggcttaacacatgcaagtcgaggggcagcatggaggaagcttgcttcctctgatggcgaccggcgcacgggtgagtaacgcgtatccaaccttccccttagtagggcatagcccggcgaaagtcggattaataccctatgttgttcgaagaggacatctgatttgaaccaaagacttgtcgctaaggg

SEQ ID NO: 3874 - DNA, 225 bp, unidentified
  misc_feature 1..225: note = bacterial strain Ascusb_2886 encodes 16S rRNA
  source 1..225: mol_type = genomic DNA
agagtttgatcctggctcaggatgaacgctagctacaggcttaacacatgcaagtcgaggggcagcatgggattagcttgctaatcctgatggcgaccggcgcacgggtgagtaacgcgtatccaaccttccccctactcaggcatagcccggtgaaaaccggattaactcctgatagtttcactagatggcatctgacggtgaataaagctctgcggtaaggga

SEQ ID NO: 3875 - DNA, 225 bp, unidentified
  misc_feature 1..225: note = bacterial strain Ascusb_453 encodes 16S rRNA
  source 1..225: mol_type = genomic DNA
agagtttgatcctggctcaggatgaacgctagctacaggcttaacacatgcaagtcgaggggcatcatgggaggacttcggtccttttgatggcgaccggcgaatgggtgagtaacacgtatccgacctgccctgtactggaggatagcctcccgaaagggaaattaatactccatgtgtcaaatgtccgcatggtcgtttgatgaaagatttatcggtacagga

SEQ ID NO: 3876 - DNA, 225 bp, unidentified
  misc_feature 1..225: note = bacterial strain Ascusb_569 encodes 16S rRNA
  source 1..225: mol_type = genomic DNA
agagtttgatcatggctcaggatgaacgctggcggcgtgcttaacacatgcaagtcgaacgaggcacctttgcagaagttttcggatggaagcggaggcgaccgagtggcggacgggtgagtaacgcgtggggaacctgccccattccgggggataccagttggaaacgactgttaataccgcataagcgcacggaaggacatccttttgtgtgaaaaactgagg

SEQ ID NO: 3877 - DNA, 225 bp, unidentified
  misc_feature 1..225: note = bacterial strain Ascusb_7167 encodes 16S rRNA
  source 1..225: mol_type = genomic DNA
agagtttgatcatggctcaggatgaacgctagcggcaggcttaacacatgcaagtcgaggggtaacagggagtagcaatactccgctgacgaccggcgcacgggtgcgtaacgcgtatgcaacctaccttgtacagggggataacggagagaaatttccactaatatcccatggtgttgggggatcgcatgattctccgactaaagcttcggtggtacaagatgg

SEQ ID NO: 3878 - DNA, 225 bp, unidentified
  misc_feature 1..225: note = bacterial strain Ascusb_12394 encodes 16S rRNA
  source 1..225: mol_type = genomic DNA
agagtttgatcctggctcaggatgaacgctagctacaggcttaacacatgcaagtcgaggggcagcatgatctaagcttgcttagattgatggcgaccggcgcacgggtgagtaacgcgtatccaaccttccctatagtagaggatagcccggcgaaagtcggattaatactctatgttttccaatgcagacatctaagttggaacaaaggttcaccgctatagg

SEQ ID NO: 3879 - DNA, 225 bp, unidentified
  misc_feature 1..225: note = bacterial strain Ascusb_5760 encodes 16S rRNA
  source 1..225: mol_type = genomic DNA
agagtttgatcatggctcagaatgaacgttggcggcgtggattaggcatgcaagtcgagcggcaaggttccttcggggaccctagagcggcggaagggataggaacatatagatacgtgcctcttagcccgggatagcgtctggaaacggacgataataccggatgacgtactcgtacgaaaagtgtaattctgctaagagatcggtctatatcctattagctag

SEQ ID NO: 3880 - DNA, 225 bp, unidentified; identical to SEQ ID NO: 2967
  misc_feature 1..225: note = bacterial strain Ascusb_17962 encodes 16S rRNA
  source 1..225: mol_type = genomic DNA

SEQ ID NO: 3881 - DNA, 225 bp, unidentified
  misc_feature 1..225: note = bacterial strain Ascusb_3971 encodes 16S rRNA
  source 1..225: mol_type = genomic DNA
agagtttgatcatggctcaggatgaacgctggcggcgtgcttaacacatgcaagtcgaacggacttatttgagagcttgcttttagataagttagtggcggacgggtgagtaacgcgtgggtaacctgccgtatgccgggggacaacagttggaaacgactgctaataccgcataagcgcacagagtggcatcactcagtgtgaaaaactccggtggcatacgat

SEQ ID NO: 3882 - DNA, 225 bp, unidentified
  misc_feature 1..225: note = bacterial strain Ascusb_9879 encodes 16S rRNA
  source 1..225: mol_type = genomic DNA
agagtttgatcctggctcaggatgaacgctggcggcatgcctaagacatgcaagtcgtacgaggtggcccgttgagttctgtgcttgcacaaaacaattcggatccccacctagtggcgaaagggtgagtaacacgtgggttatctacctcagagactgggataactactggaaacggtagctaataccggatgatatatagaacgatacgttgttctatagtaa

SEQ ID NO: 3883 - DNA, 225 bp, unidentified
  misc_feature 1..225: note = bacterial strain Ascusb_2185 encodes 16S rRNA
  source 1..225: mol_type = genomic DNA
agagtttgatcatggctcaggatgaacgctggcggcgtgcctaacacatgcaagtcgagcgagaaactcatgaccaatacttcggttgcgtgattgagcggaaagcggcggacgggtgagtaacgcgtaggcaacctgccccttgcagagggatagcctcgggaaaccgggattaaaacctcataatgccgagagtcgacatcttctttcggccaaagatttatc

SEQ ID NO: 3884 - DNA, 225 bp, unidentified
  misc_feature 1..225: note = bacterial strain Ascusb_6223 encodes 16S rRNA
  source 1..225: mol_type = genomic DNA
agagtttgatcatggctcagaacgaacgctggcggcgcgtcttaagcatgcaagtcgggcgggattggggagcttgctccccatgagagcggcggactggcgaggaacgcgtgggcgacgcgccctccggagggggacagcccgtggaaacacggggtaataccccatgacatgggaggcttggaggccttccatcaaaggagcttcggctccgccgggggagcg

SEQ ID NO: 3885 - DNA, 225 bp, unidentified
  misc_feature 1..225: note = bacterial strain Ascusb_310 encodes 16S rRNA
  source 1..225: mol_type = genomic DNA
agagtttgatcatggctcaggatgaacgctagctacaggcttaacacatgcaagtcgaggggcagcataacgaaagcttgcttttgttgatggcgaccggcgcacgggtgagtaacgcgtatccaaccttccctatagtagagaatagcccggcgaaagtcggattaatgctctatgttcttctttgatggcatctgacgagaagcaaaggttcaccgctatagg

SEQ ID NO: 3886 - DNA, 225 bp, unidentified
  misc_feature 1..225: note = bacterial strain Ascusb_19690 encodes 16S rRNA
  source 1..225: mol_type = genomic DNA
agagtttgatcatggctcagaacgaacgctggcggcgcgtcttaagcatgcaagtcgaacggcaagagaagtgcttgcacttctcctagagtggcggactggtgagtaacaggtgggtgacatacccttcagatggggatagccggtagaaataccgggtaataccgaatacgctcgtgcatctcggaagtgtacgaggaaaggagctacggcttcgctgttgga

SEQ ID NO: 3887 - DNA, 225 bp, unidentified
  misc_feature 1..225: note = bacterial strain Ascusb_10664 encodes 16S rRNA
  source 1..225: mol_type = genomic DNA
agagtttgatcatggctcagaacgaacgctggcggcgcgtcttaagcatgcaagtcgggcgggaacgggaagcttgcttcccgcgagagcggcggactggtgagtaacgcgtgggtgacgtaccccccggacggggacagcctgcagaaatgcagggtaataccggatacggttctgtgcattggaagtacagaaggaaaggagctacggctccgccgggggaac

SEQ ID NO: 3888 - DNA, 225 bp, unidentified
  misc_feature 1..225: note = bacterial strain Ascusb_1109 encodes 16S rRNA
  source 1..225: mol_type = genomic DNA
agagtttgatcatggctcaggatgaacgctggcggcgtgcttaacacatgcaagtcgaacggggttattacggaagcttgcttttgttttaacctagtggcggacgggtgagtaacgcgtgagaaacctgcccttcagtggggaataacaccgagaaatcggtgctaataccgcataatgtcggatcatcgcatgttgaaccgaccaaaggatttattcgctgaa

SEQ ID NO: 3889 - DNA, 225 bp, unidentified
  misc_feature 1..225: note = bacterial strain Ascusb_2186 encodes 16S rRNA
  source 1..225: mol_type = genomic DNA
agagtttgatcatggctcaggatgaacgctggcggcgtgcctaacacatgcaagtcgaacgaagcactggaaacggagattcgtcgaagttttctttgacttagtggcggacgggtgagtaatgtatgagcaacctgcctttcagagggggacaacagttggaaacgactgctaataccgcgtaacgtatagagggggcatcctttttataccaaaggagcaatc

SEQ ID NO: 3890 - DNA, 225 bp, unidentified
  misc_feature 1..225: note = bacterial strain Ascusb_938 encodes 16S rRNA
  source 1..225: mol_type = genomic DNA
agagtttgatcctggctcaggacgaacgctggcggcacgcttaacacatgcaagtcgaacggagaatttttggtttactgagaattcttagtggcggacgggtgagtaacacgtgagcaacctgcctctgagagagggatagcttctggaaacggatggtaatacctcataacatatacggaagacatcttctgtatatcaaagatttatcgctcagagatgggc

SEQ ID NO: 3891 - DNA, 225 bp, unidentified
  misc_feature 1..225: note = bacterial strain Ascusb_2035 encodes 16S rRNA
  source 1..225: mol_type = genomic DNA
agagtttgatcatggctcaggacgaacgctggcggcgtgcttaacacatgcaagtcgaacgaggttatttaccggaagtcttcggatggaaagtggataaccgagtggcggacgggtgagtaacgcgtgagcaacctgtcttctacagggggataacactccgaaaggagcgctaataccgcataagaccacggtttcgcatgggactgaggtcaaaggagcaat

SEQ ID NO: 3892 - DNA, 225 bp, unidentified
  misc_feature 1..225: note = bacterial strain Ascusb_3790 encodes 16S rRNA
  source 1..225: mol_type = genomic DNA
agagtttgatcatggctcaggacgaacgctggcggcgtgcttaacacatgcaagtcgaacggggatcaaattggaagtccttcgggacggaagatttgattctagtggcggacgggtgagtaacgcgtgagcaacctgtcccagacagggggataacacttggaaacaggtgctaataccgcataagaccacgggatcacatggttctgaggtaaaaggagcaat

SEQ ID NO: 3893 - DNA, 225 bp, unidentified
  misc_feature 1..225: note = bacterial strain Ascusb_17080 encodes 16S rRNA
  source 1..225: mol_type = genomic DNA
agagtttgatcctggctcaggatgaacgctggcggcatgcctaagacatgcaagtcgaacggagcggcctattgaagacggagtgcttgcacaaagttggatttagattcccgctcagtggcagacgggtgagtaacacgtgggtaatctaccctagagactgggacaacagttggaaacgactgctaataccggatgattcatatttagaaaactagatatgct

SEQ ID NO: 3894 - DNA, 225 bp, unidentified
  misc_feature 1..225: note = bacterial strain Ascusb_7346 encodes 16S rRNA
  source 1..225: mol_type = genomic DNA
agagtttgatcctggctcaggatgaacgctagcggcaggcttaacacatgcaagtcgaggggcagcggggcccagcaatgggctgccggcgaccggcgcacgggtgcgtaacgcgtatgcaacctgcccgcgacagggggataaccggtggaaacgccgactaataccccgtaacgcacggtctcgcatgggattgtgctgaaagcttcggtggtcgcggatggg

SEQ ID NO: 3895 - DNA, 225 bp, unidentified
  misc_feature 1..225: note = bacterial strain Ascusb_4539 encodes 16S rRNA
  source 1..225: mol_type = genomic DNA
agagtttgatcatggctcaggatgaacgctagcggcaggcttaacacatgcaagtcgaggggcagcggggtgtagcaatacactgccggcgaccggcgcacgggtgcgtaacgcgtatgcaacctgcccgtaacagggggataacggagagaaatttccactaataccccatatagccgtttggccgcatggtcaggcggcgaaagccttggtggttacggatgg

SEQ ID NO: 3896 - DNA, 225 bp, unidentified
  misc_feature 1..225: note = bacterial strain Ascusb_4883 encodes 16S rRNA
  source 1..225: mol_type = genomic DNA
agagtttgatcctggctcaggatgaacgctggcggcgtgcctaacacatgcaagtcgaacggagatcttattgatggagacttcggtcaaaagaggtttgatcttagtggcggacgggtgagtaacgcgtggagaacctgccctgtacagggggataacaggcagaaatgcctgctaataccgcataagcgcacgggagcgcatgcttctgtgtgaaaaactccg

SEQ ID NO: 3897 - DNA, 225 bp, unidentified
  misc_feature 1..225: note = bacterial strain Ascusb_14062 encodes 16S rRNA
  source 1..225: mol_type = genomic DNA
agagtttgatcatggctcaggatgaacgctggcggcatgcctaagacatgcaagtcgaacgaagtagtccaaagaagaatgagtgcttgcacgaatttggaaatggtacgctacttagtggcagacgggtgagtaacacgtgggtaacctacctcagagactgggataacaattagaaatgattgctaataccggatgatttgtaatatgataacatgttatact

SEQ ID NO: 3898 - DNA, 225 bp, unidentified
  misc_feature 1..225: note = bacterial strain Ascusb_855 encodes 16S rRNA
  source 1..225: mol_type = genomic DNA
agagtttgatcatggctcaggatgaacgctggcggcgtgcctaacacatgcaagtcgagcggagttaagttttcggatttaacttagcggcggatgggtgagtaacgcgtggataacctgccctgctcagggggataacagttggaaacggctgttaataccgcatatgcacacagtaccgcatggtacagggtggaaagattttatcggagcaggatggatccg

SEQ ID NO: 3899 - DNA, 225 bp, unidentified
  misc_feature 1..225: note = bacterial strain Ascusb_9297 encodes 16S rRNA
  source 1..225: mol_type = genomic DNA
agagtttgatcatggctcaggatgaacgctagctacaggcctaacacatgcaagtcgaggggcatcgcgggagtgagcaatcacacccggcggcgaccggcggatgggtgagtaacgcgtatccaacctgccccatgcccgggcacagcccctggaaacggggagtgactcccgatggcgccatttggccgcatggccttctggctaaatttcgaggcatgggat

SEQ ID NO: 3900 - DNA, 225 bp, unidentified
  misc_feature 1..225: note = bacterial strain Ascusb_351 encodes 16S rRNA
  source 1..225: mol_type = genomic DNA
agagtttgatcatggctcaggatgaacgctagctacaggcttaacacatgcaagtcgaggggcagcatgaagatgtgcttgcacaactttgatggcgaccggcgcacgggtgagtaacgcgtatccaaccttccctatagtagagaatagcccggcgaaagtcggattaatgctctatgttcttctttgatggcatctgaggagaagcaaaggttcaccgctata

SEQ ID NO: 3901 - DNA, 225 bp, unidentified
  misc_feature 1..225: note = bacterial strain Ascusb_4309 encodes 16S rRNA
  source 1..225: mol_type = genomic DNA
agagtttgatcatggctcaggatgaacgctggcggcgtgcctaacacatgcaagtcgaacggagatttaacgctgatgaggcttcggccaagtcttgttaaatcttagtggcggacgggtgagtaacgcgtgggcaacctgcctcgtactgggggataacagttggaaacgactgttaataccgcataagcgcacggtgtcgcatgacacagtgtgaaaaactcc

SEQ ID NO: 3902 - DNA, 225 bp, unidentified
  misc_feature 1..225: note = bacterial strain Ascusb_4720 encodes 16S rRNA
  misc_feature 199..225: note = n is any nucleotide
  source 1..225: mol_type = genomic DNA
agagtttgatcatggctcaggatgaacgctggcggcgtgcctaacacatgcaagtcgaacggggttaagggaaattttcggatggaacttaacttagtggcggacgggtgagtaacgcgtggataacctgcctcacactgggggatagcagctggaaacggctggtaataccgcataagaccacagcaccgcggtaatnnnnnnnnnnnnnnnnnnnnnnnnnnn

SEQ ID NO: 3903 - DNA, 225 bp, unidentified
  misc_feature 1..225: note = bacterial strain Ascusb_2378 encodes 16S rRNA
  source 1..225: mol_type = genomic DNA
agagtttgatcctggctcaggatgaacgctagctacaggcttaacacatgcaagtcgaggggcagcatgggagttgcttgcaactcttgatggcgaccggcgcacgggtgagtaacgcgtatccaaccttcccctcagtagggcatagcccgtagaaatgcggattaataccctatgtggtccgatgaggacatctgagctggacgaaaggtttaccgctgaggg

SEQ ID NO: 3904 - DNA, 225 bp, unidentified
  misc_feature 1..225: note = bacterial strain Ascusb_6087 encodes 16S rRNA
  source 1..225: mol_type = genomic DNA
agagtttgatcatggctcagaacgaacgctggcggcgcgtcttaagcatgcaagtcggacggcaagggaagtgcttgcacttctcccagagtggcggactggtgagtaacacgtgggtgacgtacccccgggacggggatagctcctagaaataggaggtaataccggatacgaccgcagacgtaggtgtctgcgaggaaaggagctctggctccgcccggggaa

SEQ ID NO: 3905 - DNA, 225 bp, unidentified
  misc_feature 1..225: note = bacterial strain Ascusb_485 encodes 16S rRNA
  source 1..225: mol_type = genomic DNA
agagtttgatcatggctcaggatgaacgctggcggcgtgcctaatacatgcaagtcgagcgagaatctgatgacttgagattcgttgaaatgattcagaggaaagcggcggacgggtgagtaacgcgtaggcaacctgcccttagcagagggatagccattggaaacgatgattaaaacctcataacgctgttttaacacatgttgagacagccaaagatttatc

SEQ ID NO: 3906 - DNA, 225 bp, unidentified
  misc_feature 1..225: note = bacterial strain Ascusb_7324 encodes 16S rRNA
  source 1..225: mol_type = genomic DNA
agagtttgatcatggctcaggatgaacgctggcggcgtgcttaacacatgcaagtcgaacgaagccaaaaggaagcttgctttctttgaagcttagtggcggacgggtgagtaacgcgtgaggaacctgcccttcagtggggaataacagccggaaacgactgctaataccgcataacgtcatcggaccgcatgatctggtgaccaaaggatttattcgctgaag

SEQ ID NO: 3907 - DNA, 225 bp, unidentified
  misc_feature 1..225: note = bacterial strain Ascusb_680 encodes 16S rRNA
  source 1..225: mol_type = genomic DNA
agagtttgatcatggctcaggacgaacgctggcggcacgcttaacacatgcaagtcgaacggagttttagagagcttgctttttaaaacttagtggcggacgggtgagtaacacgtgagcaatctgcctttcagagggggatagcagttggaaacgactgataataccgcataacatagcaagaccgcatgatcatgctatcaaagatttatcgctgaaagatga

SEQ ID NO: 3908 - DNA, 225 bp, unidentified
  misc_feature 1..225: note = bacterial strain Ascusb_2801 encodes 16S rRNA
  source 1..225: mol_type = genomic DNA
agagtttgatcatggctcaggacgaacgctggcggcgtgcctaatacatgcaagtcgaacggagctagagacttcggtttctaacttagtggcgaacgggtgagtaacgcgtgagcaacctgactcaaagagggggacaacagctggaaacggctgctaataccgcataagaccacaatgtggcatcacgaaggggtcaaagaatttcgctttgagaggggctcg

SEQ ID NO: 3909 - DNA, 225 bp, unidentified
  misc_feature 1..225: note = bacterial strain Ascusb_2590 encodes 16S rRNA
  source 1..225: mol_type = genomic DNA
agagtttgatcatggctcaggatgaacgctagctacaggcttaacacatgcaagtcgaggggcagcatgaagtcagcttgctgactttgatggcgaccggcgcacgggtgcgtaacacgtatccaatctgcccgttactcagggatagcctttcgaaagaaagattaatacctgatggtttccttaggtcgcatgacctgcggaataaagatatatcggtaacgg

SEQ ID NO: 3910 - DNA, 225 bp, unidentified
  misc_feature 1..225: note = bacterial strain Ascusb_1586 encodes 16S rRNA
  source 1..225: mol_type = genomic DNA
agagtttgatcatggctcaggatgaacgctggcggcgtgcttaacacatgcaagtcgaacgagggttgctggttgaagttttcggatggaaaccggtaattcctagtggcggacgggtgagtaacgcgtggggaacctgccccgctccgggggataccagctggaaacggctgttaataccgcataagcgcacagcattgcatgatgcagtgtgaaaaactccgg

SEQ ID NO: 3911 - DNA, 225 bp, unidentified
  misc_feature 1..225: note = bacterial strain Ascusb_19487 encodes 16S rRNA
  source 1..225: mol_type = genomic DNA
agagtttgatcatggctcaggatgaacgctagctacaggcttaacacatgcaagtcgcggggcagcatggtcttagcttgctaaggctgatggcgaccggcgcacgggtgagtaacgcgtatccaaccttccccttagtagggcatagcccggcgaaagtcggattaataccctatgttgttcgaagcagacatctaatttgaaccaaagatttatcgctaaggg

SEQ ID NO: 3912 - DNA, 225 bp, unidentified
  misc_feature 1..225: note = bacterial strain Ascusb_4646 encodes 16S rRNA
  source 1..225: mol_type = genomic DNA
agagtttgatcatggctcaggattaacgctggcggcgtgcttaacacatgcaagtcgaacggggtatgagacttcggttttatacctagtggcggacgggtgagtaacgcgtgggcaacctgccctgtaccgggggacaacagctggaaacggctgctaataccgcataagcgcacaaaaccgcatggttttgtgtgaaaagatttatcagtacaggatgggccc

SEQ ID NO: 3913 - DNA, 225 bp, unidentified
  misc_feature 1..225: note = bacterial strain Ascusb_2238 encodes 16S rRNA
  source 1..225: mol_type = genomic DNA
agagtttgatcctggctcaggatgaacgctggcggcgtgcttaacacatgcaagtcgaacggactttacatgaagcctagcgaatgtaaagttagtggcggacgggtgagtaacgcgtgggtaacctgccgtatgctgggggacaacagttggaaacgactgctaataccgcataagcgcacagaaccgcatggttcagtgtgaaaaactccggtggcatacgat

SEQ ID NO: 3914 - DNA, 225 bp, unidentified
  misc_feature 1..225: note = bacterial strain Ascusb_4596 encodes 16S rRNA
  source 1..225: mol_type = genomic DNA
agagtttgatcatggctcaggatgaacgctggcggcgtgcctaacacatgcaagtcgaacgaagctcttgatgcggagatttcggtcaaagcggatagatgactgagtggcggacgggtgagtaacgcgtgggcaacctgccctatactgggggatagcagttggaaacgactgataataccgcataagcgcacggaagggcatccttctgtgtgaaaagattta

SEQ ID NO: 3915 - DNA, 225 bp, unidentified
  misc_feature 1..225: note = bacterial strain Ascusb_4227 encodes 16S rRNA
  source 1..225: mol_type = genomic DNA
agagtttgatcctggctcaggacgaacgcttgcggcgtgcctaagaaatgcaagtcgagcgaagtccagggtgcttgcacccgaagacttagcggcgaacggtcgcgtaacacgtaagcaacctgccctaaagacggggatagcccaccgaaaggtggattaataccggatgtgaacacttattcgcatgtattagtgtttaaagcagcaatgcgctttaggatg

SEQ ID NO: 3916 - DNA, 225 bp, unidentified
  misc_feature 1..225: note = bacterial strain Ascusb_4150 encodes 16S rRNA
  source 1..225: mol_type = genomic DNA
agagtttgatcctggctcagagttaacgctggcatcgtgcataacacatgcaagtcgaacgggacttagtttgtagcttgctatagactaagtttagtggcagacgggtgagtaatgtataaggaacctacctctgagtggggaataacagtccgaaaggattgctaataccccataacataacttagtggcatcactgagttatcaaagatttatcgcttggag

SEQ ID NO: 3917 - DNA, 225 bp, unidentified
  misc_feature 1..225: note = bacterial strain Ascusb_3902 encodes 16S rRNA
  source 1..225: mol_type = genomic DNA
agagtttgatcatggctcaggatgaacgctagctacaggcttaacacatgcaagtcgaggggcagcatgaagtcagcttgctgactttgatggcgaccggcgcacgggtgcgtaacacgtatccaatctacccatctgctcggggatagcctttcgaaagaaagattaatacccgatggtttcgttttttcgcatgagaagatgaataaagatttatcggcgatg

SEQ ID NO: 3918 - DNA, 225 bp, unidentified
  misc_feature 1..225: note = bacterial strain Ascusb_1486 encodes 16S rRNA
  source 1..225: mol_type = genomic DNA
agagtttgatcatggctcaggacgaacgctggcggcacgcttaacacatgcaagtcgaacggagttattggaagcttgcttttaataacttagtggcggacgggtgagtaacacgtgagcaacctgcctttgagagcggaatagcttctggaaacggatggtaataccgcataacattaccggaccgcatgatctggtaatcaaagatttatcgctcaaagatgg

SEQ ID NO: 3919 - DNA, 225 bp, unidentified
  misc_feature 1..225: note = bacterial strain Ascusb_2584 encodes 16S rRNA
  source 1..225: mol_type = genomic DNA
agagtttgatcatggctcaggatgaacgctggcggcgtgcttaacacatgcaagtcgaacggagttatgtttttgagatcttcggatggatgagatataacttagtggcggacgggtgagtaacgcgtggggaacctgccccataccgggggacaacagttggaaacgactgctaataccgcataagcgcacgggaggacatcctccagtgtgaaaaactccggt

SEQ ID NO: 3920 - DNA, 225 bp, unidentified
  misc_feature 1..225: note = bacterial strain Ascusb_17128 encodes 16S rRNA
  source 1..225: mol_type = genomic DNA
agagtttgatcatggctcaggatgaacgctagctacaggcttaacacatgcaagtcgaggggcagcgagaggaaagcttgctttccttgtcggcgaccggcgcacgggtgagtaacgcgtatccaaccttccccttagtagggcatagcccggcgaaagtcggattaacaccctatgttatccgaagaggacatctgaactggattaaaggtttaccgctaaggg

SEQ ID NO: 3921 - DNA, 225 bp, unidentified
  misc_feature 1..225: note = bacterial strain Ascusb_38 encodes 16S rRNA
  source 1..225: mol_type = genomic DNA
agagtttgatcatggctcagagcgaacgctggcggcatgcttaacacatgcaagtcgcacgaaggtttcggccttagtggcggacgggtgagtaacgcgtaggtatctatccatgggtgggggataacactgggaaactggtgctaataccgcatgacacctgagggtcaaaggcgcaagtcgcctgtggaggagcctgcgtttgattagctagttggtggggta

SEQ ID NO: 3922 - DNA, 225 bp, unidentified
  misc_feature 1..225: note = bacterial strain Ascusb_12323 encodes 16S rRNA
  source 1..225: mol_type = genomic DNA
agagtttgatcatggctcaggacgaacgctggcggcgtgcctaacacatgcaagtcgaacggaactgacgccggttcttcggaaccattgtcagtttagtggcggacgggtgagtaacgcgtgagtaacctgcctctgagaggggaataacgttctgaaaagaacgctaataccgcataacatagtgaagtcgcatggctttgctatcaaagattttatcgctcg

SEQ ID NO: 3923 - DNA, 225 bp, unidentified
  misc_feature 1..225: note = bacterial strain Ascusb_4420 encodes 16S rRNA
  source 1..225: mol_type = genomic DNA
agagtttgatcatggctcaggacgaacgctggcggcgtgcctaacacatgcaagtcgaacggagttattttgacagattccttcgggatgacggatttataacttagtggcggacgggtgagtaacgcgtgagtaacctgcctctaagaggggaataacgttctgaaaagatcgctaataccgcataacatattgaagccgcatgactttgatatcaaagattta

SEQ ID NO: 3924 - DNA, 225 bp, unidentified
  misc_feature 1..225: note = bacterial strain Ascusb_2347 encodes 16S rRNA
  source 1..225: mol_type = genomic DNA
agagtttgatcatggctcaggacgaacgctggcggcgtgcctaacacatgcaagtcgaacggagcgaaagaagcttgcttctggcgcttagtggcggacgggtgagtaacacgtgagtaacctgcctttcagaggggaataatgtttggaaacggacactaataccgcataatgtattttaaccgcatggttgagataccaaaggagcaatccgctgaaagatgg

SEQ ID NO: 3925 - DNA, 225 bp, unidentified
  misc_feature 1..225: note = bacterial strain Ascusb_12793 encodes 16S rRNA
  source 1..225: mol_type = genomic DNA
agagtttgatcatggctcaggatgaacgctggcggcgtgcctaacacatgcaagtcgaacgaagcactttagccgatccttcgggtgaagctttagtgactgagtggcggacgggtgagtaacgcgtgggtaacctgccctgtacagggggataacagtcagaaatgactgctaataccgcataagcgcacgagaggacatcctcttgtgtgaaaaactccggtg

SEQ ID NO: 3926 - DNA, 225 bp, unidentified
  misc_feature 1..225: note = bacterial strain Ascusb_15051 encodes 16S rRNA
  source 1..225: mol_type = genomic DNA
agagtttgatcatggctcaggatgaacgctagctacaggcttaacacatgcaagtcgaggggtaacattggcggagcttgctctgccagatgacgaccggcgcacgggtgagtaacgcgtatccaacctgcccatgggtcagggataaacttccgaaagggagcctaatacctgatgttgtgagaagaaggcctctgattttcacgaaaggcttcggtcgccgat

SEQ ID NO: 3927 - DNA, 225 bp, unidentified
  misc_feature 1..225: note = bacterial strain Ascusb_1988 encodes 16S rRNA
  source 1..225: mol_type = genomic DNA
agagtttgatcatggctcagaacgaacgctggcggcatggattaggcatgcaagtcgaacgggagcagcaatgctccagtggcgcaagggtgaggaacacgtgaacaacctgccttcgagttggggatagcttctggaaacgggagataataccgaataacatcaccgggtcgcatgacctggtgatcaaagcagcaatgcgcttgaagaggggttcgcgtccca

SEQ ID NO: 3928 - DNA, 225 bp, unidentified
  misc_feature 1..225: note = bacterial strain Ascusb_5474 encodes 16S rRNA
  source 1..225: mol_type = genomic DNA
agagtttgatcctggctcaggatgaacgctagctacaggcttaacacatgcaagtcgaggggcagcatggtcttagcttgctaagactgatggcgaccggcgcacgggtgagtaacgcgtatccaaccttccccatagtagaggatagcccggcgaaagtcggattaatactctatgttcttcaatgcagacatctaggttgaagcaaagattcatcgctatggg

SEQ ID NO: 3929 - DNA, 225 bp, unidentified
  misc_feature 1..225: note = bacterial strain Ascusb_12866 encodes 16S rRNA
  source 1..225: mol_type = genomic DNA
agagtttgatcatggctcaggatgaacgctagctacaggcttaacacatgcaagtcgaggggcatcatggagtcagcttgctgactttgatggcgaccggcgcacgggtgagtaacgcgtatccaaccttccccctaccagaggatagcccggcgaaagtcggattaatactctatgttttccttgttgggcatcttgtgaggaacaaagactcgtcggtatggg

SEQ ID NO: 3930 - DNA, 225 bp, unidentified
  misc_feature 1..225: note = bacterial strain Ascusb_2454 encodes 16S rRNA
  source 1..225: mol_type = genomic DNA
agagtttgatcctggctcaggatgaacgctagctacaggcttaacacatgcaagtcgaggggcatcatgatcaaagcttgctttgattgatggcgaccggcgcacgggtgagtaacgcgtatccaaccttccccctagtagggcatagcccggcgaaagtcggattaataccctatgttttccaatgaggacatctgagctggaacaaagattcatcgctagggg

SEQ ID NO: 3931 - DNA, 225 bp, unidentified
  misc_feature 1..225: note = bacterial strain Ascusb_15659 encodes 16S rRNA
  source 1..225: mol_type = genomic DNA
agagtttgatcatggctcaggatgaacgctagctacaggcctaacacatgcaagtcgaggggcagcgggaaggaagcttgctttctttgccggcgaccggcgcacgggtgcgtaacgcgtatcgaacctcccccatactcgggaatagccttgcgaaagtaagattaatgcccgatggtctcagaatatgacatcatgctttgagtaaagattcatcggtatggg

SEQ ID NO: 3932 - DNA, 225 bp, unidentified
  misc_feature 1..225: note = bacterial strain Ascusb_2348 encodes 16S rRNA
  source 1..225: mol_type = genomic DNA
agagtttgatcatggctcaggatgaacgctggcggcgtgcctaacacatgcaagtcgaacgaggtatgctggaatgagattcgtcgaatgaaagcataccgagtggcggatgggtgagtaacgcgtggagaacctgccctatgcagggggataacagctggaaacggctgacaataccgcataagcgcacgatgccgcatggcatagagcgaaaagatttatcgg

SEQ ID NO: 3933 - DNA, 225 bp, unidentified
  misc_feature 1..225: note = bacterial strain Ascusb_7028 encodes 16S rRNA
  source 1..225: mol_type = genomic DNA
agagtttgatcatggctcaggatgaacgctagctacaggcttaacacatgcaagtcgaggggcagcatcaggttagcttgctaacttggatggcgaccggcgcacgggtgagtaacgcgtatccaaccttccccctgctcagggatagcccgctgaaaggcggattaacacctgatagcttcactagatggcatctgacggtgaataaagataacggcaagggat

SEQ ID NO: 3934 - DNA, 225 bp, unidentified
  misc_feature 1..225: note = bacterial strain Ascusb_2352 encodes 16S rRNA
  source 1..225: mol_type = genomic DNA
agagtttgatcatggctcaggacgaacgctggcggcacgcttaacacatgcaagtcgaacggagaaattggatttattcattttcttagtggcggacgggtgagtaacacgtgagcaacctgcctttgagaggggaatagcttcgggaaactgatggtaataccctataacatatatttgccgcatggcagatatatcaaagatttatcactcaaagatgggctc

SEQ ID NO: 3935 - DNA, 225 bp, unidentified
  misc_feature 1..225: note = bacterial strain Ascusb_2275 encodes 16S rRNA
  source 1..225: mol_type = genomic DNA
agagtttgatcctggctcagaacgaacgctggcggcgcgtcttaagcatgcaagtcgagcggtaagttggaagcttgcttctaacctagagcggcggactggtgagtaacgcgtgggtgacgtacctttgtgacggggacagctcctagaaataggagataataccggatacgctgtatgttgtcagaggacatacaggaaaggatcttttgattcgcacagaga

SEQ ID NO: 3936 - DNA, 225 bp, unidentified
  misc_feature 1..225: note = bacterial strain Ascusb_13726 encodes 16S rRNA
  source 1..225: mol_type = genomic DNA
agagtttgatcatggctcaggatgaacgctggcggcatgcctaagacatgcaagtcgaacgaggcgaccttaagaagactgagtgcttgcacgaagttggaagaagatcatcgcctagtggcagacgggtgagtaacacgtgggtaacctaccttaaagttggggataacagttggaaacgattgctaataccgaataagatgtacttgtacattgaaagaagcc

SEQ ID NO: 3937 - DNA, 225 bp, unidentified
  misc_feature 1..225: note = bacterial strain Ascusb_476 encodes 16S rRNA
  source 1..225: mol_type = genomic DNA
agagtttgatcatggctcaggacgaacgctggcggcacgcttaacacatgcaagtcgaacggagaatatttggtttactgagtattcttagtggcggacgggtgagtaacacgtgagcaacctgcctttgagagagggatagcttctggaaacggatggtaatacctcataacatacagagaccgcatgatttttgtatcaaagatttatcactcaaagatgggc

SEQ ID NO: 3938 - DNA, 225 bp, unidentified
  misc_feature 1..225: note = bacterial strain Ascusb_3632 encodes 16S rRNA
  source 1..225: mol_type = genomic DNA
agagtttgatcctggctcaggacgaacgctggcggcgtgcttaacacatgcaagtcgaacggactgagctccttcgggggcgaaagttagtggcgaacgggtgagtaacgcgtgaggaacctgcctttcagagggggacaacagttggaaacgactgctaataccgcataacatgtttctttcgcatgaaggaaacatcaaagattttatcgctgaaagatggcc

SEQ ID NO: 3939 - DNA, 225 bp, unidentified
  misc_feature 1..225: note = bacterial strain Ascusb_6159 encodes 16S rRNA
  source 1..225: mol_type = genomic DNA
agagtttgatcatggctcaggatgaacgctggcggcgtgcctaatacatgcaagtcgaacgaggttagcaataaccgagtggcgaacgggtgagtaacacgtaggtaacctgccttacagtttgggatacccgagggaaaccttggctaataccgaataattcttcgagaggcatctcttgaagctaaaaggggcctttaaagcctcgctgaatgatggacctgc

SEQ ID NO: 3940 - DNA, 225 bp, unidentified
  misc_feature 1..225: note = bacterial strain Ascusb_4894 encodes 16S rRNA
  source 1..225: mol_type = genomic DNA
agagtttgatcatggctcaggatgaacgctggcggcgtgcttaacacatgcaagtcgaacgaagcagcgggaacgaagttttcggactaagatcctgctgacttagtggcggacgggtgagtaacgcgtggataacctgccgtatgcagggggacaacagctggaaacggctgctaataccgcataagcgcacagatgcgcatgcatcagtgtgaaaagtcttgg

SEQ ID NO: 3941 - DNA, 225 bp, unidentified
  misc_feature 1..225: note = bacterial strain Ascusb_12833 encodes 16S rRNA
  source 1..225: mol_type = genomic DNA
agagtttgatcatggctcaggatgaacgctagcggcaggcttaacacatgcaagtcgaggggcagcgggtgtagcaatacatgccggcgaccggcgcaagggtgcgtaacgcgtgagcgacatgcccgtgacctggggataaccgatggaaacgtcgcctaacccccaatacgatacacattcgcatggacgtgtattgaaaaccttggtggtcacggattggct

SEQ ID NO: 3942 - DNA, 225 bp, unidentified
  misc_feature 1..225: note = bacterial strain Ascusb_2917 encodes 16S rRNA
  source 1..225: mol_type = genomic DNA
agagtttgatcctggctcaggataaacgctggcggcgtgcctaatacatgcaagtcgaacggagagagacaagcttgcttgtcgaacttagtggcgaacgggtgagtaatacataagcaacctgcccataaagtccgggataactttgggaaactggaattaataccggataggtaacgaggacgcatgttcttgttattaaaggtgagaaacgctaatggatgg

SEQ ID NO: 3943 - DNA, 225 bp, unidentified
  misc_feature 1..225: note = bacterial strain Ascusb_3499 encodes 16S rRNA
  source 1..225: mol_type = genomic DNA
agagtttgatcctggctcaggatgaacgctagcggcaggcttaacacatgcaagtcgcggggcagcgagggtagcaatacctgtcggcgaccggcggaagggtgcgtaacgcgtgagcaacttgcccgtggttgggggataaccggtggaaacgccgcctaataccccgtaacaattggaatcacatgtttctgatttgataggtagcaatactgtccacggata

SEQ ID NO: 3944 - DNA, 225 bp, unidentified
  misc_feature 1..225: note = bacterial strain Ascusb_3047 encodes 16S rRNA
  source 1..225: mol_type = genomic DNA
agagtttgatcctggctcaggatgaacgctagctacaggcttaacacatgcaagtcgaggggcagcatgagagtagcttgctactcttgatggcgaccggcgcacgggtgcgtaacacgtatccaatctacccatggctcgggaatagcctttcgaaagaaagattaatgcccgatggtctgtgattgagacatctcgattacagtaaagattaatcggcgatgg

SEQ ID NO: 3945 - DNA, 225 bp, unidentified
  misc_feature 1..225: note = bacterial strain Ascusb_4620 encodes 16S rRNA
  source 1..225: mol_type = genomic DNA
agagtttgatcctggctcaggatgaacgctggcggcgtgcctaacacatgcaagtcgaacggtgatggtttgatattttcggatggataatcatcatagtggcggacgggtgagtaacgcgtggataacctgcctctcactgggggatagcagctggaaacggctggtaataccgcatacgatcctttaatcgcatgattgaaggaagaaagatttatcggtgag

SEQ ID NO: 3946 - DNA, 225 bp, unidentified
  misc_feature 1..225: note = bacterial strain Ascusb_9412 encodes 16S rRNA
  source 1..225: mol_type = genomic DNA
agagtttgatcatggctcagaacgaacgccggcggcgcgtcttaagcatgcaagtcgagcgggattgaggggcttgcccctcatgagagcggcggactggtgagtaacgcgtgggcgacgtaccccctgcaccgggacagccggcagaaatgccgggtgatacgggatgaggtcgcagcctgtggtgggctgcgaggaaagcggctacggccgcggcaggggaac

SEQ ID NO: 3947 - DNA, 225 bp, unidentified
  misc_feature 1..225: note = bacterial strain Ascusb_1654 encodes 16S rRNA
  source 1..225: mol_type = genomic DNA
agagtttgatcatggctcaggacgaacgctggcggcgtgcttaacacatgcaagtcgaacggagaaccccggatgaaattttcggatggattctgggaattctcagtggcggacgggtgagtaacgcgtgagcaatctgcctcagagagggggacaacagctggaaacggctgctaataccgcataagaccacactacagcattgtagaggggtaaaaggagtga

SEQ ID NO: 3948 - DNA, 225 bp, unidentified
  misc_feature 1..225: note = bacterial strain Ascusb_2155 encodes 16S rRNA
  source 1..225: mol_type = genomic DNA
agagtttgatcctggctcaggatgaacgctggcggcgtgcctaacacatgcaagtcgaacgagaataccctgatgtttcggcggatgagtattcgagtggcggacgggtgagtaacgcgtgggtaacctgccctgtaccgggggataacagttagaaatgactgctaataccgcataagcgcacagtaccgcatggtacagtgtgaaaaactccggtggtacagg

SEQ ID NO: 3949 - DNA, 225 bp, unidentified
  misc_feature 1..225: note = bacterial strain Ascusb_4126 encodes 16S rRNA
  source 1..225: mol_type = genomic DNA
agagtttgatcatggctcaggatgaacgctagcgacaggcctaacacatgcaagtcgagggtgattattagtttagcttgctaaattggtatgaaaccggcgcacgggtgcgtaacaggtatgcaatctgtcctataccggggaatagcccactgaaaagtggattaatgctccatgcgccatttgagggcatccttagatggtgaaactaaagggtatagggtg

SEQ ID NO: 3950 - DNA, 225 bp, unidentified
  misc_feature 1..225: note = bacterial strain Ascusb_2425 encodes 16S rRNA
  source 1..225: mol_type = genomic DNA
agagtttgatcctggctcaggatgaacgctagctacaggcttaacacatgcaagtcgaggggcagcatgggagtagcttgctactcctgatggcgaccggcggatgggtgcgcaacgcgtgtccaacctgccccagtcccggggatagcccttggaaacgaggattaacacccgatggtgctgcatagccgcatggcttagcagctaaattgcgaggactgggat

SEQ ID NO: 3951 - DNA, 225 bp, unidentified
  misc_feature 1..225: note = bacterial strain Ascusb_3365 encodes 16S rRNA
  source 1..225: mol_type = genomic DNA
agagtttgatcatggctcaggatgaacgctggcggcgtgcttaacacatgcaagtcgaacgaggcttgtcgacggaaattttcggatggaagacggcatgaccgagtggcggacgggtgagtaacgcgtggggaacctgccccattccgggggataccagttggaaacgactgttaataccgcataagcgcacgggaaggcatcttccagtgtgaaaaactgagg

SEQ ID NO: 3952 - DNA, 225 bp, unidentified
  misc_feature 1..225: note = bacterial strain Ascusb_6351 encodes 16S rRNA
  source 1..225: mol_type = genomic DNA
agagtttgatcatggctcaggatgaacgctggcggcatgcctaagacatgcaagtcgaacgagacggcccaatgaagatggagtgcttgcacaaagttagatttggattcccgtctagtggcgcaagggtgagtaacacgtgggtaatctaccttcgagtctggaataacagttagaaatgattgctaatgccggattatacatccaaagatatactatggattt

SEQ ID NO: 3953 - DNA, 225 bp, unidentified
  misc_feature 1..225: note = bacterial strain Ascusb_3851 encodes 16S rRNA
  source 1..225: mol_type = genomic DNA
agagtttgatcatggctcaggatgaacgctagctacaggcttaacacatgcaagtcgaggggcagcatggaggaagcttgcttcctctgatggcgaccggcgcacgggtgagtaacgcgtatccaacctgcccattactctgggatagcccgccgaaaggcgaattaataccggatagtgttcttagatggcatcagacaaggactaaaggttttttccggtaat

SEQ ID NO: 3954 - DNA, 225 bp, unidentified
  misc_feature 1..225: note = bacterial strain Ascusb_18558 encodes 16S rRNA
  source 1..225: mol_type = genomic DNA
agagtttgatcatggctcaggacgaacgctggcggcgtgcttcatacatgcaagtcgaacgataaggttccttcgggaatacataagtggcggacgggtgagtaatgtgtagagaatctgccctgaagtgggggacaacagagggaaacttctgctaataccccatatgagcgtagttgtgatactattcttgaaagatttatcgcttcaggatgagtctgcatc

SEQ ID NO: 3955 - DNA, 225 bp, unidentified
  misc_feature 1..225: note = bacterial strain Ascusb_3172 encodes 16S rRNA
  source 1..225: mol_type = genomic DNA
agagtttgatcatggctcaggacgaacgctggcggcgtgcttaacacatgcaagtcgaacgaggatatactgcggaaggcttcggctggaaggggtgtattcgagtggcggacgggtgagtaacgcgtgagcaatctgtcccagacaggggaataacacttggaaacaggtgctaataccgcataagaccacagtatcgcatggtacagaggtaaaaggagcaat

SEQ ID NO: 3956 - DNA, 225 bp, unidentified
  misc_feature 1..225: note = bacterial strain Ascusb_4766 encodes 16S rRNA
  source 1..225: mol_type = genomic DNA
agagtttgatcatggctcaggacgaacgctggcggcgtgcttaacacatgcaagtcgaacgaggatagattggaagcttgcttttgatttattcgagtggcggacgggtgagtaacgcgtgaataatctgtcctatacagggggataacgcatcgaaagatgtgctaataccgcgtaggaccacgatgtcgcatggcattgaggtgaaaggagcaatccagtata

SEQ ID NO: 3957 - DNA, 225 bp, unidentified
  misc_feature 1..225: note = bacterial strain Ascusb_3900 encodes 16S rRNA
  source 1..225: mol_type = genomic DNA
agagtttgatcatggctcaggacgaacgctggcggcgtgcctaacacatgcaagtcgaacggaactattatgaaggattcttcggatgacggatttttagtttagtggcggacgggtgagtaacgcgtgagtaacctgcctttgagaggggaataacgttctgaaaagaacgctaataccgcataacgtatgttggtcgcatggccgatgtaccaaagattttat

SEQ ID NO: 3958 - DNA, 225 bp, unidentified
  misc_feature 1..225: note = bacterial strain Ascusb_2677 encodes 16S rRNA
  source 1..225: mol_type = genomic DNA
agagtttgatcatggctcaggatgaacgctagcgacaggcctaacacatgcaagtcgagcggcagcacctcgggtggcgagcggcgcacgggtgagtaacgcgtatgtaacctgcccatgagtgggggatagcccggtgaaaaccggattaataccccatgataccattgtctgacatcatttaatggttaaagattcattgctcatggatggacatgcgttgga

SEQ ID NO: 3959 - DNA, 225 bp, unidentified
  misc_feature 1..225: note = bacterial strain Ascusb_15958 encodes 16S rRNA
  source 1..225: mol_type = genomic DNA
agagtttgatcctggctcaggacgaacgctggcggcacgcttaacacatgcaagtcgaacggagataatttgagtttacttagattatcttagtggcggacgggtgagtaacacgtgagcaacctaccttagagagagggatagcttctggaaacggatggtaatacctcataacataaccgaaccgcatgatttggttatcaaagatttatcactctgagatgg

SEQ ID NO: 3960 - DNA, 225 bp, unidentified
  misc_feature 1..225: note = bacterial strain Ascusb_1476 encodes 16S rRNA
  source 1..225: mol_type = genomic DNA
agagtttgatcatggctcaggacgaacgctggcggcacgcttaacacatgcaagtcgaacggagaatttttggtttactagaaattcttagtggcggacgggtgagtaacacgtgagcaacctgcctctgagagggggatagcttctggaaacggatggtaataccctatgacataacgaagccgcatgactttgttatcaaagatttatcactcagagatgggc

SEQ ID NO: 3961 - DNA, 225 bp, unidentified
  misc_feature 1..225: note = bacterial strain Ascusb_6514 encodes 16S rRNA
  source 1..225: mol_type = genomic DNA
agagtttgatcatggctcaggatgaacgctagctacaggcttaacacatgcaagtcgaggggcatcatgatcaaagcttgctttgattgatggcgaccggcgcacgggtgagtaacgcgtatccaaccttccccctagtagggcatagcccggcgaaagtcggattaataccctatgttttccgttgatggcatctgacatggaacaaagattcatcgctagggg

SEQ ID NO: 3962 - DNA, 225 bp, unidentified
  misc_feature 1..225: note = bacterial strain Ascusb_5993 encodes 16S rRNA
  source 1..225: mol_type = genomic DNA
agagtttgatcatggctcaggatgaacgctggcggcgtgcctaacacatgcaagtcgaacggagagattttcttcggaggatctcttagtggcggacgggtgagtaacgcgtgggtaacctgccttacaccgggggacaacagttggaaacgactgctaataccgcataagcccacgggaccgcatggtccagtgagaaaagattcattggtgtaagatgggccc

SEQ ID NO: 3963 - DNA, 225 bp, unidentified
  misc_feature 1..225: note = bacterial strain Ascusb_6753 encodes 16S rRNA
  source 1..225: mol_type = genomic DNA
agagtttgatcctggctcagaacgaacgctggcggcgcgtcttaagcatgcaagtcgggcgggattggggagcttgctccccatgagagcggcggactggcgaggaacgcgtgggcgacgcgccctccggagggggacagcccgtggaaacacggggtaataccccatgacatggttggcttggaggcctatcatcaaaggagcttcggctccgccgggggagcg

SEQ ID NO: 3964 - DNA, 225 bp, unidentified
  misc_feature 1..225: note = bacterial strain Ascusb_5168 encodes 16S rRNA
  source 1..225: mol_type = genomic DNA
agagtttgatcctggctcaggatgaacgctagctacaggcttaacacatgcaagtcgaggggcagcatgagatcagcttgctgatcttgatggcgaccggcgcacgggtgagtaacgcgtatccaaccttccccctgctcagggatagcccgctgaaaggcggattaacacctgatagcttcactagatggcatctgacggtgaataaagataacggcaagggat

SEQ ID NO: 3965 - DNA, 225 bp, unidentified
  misc_feature 1..225: note = bacterial strain Ascusb_5300 encodes 16S rRNA
  source 1..225: mol_type = genomic DNA
agagtttgatcatggctcaggatgaacgctagcggcaggcttaacacatgcaagtcgaggggcagcgcggaagtagtaatacttttggcggcgaccggcgcaagggtgcgtaacgcgtgagcgacatgcccgtaaccgggggataaccgatggaaacgtcgcctaaccccccataacaccagtttctgcatggtgactggttgaaaactctggtggttacggatt

SEQ ID NO: 3966 - DNA, 225 bp, unidentified
  misc_feature 1..225: note = bacterial strain Ascusb_1932 encodes 16S rRNA
  source 1..225: mol_type = genomic DNA
agagtttgatcatggctcaggataaacgctggcggcgcacataagacatgcaagtcgaacggacttaaccgatagtttactattggagcggttagtggcggactggtgagtaacgcgtaagcaatctgcctattagagggggataacagtgagaaattactgctaataccgcatatgctgtgagtaccacatggtacaaacaggaaaggagcaatccactaatag

SEQ ID NO: 3967 - DNA, 225 bp, unidentified
  misc_feature 1..225: note = bacterial strain Ascusb_21072 encodes 16S rRNA
  source 1..225: mol_type = genomic DNA
agagtttgatcatggctcaggatgaacgctggcggcatgcctaagacatgcaagtcgaacgaagtagcctattgaagattgagtgcttgcacaagattggatttagattcctacttagtggcagacgggtgagtaacacgtgggtaatctacctcagagactgggataacgtttagaaatgaacgctaataccggatgatttgtaaatggataactatttatact

SEQ ID NO: 3968 - DNA, 225 bp, unidentified
  misc_feature 1..225: note = bacterial strain Ascusb_12507 encodes 16S rRNA
  source 1..225: mol_type = genomic DNA
agagtttgatcctggctcaggatgaacgctagctacaggcttaacacatgcaagtcgaggggcatcggggatctagcttgctagatctgccggcgaccggcgcacgggtgagtaacgcgtatccaaccttccccccagtagggcatagcccggcgaaagtcggattaataccctatgttgtgtcatgaggacatctgaataacaccaaagatttatcgctggggg

SEQ ID NO: 3969 - DNA, 225 bp, unidentified
  misc_feature 1..225: note = bacterial strain Ascusb_10532 encodes 16S rRNA
  source 1..225: mol_type = genomic DNA
agagtttgatcatggctcagaacgaacgctggcggcgcgtcttaagcatgcaagtcgggcggcaaggatgtgcttgcacatccctagagcggcggactggtgagtaacgcgtgggtgacgcaccctccggacggggatagcctgcagaaatgcagggtaataccggatacggttccgtgtcctggaagcacggaaggaaaggagcttcggctccgccggaggagc

SEQ ID NO: 3970 - DNA, 225 bp, unidentified
  misc_feature 1..225: note = bacterial strain Ascusb_1523 encodes 16S rRNA
  source 1..225: mol_type = genomic DNA
agagtttgatcatggctcaggatgaacgctggcggcgtgcttaacacatgcaagtcgaacggagcttataatgggaagcttgctttccgccttaagcttagtggcggacgggtgagtaacgcgtgagcaacctgccctcgagtggggaataacatcgagaaatcggtgctaataccgcataatatggagagaccgcatgatctttccatcaaaggatttattcgc

SEQ ID NO: 3971 - DNA, 225 bp, unidentified
  misc_feature 1..225: note = bacterial strain Ascusb_5676 encodes 16S rRNA
  source 1..225: mol_type = genomic DNA
agagtttgatcatggctcaggatgaacgctggcggcgtgcttaacacatgcaagtcgaacgagggttaccggttgaagttttcggacggaaactggtaattcctagtggcggacgggtgagtaacgcgtggggaacctgccccattccgggggataccagttggaaacgactgttaataccgcataagcgcacggtactgcatggtacagtgtgaaaaactccgg

SEQ ID NO: 3972 - DNA, 225 bp, unidentified
  misc_feature 1..225: note = bacterial strain Ascusb_20 encodes 16S rRNA
  source 1..225: mol_type = genomic DNA
agagtttgatcatggctcaggatgaacgctggcggcgtgcctaacacatgcaagtcgagcggagttaagttttcggatttaacttagcggcggatgggtgagtaacacgtgggtaacctgccctgcacagggggataacagttggaaacgactgttaataccgcatatgcacacagcaccgcatggtgccgggtggaaagatttatcggtgcaggatgggcccgc

SEQ ID NO: 3973 - DNA, 225 bp, unidentified
  misc_feature 1..225: note = bacterial strain Ascusb_4601 encodes 16S rRNA
  source 1..225: mol_type = genomic DNA
agagtttgatcctggctcagagttaacgctggcatcgtgcataacacatgcaagtcgaacgggactttgctttgtagcaatacagagtaaagtttagtggcagacgggtgagtaatgtatgggaaatctacctttgagtggggaataacggtccgaaaggattgctaataccccataacatttctcggtggcatcacttggaaatcaaagatttatcgcttgaag

SEQ ID NO: 3974 - DNA, 225 bp, unidentified
  misc_feature 1..225: note = bacterial strain Ascusb_624 encodes 16S rRNA
  source 1..225: mol_type = genomic DNA
agagtttgatcatggctcaggatgaacgctagctacaggcttaacacatgcaagtcgaggggcagcgagaagaaagcttgctttctttgtcggcgaccggcgcacgggtgagtaacgcgtatccaaccttccccttagtagaggatagcccggcgaaagtcggattaatactctatgttattcgtagatgacatctgaaatgaatcaaaggtttaccgctaaggg

SEQ ID NO: 3975 - DNA, 225 bp, unidentified
  misc_feature 1..225: note = bacterial strain Ascusb_1754 encodes 16S rRNA
  source 1..225: mol_type = genomic DNA
agagtttgatcatggctcaggataaacgctggcggcgtgcttaacacatgcaagtcgaacggagtggttctcccgagaagtgacgaagcttgcttcggaatgactcatttgaatcacttagtggcggacgggtgagtaacgcgtgggtaacctgccctatactgggggatagcagttggaaacgactgataataccgcataagcacacagcatcgcatgttgcag

SEQ ID NO: 3976 - DNA, 225 bp, unidentified
  misc_feature 1..225: note = bacterial strain Ascusb_7814 encodes 16S rRNA
  source 1..225: mol_type = genomic DNA
agagtttgatcatggctcaggatgaacgctagctacaggcttaacacatgcaagtcgaggggcagcatgctggtagcttgctatcagcgatggcgaccggcgcacgggtgcgtaacacgtatccaatctacccatggctcggggatagcctttcgaaagaaagattaatacccgatggtctgcgattgagacatctcgattacagtaaagattaatcggcgatgg

SEQ ID NO: 3977 - DNA, 225 bp, unidentified
  misc_feature 1..225: note = bacterial strain Ascusb_629 encodes 16S rRNA
  source 1..225: mol_type = genomic DNA
agagtttgatcatggctcaggatgaacgctggcggcgtgcctaacacatgcaagtcgaacgaggtgagaccttcgggttgatccgagtggcggacgggtgagtaacgcgtgggtaacctaccctgtacagggggacaacagttggaaacgactgctaataccgcataagcccacgggaccgcatggtcctgtgagaaaagttcaggcggtacaggatggacccgc

SEQ ID NO: 3978 - DNA, 225 bp, unidentified
  misc_feature 1..225: note = bacterial strain Ascusb_6114 encodes 16S rRNA
  source 1..225: mol_type = genomic DNA
agagtttgatcctggctcaggatgaacgctggcggcgtgcttaacacatgcaagtcgaacgaagcgtcccgcccgatgaagtggagtacttgtacaaagtggattcaattgggatgacttagtggcggacgggtgagtaacgcgtgggtaacctgccttacacagggggacaacagttggaaacgactgctaataccgcataacccgctagtaccgcatggtaca

SEQ ID NO: 3979 - DNA, 225 bp, unidentified
  misc_feature 1..225: note = bacterial strain Ascusb_5038 encodes 16S rRNA
  source 1..225: mol_type = genomic DNA
agagtttgatcatggctcaggatgaatgctggcggcgtgcctaatacatgcaagtcgagcggtaacagggcttcaccgtttccttgacgcacttggccatagagcaagtagttgaattcgagggaacagtgaagctgctgacgagcggcggacggctgagtaacgcgtgggaacggaccccaaactgagggataacgcaccgaaaggtgtgctaataccgcatgt

SEQ ID NO: 3980 - DNA, 225 bp, unidentified
  misc_feature 1..225: note = bacterial strain Ascusb_4910 encodes 16S rRNA
  source 1..225: mol_type = genomic DNA
agagtttgatcctggctcaggacgaacgctggcggcgtgcttaacacatgcaagtcgaacgagaatcactggaaggagttttcggacaacggaaggtgaggacagtggcggacgggtgagtaacgcgtgaggaacctgcctttcagagggggacaacagttggaaacgactgctaataccgcataacgcatagttgtcgcatggcgattatgccaaagatttatc

SEQ ID NO: 3981 - DNA, 225 bp, unidentified
  misc_feature 1..225: note = bacterial strain Ascusb_18736 encodes 16S rRNA
  source 1..225: mol_type = genomic DNA
agagtttgatcctggctcaggatgaacgctggcggcacgcctaacacatgcaagtcgaacggtgttattgaagcttgctttgataacatagtggcggacgggtgagtaacacgtgagcaacctgccttcaagtgagggatagcttctggaaacggatggtaataccttataaaataattttatcgcatggtagaattatcaaagatttattgcttgaagatgggc

SEQ ID NO: 3982 - DNA, 225 bp, unidentified
  misc_feature 1..225: note = bacterial strain Ascusb_175 encodes 16S rRNA
  source 1..225: mol_type = genomic DNA
agagtttgatcatggctcaggatgaacgctggcggcgtgcctaacacatgcaagtcgaacgaagcagtcctctccggagggctgactgagtggcggacgggtgagtaacgcgtgggtaacctgccctgtacagggggataacagtcagaaatgactgctaataccgcataagcgcacgggaagacatctttctgtgtgaaaaactccggtggtacaggatgggcc

SEQ ID NO: 3983 - DNA, 225 bp, unidentified
  misc_feature 1..225: note = bacterial strain Ascusb_3086 encodes 16S rRNA
  source 1..225: mol_type = genomic DNA
agagtttgatcatggctcaggatgaacgctggcggcgtgcctaacacatgcaagtcgaacggagtatattcgctgcagagatttcggtcgaagcttgagtatacttagtggcggacgggtgagtaacgcgtgggcaacctgcctcatactgggggatagcagttggaaacgactgataaaaccgcataagcgcacggtaccgcatggtacagtgtgaaaaactcc

SEQ ID NO: 3984 - DNA, 225 bp, unidentified
  misc_feature 1..225: note = bacterial strain Ascusb_4338 encodes 16S rRNA
  source 1..225: mol_type = genomic DNA
agagtttgatcatggctcaggatgaacgctagcggcaggcttaacacatgcaagtcgaggggcagcgcggatagcaatatctggcggcgaccggcgaaagggtgcgtaacgcgtgagcaacttgcccgtatctgggggataagcggtggaaacgccgtctaataccccataacaacagaggccgcatgacctttgtttgaaagcttcggtggatacggataggct

SEQ ID NO: 3985 - DNA, 225 bp, unidentified
  misc_feature 1..225: note = bacterial strain Ascusb_370 encodes 16S rRNA
  source 1..225: mol_type = genomic DNA
agagtttgatcatggctcaggatgaacgctagctacaggcttaacacatgcaagtcgaggggcagcggggtcttagcttgctaagactgccggcgaccggcgcacgggtgagtaacgcgtatccaaccttccccttagtagggcatagcccgtagaaatgcggattaataccctatgttcttcgtcgatggcatctgaagtgaagcaaaggtttaccgctaaggg

SEQ ID NO: 3986 - DNA, 225 bp, unidentified
  misc_feature 1..225: note = bacterial strain Ascusb_8042 encodes 16S rRNA
  source 1..225: mol_type = genomic DNA
agagtttgatcatggctcaggataaacgctagcggcaggcctaacacatgcaagtcgagcggcagcacgaagtagcaatattttggtggcgagcggcggacgggtgagtaacgcgtatgcaacctgcccgcaacacggagatagccgaccgaaaggacgattaaactccgatagtatcatttggcggcatcgcttgatgattaaatattcataggttgcggatgg

SEQ ID NO: 3987 - DNA, 225 bp, unidentified
  misc_feature 1..225: note = bacterial strain Ascusb_3031 encodes 16S rRNA
  source 1..225: mol_type = genomic DNA
agagtttgatcatggctcaggatgaacgctagcgacaggcttaacacatgcaagtcgaggggcagcgcggaggtagcaatacttctggcggcgaccggcgcactggtgagtaacacgtatgcgacctgccccggacagggggataaacccgggaaactgggcctaataccccatatgcctggaggatgcatgtcctctaggtgaaagatccgtcggtccgggatg

SEQ ID NO: 3988 - DNA, 225 bp, unidentified
  misc_feature 1..225: note = bacterial strain Ascusb_927 encodes 16S rRNA
  source 1..225: mol_type = genomic DNA
agagtttgatcatggctcaggatgaacgctagctacaggcttaacacatgcaagtcgaggggcagcatgatcttagcttgctaagattgatggcgaccggcgcacgggtgagtaacgcgtatccaaccttccctgtactaggggatagcccggcgaaagtcggattaataccctatgttttccgaagcgagcatttaatttggaacaaaggtttaccggtatagg

SEQ ID NO: 3989 - DNA, 225 bp, unidentified
  misc_feature 1..225: note = bacterial strain Ascusb_691 encodes 16S rRNA
  source 1..225: mol_type = genomic DNA
agagtttgatcatggctcaggatgaacgctggcggcgtgcctaacacatgcaagtcgaacggagatatatttgacagaagcttcggcagaaagattatatatcttagtggcggacgggtgagtaacgcgtggggaacctgccctgtactgggggataacagtgagaaatcactgctaaaaccgcataagcgcacactggcgcatgccagagtgtgaaaaactccg

SEQ ID NO: 3990 - DNA, 225 bp, unidentified
  misc_feature 1..225: note = bacterial strain Ascusb_4054 encodes 16S rRNA
  source 1..225: mol_type = genomic DNA
agagtttgatcctggctcaggatgaacgctggcggcgtgcctaacacatgcaagtcgaacggttaagccggcttcggccgggaatacagtggcgaacgggtgagtaacacgtgaccaacctgccccctcctccgggacagcctcgggaaaccgggattaataccggatactccgcgcgcaccgcatggagcgcgcgggaaagcccaagcgggaggggatggggtc

SEQ ID NO: 3991 - DNA, 225 bp, unidentified
  misc_feature 1..225: note = bacterial strain Ascusb_13183 encodes 16S rRNA
  source 1..225: mol_type = genomic DNA
agagtttgatcctggctcaggacgaacgctggcggcgtgcctaacacatgcaagtcgagcggggacacacagtgaagaggaagttttcggatggaattggaacggtatgttctagcggcggacgggtgagtaacgcgtgagcaacctgtccttcacagggggataacacagcgaaagttgtactaataccgcataagaccacgggaccgcatggttttggggtca

SEQ ID NO: 3992 - DNA, 225 bp, unidentified
  misc_feature 1..225: note = bacterial strain Ascusb_7502 encodes 16S rRNA
  source 1..225: mol_type = genomic DNA
agagtttgatcctggctcaggatgaacgctagctacaggcttaacacatgcaagtcgaggggcagcatgctggtagcttgctatcagcgatggcgaccggcgcacgggtgcgtaacacgtatccaatctacccatggctcggggatagcctttcgaaagaaagattaatacccgatggtctgtttgtgagacatctcgcgagcagtaaagattcatcggcgatgg

SEQ ID NO: 3993 - DNA, 225 bp, unidentified
  misc_feature 1..225: note = bacterial strain Ascusb_9710 encodes 16S rRNA
  source 1..225: mol_type = genomic DNA
agagtttgatcctggctcaggatgaacgctagctacaggcttaacacatgcaagtcgaggggcagcatggaggttgcttgcaacttctgatggcgaccggcgcacgggtgagtaacgcgtatccaaccttccccatagtagaggatagcccggcgaaagtcggattaatactctatgttcttcgttgaggacatctgaaatgaagcaaagatttatcgctatggg

SEQ ID NO: 3994 - DNA, 225 bp, unidentified
  misc_feature 1..225: note = bacterial strain Ascusb_21636 encodes 16S rRNA
  source 1..225: mol_type = genomic DNA
agagtttgatcctggctcaggacgaacgctggcggcgtgcttaacacatgcaagtcgaacggggattaagttggaaaggcttcggcccggaagacataattcgagtggcggacgggtgagtaacgcgtgagcaacctgtcccagacagggggataacacttggaaacaggtgctaataccgcataagaccacggggtcacatggctctggggtaaaaggagcaat

SEQ ID NO: 3995 - DNA, 225 bp, unidentified
  misc_feature 1..225: note = bacterial strain Ascusb_2736 encodes 16S rRNA
  source 1..225: mol_type = genomic DNA
agagtttgatcatggctcaggatgaacgctagctacaggcttaacacatgcaagtcgaggggcagcaggacgatagcttgctattgttgctggcgaccggcgcacgggtgagtaacgcgtatccaaccttccccttagtagggaatagcccggtgaaaatcggattaatgccctatgttcttcacagcggacatctaacgtgaagcaaagattcatcgctaaggg

SEQ ID NO: 3996 - DNA, 225 bp, unidentified
  misc_feature 1..225: note = bacterial strain Ascusb_2150 encodes 16S rRNA
  source 1..225: mol_type = genomic DNA
agagtttgatcatggctcaggatgaacgctggcggcgtgcttaacacatgcaagtcgaacgaggttaattattacgatttccttcggggatgacgatttttaaccgagtggcggacgggtgagtaacgcgtgggcaacctgccccatacagggggataacagttggaaacgactgacaataccgcataagcgcacagtatcgcatggtacggtgtgaaaaactcc

SEQ ID NO: 3997 - DNA, 225 bp, unidentified
  misc_feature 1..225: note = bacterial strain Ascusb_10252 encodes 16S rRNA
  source 1..225: mol_type = genomic DNA
agagtttgatcctggctcagaacgaacgctggcggcgcgtcttaagcatgcaagtcgaatggcaagatctgtgcttgcacaggtcctagaatggcggactggtgagtaacgcgtgggtgacgtaccttccggatggggatagctcctggaaacaggagataataccgaatacgatacacgggaacagaggccgtgtatgaaaggatcttttgattcgccggaaga

SEQ ID NO: 3998 - DNA, 225 bp, unidentified
  misc_feature 1..225: note = bacterial strain Ascusb_2855 encodes 16S rRNA
  source 1..225: mol_type = genomic DNA
agagtttgatcatggctcaggatgaacgctggcggcgtgcctaacacatgcaagtcgaacgaagcgcctcgcccgacgaagtggagtgcttgcacaaagcagaatcaattgaggcgacttagtggcggacgggtgagtaacgcgtgggtaacctgccgtatgcagggggataacagttagaaatgactgctaataccgcataagcgcacagtatcgcatgataca

SEQ ID NO: 3999 - DNA, 225 bp, unidentified
  misc_feature 1..225: note = bacterial strain Ascusb_2899 encodes 16S rRNA
  source 1..225: mol_type = genomic DNA
agagtttgatcatggctcaggacgaacgctggcggcacgcttaacacatgcaagtcgaacggtgaaggtagcttgctaccggatcagtggcggacgggtgagtaacacgtgagcaatctgcctttaagtggggaataacgattggaaacgatcggtaataccgcataatatactttttccgcatgaaaagagtatcaaagatttatcgcttaaagatgagctcgc

SEQ ID NO: 4000 - DNA, 225 bp, unidentified
  misc_feature 1..225: note = bacterial strain Ascusb_5908 encodes 16S rRNA
  source 1..225: mol_type = genomic DNA
agagtttgatcatggctcaggatgaacgctggcggcgtgcctaatacatgcaagtcgaacgagggtgcttgcaccctagtggcgaacgggtgagtaacacgtaggtaacctgccttacagtttgggatacccgagggaaaccttggctaataccgaataattggctcggaggcatctctgagtcctaaaaggggcctttaaagcctcgctgaaagatggacctgc

SEQ ID NO: 4001 - DNA, 225 bp, unidentified
  misc_feature 1..225: note = bacterial strain Ascusb_4445 encodes 16S rRNA
  source 1..225: mol_type = genomic DNA
agagtttgatcatggctcagaacgaacgctggcggcgcgtcttaagcatgcaagtcgagcggtaagattggtgcttgcactaatcctagagcggcggactggtgagtaacgcgtgggtgacgtacccttatgacggggacagctcctagaaataggagataataccggatacgctgtatgttgtcagaggacatacaggaaaggttcttttgaatcgcataagga

SEQ ID NO: 4002 - DNA, 225 bp, unidentified
  misc_feature 1..225: note = bacterial strain Ascusb_2893 encodes 16S rRNA
  source 1..225: mol_type = genomic DNA
agagtttgatcatggctcaggatgaacgctggcggcgtgcctaacacatgcaagtcgagcgagaaatacttgattgaaacttcggtagatagaaagtatggaaagcggcggacgggtgagtaacgcgtaggcaacctgccccttacacagggatagccattggaaacgatgattaaaacctgatgacaccgagagatgacatcttctttcggtcaaagatttatc

SEQ ID NO: 4003 - DNA, 225 bp, unidentified
  misc_feature 1..225: note = bacterial strain Ascusb_393 encodes 16S rRNA
  source 1..225: mol_type = genomic DNA
agagtttgatcatggctcaggatgaacgctggcggcgtgtttaacacatgcaagtcgagcgagaagtttctcagtagattcttcggatgatacagagttacggaaagcggcggacgggtgagtaacgcgtaggcaacctgccctctgcagagggatagcctcgggaaaccgggattaaaacctcataatgcgcgaccgggacatcccggatgcgccaaagattta

SEQ ID NO: 4004 - DNA, 225 bp, unidentified
  misc_feature 1..225: note = bacterial strain Ascusb_7144 encodes 16S rRNA
  source 1..225: mol_type = genomic DNA
agagtttgatcctggctcaggatgaacgctggcggcgtgcttaacacatgcaagtcgaacgaagcatccctatcgacaaagtggacgtgcttgcacagaagcggagtcacctgggatgactgagtggcggacgggtgagtaacgcgtgggcaacctgccccatagagggggacaacagttagaaatgactgctaataccgcatagtaaagcagatccgcatgctt

SEQ ID NO: 4005 - DNA, 225 bp, unidentified
  misc_feature 1..225: note = bacterial strain Ascusb_4299 encodes 16S rRNA
  source 1..225: mol_type = genomic DNA
agagtttgatcatggctcaggatgaacgctggcggcgtgcctaacacatgcaagtcgagcgagaaactcatgaccaatacttcggttgcgtgattgagcggaaagcggcggacgggtgagtaacgcgtaggcaacctgccccttgcagagggatagcctcgggaaaccgggattaaaacctcataacgcagcggtaagacatcttactgctgccaaagatttatc

SEQ ID NO: 4006 - DNA, 225 bp, unidentified
  misc_feature 1..225: note = bacterial strain Ascusb_489 encodes 16S rRNA
  source 1..225: mol_type = genomic DNA
agagtttgatcatggctcaggatgaacgctagcggcaggcttaacacatgcaagtcgaggggtaacgcgaggtagcaatactttggcgacgaccggcgcacgggtgcgtaacgcgtatgcaacctacctgtaacaggggtataacggggtgaaaatcccactaatcccccatattgttaaagaatcgcatgtttctttaacgaaagcttcggtggttacggatgg

SEQ ID NO: 4007 - DNA, 225 bp, unidentified; identical to SEQ ID NO: 3374
  misc_feature 1..225: note = bacterial strain Ascusb_2306 encodes 16S rRNA
  source 1..225: mol_type = genomic DNA

SEQ ID NO: 4008 - DNA, 225 bp, unidentified
  misc_feature 1..225: note = bacterial strain Ascusb_366 encodes 16S rRNA
  source 1..225: mol_type = genomic DNA
agagtttgatcctggctcaggatgaacgctggcggcgcgcttaacacatgcaagtcgaacggttaaagcaccttcgggtgtgaataaagtggcgaacggctgagtaacacgtgggcaacctgcccctcgcaccgggatagcctcgggaaaccgtgggtaataccggatactccggcccccccgcatggcggggccgggaaagcgtacacggcgggggatgggccc

SEQ ID NO: 4009 - DNA, 225 bp, unidentified
  misc_feature 1..225: note = bacterial strain Ascusb_9708 encodes 16S rRNA
  source 1..225: mol_type = genomic DNA
agagtttgatcatggctcaggatgaacgctagctacaggcttaacacatgcaagtcgaggggcagcattatcgaagcttgctttgatagatggcgaccggcgcacgggtgcgtaacacgtatccaatctacccatggctcagggatagcctttcgaaagaaagattaatacctgatggtctgtgattgagacatctcgaacacagtaaagatttatcggcgatgg

SEQ ID NO: 4010 - DNA, 225 bp, unidentified
  misc_feature 1..225: note = bacterial strain Ascusb_2905 encodes 16S rRNA
  source 1..225: mol_type = genomic DNA
agagtttgatcatggctcaggatgaacgctggcggcaggcttaatacatgcaagtcgaacggtaaggccgagcgtagcaatacgcgaggtacacgagtggcgcacgggtgcgtaacgcgtatgcaacctgcccccgaccgggacaaaacagctggaaacggctgctaatatcccatggttaccgaggagggcatcctcctttgtataaagattcattggtcgggg

SEQ ID NO: 4011 - DNA, 225 bp, unidentified
  misc_feature 1..225: note = bacterial strain Ascusb_4366 encodes 16S rRNA
  source 1..225: mol_type = genomic DNA
agagtttgatcatggctcagaacgaacgctggcggcgcgtcttaagcatgcaagtcgagcggtaagattggtgcttgcactaatcctagagcggcggactggtgagtaacgcgtgggtgacgtacctttgtgacggggacagctcctagaaataggagataataccggatacgctgcagcatgtcagaggtgctgcaggaaaggatcttttgattcgcacagaga

SEQ ID NO: 4012 - DNA, 225 bp, unidentified
  misc_feature 1..225: note = bacterial strain Ascusb_3867 encodes 16S rRNA
  source 1..225: mol_type = genomic DNA
agagtttgatcatggctcaggatgaacgctggcggcgcgcttaacacatgcaagtcgaacggttaaagcacctccgggtgtgcataaagtggcgaacggctgagtaacacgtgggcaacctgccccccgcaccgggatagcctcgggaaaccgtgggtaataccggatactccctcccccccgcatggcggggaggggaaagcgtacacggcgggggatgggccc

SEQ ID NO: 4013 - DNA, 225 bp, unidentified
  misc_feature 1..225: note = bacterial strain Ascusb_1703 encodes 16S rRNA
  source 1..225: mol_type = genomic DNA
agagtttgatcatggctcaggatgaacgctggcggcgtgcctaatacatgcaagtcgagcgagaatctgatgaacggagattcgtcgaagcgaatcagaggaaagcggcggacgggtgagtaacgcgtaggcaacctgcccttagcagagggatagccattggaaacgatgattaaaacctcataatgctgtctatacacatgtagagacagccaaagatttatc

SEQ ID NO: 4014 - DNA, 225 bp, unidentified
  misc_feature 1..225: note = bacterial strain Ascusb_15950 encodes 16S rRNA
  source 1..225: mol_type = genomic DNA
agagtttgatcatggctcagaatgaacgttggcggcgtggattaggcatgcaagtcgagcggcaaggttattatcttcggattttagaccctagagcggcgaaagggataggaacgtatagatacatgcctcttagctcaggatagcgtctggaaacgggcgataatactgaatgaggtctccggaccaaaggtgtgattccgctaggagattggtctatatcct

SEQ ID NO: 4015 - DNA, 225 bp, unidentified
  misc_feature 1..225: note = bacterial strain Ascusb_12834 encodes 16S rRNA
  source 1..225: mol_type = genomic DNA
agagtttgatcatggctcaggatgaacgctagctacaggcttaacacatgcaagtcgaggggcagcgagaagaaagcttgctttctttgtcggcgaccggcgcacgggtgagtaacgcgtatccaaccttccccttagtagggcatagcccggcgaaagtcggattaataccctatgttcttcgtagaggacatctgaaatgaagcaaagacttgtcgctaaggg

SEQ ID NO: 4016 - DNA, 225 bp, unidentified
  misc_feature 1..225: note = bacterial strain Ascusb_2167 encodes 16S rRNA
  source 1..225: mol_type = genomic DNA
agagtttgatcatggctcagaacgaacgctggcggcaggtcttaggcatgcaagtcgaacggatgacaagagagcttgctctcttgaagtcagtggcgcacgagtgagtaacgcgtgggaaactgcccttcactggggaataacgtctggaaacggacgctaataccgcatacgcccgcaaggggaaagatttatcggtgatggatgtgcccgcgttggattagc

SEQ ID NO: 4017 - DNA, 225 bp, unidentified
  misc_feature 1..225: note = bacterial strain Ascusb_2842 encodes 16S rRNA
  source 1..225: mol_type = genomic DNA
agagtttgatcatggctcaggacgaacgctggcggcgtgcctaacacatgcaagtcgagcgaggatatattttatgagagcttcggcaggaatgagagatattcgagcggcggacgggtgagtaacgcgtgaacaatctgtccctgacagggggataccacttggaaacaggtgctaataccgcataagaccacagcgtcgcatggcgcaggggtcaaaggagag

SEQ ID NO: 4018 - DNA, 225 bp, unidentified
  misc_feature 1..225: note = bacterial strain Ascusb_21571 encodes 16S rRNA
  source 1..225: mol_type = genomic DNA
agagtttgatcctggctcaggatgaacgctagctacaggcttaacacatgcaagtcgaggggcagcgagaagaaagcttgctttctttgtcggcgaccggcgcacgggtgagtaacgcgtatccaaccttccccttagtagaggatagcccggcgaaagtcggattaatactctatgttctttctggatggcatctgatggaaagcaaaggtttaccgctaaggg

SEQ ID NO: 4019 - DNA, 225 bp, unidentified
  misc_feature 1..225: note = bacterial strain Ascusb_8252 encodes 16S rRNA
  source 1..225: mol_type = genomic DNA
agagtttgatcatggctcaggatgaacgctagcggcaggcttaacacatgcaagtcgaggggcagcggggagtagcaatactctgccggcgaccggcgaaagggtgcgtaacgcgtgaacaatctgcccgtatccgggacataagcgatggaaacgtcgtctaatttcccataacaacaggagccgcatgacttttgtttgaaagatccgtcggatacggatgag

SEQ ID NO: 4020 - DNA, 225 bp, unidentified
  misc_feature 1..225: note = bacterial strain Ascusb_5361 encodes 16S rRNA
  source 1..225: mol_type = genomic DNA
agagtttgatcatggctcaggacgaacgctggcggcgtgcttaacacatgcaagtcgaacgaagctgggagaaagatttcttcggaatgaattcttctaagactgagtggcggacgggtgagtaacgcgtgagcaacctgcccttcggagggggatagtgtctggaaacggacagtaataccgcataacgtacagatacggcatcgtgactgtaccaaagattta

SEQ ID NO: 4021 - DNA, 225 bp, unidentified
  misc_feature 1..225: note = bacterial strain Ascusb_544 encodes 16S rRNA
  source 1..225: mol_type = genomic DNA
agagtttgatcctggctcaggatgaacgctagctacaggcttaacacatgcaagtcgaggggcagcatgaagtttgcttgcaaactttgatggcgaccggcgcacgggtgagtaacgcgtatccaaccttccctatagtagaggatagcccggcgaaagtcggattaatactctatgttttccaatgcagacatctaaaatggaacaaaggtttaccgctatagg

SEQ ID NO: 4022 - DNA, 225 bp, unidentified
  misc_feature 1..225: note = bacterial strain Ascusb_3745 encodes 16S rRNA
  source 1..225: mol_type = genomic DNA
agagtttgatcctggctcagaacgaacgctggcggcgcgtcttaagcatgcaagtcgagcgggattcatgtgcttgcacatgatgagagcggcggactggcgaggagcgcgtgggcgacgcgccccccggactggaacagcccgtggaaacacggggtaatgccggacggcatgcggagtttggagactccgcatcaaaggggcttcggccccgccgggggagcg

SEQ ID NO: 4023 - DNA, 225 bp, unidentified
  misc_feature 1..225: note = bacterial strain Ascusb_1907 encodes 16S rRNA
  source 1..225: mol_type = genomic DNA
agagtttgatcctggctcaggatgaacgctggcggcgtgcctaatacatgcaagtcgaacggcagtagcaatactgtagtggcgaacgggtgagtaacacgttggtgacctgccccaaagatgggaatatcacctggaaacgggtggcaaaaccgaataagcttatactgattagaaaggtataagtaaaagtgcaaactactttgggaggggcctgcggcccat

SEQ ID NO: 4024 - DNA, 225 bp, unidentified
  misc_feature 1..225: note = bacterial strain Ascusb_4016 encodes 16S rRNA
  source 1..225: mol_type = genomic DNA
agagtttgatcctggctcaggatgaacgctagctacaggcttaacacatgcaagtcgaggggcagcaggatctgtgcttgcacaggttgctggcgaccggcgcacgggtgagtaacgcgtatccaaccttccccttagtagggcatagcccgtagaaatgcggattaataccctatgttttccgatgcagacatctaatttggaataaaggtttaccgctaaggg

SEQ ID NO: 4025 - DNA, 225 bp, unidentified
  misc_feature 1..225: note = bacterial strain Ascusb_749 encodes 16S rRNA
  source 1..225: mol_type = genomic DNA
agagtttgatcatggctcaggacgaacgctggcggcatgcctaacacatgcaagtcgaacgaagttaagaagcttgctttttaacttagtggcggacgggtgagtaacgcgtgagcaacctgcctctaagtggggaataatgtactgaaaaggacactaataccgcataacatattggaagcgcatgattctgatatcaaagatttatcgcttagagatgggctc

SEQ ID NO: 4026 - DNA, 225 bp, unidentified
  misc_feature 1..225: note = bacterial strain Ascusb_1073 encodes 16S rRNA
  source 1..225: mol_type = genomic DNA
agagtttgatcatggctcaggatgaacgctagctacaggcttaacacatgcaagtcgaggggcagcatgttggttgcttgcaaccgatgatggcgaccggcgcacgggtgcgtaacgcgtatccaatctgccctgtgctcggggatagccttgcgaaagtaagattaacacccgatggtctccttggcccgcatggtccttggagtaaagtttcacggcacggga

SEQ ID NO: 4027 - DNA, 225 bp, unidentified
  misc_feature 1..225: note = bacterial strain Ascusb_5329 encodes 16S rRNA
  source 1..225: mol_type = genomic DNA
agagtttgatcctggctcaggatgaacgctagcggcaggcttaacacatgcaagtcgaggggcagcgcgggagtagcaatacttctggcggcgaccggcgcaagggtgcgtaacgcgtgagcgacatgcccgtgaccgggggataaccgatggaaacgtcgcctaatcccccataacatgattggtcgcatggccaatgattgaaaactccggtggtcacggatt

SEQ ID NO: 4028 - DNA, 225 bp, unidentified
  misc_feature 1..225: note = bacterial strain Ascusb_6360 encodes 16S rRNA
  source 1..225: mol_type = genomic DNA
agagtttgatcctggctcaggatgaacgctggcggcgtgcctaacacatgcaagtcgaacggagatttgacgcttccgaagcttcggcagaggattgttaaatcttagtggcggacgggtgagtaacgcgtgggcaacctgcctcatactgggggataacagctggaaacgactgttaataccgcataagcgcacggtgtcgcatgacacagtgtgaaaaactcc

SEQ ID NO: 4029 - DNA, 225 bp, unidentified
  misc_feature 1..225: note = bacterial strain Ascusb_7389 encodes 16S rRNA
  source 1..225: mol_type = genomic DNA
agagtttgatcctggctcaggatgaacgctagctacaggcttaacacatgcaagtcgaggggcagcatgggagttgcttgcaattcctgatggcgaccggcgcacgggtgagtaacgcgtatccaaccttccccttagtagggcatagcccggtgaaaatcggattaataccctatgttcttcacagcagacatctaacgtgaagcaaaggttcaccgctaaggg

SEQ ID NO: 4030 - DNA, 225 bp, unidentified
  misc_feature 1..225: note = bacterial strain Ascusb_6421 encodes 16S rRNA
  source 1..225: mol_type = genomic DNA
agagtttgatcatggctcaggatgaacgctagctacaggcttaacacatgcaagtcgaggggcagcatgatcaaagcttgctttgattgatggcgaccggcgcacgggtgcgtaacgcgtatccaacctgccatgtactccgggatagccctctgaaaggaggattaataccggatgtggttgttcgaggacatcctcttacaattaaagatttatcggtacatc

SEQ ID NO: 4031 - DNA, 225 bp, unidentified
  misc_feature 1..225: note = bacterial strain Ascusb_4478 encodes 16S rRNA
  source 1..225: mol_type = genomic DNA
agagtttgatcctggctcaggatgaacgctagcgacaggcctaacacatgcaagtcgagcggcagcacctcgggtggcgagcggcgcacgggtgagtaacgcgtatgtaacctgcccatgagtgggggatagcccggtgaaaaccggattaataccgcataacaccgatatctgacatcaaagatcggttaaagattcattgctcatggatggacatgcgttgga

SEQ ID NO: 4032 - DNA, 225 bp, unidentified
  misc_feature 1..225: note = bacterial strain Ascusb_3739 encodes 16S rRNA
  source 1..225: mol_type = genomic DNA
agagtttgatcatggctcaggatgaacgctggcggcgtgcctaacacatgcaagtcgagcgggaatcgaccaactgaagcttcggcagaaggaagttgaggagagcggcggacgggtgagtaacgcgtaggtaacctaccttatgcacagggatagccccgggaaactggaattaatacctgataacgcggtgatatcacatggtattatcgccaaagatttatc

SEQ ID NO: 4033 - DNA, 225 bp, unidentified
  misc_feature 1..225: note = bacterial strain Ascusb_579A encodes 16S rRNA
  source 1..225: mol_type = genomic DNA
agagtttgatcctggctcaggacgaacgctggcggcgtgcttaacacatgcaagtcgaacggagaacttatttcggtaagttcttagtggcgaacgggtgagtaacgcgtaggcaacctgccctccagttggggacaacattccgaaagggatgctaataccgaatacgatgggtttcccgcatgaggaacccatgaaaggcgctttcgggcgtcgctggaagat

SEQ ID NO: 4034 - DNA, 225 bp, unidentified
  misc_feature 1..225: note = bacterial strain Ascusb_2295A encodes 16S rRNA
  source 1..225: mol_type = genomic DNA
agagtttgatcctggctcaggatgaacgctagctacaggcttaacacatgcaagtcgaggggcagcatgaaggaagcttgcttcctttgatggcgaccggcgcacgggtgagtaacgcgtatccaacctgcccattacactgggatagcccgccgaaaggcgaattaatcccggatagtgttcttagatggcatcagacaaggactaaaggtattttccggtaat

SEQ ID NO: 4035 - DNA, 225 bp, unidentified
  misc_feature 1..225: note = bacterial strain Ascusb_2143B encodes 16S rRNA
  source 1..225: mol_type = genomic DNA
agagtttgatcatggctcaggacgaacgctggcggcgtgcctaatacatgcaagtcgagcgagcttgcctagatgattttagtgcttgcactaaatgaaactagatacaagcgagcggcggacgggtgagtaacacgtgggtaacctgcccaagagactgggataacacctggaaacagatgctaataccggataacaacactagacgcatgtctagagtttgaa

SEQ ID NO: 4036 - DNA, 225 bp, unidentified
  misc_feature 1..225: note = bacterial strain Ascusb_124A encodes 16S rRNA
  source 1..225: mol_type = genomic DNA
agagtttgatcatggctcaggatgaacgctggcggcgtgcctaacacatgcaagtcgagcgatgaataaaccgacaaggtttcggccaaggaagtttattcagagcggcggatgggtgaggaacgcgtggggaacctgcctttcaccgggggataccagctggaaacggctgttaataccgcatatgctcacagtgccgcatggcacagggaggaaaactccggt

SEQ ID NO: 4037 - DNA, 225 bp, unidentified; identical to SEQ ID NO: 4036
  misc_feature 1..225: note = bacterial strain Ascusb_3851B encodes 16S rRNA
  source 1..225: mol_type = genomic DNA

SEQ ID NO: 4038 - DNA, 225 bp, unidentified; identical to SEQ ID NO: 2887
  misc_feature 1..225: note = bacterial strain Ascusb_7126A encodes 16S rRNA
  source 1..225: mol_type = genomic DNA

SEQ ID NO: 4039 - DNA, 225 bp, unidentified
  misc_feature 1..225: note = bacterial strain Ascusb_2255B encodes 16S rRNA
  source 1..225: mol_type = genomic DNA
agagtttgatcatggctcaggatgaacgctagctacaggcttaacacatgcaagtcgaggggaaacggcagagaagcttgcttttctggacgtcgaccggcgaatgggtgagtaacgcgtatccaacctgcccctaagtagggaatagccttgcgaaagtaagattaatgccctatgttgtctttcgatcacatgagaagaagactaaaggtttaccgcttaggg

SEQ ID NO: 4040 - DNA, 225 bp, unidentified
  misc_feature 1..225: note = bacterial strain Ascusb_845A encodes 16S rRNA
  source 1..225: mol_type = genomic DNA
agagtttgatcatggctcaggatgaacgctagctacaggcttaacacatgcaagtcgaggggaaacgatattgaaagcttgctttctttaggcgtcgaccggcgaatgggtgagtaacgcgtatccaacctgcccctgagtaagggatagcccatcgaaagatggattaataccttatggtctcctttgaaggcatcggattaggagtaaagatttatcgctgag

SEQ ID NO: 4041 - DNA, 225 bp, unidentified
  misc_feature 1..225: note = bacterial strain Ascusb_223B encodes 16S rRNA
  source 1..225: mol_type = genomic DNA
agagtttgatcctggctcaggacgaacgctggcggcgtgcctaatacatgcaagtagaacgctgaagactttagcttgctaaagttggaagagttgcgaacgggtgagtaacgcgtaggtaacctgcctactagcgggggataactattggaaacgatagctaataccgcataacagcatttaacacatgttagatgcttgaaaggagcaattgcttcactagta

SEQ ID NO: 4042 - DNA, 225 bp, unidentified
  misc_feature 1..225: note = bacterial strain Ascusb_15705A encodes 16S rRNA
  source 1..225: mol_type = genomic DNA
agagtttgatcctggctcaggacgaacgctggcggcgtgcttaacacatgcaagtcgagcggaaaggccccttcgggggtactcgagcggcgaacgggtgagtaacacgtgagcaacctgcccctgacactgggataagcctgggaaaccgggtctaataccggatatgacctgcctccgcatgggggtgggtggaaaggttggcccgtttgggtcttccggtca

SEQ ID NO: 4043 - DNA, 225 bp, unidentified; identical to SEQ ID NO: 4042
  misc_feature 1..225: note = bacterial strain Ascusb_9859A encodes 16S rRNA
  source 1..225: mol_type = genomic DNA

SEQ ID NO: 4044 - DNA, 225 bp, unidentified; identical to SEQ ID NO: 4042
  misc_feature 1..225: note = bacterial strain Ascusb_12147A encodes 16S rRNA
  source 1..225: mol_type = genomic DNA

SEQ ID NO: 4045 - DNA, 225 bp, unidentified; identical to SEQ ID NO: 4042
  misc_feature 1..225: note = bacterial strain Ascusb_9658A encodes 16S rRNA
  source 1..225: mol_type = genomic DNA

SEQ ID NO: 4046 - DNA, 225 bp, unidentified
  misc_feature 1..225: note = bacterial strain Ascusb_17947C encodes 16S rRNA
  source 1..225: mol_type = genomic DNA
agagtttgatcctggctcaggacgaacgctggcggcatgcctaatacatgcaagtcgaacgagcttccgttgattgacgtgcttgcactgatttcaacattgaagcgagtggcgaactggtgagtaacacgtgggaaatctgcccagaagcaggggataacacttggaaacaggtgctaataccgtataacaacaaaaaccgcatggtttttgtttgaaaggtgg

SEQ ID NO: 4047 - DNA, 225 bp, unidentified; identical to SEQ ID NO: 4046
  misc_feature 1..225: note = bacterial strain Ascusb_21C encodes 16S rRNA
  source 1..225: mol_type = genomic DNA

SEQ ID NO: 4048 - DNA, 225 bp, unidentified
  misc_feature 1..225: note = bacterial strain Ascusb_1379A encodes 16S rRNA
  source 1..225: mol_type = genomic DNA
agagtttgatcatggctcaggatgaacgctggcggcgtgcctaatacatgcaagtcgaacgcactgacgtcgactgaagctgcttgcagtggaagtcgatcgacgtgagtggcggacgggtgagtaacacgtgggtaacctacccttaagtgggggataacatttggaaacagatgctaataccgcataaccatacagaccacatggtctgtatgtaaaagatgg

SEQ ID NO: 4049 - DNA, 225 bp, unidentified
  misc_feature 1..225: note = bacterial strain Ascusb_11080B encodes 16S rRNA
  source 1..225: mol_type = genomic DNA
agagtttgatcctggctcaggacgaacgctggcggcgtgcctaatacatgcaagtcgagcggacttgatggagagcttgctctccagagagttagcggcggacgggtgagtaacacgtaggcaacctgcctgtaagactgggataactagcggaaacgttagctaataccggataatttattttctcgcatgaggagataatgaaagacggagcaatctgtcact

SEQ ID NO: 4050 - DNA, 225 bp, unidentified
  misc_feature 1..225: note = bacterial strain Ascusb_1411A encodes 16S rRNA
  source 1..225: mol_type = genomic DNA
agagtttgatcatggctcaggatgaacgctggcggcgtgcctaacacatgcaagtcgaacgagggtgcttgcaccctagtggcgaacgggtgagtaacacgtaggtaacctgcctttaagcttgggatacccagaggaaactttggctaataccggataacaatggaagaggcatctcttctatttaaaaggcccgtatgggtcacttaaagatggacctgcggc

SEQ ID NO: 4051 - DNA, 225 bp, unidentified; identical to SEQ ID NO: 4039
  misc_feature 1..225: note = bacterial strain Ascusb_3855A encodes 16S rRNA
  source 1..225: mol_type = genomic DNA

SEQ ID NO: 4052 - DNA, 225 bp, unidentified
  misc_feature 1..225: note = bacterial strain Ascusb_4938A encodes 16S rRNA
  source 1..225: mol_type = genomic DNA
agagtttgatcatggctcagaacgaacgctggtggcgtgtcttatacatgcaagtcgagcggtgcagcaatgcatagcggcgaacgggtgagtaacgcgtaagcaatctgccccatgcccgggaatagccgtgccaacgcgcgggtaataccggatatagtggctccctgcatagggagttgacgaaagatttatcggcatgggatgagcttgcgtccgattagc

SEQ ID NO: 4053 - DNA, 225 bp, unidentified
  misc_feature 1..225: note = bacterial strain Ascusb_4492C encodes 16S rRNA
  source 1..225: mol_type = genomic DNA
agagtttgatcatggctcaggatgaacgctagctacaggcttaacacatgcaagtcgaggggcagcattgtcgaagcttgctttgacagatggcgaccggcgcacgggtgagtaacgcgtatccaaccttccccatagtagggcatagcccgtagaaatgcggattaataccctatgttttccgaagaagacatctgatttggaacaaaggttcaccgctatggg

SEQ ID NO: 4054 - DNA, 225 bp, unidentified; identical to SEQ ID NO: 4053
  misc_feature 1..225: note = bacterial strain Ascusb_2612C encodes 16S rRNA
  source 1..225: mol_type = genomic DNA

SEQ ID NO: 4055 - DNA, 225 bp, unidentified
  misc_feature 1..225: note = bacterial strain Ascusb_445B encodes 16S rRNA
  source 1..225: mol_type = genomic DNA
agagtttgatcctggctcaggatgaacgctagctacaggcttaacacatgcaagtcgaggggcagcatgaggtcagcttgctgactttgatggcgaccggcgcacgggtgcgtaacacgtatccaatctgcccgttacccggggatagcctttcgaaagaaagattaatacccgatggcttcacaccgccgcatggcgttgtgaataaagattcatcggtaacgg

SEQ ID NO: 4056 - DNA, 225 bp, unidentified
  misc_feature 1..225: note = bacterial strain Ascusb_1590A encodes 16S rRNA
  source 1..225: mol_type = genomic DNA
agagtttgatcatggctcaggatgaacgctggcggcgtgcttaacacatgcaagtcgaacgaagcaacttattacgatcccttcggggtgacgatttgttgactgagtggcggacgggtgagtaacgcgtgggtaacctaccttgtacagggggataacagttggaaacgactgctaataccgcataagcgcacagcttcgcatgaagcagtgtgaaaagttttt

SEQ ID NO: 4057 - DNA, 225 bp, unidentified
  misc_feature 1..225: note = bacterial strain Ascusb_386B encodes 16S rRNA
  source 1..225: mol_type = genomic DNA
agagtttgatcatggctcaggatgaacgctggcggcgtgcttaatacatgcaagtcgaacggatgaaggaagaaagcttgctttcttcccgattcagtggcgaacgggtgagtaatacgtaggcaacctgccccaaagcgggggatagcagttggaaacgactattaataccgcataggtaatagggaggcatctccttattattaaaggtgcgtttgcaccgct

SEQ ID NO: 4058 - DNA, 225 bp, unidentified; identical to SEQ ID NO: 4057
  misc_feature 1..225: note = bacterial strain Ascusb_1419B encodes 16S rRNA
  source 1..225: mol_type = genomic DNA

SEQ ID NO: 4059 - DNA, 225 bp, unidentified
  misc_feature 1..225: note = bacterial strain Ascusb_221B encodes 16S rRNA
  source 1..225: mol_type = genomic DNA
agagtttgatcatggctcaggatgaacgctagctacaggcttaacacatgcaagtcgaggggcagcagatcgaaagcttgcttttgatgctggcgaccggcgcacgggtgagtaacgcgtatccaaccttccctatagtagagaatagcccggcgaaagtcggattaatgctctatgttgtatttagaagacatctgaagaataccaaaggtttaccgctatagg

SEQ ID NO: 4060 - DNA, 225 bp, unidentified
  misc_feature 1..225: note = bacterial strain Ascusb_847B encodes 16S rRNA
  source 1..225: mol_type = genomic DNA
agagtttgatcctggctcaggatgaacgctagctacaggcttaacacatgcaagtcgaggggcagcagatcgaaagcttgcttttgatgctggcgaccggcgcacgggtgagtaacgcgtatccaaccttccctatagtagagaatagcccggcgaaagtcggattaatgctctatgttgtatttagaagacatctgaagaataccaaaggtttaccgctatagg

SEQ ID NO: 4061 - DNA, 225 bp, unidentified
  misc_feature 1..225: note = bacterial strain Ascusb_466B encodes 16S rRNA
  source 1..225: mol_type = genomic DNA
agagtttgatcctggctcaggacgaacgctggcggcgtgcctaatacatgcaagtcgaacgcattttctttcaccgtagcttgctacaccgaaagaaaatgagtggcgaacgggtgagtaacacgtgggtaacctgcccatcagcgggggataacacttggaaacaggtgctaataccgcataatttcatttactgcatggtagatggatgaaaggcgcttttgc

SEQ ID NO: 4062 - DNA, 225 bp, unidentified
  misc_feature 1..225: note = bacterial strain Ascusb_6214A encodes 16S rRNA
  source 1..225: mol_type = genomic DNA
agagtttgatcatggctcaggatgaacgctagctacaggcttaacacatgcaagtcgaggggcagcagatcgaaagcttgcttttgatgctggcgaccggcgcacgggtgagtaacgcgtatccaaccttccctatagtagagaatagcccggcgaaagtcggattaatgctctatgttgtatttagaggacatctgaagaataccaaaggtttaccgctatagg

SEQ ID NO: 4063 - DNA, 225 bp, unidentified; identical to SEQ ID NO: 2059
  misc_feature 1..225: note = bacterial strain Ascusb_4975B encodes 16S rRNA
  source 1..225: mol_type = genomic DNA

SEQ ID NO: 4064 - DNA, 225 bp, unidentified
  misc_feature 1..225: note = bacterial strain Ascusb_3349B encodes 16S rRNA
  source 1..225: mol_type = genomic DNA
agagtttgatcctggctcaggatgaacgctagctacaggcttaacacatgcaagtcgaggggcagcaggacgatagcttgctattgttgctggcgaccggcgcacgggtgagtaacgcgtatccaaccttccctatagtagagaatagcccggcgaaagtcggattaatgctctatgttcttctttgatggcctctgatgagaagcaaagctttagcgctatagg

SEQ ID NO: 4065 - DNA, 225 bp, unidentified; identical to SEQ ID NO: 1741
  misc_feature 1..225: note = bacterial strain Ascusb_7502A encodes 16S rRNA
  source 1..225: mol_type = genomic DNA

SEQ ID NO: 4066 - DNA, 225 bp, unidentified; identical to SEQ ID NO: 1393
  misc_feature 1..225: note = bacterial strain Ascusb_352B encodes 16S rRNA
  source 1..225: mol_type = genomic DNA

SEQ ID NO: 4067 - DNA, 225 bp, unidentified
  misc_feature 1..225: note = bacterial strain Ascusb_262A encodes 16S rRNA
  source 1..225: mol_type = genomic DNA
agagtttgatcatggctcaggatgaacgctagctacaggcttaacacatgcaagtcgaggggcagcatgatcaaagcttgctttgattgatggcgaccggcgcacgggtgagtaacgcgtatccaaccttccctatagtagaggatagcccggcgaaagtcggattaatactctatgttgtatttagaggacatctgaagaataccaaaggtttaccgctatagg

SEQ ID NO: 4068 - DNA, 225 bp, unidentified
  misc_feature 1..225: note = bacterial strain Ascusb_314A encodes 16S rRNA
  source 1..225: mol_type = genomic DNA
agagtttgatcatggctcaggatgaacgctggcggtatgcctaatacatgcaagtcgaacgcattctcgtttttgattgaaggtgcttgcaccagattgaaaaaacattggaatgagtggcggacgggtgagtaacacgtgggtaacctgcccaaaagtgggggataacatttggaaacaaatgctaataccgcataatagttagaaccgcatggttctaatttg

SEQ ID NO: 4069 - DNA, 225 bp, unidentified; identical to SEQ ID NO: 3235
  misc_feature 1..225: note = bacterial strain Ascusb_4791B encodes 16S rRNA
  source 1..225: mol_type = genomic DNA

SEQ ID NO: 4070 - DNA, 225 bp, unidentified
  misc_feature 1..225: note = bacterial strain Ascusb_479A encodes 16S rRNA
  source 1..225: mol_type = genomic DNA
agagtttgatcatggctcagattgaacgctggcggcaggcctaacacatgcaagtcgaacggtaacaggaagcagcttgctgcttcgctgacgagtggcggacgggtgagtaatgtctgggaaactgcctgatggagggggataactactggaaacggtagctaataccgcataacgtcgcaagaccaaagagggggaccttcgggcctcttgccatcggatgtg

SEQ ID NO: 4071 - DNA, 225 bp, unidentified
  misc_feature 1..225: note = bacterial strain Ascusb_2965B encodes 16S rRNA
  source 1..225: mol_type = genomic DNA
agagtttgatcctggctcaggatgaacgctagcgacaggcctaacacatgcaagtcgaggggcagcacttcgggtggcgaccggcgcacgggtgagtaacgcgtatgtaacctgcccttgagtgggggatagcccatcgaaagatggattaataccgcataaagccgcggatgaacatttattagcggccaaagatttattgctcagggatggacatgcgtatga

SEQ ID NO: 4072 - DNA, 225 bp, unidentified
  misc_feature 1..225: note = bacterial strain Ascusb_141B encodes 16S rRNA
  source 1..225: mol_type = genomic DNA
agagtttgatcatggctcaggacgaacgctggcggcgtgcctaatacatgcaagtcgagcggacttgatggagagcttgctctcttgagagttagcggcggacgggtgagtaacacgtaggcaacctgcctgtaagactgggataactagcggaaacgttagctaataccggataatttattttctcgcatgaggagataatgaaagacggagcaatctgtcact

SEQ ID NO: 4073 - DNA, 225 bp, unidentified
  misc_feature 1..225: note = bacterial strain Ascusb_110A encodes 16S rRNA
  source 1..225: mol_type = genomic DNA
agagtttgatcatggctcaggatgaacgctggcggcgtgcctaacacatgcaagtcgaacggtgatccattgatattttcggatggatttggatcatagtggcggacgggtgagtaacgcgtggataacctgcctctctctgggggatagcagctggaaacggctggtaataccgcataagaccacagagccgcatggctcagaggtaaaagatttatcggagag

SEQ ID NO: 4074 - DNA, 225 bp, unidentified
  misc_feature 1..225: note = bacterial strain Ascusb_3013B encodes 16S rRNA
  source 1..225: mol_type = genomic DNA
agagtttgatcatggctcaggatgaacgctggcggcgtgcttaacacatgcaagtcgaacgaggttattacagttgaagttttcggatggaaaccgttttaaccgagtggcggacgggtgagtaacgcgtggggaacctgccccattccgggggataccagttggaaacgactgttaataccgcataagcgcacagtaccgcatggtacagtgtgaaaaactccg

SEQ ID NO: 4075 - DNA, 225 bp, unidentified
  misc_feature 1..225: note = bacterial strain Ascusb_8516A encodes 16S rRNA
  source 1..225: mol_type = genomic DNA
agagtttgatcctggctcaggatgaacgctagctacaggcttaacacatgcaagtcgaggggcagcatgtcggtggcttgccaccgatgatggcgaccggcgcacgggtgcgtaacgcgtatccaaccttcccgcaagttggggatagcccggcgaaagtcggattaatacccgatgtggtgctttgaggacatctgattggcactaaaggcttgccgcttgcgg

SEQ ID NO: 4076 - DNA, 225 bp, unidentified; identical to SEQ ID NO: 4062
  misc_feature 1..225: note = bacterial strain Ascusb_714A encodes 16S rRNA
  source 1..225: mol_type = genomic DNA

SEQ ID NO: 4077 - DNA, 225 bp, unidentified; identical to SEQ ID NO: 62
  misc_feature 1..225: note = bacterial strain Ascusb_1784B encodes 16S rRNA
  source 1..225: mol_type = genomic DNA

SEQ ID NO: 4078 - DNA, 225 bp, unidentified; identical to SEQ ID NO: 62
  misc_feature 1..225: note = bacterial strain Ascusb_3047B encodes 16S rRNA
  source 1..225: mol_type = genomic DNA

SEQ ID NO: 4079 - DNA, 225 bp, unidentified; identical to SEQ ID NO: 62
  misc_feature 1..225: note = bacterial strain Ascusb_2140A encodes 16S rRNA
  source 1..225: mol_type = genomic DNA

SEQ ID NO: 4080 - DNA, 225 bp, unidentified
  misc_feature 1..225: note = bacterial strain Ascusb_2917A encodes 16S rRNA
  source 1..225: mol_type = genomic DNA
agagtttgatcatggctcaggacgaacgctggcggcgtgcctaatacatgcaagtcgagcggacttgatggagagcttgctctccagagagttagcggcggacgggtgagtaacgcgtaggtaacctgcctactagcgggggataactattggaaacgatagctaataccgcataacagcatttaacccatgttagatgcttgaaaggagcaattgcttcactag

SEQ ID NO: 4081 - DNA, 225 bp, unidentified; identical to SEQ ID NO: 4080
  misc_feature 1..225: note = bacterial strain Ascusb_555A encodes 16S rRNA
  source 1..225: mol_type = genomic DNA

SEQ ID NO: 4082 - DNA, 225 bp, unidentified
  misc_feature 1..225: note = bacterial strain Ascusb_1618B encodes 16S rRNA
  source 1..225: mol_type = genomic DNA
agagtttgatcatggctcaggatgaacgctagctacaggcttaacacatgcaagtcgaggggtaacgatattgaaagcttgctttcgataggcgacgaccggcgcacgggtgagtaacgcgtatccaacctgcccataactaagggataatccgtagaaatgcggtctaataccttatgtgttccgacgaggacatctgaattggaataaagatttatcggttat

SEQ ID NO: 4083 - DNA, 225 bp, unidentified
  misc_feature 1..225: note = bacterial strain Ascusb_534B encodes 16S rRNA
  source 1..225: mol_type = genomic DNA
agagtttgatcctggctcaggatgaacgctagctacaggcttaacacatgcaagtcgaggggtaacatgaagaaagcttgctttctttgatgacgaccggcgcacgggtgagtatcgcgtatccaacctgcccataagtagggaatagccttgcgaaagtaagattaatgccctatggtttccgttgaggacatctgagatggaataaagatttatcgcttatgg

SEQ ID NO: 4084 - DNA, 225 bp, unidentified; identical to SEQ ID NO: 4083
  misc_feature 1..225: note = bacterial strain Ascusb_1179C encodes 16S rRNA
  source 1..225: mol_type = genomic DNA

SEQ ID NO: 4085 - DNA, 225 bp, unidentified
  misc_feature 1..225: note = bacterial strain Ascusb_1536B encodes 16S rRNA
  source 1..225: mol_type = genomic DNA
agagtttgatcatggctcaggataaacgctggcggcgtgcctaatacatgcaagtcgatcggacgagttcaagcttgcttggacaaatcagaggcgaacgggtgagtaatacgtaagcaacctgcctgtaaggaacgggataacacctggaaacgggcgctaaaaccgtataggtaacggagaggcatctttctgttattaaaggttggaaacacaaacagatgg

SEQ ID NO: 4086 - DNA, 225 bp, unidentified
  misc_feature 1..225: note = bacterial strain Ascusb_132C encodes 16S rRNA
  source 1..225: mol_type = genomic DNA
agagtttgatcctggctcaggatgaacgctggcggcgtgcctaatacatgcaagtcgagcgcgagcgttagaagcttgcttctaacaatcgagcggcggacgggtgagtaacacgtgggcaacctacctttgagattgggataactaccggaaacggtagctaataccggataggacatgattacataagtagtgatgttaaaaggcggatttatctgccgttca

SEQ ID NO: 4087 - DNA, 225 bp, unidentified
  misc_feature 1..225: note = bacterial strain Ascusb_1278A encodes 16S rRNA
  source 1..225: mol_type = genomic DNA
agagtttgatcatggctcagattgaacgctggcggcaggcttaacacatgcaagtcgaacggtagcgggaagaaagcttgctttctttgccgacgagtggcggacgggtgagtaatgcttggggatctggcttatggagggggataacgacgggaaactgtcgctaataccgcgtaatatcttcggattaaagggtgggactttcgggccacctgccataagatg

SEQ ID NO: 4088 - DNA, 225 bp, unidentified
  misc_feature 1..225: note = bacterial strain Ascusb_654A encodes 16S rRNA
  source 1..225: mol_type = genomic DNA
agagtttgatcatggctcaggatgaacgctggcggcgtgcctaacacatgcaagtcgaacggggttaagggaaattttcggatggaacttaacttagtggcggacgggtgagtaacgcgtggataacctgcctcacacagggggatagcagctggaaacggctggtaataccgcataagaccacgaccccgcatgggggtgtggtaaaagatttatcggtgtgag

SEQ ID NO: 4089 - DNA, 225 bp, unidentified
  misc_feature 1..225: note = bacterial strain Ascusb_221C encodes 16S rRNA
  source 1..225: mol_type = genomic DNA
agagtttgatcatggctcaggacgaacgctggcggcgtgcctaatacatgcaagtcgagcgaatctttgggagcttgctcttttaagattagcggcggacgggtgagtaacacgtgggcaacctgcctgtaagacggggataactccgggaaaccggggctaataccggatgattcttctctgcacatgcagggaagctaaaagatggtttacgctatcgcttac

SEQ ID NO: 4090 - DNA, 225 bp, unidentified
  misc_feature 1..225: note = bacterial strain Ascusb_2191C encodes 16S rRNA
  source 1..225: mol_type = genomic DNA
agagtttgatcatggctcaggatgaacgctggcggcgtgcctaacacatgcaagtcgaacggtggtccattgatattttcggatggatatggatcatagtggcggacgggtgagtaacgcgtggataacctgcctctctctgggggatagcagctggaaacggttggtaataccgcataagaccacagagccgcatgactcaggggtaaaagatttatcggagag

SEQ ID NO: 4091 - DNA, 225 bp, unidentified
  misc_feature 1..225: note = bacterial strain Ascusb_10267B encodes 16S rRNA
  source 1..225: mol_type = genomic DNA
agagtttgatcctggctcaggacgaacgctggcggcgtgcctaatacatgcaagtcgagcggactaataggttcttcggaacctgttggttagcggcggacgggtgagtaacacgtaggcaacctgcccgtaagactgggataactaccggaaacggtagctaataccggatacgcaagtttctcgcatgggggacttgggaaaggcggagcaatctgtcactta

SEQ ID NO: 4092 - DNA, 225 bp, unidentified
  misc_feature 1..225: note = bacterial strain Ascusb_2897A encodes 16S rRNA
  source 1..225: mol_type = genomic DNA
agagtttgatcatggctcaggacgaacgctggcggcgtgcttaacacatgcaagtcgaacggagaatttgcttcggtgaattcttagtggcgaacgggtgagtaacgcgtaggcaacctgccctctggttggggacaacattccgaaagggatgctaataccgaatgtgctcacacttccgcatggaggtgtgaggaaagatggcctctacttgtaagctatcgc

SEQ ID NO: 4093 - DNA, 225 bp, unidentified; identical to SEQ ID NO: 1725
  misc_feature 1..225: note = bacterial strain Ascusb_19701A encodes 16S rRNA
  source 1..225: mol_type = genomic DNA

SEQ ID NO: 4094 - DNA, 225 bp, unidentified
  misc_feature 1..225: note = bacterial strain Ascusb_9898B encodes 16S rRNA
  source 1..225: mol_type = genomic DNA
agagtttgatcatggctcaggatgaacgccggcggtgtgcctaatacatgcaagtcgaacgcgttggcccaactgattgaacgtgcttgcacggacttgacgttggtttaccaacgagtggcggacgggtgagtaacacgtaggtaacctgccccaaagcgggggataacatttggaaacagatgctaataccgcataacaatttgaatcgcatgattcaaattt

SEQ ID NO: 4095 - DNA, 225 bp, unidentified
  misc_feature 1..225: note = bacterial strain Ascusb_299B encodes 16S rRNA
  source 1..225: mol_type = genomic DNA
agagtttgatcctggctcaggatgaacgctggcggcgtgcttaacacatgcaagtcgaacggagttaataagcggaagtcttcggatggaagcttgttaacttagtggcggacgggtgagtaacgcgtgggtaacctgccttatacagggggataacagccggaaacggttgctaataccgcataagcatacagtaccgcatggtacagtgtgaaaaagattaag

SEQ ID NO: 4096 - DNA, 225 bp, unidentified; identical to SEQ ID NO: 4095
  misc_feature 1..225: note = bacterial strain Ascusb_346B encodes 16S rRNA
  source 1..225: mol_type = genomic DNA

SEQ ID NO: 4097 - DNA, 225 bp, unidentified
  misc_feature 1..225: note = bacterial strain Ascusb_1271A encodes 16S rRNA
  source 1..225: mol_type = genomic DNA
agagtttgatcctggctcaggacgaacgctggcggcgtgcctaacacatgcaagtcgagcgaagtgcttattaggaaatcttcggatggaatgataagtatcttagcggcggatgggtgagtaacgcgtgaggaacctgccttctacaagggaatagcctcgggaaaccgggattaataccctatgacacttcttaatcgcatgattttgaagttaaagcgttag

SEQ ID NO: 4098 - DNA, 225 bp, unidentified
  misc_feature 1..225: note = bacterial strain Ascusb_3758C encodes 16S rRNA
  source 1..225: mol_type = genomic DNA
agagtttgatcatggctcaggacgaacgctggcggcgtgcctaatacatgcaagtcgagcggacctgatggagtgcttgcactcctgatggttagcggcggacgggtgagtaacacgtaggcaacctgcccgtaagaccgggataactaccggaaacggtagctaataccggataatcaagcctctcgcatgagaagcttgggaaaggcggagcaatctgtcact

SEQ ID NO: 4099 - DNA, 225 bp, unidentified
  misc_feature 1..225: note = bacterial strain Ascusb_20B encodes 16S rRNA
  source 1..225: mol_type = genomic DNA
agagtttgatcctggctcaggacgaacgctggcggcgtgcttaacacatgcaagtcgagcgatgaagcttccttcgggaagtggattagcggcggacgggtgagtaacacgtgggtaacctgcctcaaagtgggggatagccttccgaaaggaagattaataccgcataacataagagaatcgcatgattttcttatcaaagatttattgctttgagatggaccc

SEQ ID NO: 4100 - DNA, 225 bp, unidentified
  misc_feature 1..225: note = bacterial strain Ascusb_1989B encodes 16S rRNA
  source 1..225: mol_type = genomic DNA
agagtttgatcctggctcaggacgaacgctggcggcgtgcctaatacatgcaagtcgagcggacttgatggagagcttgctctccagagggttagcggcggacgggtgagtaacacgtaggtaacctgcctgtaagactgggataactagcggaaacgttagctaataccggataatttattttctcgcatggggaagtaatgaaagacggagcaatctgtcact

SEQ ID NO: 4101 - DNA, 225 bp, unidentified; identical to SEQ ID NO: 4100
  misc_feature 1..225: note = bacterial strain Ascusb_132D encodes 16S rRNA
  source 1..225: mol_type = genomic DNA

SEQ ID NO: 4102 - DNA, 225 bp, unidentified; identical to SEQ ID NO: 4100
  misc_feature 1..225: note = bacterial strain Ascusb_3718C encodes 16S rRNA
  source 1..225: mol_type = genomic DNA

SEQ ID NO: 4103 - DNA, 225 bp, unidentified
  misc_feature 1..225: note = bacterial strain Ascusb_18A encodes 16S rRNA
  source 1..225: mol_type = genomic DNA
agagtttgatcctggctcaggacgaacgctggcggcgtgcttaacacatgcaagtcgagcgatgaagcttccttcgggaggtggattagcggcggacgggtgagtaacacgtgggtaacctgcctcaaagtgggggatagccttccgaaaggaagattaataccgcataatataagagaatcgcatgattttcttatcaaagatttattgctttgagatggaccc

SEQ ID NO: 4104 - DNA, 225 bp, unidentified; identical to SEQ ID NO: 2143
  misc_feature 1..225: note = bacterial strain Ascusb_18B encodes 16S rRNA
  source 1..225: mol_type = genomic DNA

SEQ ID NO: 4105 - DNA, 225 bp, unidentified
  misc_feature 1..225: note = bacterial strain Ascusb_2495A encodes 16S rRNA
  source 1..225: mol_type = genomic DNA
agagtttgatcatggctcaggacgaacgctggcggcgtgcctaacacatgcaagtcgagcgaagttttcaaagcagatttcttcggattgaagctttgattatcttagcggcggacgggtgagtaacgcgtgagaaacctgcctttcacaaagggatagcctcgggaaactgggattaataccttatgatactaattcttcgcatgaagaattagtcaaagcgta

SEQ ID NO: 4106 - DNA, 225 bp, unidentified
  misc_feature 1..225: note = bacterial strain Ascusb_211C encodes 16S rRNA
  source 1..225: mol_type = genomic DNA
agagtttgatcctggctcagattgaacgctggcggcaggcctaacacatgcaagtcgagcggtaacagaagaaagcttgctttcttgctgacgagcggcggacgggtgagtaatgtatggggatctgcccgatagagggggataactactggaaacggtggctaataccgcatgacgtctacggaccaaagcaggggctcttcggaccttgcgctatcggatgaa

SEQ ID NO: 4107 - DNA, 225 bp, unidentified; identical to SEQ ID NO: 4106
  misc_feature 1..225: note = bacterial strain Ascusb_310C encodes 16S rRNA
  source 1..225: mol_type = genomic DNA

SEQ ID NO: 4108 - DNA, 225 bp, unidentified
  misc_feature 1..225: note = bacterial strain Ascusb_1924B encodes 16S rRNA
  source 1..225: mol_type = genomic DNA
agagtttgatcatggctcaggacgaacgctggcggcgtgcctaatacatgcaagtcgagcggacctgatggagtgcttgcactcctgatggttagcggcggacgggtgagtaacacgtaggcaacctgcccgtaagaccgggataactaccggaaacggtagctaataccggatacgcaagtttctcgcatgggggacttgggaaaggcggagcaatctgtcact

SEQ ID NO: 4109 - DNA, 225 bp, unidentified; identical to SEQ ID NO: 4108
  misc_feature 1..225: note = bacterial strain Ascusb_8863B encodes 16S rRNA
  source 1..225: mol_type = genomic DNA

SEQ ID NO: 4110 - DNA, 225 bp, unidentified; identical to SEQ ID NO: 4108
  misc_feature 1..225: note = bacterial strain Ascusb_1189B encodes 16S rRNA
  source 1..225: mol_type = genomic DNA

SEQ ID NO: 4111 - DNA, 225 bp, unidentified; identical to SEQ ID NO: 4108
  misc_feature 1..225: note = bacterial strain Ascusb_2725B encodes 16S rRNA
  source 1..225: mol_type = genomic DNA

SEQ ID NO: 4112 - DNA, 225 bp, unidentified
  misc_feature 1..225: note = bacterial strain Ascusb_2446B encodes 16S rRNA
  source 1..225: mol_type = genomic DNA
agagtttgatcctggctcaggacgaacgctggcggcgtgcctaatacatgcaagtcgagcggagttaattaggagcttgctcttgattaacttagcggcggacgggtgagtaacacgtaggcaacctgcccgtaagactgggataactaccggaaacggtagctaataccggatacgcaagtttctcgcatgggagacttgggaaaggcggagcaatctgtcact

SEQ ID NO: 4113 - DNA, 225 bp, unidentified
  misc_feature 1..225: note = bacterial strain Ascusb_2900A encodes 16S rRNA
  source 1..225: mol_type = genomic DNA
agagtttgatcctggctcagattgaacgctggcggcaggcctaacacatgcaagtcgaacggtaacaggaagcagcttgctgctttgctgacgagtggcggacgggtgagtaatgtctgggaaactgcccgatggagggggataactactggaaacggtagctaataccgcataatgtcgcaagaccaaagagggggaccttcgggcctcttgccatcggatgtg

SEQ ID NO: 4114 - DNA, 225 bp, unidentified
  misc_feature 1..225: note = bacterial strain Ascusb_2067A encodes 16S rRNA
  source 1..225: mol_type = genomic DNA
agagtttgatcatggctcaggatgaacgctggcggcgtgcctaatacatgcaagtcgagcgaatggattaagagcttgctcttatgaagttagcggcggacgggtgagtaacacgtgggtaacctgcccataagactgggataactccgggaaaccggggctaataccggataatattttgaactgcatggttcgaaattgaaaggcggcttcggctgtcactta

SEQ ID NO: 4115 - DNA, 225 bp, unidentified
  misc_feature 1..225: note = bacterial strain Ascusb_1731B encodes 16S rRNA
  source 1..225: mol_type = genomic DNA
agagtttgatcatggctcaggatgaacgctagcgacaggcttaacacatgcaagtcgaggggcagcgggcgagtggcaacacttgctgtcggcgaccggcgcactggtgagtaacacgtatgcaacctgcccccttctgggagataacccatagaaatgtggcctaatatcccatagtcggtccagccgcatggccgggccgggaaaggcgagccggaaggggat

SEQ ID NO: 4116 - DNA, 225 bp, unidentified
  misc_feature 1..225: note = bacterial strain Ascusb_1785B encodes 16S rRNA
  source 1..225: mol_type = genomic DNA
agagtttgatcctggctcaggatgaacgctggcggcgtgcctaatacatgcaagtcgagcgaatggattaagagcttgctcttatgaagttagcggcggacgggtgagtaacacgtgggtaacctgcccataagactgggataactccgggaaaccggggctaataccggatgacattttgaactgcatggttcgaaattgaaaggcggcttcggctgtcactta

SEQ ID NO: 4117 - DNA, 225 bp, unidentified
  misc_feature 1..225: note = bacterial strain Ascusb_1906B encodes 16S rRNA
  source 1..225: mol_type = genomic DNA
agagtttgatcatggctcaggacgaacgctggcggcgtgcttaacacatgcaagtcgaacgagacgattttaagcttgcttagatgagtcgagtggcaaacgggtgagtaacgcgtagacaacctgccgcaaagatggggacaacagtccgaaaggactgctaataccgaatgttgtgcaacctccgcatggaggatgcattaaagatggcctctacttgtaagc

SEQ ID NO: 4118 - DNA, 225 bp, unidentified; identical to SEQ ID NO: 4092
  misc_feature 1..225: note = bacterial strain Ascusb_115B encodes 16S rRNA
  source 1..225: mol_type = genomic DNA

SEQ ID NO: 4119 - DNA, 225 bp, unidentified
  misc_feature 1..225: note = bacterial strain Ascusb_14159A encodes 16S rRNA
  source 1..225: mol_type = genomic DNA
agagtttgatcatggctcaggacgaacgctggcggcgtgcctaatacatgcaagtcgagcggactttaaaagcttgcttttaaagttagcggcggacgggtgagtaacacgtgggcaacctgcctgtaagactgggataacttcgggaaaccggagctaataccggataatccttttcctctcatgaggaaaagctgaaagacggtttacgctgtcacttacaga

SEQ ID NO: 4120 - DNA, 225 bp, unidentified; identical to SEQ ID NO: 4119
  misc_feature 1..225: note = bacterial strain Ascusb_14763A encodes 16S rRNA
  source 1..225: mol_type = genomic DNA

SEQ ID NO: 4121 - DNA, 225 bp, unidentified
  misc_feature 1..225: note = bacterial strain Ascusb_14918A encodes 16S rRNA
  source 1..225: mol_type = genomic DNA
agagtttgatcatggctcagattgaacgctggcggcaggcttaacacatgcaagtcgaacggtagcgggaggaaagcttgctttctttgccgacgagtggcggacgggtgagtaatgcttggggatctggcttatggagggggataacgacgggaaactgtcgctaataccgcgtaatatcttcggattaaagggtgggactttcgggccacccgccataagatg

SEQ ID NO: 4122 - DNA, 225 bp, unidentified; identical to SEQ ID NO: 4091
  misc_feature 1..225: note = bacterial strain Ascusb_2188C encodes 16S rRNA
  source 1..225: mol_type = genomic DNA

SEQ ID NO: 4123 - DNA, 225 bp, unidentified; identical to SEQ ID NO: 4091
  misc_feature 1..225: note = bacterial strain Ascusb_668B encodes 16S rRNA
  source 1..225: mol_type = genomic DNA

SEQ ID NO: 4124 - DNA, 225 bp, unidentified; identical to SEQ ID NO: 4091
  misc_feature 1..225: note = bacterial strain Ascusb_804C encodes 16S rRNA
  source 1..225: mol_type = genomic DNA

SEQ ID NO: 4125 - DNA, 225 bp, unidentified
  misc_feature 1..225: note = bacterial strain Ascusb_773A encodes 16S rRNA
  source 1..225: mol_type = genomic DNA
agagtttgatcatggctcaggacgaacgctggcggcgtgcctaatacatgcaagtcgtgcggaccttttaaaagcttgcttttaaaaggttagcggcggacgggtgagtaacacgtgggcaacctgcctgtaagatcgggataacgccgggaaaccggggctaataccggatagttttttcctccgcatggaggaaaaaggaaagacggcttttgctgtcactta

SEQ ID NO: 4126 - DNA, 225 bp, unidentified; identical to SEQ ID NO: 4125
  misc_feature 1..225: note = bacterial strain Ascusb_15604A encodes 16S rRNA
  source 1..225: mol_type = genomic DNA

SEQ ID NO: 4127 - DNA, 225 bp, unidentified; identical to SEQ ID NO: 4125
  misc_feature 1..225: note = bacterial strain Ascusb_17906A encodes 16S rRNA
  source 1..225: mol_type = genomic DNA

SEQ ID NO: 4128 - DNA, 225 bp, unidentified; identical to SEQ ID NO: 1527
  misc_feature 1..225: note = bacterial strain Ascusb_15152B encodes 16S rRNA
  source 1..225: mol_type = genomic DNA

SEQ ID NO: 4129 - DNA, 225 bp, unidentified
  misc_feature 1..225: note = bacterial strain Ascusb_136B encodes 16S rRNA
  source 1..225: mol_type = genomic DNA
agagtttgatcctggctcaggatgaacgctagctacaggcttaacacatgcaagtcgaggggaaacgatgcggaagcttgcttctgcaggcgtcgaccggcgcacgggtgagtaacgcgtatccaacctgccccgaggtagggaataatccgtagaaatgcggtctaataccttatgtgctccgaagaggacatctgatttggagtaaagatttatcgccttggg

SEQ ID NO: 4130 - DNA, 225 bp, unidentified; identical to SEQ ID NO: 4121
  misc_feature 1..225: note = bacterial strain Ascusb_45A encodes 16S rRNA
  source 1..225: mol_type = genomic DNA

SEQ ID NO: 4131 - DNA, 225 bp, unidentified; identical to SEQ ID NO: 4121
  misc_feature 1..225: note = bacterial strain Ascusb_2598A encodes 16S rRNA
  source 1..225: mol_type = genomic DNA

SEQ ID NO: 4132 - DNA, 225 bp, unidentified; identical to SEQ ID NO: 4121
  misc_feature 1..225: note = bacterial strain Ascusb_17962A encodes 16S rRNA
  source 1..225: mol_type = genomic DNA

SEQ ID NO: 4133 - DNA, 225 bp, unidentified; identical to SEQ ID NO: 4121
  misc_feature 1..225: note = bacterial strain Ascusb_13295A encodes 16S rRNA
  source 1..225: mol_type = genomic DNA

SEQ ID NO: 4134 - DNA, 225 bp, unidentified; identical to SEQ ID NO: 4119
  misc_feature 1..225: note = bacterial strain Ascusb_4900A encodes 16S rRNA
  source 1..225: mol_type = genomic DNA

SEQ ID NO: 4135 - DNA, 225 bp, unidentified
  misc_feature 1..225: note = bacterial strain Ascusb_223C encodes 16S rRNA
  source 1..225: mol_type = genomic DNA
agagtttgatcatggctcaggacgaacgctggcggcgtgcctaatacatgcaagtcgaacgaactctggtattgattggtgcttgcatcatgatttacatttgagtgagtggcgaactggtgagtaacacgtgggaaacctgcccagaagcgggggataacacctggaaacagatgctaataccgcataacaacttggaccgcatggtccgagcttgaaagatgg

SEQ ID NO: 4136 - DNA, 225 bp, unidentified; identical to SEQ ID NO: 4135
  misc_feature 1..225: note = bacterial strain Ascusb_198C encodes 16S rRNA
  source 1..225: mol_type = genomic DNA

SEQ ID NO: 4137 - DNA, 225 bp, unidentified
  misc_feature 1..225: note = bacterial strain Ascusb_19281B encodes 16S rRNA
  source 1..225: mol_type = genomic DNA
agagtttgatcctggctcaggatgaacgctggcggcgtgcttaacacatgcaagtcgaacggagtttataagaggaagccttcgggtggaaacttataaacttagtggcggacgggtgagtaacgcgtgggtaacctgccttacacagggggataacaactggaaacggttgctaataccgcataagcgcacagcatcgcatgatacagtgtgaaaagatttatc

SEQ ID NO: 4138 - DNA, 225 bp, unidentified; identical to SEQ ID NO: 4137
  misc_feature 1..225: note = bacterial strain Ascusb_20167B encodes 16S rRNA
  source 1..225: mol_type = genomic DNA

SEQ ID NO: 4139 - DNA, 225 bp, unidentified; identical to SEQ ID NO: 4137
  misc_feature 1..225: note = bacterial strain Ascusb_1125B encodes 16S rRNA
  source 1..225: mol_type = genomic DNA

SEQ ID NO: 4140 - DNA, 225 bp, unidentified; identical to SEQ ID NO: 4137
  misc_feature 1..225: note = bacterial strain Ascusb_14943B encodes 16S rRNA
  source 1..225: mol_type = genomic DNA

SEQ ID NO: 4141 - DNA, 225 bp, unidentified; identical to SEQ ID NO: 4137
  misc_feature 1..225: note = bacterial strain Ascusb_19296B encodes 16S rRNA
  source 1..225: mol_type = genomic DNA

SEQ ID NO: 4142 - DNA, 225 bp, unidentified
  misc_feature 1..225: note = bacterial strain Ascusb_624C encodes 16S rRNA
  source 1..225: mol_type = genomic DNA
agagtttgatcatggctcagattgaacgctggcggcaggcttaacacatgcaagtcgaacggtaacgggttgaaagcttgctttcaatgctgacgagtggcggacgggtgagtaaggcttggggatctggcttttggagggggataaccattggaaacgatggctaataccgcatagtatcgagagatgaaaggggtgggaaaccacttgccaagggatgaaccc

SEQ ID NO: 4143 - DNA, 225 bp, unidentified; identical to SEQ ID NO: 4142
  misc_feature 1..225: note = bacterial strain Ascusb_579B encodes 16S rRNA
  source 1..225: mol_type = genomic DNA

SEQ ID NO: 4144 - DNA, 225 bp, unidentified; identical to SEQ ID NO: 4119
  misc_feature 1..225: note = bacterial strain Ascusb_1575A encodes 16S rRNA
  source 1..225: mol_type = genomic DNA

SEQ ID NO: 4145 - DNA, 225 bp, unidentified; identical to SEQ ID NO: 4119
  misc_feature 1..225: note = bacterial strain Ascusb_21055A encodes 16S rRNA
  source 1..225: mol_type = genomic DNA

SEQ ID NO: 4146 - DNA, 225 bp, unidentified; identical to SEQ ID NO: 4064
  misc_feature 1..225: note = bacterial strain Ascusb_4208B encodes 16S rRNA
  source 1..225: mol_type = genomic DNA

SEQ ID NO: 4147 - DNA, 225 bp, unidentified; identical to SEQ ID NO: 4090
  misc_feature 1..225: note = bacterial strain Ascusb_3089C encodes 16S rRNA
  source 1..225: mol_type = genomic DNA

SEQ ID NO: 4148 - DNA, 225 bp, unidentified
  misc_feature 1..225: note = bacterial strain Ascusb_2255A encodes 16S rRNA
  source 1..225: mol_type = genomic DNA
agagtttgatcatggctcaggatgaacgctagctacaggcttaacacatgcaagtcgaggggcagcatttcagtttgcttgcaaactggagatggcgaccggcgcacgggtgagtaacacgtatccaacctgccgataactcggggatagcctttcgaaagaaagattaatacccgatggtataatcagaccgcatggtcttgttattaaagaatttcggttatc

SEQ ID NO: 4149 - DNA, 225 bp, unidentified
  misc_feature 1..225: note = bacterial strain Ascusb_338A encodes 16S rRNA
  source 1..225: mol_type = genomic DNA
agagtttgatcctggctcaggatgaacgctagctacaggcttaacacatgcaagtcgaggggcagcattgggatagcttgctattccagatggcgaccggcgcacgggtgagtaacgcgtatccaaccttccctatagtagagaatagcccggcgaaagtcgaattaatgctctatgttgtgttttgaggacatctgacgaacaccaaaggttcaccgctatagg

SEQ ID NO: 4150 - DNA, 225 bp, unidentified
  misc_feature 1..225: note = bacterial strain Ascusb_10663B encodes 16S rRNA
  source 1..225: mol_type = genomic DNA
agagtttgatcctggctcagattgaacgctggcggcaggcctaacacatgcaagtcgaacggtaacaggaagcagcttgctgcttcgctgacgagtggcggacgggtgagtaatgtctgggaaactgcctgatggagggggataactactggaaacggtagctaataccgcataacgtcgcaagaccaaagtgggggacctttgggcctcatgccatcagatgtg

SEQ ID NO: 4151 - DNA, 225 bp, unidentified
  misc_feature 1..225: note = bacterial strain Ascusb_4840B encodes 16S rRNA
  source 1..225: mol_type = genomic DNA
agagtttgatcatggctcaggatgaacgctagctacaggcttaacacatgcaagtcgaggggcagcatgaacttagcttgctaagtttgatggcgaccggcgcacgggtgagtaacgcgtatccaacctggcccacagtagggtatagcccggcgaaagtcggattaatcccctatgcactccgaagcgggcatctaatttggagtaaaggtttaccgctgtggg

SEQ ID NO: 4152 - DNA, 225 bp, unidentified
  misc_feature 1..225: note = bacterial strain Ascusb_1834B encodes 16S rRNA
  source 1..225: mol_type = genomic DNA
agagtttgatcctggctcaggatgaacgctagctacaggcttaacacatgcaagtcgaggggcagcatagggtttgcttgcaaactctgatggcgaccggcgcacgggtgagtaacgcgtatccaacctgcccatggctagggaatagcccgttgaaaagcggattaatgccctatggggtcctttgcagacatctaacgaggactaaaggtttaccggccatgg

SEQ ID NO: 4153 - DNA, 225 bp, unidentified
  misc_feature 1..225: note = bacterial strain Ascusb_3969A encodes 16S rRNA
  source 1..225: mol_type = genomic DNA
agagtttgatcatggctcaggatgaacgctagctacaggcttaacacatgcaagtcgaggggcagcatatcgaaagcttgcttttgatgatggcgaccggcgcacgggtgagtaacgcgtatccaaccttccctatactagaggatagcccggcgaaagtcggattaatactctatgttcttcgtagaagacatctgaaatgaagcaaaggtttaccggtatagg

SEQ ID NO: 4154 - DNA, 225 bp, unidentified
  misc_feature 1..225: note = bacterial strain Ascusb_1115A encodes 16S rRNA
  source 1..225: mol_type = genomic DNA
agagtttgatcatggctcaggatgaacgctggcggcgtgcctaacacatgcaagtcgaacgaaactgattccatgaaacttcggtagattggatgaaagttgagtggcggacgggtgagtaacacgtgggcaacctgcctcacagagggggatagcagttggaaacgactgataataccgcataagcacacagtaccgcatggtacagggtgaaaagatttatca

SEQ ID NO: 4155 - DNA, 225 bp, unidentified
  misc_feature 1..225: note = bacterial strain Ascusb_724B encodes 16S rRNA
  source 1..225: mol_type = genomic DNA
agagtttgatcctggctcaggatgaacgctggcggcgtgcctaatacatgcaagtcgagcgagggtagcaatacccgagcggcgaacgggtgagtaacacgtaggtaacctgcctttgagactgggatacccggacgaaagttcggctaataccggataacaacggggacggcatcgtctccgcttgaaaggtgcgtttgcaccactcttagatggacctgcggc

SEQ ID NO: 4156 - DNA, 225 bp, unidentified; identical to SEQ ID NO: 4155
  misc_feature 1..225: note = bacterial strain Ascusb_2886C encodes 16S rRNA
  source 1..225: mol_type = genomic DNA

SEQ ID NO: 4157 - DNA, 225 bp, unidentified; identical to SEQ ID NO: 4155
  misc_feature 1..225: note = bacterial strain Ascusb_2027B encodes 16S rRNA
  source 1..225: mol_type = genomic DNA

SEQ ID NO: 4158 - DNA, 217 bp, unidentified
  misc_feature 1..217: note = bacterial strain Ascusb_514B encodes 16S rRNA
  source 1..217: mol_type = genomic DNA
agagtttgatcctggctcaggacgaacgctggcggcgtgcctaatacatgcaagtcgagcggacttgatggagagcttgctctcctgatggttagcggcggacgggtgagtaacacgtaggtaacctgcctgtaagactgggataactagcggaaacgttagctaataccggataatttattttctcgcatgggaagataatgaaagacggagcaat

SEQ ID NO: 4159 - DNA, 217 bp, unidentified; identical to SEQ ID NO: 4158
  misc_feature 1..217: note = bacterial strain Ascusb_4119C encodes 16S rRNA
  source 1..217: mol_type = genomic DNA

SEQ ID NO: 4160 - DNA, 225 bp, unidentified
  misc_feature 1..225: note = bacterial strain Ascusb_1549A encodes 16S rRNA
  source 1..225: mol_type = genomic DNA
agagtttgatcatggctcaggatgaacgctagctacaggcttaacacatgcaagtcgaggggaaacgacatcgaaagcttgcttttggtgggcgtcgaccggcgcacgggtgagtaacgcgtatccaacctacctggaaataaggaataatccgtggaaacgcggtctaatgccttatgtgctccgatgaggacatctgaattggagtaaagatttattgttttc

SEQ ID NO: 4161 - DNA, 217 bp, unidentified; identical to SEQ ID NO: 4158
  misc_feature 1..217: note = bacterial strain Ascusb_4552A encodes 16S rRNA
  source 1..217: mol_type = genomic DNA

SEQ ID NO: 4162 - DNA, 225 bp, unidentified; identical to SEQ ID NO: 2461
  misc_feature 1..225: note = bacterial strain Ascusb_9020B encodes 16S rRNA
  source 1..225: mol_type = genomic DNA

SEQ ID NO: 4163 - DNA, 225 bp, unidentified; identical to SEQ ID NO: 3885
  misc_feature 1..225: note = bacterial strain Ascusb_1867A encodes 16S rRNA
  source 1..225: mol_type = genomic DNA

SEQ ID NO: 4164 - DNA, 225 bp, unidentified; identical to SEQ ID NO: 3885
  misc_feature 1..225: note = bacterial strain Ascusb_3294A encodes 16S rRNA
  source 1..225: mol_type = genomic DNA

SEQ ID NO: 4165 - DNA, 225 bp, unidentified; identical to SEQ ID NO: 2054
  misc_feature 1..225: note = bacterial strain Ascusb_855A encodes 16S rRNA
  source 1..225: mol_type = genomic DNA

SEQ ID NO: 4166 - DNA, 225 bp, unidentified; identical to SEQ ID NO: 2054
  misc_feature 1..225: note = bacterial strain Ascusb_1281A encodes 16S rRNA
  source 1..225: mol_type = genomic DNA

SEQ ID NO: 4167 - DNA, 225 bp, unidentified
  misc_feature 1..225: note = bacterial strain Ascusb_1985C encodes 16S rRNA
  source 1..225: mol_type = genomic DNA
agagtttgatcctggctcaggatgaacgctagctacaggcttaacacatgcaagtcgaggggtaacgacagcgaaagcttgctttcgataggcgacgaccggcgcacgggtgagtaacgcgtatccaacctgcccataactaagggataatccgtagaaatgcggtctaataccttatgtgttccgacgaggacatctgaattggaataaagatttatcggttat

SEQ ID NO: 4168 - DNA, 225 bp, unidentified; identical to SEQ ID NO: 4167
  misc_feature 1..225: note = bacterial strain Ascusb_14185B encodes 16S rRNA
  source 1..225: mol_type = genomic DNA

SEQ ID NO: 4169 - DNA, 225 bp, unidentified; identical to SEQ ID NO: 4167
  misc_feature 1..225: note = bacterial strain Ascusb_3092B encodes 16S rRNA
  source 1..225: mol_type = genomic DNA

SEQ ID NO: 4170 - DNA, 225 bp, unidentified; identical to SEQ ID NO: 4167
  misc_feature 1..225: note = bacterial strain Ascusb_15051A encodes 16S rRNA
  source 1..225: mol_type = genomic DNA

SEQ ID NO: 4171 - DNA, 225 bp, unidentified
  misc_feature 1..225: note = bacterial strain Ascusb_35A encodes 16S rRNA
  source 1..225: mol_type = genomic DNA
agagtttgatcctggctcaggacgaacgctggcggcgtgcttaacacatgcaagtcgaacgatgaacctccttcgggaggggattagtggcgaacgggtgagtaacacgtgggcaacctgccccgcacactgggataagccctggaaacggggtctaataccggatatgactcaaggtcgcatggtcttgggtggaaagctccggcggtgcgggatgggcccgcg

SEQ ID NO: 4172 - DNA, 225 bp, unidentified
  misc_feature 1..225: note = bacterial strain Ascusb_8042A encodes 16S rRNA
  source 1..225: mol_type = genomic DNA
agagtttgatcctggctcaggatgaacgctggcggcgtgcctaacacatgcaagtcgaacggagtttagcgctgatgaagcttcggcagattcttgttaaacttagtggcggacgggtgagtaacgcgtgggtaacctgcctcatacagggggatagcagttggaaacgactgataacaccgcataagcgcacaggatcgcatgatctagtgtgaaaatatttat

SEQ ID NO: 4173 - DNA, 225 bp, unidentified
  misc_feature 1..225: note = bacterial strain Ascusb_3554A encodes 16S rRNA
  source 1..225: mol_type = genomic DNA
agagtttgatcctggctcaggacgaacgctggcggcgtgcttaacacatgcaagtcgaacgagaagagatgagaagcttgcttcttattgattcgagtggcaaacgggtgagtaacgcgtaagcaacctgcccttcagatggggacaacagctggaaacggctgctaataccgaatacgttctttttgtcgcatggcagagagaagaaagggaggctcttcggag

SEQ ID NO: 4174 - DNA, 225 bp, unidentified
  misc_feature 1..225: note = bacterial strain Ascusb_5201B encodes 16S rRNA
  source 1..225: mol_type = genomic DNA
agagtttgatcatggctcaggacgaacgctggcggcgtgcctaatacatgcaagtcgagcggacctgatggagtgcttgcactcctgacggttagcggcggacgggtgagtaacacgtaggcaacctgcccgtaagaccgggataactaccggaaacggtagctaataccggataatcaagtcttccgcatgggaggcttgggaaaggcggttctgaatttattc

SEQ ID NO: 4175 - DNA, 225 bp, unidentified; identical to SEQ ID NO: 62
  misc_feature 1..225: note = bacterial strain Ascusb_6229A encodes 16S rRNA
  source 1..225: mol_type = genomic DNA

SEQ ID NO: 4176 - DNA, 225 bp, unidentified
  misc_feature 1..225: note = bacterial strain Ascusb_2648A encodes 16S rRNA
  source 1..225: mol_type = genomic DNA
agagtttgatcctggctcaggacgaacgctggcggcgtgcctaatacatgcaagtcgaacgctttttctttcaccggagcttgctccaccgaaagaaaaagagtggcgaacgggtgagtaacacgtgggtaacctgcccatcagaaggggataacacttggaaacaggtgctaataccgtataacactattttccgcatgggagaaagttgaaaggcgcttttgc

SEQ ID NO: 4177 - DNA, 225 bp, unidentified; identical to SEQ ID NO: 4176
  misc_feature 1..225: note = bacterial strain Ascusb_4062A encodes 16S rRNA
  source 1..225: mol_type = genomic DNA

SEQ ID NO: 4178 - DNA, 225 bp, unidentified
  misc_feature 1..225: note = bacterial strain Ascusb_3539A encodes 16S rRNA
  source 1..225: mol_type = genomic DNA
agagtttgatcctggctcaggatgaacgctagctacaggcttaacacatgcaagtcgaggggcagcatgacggtagcttgctactgttgatggcgaccggcgcacgggtgagtaacgcgtatccaaccttcccacaaataaggaatagcccggtgaaaatcgaattaataccttatgtggtcataagaagacatctgattatgattaaagatttatcgtttgtgg

SEQ ID NO: 4179 - DNA, 225 bp, unidentified
  misc_feature 1..225: note = bacterial strain Ascusb_10976B encodes 16S rRNA
  source 1..225: mol_type = genomic DNA
agagtttgatcatggctcagattgaacgctggcggcaggcttaatacatgcaagtcgaacggtaacggcaggaagcttgcttcctggctgacgagtggcggacgggtgagtaatacctggggagctgcctgaatgagggggacaacacctggaaacgggtgctaataccgcgtaagccctgagggggaaaggccgggcaaccggtcgcattcagatgcgcccagg

SEQ ID NO: 4180 - DNA, 225 bp, unidentified; identical to SEQ ID NO: 4179
  misc_feature 1..225: note = bacterial strain Ascusb_15111B encodes 16S rRNA
  source 1..225: mol_type = genomic DNA

SEQ ID NO: 4181 - DNA, 225 bp, unidentified; identical to SEQ ID NO: 4179
  misc_feature 1..225: note = bacterial strain Ascusb_15117B encodes 16S rRNA
  source 1..225: mol_type = genomic DNA

SEQ ID NO: 4182 - DNA, 225 bp, unidentified; identical to SEQ ID NO: 4179
  misc_feature 1..225: note = bacterial strain Ascusb_9316A encodes 16S rRNA
  source 1..225: mol_type = genomic DNA

SEQ ID NO: 4183 - DNA, 225 bp, unidentified; identical to SEQ ID NO: 4070
  misc_feature 1..225: note = bacterial strain Ascusb_992A encodes 16S rRNA
  source 1..225: mol_type = genomic DNA

SEQ ID NO: 4184 - DNA, 225 bp, unidentified; identical to SEQ ID NO: 4070
  misc_feature 1..225: note = bacterial strain Ascusb_12024A encodes 16S rRNA
  source 1..225: mol_type = genomic DNA

SEQ ID NO: 4185 - DNA, 225 bp, unidentified; identical to SEQ ID NO: 4070
  misc_feature 1..225: note = bacterial strain Ascusb_3175A encodes 16S rRNA
  source 1..225: mol_type = genomic DNA

SEQ ID NO: 4186 - DNA, 225 bp, unidentified; identical to SEQ ID NO: 4070
  misc_feature 1..225: note = bacterial strain Ascusb_5433A encodes 16S rRNA
  source 1..225: mol_type = genomic DNA

SEQ ID NO: 4187 - DNA, 225 bp, unidentified; identical to SEQ ID NO: 2098
  misc_feature 1..225: note = bacterial strain Ascusb_17652B encodes 16S rRNA
  source 1..225: mol_type = genomic DNA

SEQ ID NO: 4188 - DNA, 225 bp, unidentified; identical to SEQ ID NO: 4178
  misc_feature 1..225: note = bacterial strain Ascusb_511A encodes 16S rRNA
  source 1..225: mol_type = genomic DNA

SEQ ID NO: 4189 - DNA, 225 bp, unidentified; identical to SEQ ID NO: 4178
  misc_feature 1..225: note = bacterial strain Ascusb_312A encodes 16S rRNA
  source 1..225: mol_type = genomic DNA

SEQ ID NO: 4190 - DNA, 225 bp, unidentified
  misc_feature 1..225: note = bacterial strain Ascusb_19874A encodes 16S rRNA
  source 1..225: mol_type = genomic DNA
agagtttgatcatggctcaggacgaacgctggcggcgtgcttaacacatgcaagtcgagcgatgaagcttccttcgggaggtggattagcggcggacgggtgagtaacacgtgggtaacctgcctcaaagtgggggatagccttccgaaaggaagattaataccgcataatataagagaatcgcatgattttcttatcaaagatttattgctttgagatggaccc

SEQ ID NO: 4191 - DNA, 225 bp, unidentified; identical to SEQ ID NO: 4176
  misc_feature 1..225: note = bacterial strain Ascusb_6130A encodes 16S rRNA
  source 1..225: mol_type = genomic DNA

SEQ ID NO: 4192 - DNA, 225 bp, unidentified; identical to SEQ ID NO: 4190
  misc_feature 1..225: note = bacterial strain Ascusb_3228A encodes 16S rRNA
  source 1..225: mol_type = genomic DNA

SEQ ID NO: 4193 - DNA, 225 bp, unidentified; identical to SEQ ID NO: 4190
  misc_feature 1..225: note = bacterial strain Ascusb_116A encodes 16S rRNA
  source 1..225: mol_type = genomic DNA

SEQ ID NO: 4194 - DNA, 225 bp, unidentified; identical to SEQ ID NO: 4190
  misc_feature 1..225: note = bacterial strain Ascusb_439A encodes 16S rRNA
  source 1..225: mol_type = genomic DNA

SEQ ID NO: 4195 - DNA, 225 bp, unidentified; identical to SEQ ID NO: 4190
  misc_feature 1..225: note = bacterial strain Ascusb_10919A encodes 16S rRNA
  source 1..225: mol_type = genomic DNA

SEQ ID NO: 4196 - DNA, 225 bp, unidentified
  misc_feature 1..225: note = bacterial strain Ascusb_2272B encodes 16S rRNA
  source 1..225: mol_type = genomic DNA
agagtttgatcatggctcaggatgaacgctggcggcgtgcctaacacatgcaagtcgaacggtgatccattgatattttcggatggatatggatcatagtggcggacgggtgagtaacgcgtggataacctgcctctctctgggggatagcagctggaaacggctggtaataccgcataagaccacagagccgcatgactcaggggtaaaagatttatcggagag

SEQ ID NO: 4197 - DNA, 225 bp, unidentified
  misc_feature 1..225: note = bacterial strain Ascusb_19172B encodes 16S rRNA
  source 1..225: mol_type = genomic DNA
agagtttgatcatggctcaggacgaacgctggcggcgtgcctaatacatgcaagtagaacgctgaagactttagcttgctaaagttggaagagttgcgaacgggtgagtaacgcgtaggtaacctgcctactagcgggggataactattggaaacgatagctaataccgcataacagcatttaacccatgttagatgcttgaaaggagcaattgcttcactagta

SEQ ID NO: 4198 - DNA, 225 bp, unidentified; identical to SEQ ID NO: 4197
  misc_feature 1..225: note = bacterial strain Ascusb_3031A encodes 16S rRNA
  source 1..225: mol_type = genomic DNA

SEQ ID NO: 4199 - DNA, 225 bp, unidentified
  misc_feature 1..225: note = bacterial strain Ascusb_351B encodes 16S rRNA
  source 1..225: mol_type = genomic DNA
agagtttgatcatggctcaggatgaacgctagctacaggcttaacacatgcaagtcgaggggcagcgtgtacaggtgcttgcaccagtatgacggcgaccggcgcacgggtgagtaacgcgtatccaacctgccatatactcgggtatagcccggtgaaaaccgaattaacccccgatagtgtcctttgcaggcatctaattaggactaaagtttacggtatatg

SEQ ID NO: 4200 - DNA, 225 bp, unidentified
  misc_feature 1..225: note = bacterial strain Ascusb_417A encodes 16S rRNA
  source 1..225: mol_type = genomic DNA
agagtttgatcctggctcaggatgaacgctggcggcgtgcctaacacatgcaagtcgaacgaataacccgccttcgggcggtcatagagtggcgaacgggtgagtaacacgtgaccaaccttccccccgcatggggataaccgggcgaaagcccggctaatacccaatactccgggccctccgcatggaggggccgggaaagcccaggcggcgggggatggggtc

SEQ ID NO: 4201 - DNA, 225 bp, unidentified
  misc_feature 1..225: note = bacterial strain Ascusb_2003A encodes 16S rRNA
  source 1..225: mol_type = genomic DNA
agagtttgatcatggctcaggatgaacgctagctacaggcttaacacatgcaagtcgaggggcatcatgaaggaagcttgcttcctttgatggcgaccggcgcacgggtgagtaacgcgtatccaaccttcccctcagtagggcatagcccgtagaaatgcggattaataccctatgtggtccgatgaggacatctgagctggactaaaggtttaccgctgaggg

SEQ ID NO: 4202 - DNA, 225 bp, unidentified; identical to SEQ ID NO: 4176
  misc_feature 1..225: note = bacterial strain Ascusb_1276A encodes 16S rRNA
  source 1..225: mol_type = genomic DNA

SEQ ID NO: 4203 - DNA, 225 bp, unidentified
  misc_feature 1..225: note = bacterial strain Ascusb_56A encodes 16S rRNA
  source 1..225: mol_type = genomic DNA
agagtttgatcctggctcaggacgaacgctggcggcgtgcttaacacatgcaagtcgagcggtaaggccccttcgggggtacacgagcggcgaacgggtgagtaacacgtgagtaacctgcccctgactctgggataagcctgggaaactgggtctaataccggatatgacctcgtgccgcatggtgtggggtggaaaggtgtttttccggtcagggatgggctc

SEQ ID NO: 4204 - DNA, 225 bp, unidentified; identical to SEQ ID NO: 4149
  misc_feature 1..225: note = bacterial strain Ascusb_847A encodes 16S rRNA
  source 1..225: mol_type = genomic DNA

SEQ ID NO: 4205 - DNA, 225 bp, unidentified
  misc_feature 1..225: note = bacterial strain Ascusb_625A encodes 16S rRNA
  source 1..225: mol_type = genomic DNA
agagtttgatcatggctcaggatgaacgctagctacaggcttaacacatgcaagtcgaggggcagcgagaagagagcttgctttctttgtcggcgaccggcgcacgggtgagtaacgcgtatccaaccttccccatagtagaggatagcccggcgaaagtcggattaatactctatgttgtattttgaggacatctgacgaataccaaagattgatcgctatggg

SEQ ID NO: 4206 - DNA, 225 bp, unidentified
  misc_feature 1..225: note = bacterial strain Ascusb_5587B encodes 16S rRNA
  source 1..225: mol_type = genomic DNA
agagtttgatcatggctcaggacgaacgctggcggcgtgcctcctcccttcccgtctccctcttcctcctttctctttctccctttttccgcgttgcgaacgggtgagtaacgcgtaggtaacctgcctactagcgggggataactattggaaacgatagctaataccgcataacagcatttaacacatgttagatgcttgaaaggagcaattgcttcactagta

SEQ ID NO: 4207 - DNA, 225 bp, unidentified
  misc_feature 1..225: note = bacterial strain Ascusb_253A encodes 16S rRNA
  source 1..225: mol_type = genomic DNA
agagtttgatcatggctcaggatgaacgctggcggcgtgcctaacacatgcaagtcgaacgagcgagagatgaaacctagtgattctcgagcgagtggcggacgggtgagtaacgcgtgggtaacctgccttacagagggggataacagtttgaaaagactgctaataccgcataagcacacagtaccgcatggtacagggtgaaaagatttatcactgtaagat

SEQ ID NO: 4208 - DNA, 225 bp, unidentified
  misc_feature 1..225: note = bacterial strain Ascusb_355A encodes 16S rRNA
  source 1..225: mol_type = genomic DNA
agagtttgatcctggctcaggatgaacgctagctacaggcttaacacatgcaagtcgaggggcagcataacgaaagcttgcttttgttgatggcgaccggcgcacgggtgagtaacgcgtatccaaccttccctatagtagagaatagcccggcgaaagtcggattaatgctctatgttgtatttagaggacatctgaagaataccaaaggtttaccgctatagg

SEQ ID NO: 4209 - DNA, 225 bp, unidentified
  misc_feature 1..225: note = bacterial strain Ascusb_3326A encodes 16S rRNA
  source 1..225: mol_type = genomic DNA
agagtttgatcatggctcaggatgaacgctagctacaggcttaacacatgcaagtcgaggggcatcatggagtttgcttgcaaactctgatggcgaccggcgcacgggtgagtaacgcgtatccaaccttccctatagtagaggatagcccggcgaaagtcggattaatactctatgttttccgttgcagacatctaagatggaacaaaggcttgccgctatagg

SEQ ID NO: 4210 - DNA, 225 bp, unidentified
  misc_feature 1..225: note = bacterial strain Ascusb_8129A encodes 16S rRNA
  source 1..225: mol_type = genomic DNA
agagtttgatcctggctcaggatgaacgctagctacaggcttaacacatgcaagtcgaggggcagcatggagtttgcttgcaaactctgatggcgaccggcgcacgggtgagtaacgcgtatccaaccttccccccagtagggcatagcccggtgaaaatcggattaataccctatgttgtattttgaggacatctgacgaataccaaaggtttaccgctagggg

SEQ ID NO: 4211 - DNA, 225 bp, unidentified; identical to SEQ ID NO: 3152
  misc_feature 1..225: note = bacterial strain Ascusb_1040A encodes 16S rRNA
  source 1..225: mol_type = genomic DNA

SEQ ID NO: 4212 - DNA, 217 bp, unidentified
  misc_feature 1..217: note = bacterial strain Ascusb_4420B encodes 16S rRNA
  source 1..217: mol_type = genomic DNA
agagtttgatcctggctcaggacgaacgctggcggcgtgcctaatacatgcaagtcgagcggacttgatggagagcttgctctcttgagagttagcggcggacgggtgagtaacacgtaggcaacctgcctgtaagactgggataactagcggaaacgttagctaataccggataatttattttctcgcatgggaagataatgaaagacggagcaat

SEQ ID NO: 4213 - DNA, 225 bp, unidentified
  misc_feature 1..225: note = bacterial strain Ascusb_7814A encodes 16S rRNA
  source 1..225: mol_type = genomic DNA
agagtttgatcctggctcaggacgaacgctggcggcgtgcttaacacatgcaagtcgagcgatgaagcttccttcgggaagtggattagcggcggacgggtgagtaacacgtgggtaacctgcctcaaagtgggggatagccttccgaaaggaagattaataccgcataatatgagagaatcgcatgattttcttatcaaagatttattgctttgagatggaccc

SEQ ID NO: 4214 - DNA, 225 bp, unidentified
  misc_feature 1..225: note = bacterial strain Ascusb_544A encodes 16S rRNA
  source 1..225: mol_type = genomic DNA
agagtttgatcatggctcaggatgaacgctagctacaggcttaacacatgcaagtcgaggggcagcagggagatagcttgctatctttgctggcgaccggcgcacgggtgagtaacgcgtatccaaccttccccttactaaggaatagcccggcgaaagtcggattaatgccttatgttctcctttgcaggcatctaacgaggagcaaagattcatcggtaaggg

SEQ ID NO: 4215 - DNA, 225 bp, unidentified
  misc_feature 1..225: note = bacterial strain Ascusb_3868A encodes 16S rRNA
  source 1..225: mol_type = genomic DNA
agagtttgatcctggctcaggatgaacgctagctacaggcttaacacatgcaagtcgaggggcagcattgggatagcttgctattccagatggcgaccggcgcacgggtgagtaacgcgtatccaaccttccccatagtagggcatagcccgtagaaatgcggattaataccctatgttttccgaagatgacatctgatttggaacaaaggttcaccgctatggg

SEQ ID NO: 4216 - DNA, 225 bp, unidentified; identical to SEQ ID NO: 4215
  misc_feature 1..225: note = bacterial strain Ascusb_2413A encodes 16S rRNA
  source 1..225: mol_type = genomic DNA

SEQ ID NO: 4217 - DNA, 225 bp, unidentified; identical to SEQ ID NO: 4215
  misc_feature 1..225: note = bacterial strain Ascusb_9933A encodes 16S rRNA
  source 1..225: mol_type = genomic DNA

SEQ ID NO: 4218 - DNA, 225 bp, unidentified
  misc_feature 1..225: note = bacterial strain Ascusb_17128B encodes 16S rRNA
  source 1..225: mol_type = genomic DNA
agagtttgatcatggctcaggatgaacgctagctacaggcttaacacatgcaagtcgaggggcatcatgggagttgcttgcaacttctgatggcgaccggcgcacgggtgagtaacgcgtatccaaccttccccctagcaggggatagcccggcgaaagtcggattaataccctatgttcttcgttgatggcatcagatatgaagcaaaggtttaccgctatggg

SEQ ID NO: 4219 - DNA, 225 bp, unidentified; identical to SEQ ID NO: 4218
  misc_feature 1..225: note = bacterial strain Ascusb_57B encodes 16S rRNA
  source 1..225: mol_type = genomic DNA

SEQ ID NO: 4220 - DNA, 217 bp, unidentified; identical to SEQ ID NO: 4158
  misc_feature 1..217: note = bacterial strain Ascusb_136A encodes 16S rRNA
  source 1..217: mol_type = genomic DNA

SEQ ID NO: 4221 - DNA, 225 bp, unidentified
  misc_feature 1..225: note = bacterial strain Ascusb_6424B encodes 16S rRNA
  source 1..225: mol_type = genomic DNA
agagtttgatcctggctcaggatgaacgctagctacaggcttaacacatgcaagtcgaggggcagcatgaagtttgcttgcaaactttgatggcgaccggcgcacgggtgagtaacgcgtatccaaccttccctatactagaggatagcccggcgaaagtcggattaatactctatgttgtatttagaagacatctgaagaataccaaaggtttaccggtatagg

SEQ ID NO: 4222 - DNA, 225 bp, unidentified
  misc_feature 1..225: note = bacterial strain Ascusb_375C encodes 16S rRNA
  source 1..225: mol_type = genomic DNA
agagtttgatcctggctcaggatgaacgctagctacaggcttaacacatgcaagtcgaggggcagcatggagtcagcttgctgactccgatggcgaccggcgcacgggtgagtaacgcgtatccaaccttccctatactaggggatagcccggcgaaagtcggattaataccctatgttcttcatagatggcatctgacgtgaagcaaagattcatcggtatagg

SEQ ID NO: 4223 - DNA, 225 bp, unidentified
  misc_feature 1..225: note = bacterial strain Ascusb_619A encodes 16S rRNA
  source 1..225: mol_type = genomic DNA
agagtttgatcatggctcaggacgaacgctggcggcgtgcctaatacatgcaagtcgagcggatttgatggagagcttgctctccagagagttagcggcggacgggtgaataacacgtaggcaacctgcctgtaagactgggataactagcggaaacgttagctaataccggataatttattttctcgcatggggagataatgaaagacggagcaatctgtcact

SEQ ID NO: 4224 - DNA, 225 bp, unidentified
  misc_feature 1..225: note = bacterial strain Ascusb_143A encodes 16S rRNA
  source 1..225: mol_type = genomic DNA
agagtttgatcatggctcaggattaacgctggcggcgtgcctaatacatgcaagtcgaatggtagcaataccatggcgaacgggtgagtaacacgtaggtaacctgtctttatgccgaggataaccattggaaacgatggataatactggataggacaattgatggcatcattaattgtttaaagatttatcacatagagaggggcctgcggcgcattagctagt

SEQ ID NO: 4225 - DNA, 225 bp, unidentified
  misc_feature 1..225: note = bacterial strain Ascusb_318B encodes 16S rRNA
  source 1..225: mol_type = genomic DNA
agagtttgatcctggctcaggacgaacgctggcggcgtgcctaatacatgcaagtcgagcggagttaatcgggagcttgctcctgattaacttagcggcggacgggtgagtaacacgtaggcaacctgcccgtaagaccgggataactaccggaaacggtagctaataccggataatcaagtttctcgcatgaggggcttgggaaaggcggttctgaatttattc

SEQ ID NO: 4226 - DNA, 225 bp, unidentified; identical to SEQ ID NO: 4070
  misc_feature 1..225: note = bacterial strain Ascusb_2432B encodes 16S rRNA
  source 1..225: mol_type = genomic DNA

SEQ ID NO: 4227 - DNA, 225 bp, unidentified
  misc_feature 1..225: note = bacterial strain Ascusb_2775A encodes 16S rRNA
  source 1..225: mol_type = genomic DNA
agagtttgatcatggctcaggatgaacgctggcggcgtgcctaatacatgcaagtcgagcgaacagataaggagcttgctcctttgacgttagcggcggacgggtgagtaacacgtgggtaacctacctataagactgggataacttcgggaaaccggagctaatactggataacatttggaaccgcatggttctaaagtgaaagatggttttgctatcacttat

SEQ ID NO: 4228 - DNA, 225 bp, unidentified; identical to SEQ ID NO: 4227
  misc_feature 1..225: note = bacterial strain Ascusb_7077B encodes 16S rRNA
  source 1..225: mol_type = genomic DNA

SEQ ID NO: 4229 - DNA, 225 bp, unidentified
  misc_feature 1..225: note = bacterial strain Ascusb_2569A encodes 16S rRNA
  source 1..225: mol_type = genomic DNA
agagtttgatcatggctcaggatgaacgctggcggcgtgcctaatacatgcaagtcgaacggagagacaatgtctctcagtggcgaacgggtgagtacaacataggcaacctgcccttcagagggggacaacagatggaaacgtctgctaataccgcatatccgcaggacccgcatgggacctgcgctaaaggagcaaccgctccgctggaggatggacctatgc

SEQ ID NO: 4230 - DNA, 225 bp, unidentified
  misc_feature 1..225: note = bacterial strain Ascusb_1508A encodes 16S rRNA
  source 1..225: mol_type = genomic DNA
agagtttgatcatggctcaggacgaacgctggcggcgtgcttaacacatgcaagtcgagcgatgaagcttccttcgggaagtggattagcggcggacgggtgagtaacacgtgggtaacctgcctcaaagtgggggatagccttccgaaaggaagattaataccgcataatatgagagaatcgcatgattttcttatcaaagatttattgctttgagatggaccc

SEQ ID NO: 4231 - DNA, 225 bp, unidentified
  misc_feature 1..225: note = bacterial strain Ascusb_2381B encodes 16S rRNA
  source 1..225: mol_type = genomic DNA
agagtttgatcctggctcaggatgaacgctggcggcgtgcttaacacatgcaagtcgaacgaagcactttcttacgatcccttcggggtgacgagtttgtgactgagtggcggacgggtgagtaacgcgtgggtaacctgccttatacagggggataacagttggaaacggctgctaataccgcataagcgcacagtatcgcatgatacagtgtgaaaaactccg

SEQ ID NO: 4232 - DNA, 225 bp, unidentified; identical to SEQ ID NO: 4207
  misc_feature 1..225: note = bacterial strain Ascusb_16891B encodes 16S rRNA
  source 1..225: mol_type = genomic DNA

SEQ ID NO: 4233 - DNA, 225 bp, unidentified
  misc_feature 1..225: note = bacterial strain Ascusb_2446A encodes 16S rRNA
  source 1..225: mol_type = genomic DNA
agagtttgatcatggctcaggatgaacgctagctacaggcttaacacatgcaagtcgaggggtaacgatattgaaagcttgctttcgataggcgacgaccggcgcacgggtgagtaacgcgtatccaacctgcccataactaagggataatccgtagaaatgcggtctaataccttatgtgttccgatgaggacatctgaattggaataaagatttatcggttat

SEQ ID NO: 4234 - DNA, 225 bp, unidentified
  misc_feature 1..225: note = bacterial strain Ascusb_75A encodes 16S rRNA
  source 1..225: mol_type = genomic DNA
agagtttgatcatggctcagattgaacgctggcggcaggcctaacacatgcaagtcgagcggatgaagggagcttgctccctgactcagcggcggacgggtgagtaatgcctaggaatctgcctggtagtgggggacaacgtctcgaaagggacgctaataccgcatacgtcctacgggagaaagtgggggatcttcggacctcacgctatcagatgagcctagg

SEQ ID NO: 4235 - DNA, 225 bp, unidentified; identical to SEQ ID NO: 2457
  misc_feature 1..225: note = bacterial strain Ascusb_75B encodes 16S rRNA
  source 1..225: mol_type = genomic DNA

SEQ ID NO: 4236 - DNA, 225 bp, unidentified
  misc_feature 1..225: note = bacterial strain Ascusb_1195A encodes 16S rRNA
  source 1..225: mol_type = genomic DNA
agagtttgatcatggctcaggacgaacgctggcggcgtgcctaatacatgcaagtcgaacggtagcgggaggaaagcttgctttctttgccgacgagtggcggacgggtgagtaatgcttggggatctggcttatggagggggataacgacgggaaactgtcgctaataccgcgtaatatcttcggattaaagggtgggactttcgggccacccgccataagatg

SEQ ID NO: 4237 - DNA, 225 bp, unidentified
  misc_feature 1..225: note = bacterial strain Ascusb_725B encodes 16S rRNA
  source 1..225: mol_type = genomic DNA
agagtttgatcatggctcaggacgaacgctggcggcgtgcttaacacatgcaagtcgaacgaagagcgatggaagcttgcttctatcaatcttagtggcgaacgggtgagtaacgcgtaatcaacctgcccttcagagggggacaacagttggaaacgactgctaataccgcatacgatctaacctcggcatcgaggaaagatgaaaggtggcctctatttataa

SEQ ID NO: 4238 - DNA, 225 bp, unidentified
  misc_feature 1..225: note = bacterial strain Ascusb_1253A encodes 16S rRNA
  source 1..225: mol_type = genomic DNA
agagtttgatcatggctcaggacgaacgctggcggcgtgcttaacacatgcaagtcgaacgagaagagatgagaagcttgcttcttatcaattcgagtggcaaacgggtgagtaacgcgtaagcaacctgccctttagatggggacaacagctggaaacggctgctaataccgaatacgttctttttgtcgcatggcagagggaagaaagggaggctcttcggag

SEQ ID NO: 4239 - DNA, 225 bp, unidentified
  misc_feature 1..225: note = bacterial strain Ascusb_112B encodes 16S rRNA
  source 1..225: mol_type = genomic DNA
agagtttgatcatggctcaggacgaacgctggcggcgtgcctaatacatgcaagtagaacgaggctcttcggagccgagtggcgtacgggtgagtaacacgttggtaacctgccctccagaccggaataccagagagaaatctctgctaatgccggatgacgtcatatggtcgcaagaccacttgaccaaaggcggcaactgccgcgctgaaggatggacctgcg

SEQ ID NO: 4240 - DNA, 225 bp, unidentified
  misc_feature 1..225: note = bacterial strain Ascusb_81A encodes 16S rRNA
  source 1..225: mol_type = genomic DNA
agagtttgatcatggctcaggatgaacgctagctacaggcttaacacatgcaagtcgtggggcagcatcggagaagcttcggcttatccggatggcgaccggcgaatgggtgagtaacacgtatccaacctgccgcccagtgaggaataggctcccgaaagggaaattaatgcctcatgaggtgtgtttctgacatcagagacatacgaaagccgcgaggcgctg

SEQ ID NO: 4241 - DNA, 225 bp, unidentified
  misc_feature 1..225: note = bacterial strain Ascusb_4736B encodes 16S rRNA
  source 1..225: mol_type = genomic DNA
agagtttgatcatggctcaggatgaacgctagctacaggcttaacacatgcaagtcgaggggcagcatgaagtttgcttgcaaactttgatggcgaccggcgcacgggtgagtaacgcgtatccaaccttccctatagtagaggatagcccggcgaaagtcggattaatactctatgttttccaatgcagacatctaaaatggaacaaaggtttaccgctatagg

SEQ ID NO: 4242 - DNA, 225 bp, unidentified
  misc_feature 1..225: note = bacterial strain Ascusb_1630B encodes 16S rRNA
  source 1..225: mol_type = genomic DNA
agagtttgatcatggctcaggatgaacgctggcggcgtgcctaatacatgcaagtcgagcgaacagataaggagcttgctcctttgacgttagcggcggacgggtgagtaacacgtgggtaacctacctataagactgggataacttcgggaaaccggagctaataccggataacatttggaaccgcatggttctaaagtgaaagatggttttgctatcacttat

SEQ ID NO: 4243 - DNA, 225 bp, unidentified
  misc_feature 1..225: note = bacterial strain Ascusb_2754A encodes 16S rRNA
  source 1..225: mol_type = genomic DNA
agagtttgatcatggctcagattgaacgctggcggcaggcctaacacatgcaagtcgagcggtagcacagagagcttgctctcgggtgacgagcggcggacgggtgagtaatgtctgggaaactgcctgatggagggggataactactggaaacggtagctaataccgcataatgtcgcaagaccaaagtgggggaccttcgggcctcatgccatcagatgtgcc

SEQ ID NO: 4244 - DNA, 225 bp, unidentified; identical to SEQ ID NO: 4243
  misc_feature 1..225: note = bacterial strain Ascusb_9379A encodes 16S rRNA
  source 1..225: mol_type = genomic DNA

SEQ ID NO: 4245 - DNA, 225 bp, unidentified; identical to SEQ ID NO: 4243
  misc_feature 1..225: note = bacterial strain Ascusb_2786B encodes 16S rRNA
  source 1..225: mol_type = genomic DNA

SEQ ID NO: 4246 - DNA, 225 bp, unidentified
  misc_feature 1..225: note = bacterial strain Ascusb_7910A encodes 16S rRNA
  source 1..225: mol_type = genomic DNA
agagtttgatcatggctcaggatgaacgctagctacaggcttaacacatgcaagtcgaggggcatcatgatttgtgcttgcacagattgatggcgaccggcgcacgggtgagtaacgcgtatccaaccttccccttagtagcggatagcccggcgaaagtcggattaatacgctatgttgtattttgaggacatctgaggaataccaaagattcatcgctaaggg

SEQ ID NO: 4247 - DNA, 225 bp, unidentified
  misc_feature 1..225: note = bacterial strain Ascusb_328A encodes 16S rRNA
  source 1..225: mol_type = genomic DNA
agagtttgatcatggctcaggatgaacgctagctacaggcttaacacatgcaagtcgaggggcagcatgaagtttgcttgcaaactttgatggcgaccggcgcacgggtgagtaacgcgtatccaaccttccccttagtagaggatagcccggtgaaaatcggattaatactctatgttcttcgacgaggacatctgaattgaagcaaagattcatcgctaaggg

SEQ ID NO: 4248 - DNA, 225 bp, unidentified
  misc_feature 1..225: note = bacterial strain Ascusb_471A encodes 16S rRNA
  source 1..225: mol_type = genomic DNA
agagtttgatcctggctcaggatgaacgctggcggcatgcctaatacatgcaagtcgaacgggagtgcttgcactccagtggcgaacgggtgagtaatacataggtaacctgtccttaagacgaggatagcttctagaaatggaagataaaactggataggacatcacaaatcacatgattagatgtttaaaagagcaatctacttaaggaggggcctgtggcgc

SEQ ID NO: 4249 - DNA, 225 bp, unidentified
  misc_feature 1..225: note = bacterial strain Ascusb_3264C encodes 16S rRNA
  source 1..225: mol_type = genomic DNA
agagtttgatcatggctcaggatgaacgctagctacaggcttaacacatgcaagtcgaggggtaacgacagcgaaagcttgcttttgctgggcgacgaccggcgaatgggtgagtaacgcgtatccaacctgccgcaaagtagggcacagccttgcgaaagtaagattaatgccctatgtgctgtgatgatgacatcagaattgcagtaaaggttcaccgctttg

SEQ ID NO: 4250 - DNA, 225 bp, unidentified
  misc_feature 1..225: note = bacterial strain Ascusb_20A encodes 16S rRNA
  source 1..225: mol_type = genomic DNA
agagtttgatcatggctcagattgaacgctggcggcaggcctaacacatgcaagtcgaacggtaacaggaaacagcttgctgtttcgctgacgagtggcggacgggtgagtaatgtctgggaaactgcctgatggagggggataactactggaaacggtagctaataccgcataatgtcgtaagaccaaagagggggaccttcgggcctcttgccatcggatgtg

SEQ ID NO: 4251 - DNA, 225 bp, unidentified
  misc_feature 1..225: note = bacterial strain Ascusb_1715B encodes 16S rRNA
  source 1..225: mol_type = genomic DNA
agagtttgatcatggctcaggacgaacgctggcggcgtgcctaatacatgcaagtcgaacgcttctttttccaccggagcttgctccaccggaaaaagaggagtggcgaacgggtgagtaacacgtgggtaacctgcccatcagaaggggataacacttggaaacaggtgctaataccgcataacaatcaaaaccgcatggttttgatttgaaaggcgctttcgg

SEQ ID NO: 4252 - DNA, 225 bp, unidentified
  misc_feature 1..225: note = bacterial strain Ascusb_1291A encodes 16S rRNA
  source 1..225: mol_type = genomic DNA
agagtttgatcatggctcaggacgaacgctggcggcgtgcctaatacatgcaagtagaacgctgaagactttagcttgctaaagttggaagagtggcgaacgggtgagtaacacgtgggtaacctgcccatcagaaggggataacacttggaaacaggtgctaataccgtataacactattttccgcatggaagaaagttgaaaggcgcttttgcgtcactgatg

SEQ ID NO: 4253 - DNA, 225 bp, unidentified
  misc_feature 1..225: note = bacterial strain Ascusb_1161A encodes 16S rRNA
  source 1..225: mol_type = genomic DNA
agagtttgatcctggctcaggacgaacgctggcggcgtgcctaatacatgcaagtcgagcggtaacacagagagcttgctctcgggtgacgagcggcggacgggtgagtaatgtctgggaaactgcctgatggagggggataactactggaaacggtagctaataccgcataacgtcgcaagaccaaagtgggggaccttcgggcctcatgccatcagatgtgcc

SEQ ID NO: 4254 - DNA, 225 bp, unidentified
  misc_feature 1..225: note = bacterial strain Ascusb_20052C encodes 16S rRNA
  source 1..225: mol_type = genomic DNA
agagtttgatcatggctcaggatgaacgctagctacaggcttaacacatgcaagtcgaggggcagcataagagtagcttgctacttttgatggcgaccggcgcacgggtgcgtaacacgtatccaatctacccacggctcagggatagcctttcgaaagaaagattaatacctgatggtctcctttagggacatccctttgggagtaaagattcatcggccatgg

SEQ ID NO: 4255 - DNA, 225 bp, unidentified
  misc_feature 1..225: note = bacterial strain Ascusb_2341B encodes 16S rRNA
  source 1..225: mol_type = genomic DNA
agagtttgatcctggctcaggatgaacgctagcgacaggcttaacacatgcaagtcgaggggcagcgcgatggtagcaataccattggcggcgaccggcgcactggtgagtaacacgtatgcgacctgccccggacagggggataaacccgggaaactgggcctaataccccatatgccgattggatgcatgtcctttcggtgaaagatccgtcggtccgggatg

SEQ ID NO: 4256 - DNA, 225 bp, unidentified
  misc_feature 1..225: note = bacterial strain Ascusb_403A encodes 16S rRNA
  source 1..225: mol_type = genomic DNA
agagtttgatcatggctcaggacgaacgctggcggcgtgcctaacacatgcaagtcgagcgatgaagctccttcgggagtggattagcggcggacgggtgagtaacacgtgggtaacctgcctcatagaggggaatagcctcccgaaagggagattaataccgcataatgtatgagaatcgcatgatttttgtaccaaaggagtaatccgctatgagatggaccc

SEQ ID NO: 4257 - DNA, 225 bp, unidentified; identical to SEQ ID NO: 4256
  misc_feature 1..225: note = bacterial strain Ascusb_170A encodes 16S rRNA
  source 1..225: mol_type = genomic DNA

SEQ ID NO: 4258 - DNA, 225 bp, unidentified
  misc_feature 1..225: note = bacterial strain Ascusb_360A encodes 16S rRNA
  source 1..225: mol_type = genomic DNA
agagtttgatcctggctcaggatgaacgctagctacaggcttaacacatgcaagtcgaggggtaacatgaagaaagcttgctttctttgatgacgaccggcgcacgggtgagtatcgcgtatccaacctgcccataagtagggaatagccttgcgaaagtaagattaatgccctatggtttccgccaaagacatctgagatggaataaagatttatcgcttatgg

SEQ ID NO: 4259 - DNA, 225 bp, unidentified
  misc_feature 1..225: note = bacterial strain Ascusb_2442A encodes 16S rRNA
  source 1..225: mol_type = genomic DNA
agagtttgatcctggctcaggatgaacgctggcggcgtgcctaacacatgcaagttgaacgaagcaatcaagacagaatccttcgggaggaagatttgattgactgagtggcggacgggtgagtaacgcgtgggtaacctgccttgtacagggggataacagttagaaatgactgctaataccgcataagcgcacagtactgcatggtacagtgtgaaaaactcc

SEQ ID NO: 4260 - DNA, 225 bp, unidentified
  misc_feature 1..225: note = bacterial strain Ascusb_15659A encodes 16S rRNA
  source 1..225: mol_type = genomic DNA
agagtttgatcatggctcaggacgaacgctggcggcgtgcctaacacatgcaagtcgaacggggattttgtttcggcagaatcctagtggcgaacgggtgagtaacgcgtaggcaacctgccctccagacggggacaacattccgaaaggggtgctaataccggatacgaaggagccatcgcatggtggttctttgaaagatggcctctacatgtaagctatcgc

SEQ ID NO: 4261 - DNA, 225 bp, unidentified
  misc_feature 1..225: note = bacterial strain Ascusb_93A encodes 16S rRNA
  source 1..225: mol_type = genomic DNA
agagtttgatcctggctcaggacgaacgctggcggcgtgcctaatacatgcaagtcgagcggatttgatggagagcttgctctccagagagttagcggcggacgggtgaataacacgtaggcaacctgcctgtaagactgggataactagcggaaacgttagctaataccggataatttattttctcgcatggggagataatgaaagacggagcaatctgtcact

SEQ ID NO: 4262 - DNA, 225 bp, unidentified
  misc_feature 1..225: note = bacterial strain Ascusb_619B encodes 16S rRNA
  source 1..225: mol_type = genomic DNA
agagtttgatcatggctcaggacgaacgctggcggcgtgcctaatacatgcaagtcgagcggacttgatggagagcttgctctcctgatagttagcggcggacgggtgagtaacacgtaggcaacctgcctgtaagactgggataactagcggaaacgttagctaataccggataattcatttcatcgcatggtggaatgatgaaagacggagcaatctgtcact

SEQ ID NO: 4263 - DNA, 225 bp, unidentified
  misc_feature 1..225: note = bacterial strain Ascusb_447A encodes 16S rRNA
  source 1..225: mol_type = genomic DNA
agagtttgatcctggctcaggacgaacgctggcggcgtgcttaacacatgcaagtcgaacggggcaattgaaagcttgcttttgagagcctagtggcaaacgggtgagtaacgcgtaggaaacctacctccgggatggggacaaccgtccgaaaggacagctaataccgaatgaagtatgactgacacatgttggttgtatgaaagatggcctctatttataagc

SEQ ID NO: 4264 - DNA, 225 bp, unidentified
  misc_feature 1..225: note = bacterial strain Ascusb_1187B encodes 16S rRNA
  source 1..225: mol_type = genomic DNA
agagtttgatcctggctcaggacgaacgctggcggcgtgcctaacacatgcaagtcgagcgaggtgatttccctcgggaatgaacctagcggcggacgggtgagtaacacgtgggcaacctgccttatagaggggaatagcctcccgaaagggagattaataccgcataatattgaagtttcgcatgaaacttcaatcaaaggagcaatccgctataagatgggc

SEQ ID NO: 4265 - DNA, 225 bp, unidentified
  misc_feature 1..225: note = bacterial strain Ascusb_19172C encodes 16S rRNA
  source 1..225: mol_type = genomic DNA
agagtttgatcatggctcaggacgaacgctggcggcgtgcctaatacatgcaagtcgagcggacttgatggagagcttgctctcctgagagttagcggcggacgggtgagtaacacgtaggcaacctgcccgtaagaccgggataactagcggaaacgttagctaataccggataatcaagtttctcgcatgggagacttgggaaaggcggagcaatctgtcact

SEQ ID NO: 4266 - DNA, 225 bp, unidentified; identical to SEQ ID NO: 4265
  misc_feature 1..225: note = bacterial strain Ascusb_3031B encodes 16S rRNA
  source 1..225: mol_type = genomic DNA

SEQ ID NO: 4267 - DNA, 225 bp, unidentified
  misc_feature 1..225: note = bacterial strain Ascusb_8619B encodes 16S rRNA
  source 1..225: mol_type = genomic DNA
agagtttgatcatggctcaggacgaacgctggcggcgtgcctaatacatgcaagtagaacgctgaagactttagcttgctaaagttggaagagttgcgaacgggtgagtaacgcgtaggtaacctgcctactagcgggggataactattggaaacagatgctaataccgcataacaatttgaatcgcatgattcaaatttaaaagatggcttcggctatcacttt

SEQ ID NO: 4268 - DNA, 225 bp, unidentified
  misc_feature 1..225: note = bacterial strain Ascusb_4126B encodes 16S rRNA
  source 1..225: mol_type = genomic DNA
agagtttgatcctggctcaggacgaacgctggcggcgtgcctaatacatgcaagtcgagcggacctgaaggagtgcttgcactcctgatggttagcggcggacgggtgagtaacacgtaggcaacctgcccgtaagaccgggataactaccggaaacggtagctaataccggataatcaagtctctcgcatgggaggcttgggaaaggcggttctgaatttattc

SEQ ID NO: 4269 - DNA, 225 bp, unidentified
  misc_feature 1..225: note = bacterial strain Ascusb_363B encodes 16S rRNA
  source 1..225: mol_type = genomic DNA
agagtttgatcctggctcaggacgaacgctggcggcgtgcttaacacatgcaagtcgaacgaggtgattgaaagcttgcttttgagaaccgagtggcaaacgggtgagtaacgcgtagacaacctgccgcaaagatggggacaacagtccgaaaggactgctaataccgaatgttgtgcaacttccgcatgggggatgcattaaagatggcctctacttgtaagc

SEQ ID NO: 4270 - DNA, 225 bp, unidentified
  misc_feature 1..225: note = bacterial strain Ascusb_9477B encodes 16S rRNA
  source 1..225: mol_type = genomic DNA
agagtttgatcatggctcagattgaacgctggcggcaggcctaatacatgcaagtcgaacggtaacataagaaaagcttgcttttcttgatgacgagtggcggacgggtgagtaatatttgggaaactacctgatagagggggacaacagttggaaacgactgctaataccgcatacagccttagggtgaaagaagaaattcgctatcagatgtgcccaaacggg

SEQ ID NO: 4271 - DNA, 225 bp, unidentified; identical to SEQ ID NO: 4270
  misc_feature 1..225: note = bacterial strain Ascusb_4760B encodes 16S rRNA
  source 1..225: mol_type = genomic DNA

SEQ ID NO: 4272 - DNA, 225 bp, unidentified
  misc_feature 1..225: note = bacterial strain Ascusb_1942A encodes 16S rRNA
  source 1..225: mol_type = genomic DNA
agagtttgatcatggctcagattgaacgctggcggcaggcctaacacatgcaagtcgagcggtagcacagagagcttgctctcgggtgacgagcggcggacgggtgagtaatgcttggggatctggcttatggagggggataacgacgggaaactgtcgctaataccgcgtaatatcttcggattaaagggtgggactttcgggccacctgccataagatgagcc

SEQ ID NO: 4273 - DNA, 225 bp, unidentified; identical to SEQ ID NO: 4272
  misc_feature 1..225: note = bacterial strain Ascusb_2865A encodes 16S rRNA
  source 1..225: mol_type = genomic DNA

SEQ ID NO: 4274 - DNA, 225 bp, unidentified; identical to SEQ ID NO: 4272
  misc_feature 1..225: note = bacterial strain Ascusb_3077A encodes 16S rRNA
  source 1..225: mol_type = genomic DNA

SEQ ID NO: 4275 - DNA, 225 bp, unidentified
  misc_feature 1..225: note = bacterial strain Ascusb_9020C encodes 16S rRNA
  source 1..225: mol_type = genomic DNA
agagtttgatcatggctcaggacgaacgctggcggcgtgcctaatacatgcaagtcgagcgaaccaataagaagcttgctttttgttggttagcggcggacgggtgagtaacacgtgggtaacctgcctgtaagaccgggataactccgggaaaccggtgctaataccggatagattatctttccgcctggagagataaggaaagatggctattgccatcactta

SEQ ID NO: 4276 - DNA, 225 bp, unidentified
  misc_feature 1..225: note = bacterial strain Ascusb_5387B encodes 16S rRNA
  source 1..225: mol_type = genomic DNA
agagtttgatcatggctcagattgaacgctggcggcaggcctaatacatgcaagtcggacggtaacataagaaaagcttgcttttcttgatgacgagtggcggacgggtgagtaagatttgggaaactacctgatagagggggacaacagttggaaacgactgctaataccgcatacagcctcagggtgaaagaagaaattcgctatcagatgtgcccaaatggg

SEQ ID NO: 4277 - DNA, 225 bp, unidentified; identical to SEQ ID NO: 4276
  misc_feature 1..225: note = bacterial strain Ascusb_233B encodes 16S rRNA
  source 1..225: mol_type = genomic DNA

SEQ ID NO: 4278 - DNA, 225 bp, unidentified
  misc_feature 1..225: note = bacterial strain Ascusb_1104A encodes 16S rRNA
  source 1..225: mol_type = genomic DNA
agagtttgatcatggctcaggatgaacgctggcggcgtgcctaacacatgcaagtcgaacgagcgagagatgaaacctagtgattctcgagcgagtggcggacgggtgagtaacgcgtgggtaacctgccttacagagggggataacagtctgaaaagactgctaataccgcataagcacacagtaccgcatggtacagggtgaaaagatttatcactgtaagat

SEQ ID NO: 4279 - DNA, 225 bp, unidentified
  misc_feature 1..225: note = bacterial strain Ascusb_301C encodes 16S rRNA
  source 1..225: mol_type = genomic DNA
agagtttgatcatggctcagattgaacgctggcggcaggcctaatacatgcaagtcgaacggtaacataagagaagcttgcttttcttgatgacgagtggcggacgggtgagtaatatttgggaaactacctgatagagggggacaacagttggaaacgactgctaataccgcatacagccttagggtgaaagaagaaattcgctatcagatgtgcccaaacggg

SEQ ID NO: 4280 - DNA, 225 bp, unidentified
  misc_feature 1..225: note = bacterial strain Ascusb_294A encodes 16S rRNA
  source 1..225: mol_type = genomic DNA
agagtttgatcctggctcaggacgaacgctggcggcgtgcttaacacatgcaagtcgaacgggaagaaaagaaagagcttgctcttttttggattccagtggcaaacgggtgagtaacacgtaaacaacctgccttcaggatggggacaacagacggaaacgactgctaataccgaataccttccaatttccgcatggagataggaagaaagggtggcctctact

SEQ ID NO: 4281 - DNA, 217 bp, unidentified
  misc_feature 1..217: note = bacterial strain Ascusb_1549B encodes 16S rRNA
  source 1..217: mol_type = genomic DNA
agagtttgatcatggctcaggacgaacgctggcggcgtgcctaatacatgcaagtcgagcggacttgatggagagcttgctctccagagagttagcggcggacgggtgagtaacacgtaggcaacctgcctgtaagactgggataactagcggaaacgttagctaataccggataatttattttctcgcatgggaagataatgaaagacggagcaat

SEQ ID NO: 4282 - DNA, 225 bp, unidentified
  misc_feature 1..225: note = bacterial strain Ascusb_328B encodes 16S rRNA
  source 1..225: mol_type = genomic DNA
agagtttgatcatggctcaggacgaacgctggcggcgtgcctaatacatgcaagtcgagcggatcttttaaaagcttgcttttaaaagattagcggcggacgggtgagtaacacgtgggtaacctacctataagactgggataactccgggaaaccggtgctaatactagatagttttctagctcgcatgagttagaaaggaaagatggtttcggctatcactta

SEQ ID NO: 4283 - DNA, 225 bp, unidentified
  misc_feature 1..225: note = bacterial strain Ascusb_351C encodes 16S rRNA
  source 1..225: mol_type = genomic DNA
agagtttgatcctggctcagattgaacgctggcggcaggcctaatacatgcaagtcgaacggtaacatagaaaaagcttgctttttctgatgacgagtggcggacgggtgagtaaagtttgggaagctacctgatagagggggacaacagttggaaacgactgctaataccgcatacagcctgagggtgaaagcagcgatgcgctatcagatgcgcccaaatggg

SEQ ID NO: 4284 - DNA, 225 bp, unidentified
  misc_feature 1..225: note = bacterial strain Ascusb_2220A encodes 16S rRNA
  source 1..225: mol_type = genomic DNA
agagtttgatcatggctcagattgaacgctggcggcaggcctaacacatgcaagtcgaacggtaacaggaagcagcttgctgctttgctgacgagtggcggacgggtgagtaatgtctgggaaactgcctgatggagggggataactactggaaacggtagctaataccgcataacgtcgcaagaccaaagagggggaccttcgggcctcttgccatcggatgtg

SEQ ID NO: 4285 - DNA, 225 bp, unidentified; identical to SEQ ID NO: 4284
  misc_feature 1..225: note = bacterial strain Ascusb_16089A encodes 16S rRNA
  source 1..225: mol_type = genomic DNA

SEQ ID NO: 4286 - DNA, 225 bp, unidentified
  misc_feature 1..225: note = bacterial strain Ascusb_489C encodes 16S rRNA
  source 1..225: mol_type = genomic DNA
agagtttgatcctggctcaggacgaacgctggcggcgtgcctaatacatgcaagtcgagcggaccgacgggagcttgctcccttaggtcagcggcggacgggtgagtaacacgtgggtaacctgcctgtaagactgggataactccgggaaaccggggctaataccggatgcttgattgaaccgcatggttcaattataaaaggtggcttcggctaccacttaca

SEQ ID NO: 4287 - DNA, 225 bp, unidentified
  misc_feature 1..225: note = bacterial strain Ascusb_1224B encodes 16S rRNA
  source 1..225: mol_type = genomic DNA
agagtttgatcatggctcaggacgaacgctggcggcgtgcctaatacatgcaagtcgagcggacctgatggagtgcttgcactcctgatggttagcggcggacgggtgagtaacacgtaggcaacctgcccgtaagactgggataactaccggaaacggtagctaataccggatacgcaagtttctcgcatgggggacttgggaaaggcggagcaatctgtcgct

SEQ ID NO: 4288 - DNA, 225 bp, unidentified
  misc_feature 1..225: note = bacterial strain Ascusb_56B encodes 16S rRNA
  source 1..225: mol_type = genomic DNA
agagtttgatcctggctcaggacgaacgctggcggcgtgcctaatacatgcaagtcgtgcggatcttgttaaaagcttgcttttaacaagattagcggcggacgggtgagtaacacgtgggcaacctgcctgtaagaccgggataacgccgggaaaccggggctaataccggatagttttttcctccgcatggaggaaaaaggaaaggcggcttcggctgccact

SEQ ID NO: 4289 - DNA, 225 bp, unidentified
  misc_feature 1..225: note = bacterial strain Ascusb_12149B encodes 16S rRNA
  source 1..225: mol_type = genomic DNA
agagtttgatcctggctcaggacgaacgctggcggcgtgcttaacacatgcaagtcgaacgaagagcgacggaagcttgcttctatcaatcttagtggcgaacgggtgagtaacgcgtaatcaacctgcccttcagagggggacaacagttggaaacgactgctaataccgcatacgatctgacctcggcatcgaggatggatgaaaggtggcctctacatgtaa

SEQ ID NO: 4290 - DNA, 225 bp, unidentified
  misc_feature 1..225: note = bacterial strain Ascusb_701A encodes 16S rRNA
  source 1..225: mol_type = genomic DNA
agagtttgatcatggctcagattgaacgctggcggcaggcctaatacatgcaagtcgaacggtaacataagagaagcttgcttttcttgatgacgagtggcggacgggtgagtaatatttgggaaactacctgatagagggggacaacagttggaaacgactgctaataccgcatacagcctcagggtgaaagaagaaattcgctatcagatgtgcccaaacggg

SEQ ID NO: 4291 - DNA, 225 bp, unidentified; identical to SEQ ID NO: 4290
  misc_feature 1..225: note = bacterial strain Ascusb_3805B encodes 16S rRNA
  source 1..225: mol_type = genomic DNA

SEQ ID NO: 4292 - DNA, 225 bp, unidentified
  misc_feature 1..225: note = bacterial strain Ascusb_13271C encodes 16S rRNA
  source 1..225: mol_type = genomic DNA
agagtttgatcatggctcaggacgaacgctggcggcgtgcctaatacatgcaagtcgagcggagttgatgaggtgcttgcacctctgatgcttagcggcggacgggtgagtaacacgtaggcaacctgcccgtaagaccgggataactagcggaaacgttagctaataccggataatcaaggtttccgcatggaagccttgggaaaggcggttctgatctaatca

SEQ ID NO: 4293 - DNA, 225 bp, unidentified
  misc_feature 1..225: note = bacterial strain Ascusb_2017B encodes 16S rRNA
  source 1..225: mol_type = genomic DNA
agagtttgatcatggctcaggatgaacgctggcggcgtgcctaatacatgcaagtcgagcgagaaattctttaatgaatcttcggaggatttagagaatgggcagcggcggacgggtgagtaacgcgtaggcaacctgcctcacacagagggatagccattggaaacgatgaataatacctcatgaaaccggaacaacacatgttgatccggtcaaagatttatc

SEQ ID NO: 4294 - DNA, 225 bp, unidentified
  misc_feature 1..225: note = bacterial strain Ascusb_3981A encodes 16S rRNA
  source 1..225: mol_type = genomic DNA
agagtttgatcctggctcaggacgaacgctggcggcgtgcctaatacatgcaagtcgaacgaactctggtattgattggtgcttgcatcatgatttacatttgagtgagtggcgaactggtgagtaacacgtgggaaacctgcccagaagcgggggataacacctggaaacagatgctaataccgcataacaacttggaccgcatggtccgagcttgaaagatgg

SEQ ID NO: 4295 - DNA, 225 bp, unidentified; identical to SEQ ID NO: 4294
  misc_feature 1..225: note = bacterial strain Ascusb_4041A encodes 16S rRNA
  source 1..225: mol_type = genomic DNA

SEQ ID NO: 4296 - DNA, 225 bp, unidentified
  misc_feature 1..225: note = bacterial strain Ascusb_1179D encodes 16S rRNA
  source 1..225: mol_type = genomic DNA
agagtttgatcctggctcaggacgaacgctggcggcgtgcctaatacatgcaagtggaacgcatgattgataccgtagcttgctacaccattaatcatgagtcgcgaacgggtgagtaacgcgtaggtaacctaccttctagcgggggataactattggaaacgatagctaataccgcataacagtttttaacacatgttagaaatttgaaaggagcaattgctt

SEQ ID NO: 4297 - DNA, 225 bp, unidentified; identical to SEQ ID NO: 4296
  misc_feature 1..225: note = bacterial strain Ascusb_534C encodes 16S rRNA
  source 1..225: mol_type = genomic DNA

SEQ ID NO: 4298 - DNA, 225 bp, unidentified; identical to SEQ ID NO: 4296
  misc_feature 1..225: note = bacterial strain Ascusb_16442B encodes 16S rRNA
  source 1..225: mol_type = genomic DNA

SEQ ID NO: 4299 - DNA, 225 bp, unidentified; identical to SEQ ID NO: 4296
  misc_feature 1..225: note = bacterial strain Ascusb_1287A encodes 16S rRNA
  source 1..225: mol_type = genomic DNA

SEQ ID NO: 4300 - DNA, 225 bp, unidentified; identical to SEQ ID NO: 4213
  misc_feature 1..225: note = bacterial strain Ascusb_1508B encodes 16S rRNA
  source 1..225: mol_type = genomic DNA

SEQ ID NO: 4301 - DNA, 225 bp, unidentified
  misc_feature 1..225: note = bacterial strain Ascusb_17652C encodes 16S rRNA
  source 1..225: mol_type = genomic DNA
agagtttgatcatggctcaggatgaacgctggcggcgtgcttaacacatgcaagtcgagcgaagcactttacttggatttcttcggaaagaagagtgttgtgactgagcggcggacgggtgagtaacgcgtgggtaacctgcctcatacagggggataacagtcagaaatgactgctaataccgcataagaccgcagtaccgcatggtacagtggtaaaaactcc

SEQ ID NO: 4302 - DNA, 225 bp, unidentified; identical to SEQ ID NO: 4293
  misc_feature 1..225: note = bacterial strain Ascusb_1368B encodes 16S rRNA
  source 1..225: mol_type = genomic DNA

SEQ ID NO: 4303 - DNA, 225 bp, unidentified; identical to SEQ ID NO: 4293
  misc_feature 1..225: note = bacterial strain Ascusb_12394B encodes 16S rRNA
  source 1..225: mol_type = genomic DNA

SEQ ID NO: 4304 - DNA, 225 bp, unidentified; identical to SEQ ID NO: 4293
  misc_feature 1..225: note = bacterial strain Ascusb_1332B encodes 16S rRNA
  source 1..225: mol_type = genomic DNA

SEQ ID NO: 4305 - DNA, 225 bp, unidentified; identical to SEQ ID NO: 4293
  misc_feature 1..225: note = bacterial strain Ascusb_9039B encodes 16S rRNA
  source 1..225: mol_type = genomic DNA

SEQ ID NO: 4306 - DNA, 225 bp, unidentified
  misc_feature 1..225: note = bacterial strain Ascusb_2191D encodes 16S rRNA
  source 1..225: mol_type = genomic DNA
agagtttgatcatggctcaggacgaacgctggcggcgtgcctaatacatgcaagtcgtgcggaccttttaaaagcttgcttttaaaaggttagcggcggacgggtgagtaacacgtgggcaacctgcctgtaagatcgggataacaccgggaaaccggggctaataccggatagttttttcctccgcatggaggaaaaaggaaagacggcttcggctgtcactta

SEQ ID NO: 4307 - DNA, 225 bp, unidentified
  misc_feature 1..225: note = bacterial strain Ascusb_1666A encodes 16S rRNA
  source 1..225: mol_type = genomic DNA
agagtttgatcctggctcaggacgaacgctggcggcgtgcctaacacatgcaagtcgaacggagtgatttgaaagcttgcttttgaatcacttagtggcggacgggtgagtaacgcgtgagtaacctgcctttcagagggggataacatcctgaaaaggatgctaataccgcataacatatcgaggccgcatggcattggtatcaaaggagcaatccgctgagag

SEQ ID NO: 4308 - DNA, 225 bp, unidentified
  misc_feature 1..225: note = bacterial strain Ascusb_3810B encodes 16S rRNA
  source 1..225: mol_type = genomic DNA
agagtttgatcatggctcagattgaacgctggcggcaggcctaacacatgcaagtcgaacggtagcacagaggagcttgctccttgggtgacgagtggcggacgggtgagtaatgtctgggaaactgcccgatggagggggataactactggaaacggtagctaataccgcataacgtcgcaagaccaaagagggggaccttcgggcctcttgccatcggatgtg

SEQ ID NO: 4309 - DNA, 225 bp, unidentified
  misc_feature 1..225: note = bacterial strain Ascusb_4058C encodes 16S rRNA
  source 1..225: mol_type = genomic DNA
agagtttgatcctggctcaggacgaacgctggcggcgtgcctaatacatgcaagtcgagcggacctgatggagtgcttgcactcctgatggttagcggcggacgggtgagtaacacgtaggcaacctgcccgtaagaccgggataactaccggaaacggtagctaataccggataatcaagtcttccgcatgggagacttgggaaaggcggagcaatctgtcact

SEQ ID NO: 4310 - DNA, 225 bp, unidentified
  misc_feature 1..225: note = bacterial strain Ascusb_544B encodes 16S rRNA
  source 1..225: mol_type = genomic DNA
agagtttgatcctggctcaggatgaacgctagctacaggcttaacacatgcaagtcgaggggtaacatgaagaaagcttgctttctttgatgacgaccggcgcacgggtgagtatcgcgtatccaacctgcccataagtagggaatagccttgcgaaagtaagattaatgccctatggtttccgttaaagacatctgagatggaataaagatttatcgcttatgg

SEQ ID NO: 4311 - DNA, 225 bp, unidentified; identical to SEQ ID NO: 4310
  misc_feature 1..225: note = bacterial strain Ascusb_3334A encodes 16S rRNA
  source 1..225: mol_type = genomic DNA

SEQ ID NO: 4312 - DNA, 225 bp, unidentified; identical to SEQ ID NO: 4310
  misc_feature 1..225: note = bacterial strain Ascusb_9646A encodes 16S rRNA
  source 1..225: mol_type = genomic DNA

SEQ ID NO: 4313 - DNA, 225 bp, unidentified
  misc_feature 1..225: note = bacterial strain Ascusb_15140B encodes 16S rRNA
  source 1..225: mol_type = genomic DNA
agagtttgatcctggctcaggacgaacgctggcggcgtgcttaacacatgcaagtcgaacgaagagcgatggaagcttgcttctatcaatcttagtggcgaacgggtgagtaacgcgtaatcaacctgcccttcagagggggacaacagttggaaacgactgctaataccgcatacgatctgacctcggcatcgaggatggatgaaaggtggcctctacatgtaa

SEQ ID NO: 4314 - DNA, 225 bp, unidentified; identical to SEQ ID NO: 4313
  misc_feature 1..225: note = bacterial strain Ascusb_16891C encodes 16S rRNA
  source 1..225: mol_type = genomic DNA

SEQ ID NO: 4315 - DNA, 225 bp, unidentified; identical to SEQ ID NO: 4306
  misc_feature 1..225: note = bacterial strain Ascusb_3089D encodes 16S rRNA
  source 1..225: mol_type = genomic DNA

SEQ ID NO: 4316 - DNA, 225 bp, unidentified; identical to SEQ ID NO: 4306
  misc_feature 1..225: note = bacterial strain Ascusb_798A encodes 16S rRNA
  source 1..225: mol_type = genomic DNA

SEQ ID NO: 4317 - DNA, 225 bp, unidentified; identical to SEQ ID NO: 4306
  misc_feature 1..225: note = bacterial strain Ascusb_994B encodes 16S rRNA
  source 1..225: mol_type = genomic DNA

SEQ ID NO: 4318 - DNA, 225 bp, unidentified
  misc_feature 1..225: note = bacterial strain Ascusb_3554B encodes 16S rRNA
  source 1..225: mol_type = genomic DNA
agagtttgatcctggctcaggacgaacgctggcggcgtgcctaatacatgcaagtcgagcggacctgatggagtgcttgcactcctgacggttagcggcggacgggtgagtaacacgtaggcaacctgcccgtaagaccgggataactaccggaaacggtagctaataccggataatcaagtcttccgcatgggaggcttgggaaaggcggttctgaatttattc

SEQ ID NO: 4319 - DNA, 225 bp, unidentified
  misc_feature 1..225: note = bacterial strain Ascusb_1040B encodes 16S rRNA
  source 1..225: mol_type = genomic DNA
agagtttgatcatggctcagattgaacgctggcggcaggcctaatacatgcaagtcggacggtaacataagaaaagcttgcttttcttgatgacgagtggcggacgggtgagtaagatttgggaaactacctgatagagggggacaacagttggaaacgactgctaataccgcatacagcctcagggtgaaagaagaaattcgctatcagatgtgcccaaacggg

SEQ ID NO: 4320 - DNA, 225 bp, unidentified; identical to SEQ ID NO: 4263
  misc_feature 1..225: note = bacterial strain Ascusb_20164A encodes 16S rRNA
  source 1..225: mol_type = genomic DNA

SEQ ID NO: 4321 - DNA, 225 bp, unidentified
  misc_feature 1..225: note = bacterial strain Ascusb_679A encodes 16S rRNA
  source 1..225: mol_type = genomic DNA
agagtttgatcatggctcaggacgaacgctggcggcgtgcctaatacatgcaagtcgagcggacttgatggagagcttgctctccagagagttagcggcggacgggtgagtaacacgtaggcaacctgcctgtaagactgggataactagcggaaacgttagctaataccggataatttattttctcgcatgaggagataatgaaagacggagcaatctgtcact

SEQ ID NO: 4322 - DNA, 225 bp, unidentified
  misc_feature 1..225: note = bacterial strain Ascusb_150B encodes 16S rRNA
  source 1..225: mol_type = genomic DNA
agagtttgatcctggctcaggacgaacgctggcggcgtgcctaatacatgcaagtcgagcggacttgatggagagcttgctctccagaaagttagcggcggacgggtgagtaacacgtaggcaacctgcctgtaagactgggataactagcggaaacgttagctaataccggataatttattttctcgcatgaggagataatgaaagacggagcaatctgtcact

SEQ ID NO: 4323 - DNA, 225 bp, unidentified; identical to SEQ ID NO: 4322
  misc_feature 1..225: note = bacterial strain Ascusb_2378B encodes 16S rRNA
  source 1..225: mol_type = genomic DNA

SEQ ID NO: 4324 - DNA, 225 bp, unidentified
  misc_feature 1..225: note = bacterial strain Ascusb_1882B encodes 16S rRNA
  source 1..225: mol_type = genomic DNA
agagtttgatcctggctcaggacgaacgctggcggcgtgcctaatacatgcaagtcgagcggacctgatggagtgcttgcactcctgatggttagcggcggacgggtgagtaacacgtgggtaacctgcctcaaagtgggggatagccttccgaaaggaagattaataccgcataatatgagagaatcgcatgattttcttatcaaagatttattgctttgagat

SEQ ID NO: 4325 - DNA, 225 bp, unidentified
  misc_feature 1..225: note = bacterial strain Ascusb_1675A encodes 16S rRNA
  source 1..225: mol_type = genomic DNA
agagtttgatcctggctcaggacgaacgctggcggcgtgcctaatacatgcaagtcgagcggaccgacgggagcttgctcccttaggtcagcggcggacgggtgagtaacacgtgggtaacctgcctgtaagactgggataactccgggaaaccggggctaataccggatgcttgattgaaccgcatggtttaattataaaaggtggcttttagctaccacttac

SEQ ID NO: 4326 - DNA, 225 bp, unidentified; identical to SEQ ID NO: 4325
  misc_feature 1..225: note = bacterial strain Ascusb_18852A encodes 16S rRNA
  source 1..225: mol_type = genomic DNA

SEQ ID NO: 4327 - DNA, 225 bp, unidentified; identical to SEQ ID NO: 4325
  misc_feature 1..225: note = bacterial strain Ascusb_5045A encodes 16S rRNA
  source 1..225: mol_type = genomic DNA

SEQ ID NO: 4328 - DNA, 225 bp, unidentified; identical to SEQ ID NO: 4325
  misc_feature 1..225: note = bacterial strain Ascusb_3680B encodes 16S rRNA
  source 1..225: mol_type = genomic DNA

SEQ ID NO: 4329 - DNA, 225 bp, unidentified; identical to SEQ ID NO: 4325
  misc_feature 1..225: note = bacterial strain Ascusb_2536A encodes 16S rRNA
  source 1..225: mol_type = genomic DNA

SEQ ID NO: 4330 - DNA, 225 bp, unidentified; identical to SEQ ID NO: 4207
  misc_feature 1..225: note = bacterial strain Ascusb_1715C encodes 16S rRNA
  source 1..225: mol_type = genomic DNA

SEQ ID NO: 4331 - DNA, 225 bp, unidentified
  misc_feature 1..225: note = bacterial strain Ascusb_1340B encodes 16S rRNA
  source 1..225: mol_type = genomic DNA
agagtttgatcctggctcaggacgaacgctggcggcgtgcctaatacatgcaagtagaacgctgaagactttagcttgctaaagttggaagagttgcgaacgggtgagtaacgcgtaggtaacctgccccaaagcgggggataacatttggaaacagatgctaataccgcataacaatttgaatcgcatgattcaaatttaaaagatggtttcggctatcacttt

SEQ ID NO: 4332 - DNA, 225 bp, unidentified; identical to SEQ ID NO: 4153
  misc_feature 1..225: note = bacterial strain Ascusb_818A encodes 16S rRNA
  source 1..225: mol_type = genomic DNA

SEQ ID NO: 4333 - DNA, 225 bp, unidentified
  misc_feature 1..225: note = bacterial strain Ascusb_1278B encodes 16S rRNA
  source 1..225: mol_type = genomic DNA
agagtttgatcatggctcaggacgaacgctggcggcgtgcctaatacatgcaagtcgagcgatatctttgggggcttgcccccgaagatgtagcggcggacgggtgagtaacacgtgggcaacctgcctgtaagactgggataacttcgggaaaccggagctaataccggataactcaagaaaccacatggtttcttgctaaaagatggctccggctatcactta

SEQ ID NO: 4334 - DNA, 225 bp, unidentified
  misc_feature 1..225: note = bacterial strain Ascusb_18804B encodes 16S rRNA
  source 1..225: mol_type = genomic DNA
agagtttgatcctggctcaggatgaacgctggcggcgtgcttaacacatgcaagtcgaacggagtttataagcggagcccttcggggcaaagcttataaacttagtggcggacgggtgagtaacgcgtgggtaacctgccttacacagggggataacaactggaaacggttgctaataccgcataagcgcacagcatcgcatgatgcagtgtgaaaagatttatc

SEQ ID NO: 4335 - DNA, 225 bp, unidentified
  misc_feature 1..225: note = bacterial strain Ascusb_1532C encodes 16S rRNA
  source 1..225: mol_type = genomic DNA
agagtttgatcctggctcaggatgaacgctggcggcgtgcctaatacatgcaagtcgagcgaatgaattaagagcttgctcttatgaagttagcggcggacgggtgagtaacacgtgggtaacctgcccataagactgggataactccgggaaaccggggctaataccggataacattttgaactgcatggttcgaaattgaaaggcggcttcggctgtcactta

SEQ ID NO: 4336 - DNA, 225 bp, unidentified
  misc_feature 1..225: note = bacterial strain Ascusb_1760B encodes 16S rRNA
  source 1..225: mol_type = genomic DNA
agagtttgatcatggctcaggacgaacgctggcggcgtgcctaatacatgcaagtcgagcggagtttatcgggagcttgctcctgataaacttagcggcggacgggtgagtaacacgtaggcaacctgcccgtaagactgggataactaccggaaacggtagctaataccggatacgcaagtctctcgcatgagggacttgggaaaggcggagcaatctgtcact

SEQ ID NO: 4337 - DNA, 225 bp, unidentified
  misc_feature 1..225: note = bacterial strain Ascusb_626A encodes 16S rRNA
  source 1..225: mol_type = genomic DNA
agagtttgatcctggctcaggacgaacgctggcggcgtgcttaacacatgcaagtcgaacggggcaattgaaagcttgcttttgagagcctagtggcaaacgggtgagtaacgcgtaggaaacctgcctccgggatggggacaaccgtccgaaaggacagctaataccgaatgaagtacacttgacacatgtcgggtgtatgaaagatggcctctatttataagc

SEQ ID NO: 4338 - DNA, 225 bp, unidentified
  misc_feature 1..225: note = bacterial strain Ascusb_21571B encodes 16S rRNA
  source 1..225: mol_type = genomic DNA
agagtttgatcctggctcaggatgaacgctagctacaggcttaacacatgcaagtcgaggggaaacgacatagagtgcttgcactttatgggcgtcgaccggcgaatgggtgagtaacgcgtatccaacctgcccttgactgagggatagcccagtgaaaactgaattaatacctcatgtactcctcagacggcatcagacgaggagcaaagattaatcggtcaa

SEQ ID NO: 4339 - DNA, 225 bp, unidentified
  misc_feature 1..225: note = bacterial strain Ascusb_822A encodes 16S rRNA
  source 1..225: mol_type = genomic DNA
agagtttgatcatggctcaggacgaacgctggcggcgtgcctaatacatgcaagtcgagcgaatctgagggagcttgctcctaaagattagcggcggacgggtgagtaacacgtgggcaacctgcctgtaagactgggataacttcgggaaaccggagctaataccggataactcaagaaaccaaatggtttcttgctaaaagatggctccggctatcacttaca

SEQ ID NO: 4340 - DNA, 225 bp, unidentified
  misc_feature 1..225: note = bacterial strain Ascusb_1829B encodes 16S rRNA
  source 1..225: mol_type = genomic DNA
agagtttgatcatggctcaggacgaacgctggcggcgtgcctaatacatgcaagtcgagcgaaccgacgggagcttgctcccttaggttagcggcggacgggtgagtaacacgtgggtaacctgcctgtaagactgggataactccgggaaaccggggctaataccggatgcttgattgaaccgcatggttcaattataaaaggtggcttttagctaccacttac

SEQ ID NO: 4341 - DNA, 225 bp, unidentified; identical to SEQ ID NO: 4340
  misc_feature 1..225: note = bacterial strain Ascusb_2744B encodes 16S rRNA
  source 1..225: mol_type = genomic DNA

SEQ ID NO: 4342 - DNA, 225 bp, unidentified; identical to SEQ ID NO: 4340
  misc_feature 1..225: note = bacterial strain Ascusb_1889C encodes 16S rRNA
  source 1..225: mol_type = genomic DNA

SEQ ID NO: 4343 - DNA, 225 bp, unidentified
  misc_feature 1..225: note = bacterial strain Ascusb_300C encodes 16S rRNA
  source 1..225: mol_type = genomic DNA
agagtttgatcatggctcaggacgaacgctggcggcgtgcctaatacatgcaagtcgagcggagttaattaggagcttgctcttgattaacttagcggcggacgggtgagtaacacgtaggcaacctgcccgtaagactgggataactaccggaaacggtagctaataccggatacgcaagtttctcgcatgggggacttgggaaaggcggagcaatctgtcact

SEQ ID NO: 4344 - DNA, 225 bp, unidentified; identical to SEQ ID NO: 4343
  misc_feature 1..225: note = bacterial strain Ascusb_1101B encodes 16S rRNA
  source 1..225: mol_type = genomic DNA

SEQ ID NO: 4345 - DNA, 225 bp, unidentified; identical to SEQ ID NO: 4343
  misc_feature 1..225: note = bacterial strain Ascusb_813C encodes 16S rRNA
  source 1..225: mol_type = genomic DNA

SEQ ID NO: 4346 - DNA, 225 bp, unidentified; identical to SEQ ID NO: 4343
  misc_feature 1..225: note = bacterial strain Ascusb_9659A encodes 16S rRNA
  source 1..225: mol_type = genomic DNA

SEQ ID NO: 4347 - DNA, 225 bp, unidentified
  misc_feature 1..225: note = bacterial strain Ascusb_2648B encodes 16S rRNA
  source 1..225: mol_type = genomic DNA
agagtttgatcatggctcaggatgaacgctggcggcgtgcttaacacatgcaagtcgaacggagttaataagcggaagtcttcggatggaagcttattaacttagtggcggacgggtgagtaacgcgtgggtaacctgccttatacagggggataacagccggaaacggttgctaataccgcataagcacacagtgccgcatggtacagtgtgaaaagatttatc

SEQ ID NO: 4348 - DNA, 225 bp, unidentified; identical to SEQ ID NO: 4347
  misc_feature 1..225: note = bacterial strain Ascusb_4062B encodes 16S rRNA
  source 1..225: mol_type = genomic DNA

SEQ ID NO: 4349 - DNA, 225 bp, unidentified; identical to SEQ ID NO: 4347
  misc_feature 1..225: note = bacterial strain Ascusb_1276B encodes 16S rRNA
  source 1..225: mol_type = genomic DNA

SEQ ID NO: 4350 - DNA, 225 bp, unidentified; identical to SEQ ID NO: 4103
  misc_feature 1..225: note = bacterial strain Ascusb_726A encodes 16S rRNA
  source 1..225: mol_type = genomic DNA

SEQ ID NO: 4351 - DNA, 225 bp, unidentified; identical to SEQ ID NO: 310
  misc_feature 1..225: note = bacterial strain Ascusb_927B encodes 16S rRNA
  source 1..225: mol_type = genomic DNA

SEQ ID NO: 4352 - DNA, 225 bp, unidentified
  misc_feature 1..225: note = bacterial strain Ascusb_355B encodes 16S rRNA
  source 1..225: mol_type = genomic DNA
agagtttgatcctggctcaggatgaacgccggcggtgtgcctaatacatgcaagtcgaacgcgttggcccaactgattgaacgtgcttgcacggacttgacgttggtttaccaacgagtggcggacgggtgagtaacacgtaggtaacctgccccaaagcgggggataacatttggaaacagatgctaataccgcataacaatttgaatcgcatgattcaaattt

SEQ ID NO: 4353 - DNA, 225 bp, unidentified
  misc_feature 1..225: note = bacterial strain Ascusb_7910B encodes 16S rRNA
  source 1..225: mol_type = genomic DNA
agagtttgatcatggctcaggatgaacgctagctacaggcttaacacatgcaagtcgaggggaaacgatattggaagcttgcttccgataggcgtcgaccggcgcacgggtgagtaacgcgtatccaacctgcccgtcacttgggaataaccttgcgaaagtaagactaatgcccaatgacatttatagaaggcatctgaaatgaattaaagatttatcggtgat

SEQ ID NO: 4354 - DNA, 225 bp, unidentified
  misc_feature 1..225: note = bacterial strain Ascusb_1230A encodes 16S rRNA
  source 1..225: mol_type = genomic DNA
agagtttgatcatggctcagattgaacgctggcggcaggcctaatacatgcaagtcggacggtaacataagaaaagcttgcttttcttgatgacgagtggcggacgggtgagtaatatttgggaagctacctgatagagggggacaacagttggaaacgactgctaataccgcatacagccttagggtgaaagaagaaattcgctatcagatgtgcccaaacggg

SEQ ID NO: 4355 - DNA, 225 bp, unidentified
  misc_feature 1..225: note = bacterial strain Ascusb_794A encodes 16S rRNA
  source 1..225: mol_type = genomic DNA
agagtttgatcctggctcaggacgaacgctggcggcgtgcctaacacatgcaagtcgagcggagttacctttagcactgagcattcttaataatatgatgctgatagccagcgtcttgcgaagcttaaagcgagcaatacgcgttttatcttgtgttcgaagaacactgggacagcacatgtaagagaagagtgttgagtgctaaagggagcttagcggcggacg

SEQ ID NO: 4356 - DNA, 225 bp, unidentified
  misc_feature 1..225: note = bacterial strain Ascusb_4971C encodes 16S rRNA
  source 1..225: mol_type = genomic DNA
agagtttgatcatggctcagattgaacgctggcggcaggcctaatacatgcaagtcggacggtaacataagaaaagcttgcttttcttgatgacgagtggcggacgggtgagtaagatttgggaagctacctgatagagggggacaacagttggaaacgactgctaataccgcatacagcctcagggtgaaagaagaaattcgctatcagatgtgcccaaacggg

SEQ ID NO: 4357 - DNA, 225 bp, unidentified
  misc_feature 1..225: note = bacterial strain Ascusb_218A encodes 16S rRNA
  source 1..225: mol_type = genomic DNA
agagtttgatcatggctcagattgaacgctggcggcaggcctaatacatgcaagtcggacggtaacataagaaaagcttgcttttcttgatgacgagtggcggacgggtgagtaatatttgggaaactacctgatagagggggacaacagttggaaacgactgctaataccgcatacagccttagggtgaaagaagaaattcgctatcagatgtgcccaaacggg

SEQ ID NO: 4358 - DNA, 225 bp, unidentified
  misc_feature 1..225: note = bacterial strain Ascusb_1630C encodes 16S rRNA
  source 1..225: mol_type = genomic DNA
agagtttgatcatggctcaggacgaacgctggcggcgtgcctaacacatgcaagtcgagcggagttacctttagcactgagcattcttaataatatgatgctgatagccagcgtcttgcgaagcttaaagcgagcaatacgcgttttatcttgtgttcgaagaacactggaacagtacatgtaagagaagagtgttgagtgctaaaggcagcttagcggcggacg

SEQ ID NO: 4359 - DNA, 225 bp, unidentified
  misc_feature 1..225: note = bacterial strain Ascusb_4081C encodes 16S rRNA
  source 1..225: mol_type = genomic DNA
agagtttgatcatggctcaggacgaacgctggcggcatgcctaatacatgcaagtcgaacgagcttccgttgaatgacgtgcttgcactgatttcaacaatgaagcgagtggcgaactggtgagtaacacgtggggaatctgcccagaagcaggggataacacttggaaacaggtgctaataccgtataacaacaaaatccgcatggattttgtttgaaaggtgg

SEQ ID NO: 4360 - DNA, 225 bp, unidentified
  misc_feature 1..225: note = bacterial strain Ascusb_5201C encodes 16S rRNA
  source 1..225: mol_type = genomic DNA
agagtttgatcctggctcaggacgaacgctggcggcgtgcttaacacatgcaagtcgagcgatgaagcttccttcgggaagtggattagcggcggacgggtgagtaacacgtgggcaacctgcctcaaagagaggaatagccctccgaaaggaggattaataccgcataaagttagagtttcgcatgaaactttaaccaaaggagtaatccgctttgagatgggc

SEQ ID NO: 4361 - DNA, 225 bp, unidentified
  misc_feature 1..225: note = bacterial strain Ascusb_865A encodes 16S rRNA
  source 1..225: mol_type = genomic DNA
agagtttgatcctggctcaggatgaacgctagctacaggcttaacacatgcaagtcgaggggaaacgacagagagtgcttgcactttttgggcgtcgaccggcgaatgggtgagtaacgcgtatccaacctgcccttgactgagggatagcccagtgaaaactgaattaatacctcatgttctcctcagacggcatcagacgaggagtaaagattaatcggtcaa

SEQ ID NO: 4362 - DNA, 225 bp, unidentified
  misc_feature 1..225: note = bacterial strain Ascusb_251B encodes 16S rRNA
  source 1..225: mol_type = genomic DNA
agagtttgatcctggctcaggacgaacgctggcggcgtgcctaatacatgcaagtcgagcggacttgatggagagcttgctctcctgatagttagcggcggacgggtgagtaacacgtaggcaacctgcctgtaagactgggataactagcggaaacgttagctaataccggataatttatttcatcgcatggtggaataatgaaagacggagcaatctgtcact

SEQ ID NO: 4363 - DNA, 225 bp, unidentified; identical to SEQ ID NO: 4347
  misc_feature 1..225: note = bacterial strain Ascusb_6130B encodes 16S rRNA
  source 1..225: mol_type = genomic DNA

SEQ ID NO: 4364 - DNA, 225 bp, unidentified
  misc_feature 1..225: note = bacterial strain Ascusb_51C encodes 16S rRNA
  source 1..225: mol_type = genomic DNA
agagtttgatcatggctcaggacgaacgctggcggcgtgcctaatacatgcaagtcgagcggagttaattaggagcttgctcttgattaacttagcggcggacgggtgagtaacacgtaggcaacctgcccgtaagactgggataactaccggaaacggtagctaataccggatacgcaagtttctcgcatgggagacttgggaaaggcggagcaatctgtcact

SEQ ID NO: 4365 - DNA, 225 bp, unidentified
  misc_feature 1..225: note = bacterial strain Ascusb_17128C encodes 16S rRNA
  source 1..225: mol_type = genomic DNA
agagtttgatcatggctcaggacgaacgctggcggcgtgcctaatacatgcaagtcgagcggacctgatggagtgcttgcactcctgatggttagcggcggacgggtgagtaacacgtaggcaacctgcccgtaagaccgggataactaccggaaacggtagctaataccggataatcaagtcttccgcatgggagacttgggaaaggcggagcaatctgtcact

SEQ ID NO: 4366 - DNA, 225 bp, unidentified; identical to SEQ ID NO: 4365
  misc_feature 1..225: note = bacterial strain Ascusb_57C encodes 16S rRNA
  source 1..225: mol_type = genomic DNA

SEQ ID NO: 4367 - DNA, 225 bp, unidentified
  misc_feature 1..225: note = bacterial strain Ascusb_3349C encodes 16S rRNA
  source 1..225: mol_type = genomic DNA
agagtttgatcatggctcaggacgaacgctggcggcgtgcttaacacatgcaagtcgaacgagacgattgaaagcttgcttttgagagtcgagtggcaaacgggtgagtaacgcgtagacaacctgccgcaaagatggggacaacagtccgaaaggactgctaataccgaatgttgtgcaatctccgcatggaggatgcattaaagatggcctctacttgtaagc

SEQ ID NO: 4368 - DNA, 225 bp, unidentified
  misc_feature 1..225: note = bacterial strain Ascusb_725C encodes 16S rRNA
  source 1..225: mol_type = genomic DNA
agagtttgatcatggctcaggatgaacgctagctacaggcttaacacatgcaagtcgaggggaaacgatgcggaagcttgcttccgcaggcgtcgaccggcgcacgggtgagtaacgcgtatccaacctgccccgaggtagggaataatccgtagaaatgcggtctaataccttatgtgctccgaagaggacatctgatttggagtaaagatttatcgccttggg

SEQ ID NO: 4369 - DNA, 225 bp, unidentified
  misc_feature 1..225: note = bacterial strain Ascusb_7360C encodes 16S rRNA
  source 1..225: mol_type = genomic DNA
agagtttgatcctggctcaggacgaacgctggcggcgtgcctaatacatgcaagtcgaacgcatcccgctgaattgaagtgcttgcactgattttcagcattggatgagtggcgaactggtgagtaacacgtgggtaacctgcccggaagcaggggataacacttggaaacaggtgctaataccgtataacaactgaaaccgcatggtttcagtttgaaagatgg

SEQ ID NO: 4370 - DNA, 225 bp, unidentified; identical to SEQ ID NO: 4369
  misc_feature 1..225: note = bacterial strain Ascusb_15382B encodes 16S rRNA
  source 1..225: mol_type = genomic DNA

SEQ ID NO: 4371 - DNA, 225 bp, unidentified
  misc_feature 1..225: note = bacterial strain Ascusb_386C encodes 16S rRNA
  source 1..225: mol_type = genomic DNA
agagtttgatcatggctcaggacgaacgctggcggcgtgcctaacacatgcaagtcgagcgaggagattcccttcggggatgaacctagcggcggacgggtgagtaacacgtgggcaacctgccttatagaggggaatagccttccgaaaggaagattaataccgcataacattacattttcgcatgaagaagtaattaaaggagcaatccgctataagatgggc

SEQ ID NO: 4372 - DNA, 225 bp, unidentified; identical to SEQ ID NO: 4371
  misc_feature 1..225: note = bacterial strain Ascusb_1419C encodes 16S rRNA
  source 1..225: mol_type = genomic DNA

SEQ ID NO: 4373 - DNA, 225 bp, unidentified
  misc_feature 1..225: note = bacterial strain Ascusb_1867B encodes 16S rRNA
  source 1..225: mol_type = genomic DNA
agagtttgatcatggctcaggacgaacgctggcggcgtgcctaatacatgcaagtcgagcgatatctttgggggcttgcccccgaagatgtagcggcggacgggtgagtaacacgtgggcaacctgcctgtaagactgggataacttcgggaaaccggagctaataccggataactcaagaaaccacatggtttcttgctaaaagatggctccagctatcactta

SEQ ID NO: 4374 - DNA, 225 bp, unidentified; identical to SEQ ID NO: 4373
  misc_feature 1..225: note = bacterial strain Ascusb_3294B encodes 16S rRNA
  source 1..225: mol_type = genomic DNA

SEQ ID NO: 4375 - DNA, 225 bp, unidentified; identical to SEQ ID NO: 4294
  misc_feature 1..225: note = bacterial strain Ascusb_2831B encodes 16S rRNA
  source 1..225: mol_type = genomic DNA

SEQ ID NO: 4376 - DNA, 225 bp, unidentified
  misc_feature 1..225: note = bacterial strain Ascusb_1716A encodes 16S rRNA
  source 1..225: mol_type = genomic DNA
agagtttgatcctggctcaggacgaacgctggcggcgtgcctaatacatgcaagtcgagcggacctgatggagtgcttgcactcctgatggttagcggcggacgggtgagtaacacgtaggcaacctgcccgtaagaccgggataactaccggaaacggtagctaataccggataatcaagcctctcgcatgagaagcttgggaaaggcggagcaatctgtcact

SEQ ID NO: 4377 - DNA, 225 bp, unidentified
  misc_feature 1..225: note = bacterial strain Ascusb_120C encodes 16S rRNA
  source 1..225: mol_type = genomic DNA
agagtttgatcatggctcaggacgaacgctggcggcgtgcctaacacatgcaagtcgagcgaggagattcctttcggggatgaacctagcggcggacgggtgagtaacacgtgggcaacctgccttatagagggggatagcctcccgaaagggagattaataccgcataacattgaagtttcgcatgaagcatcaatcaaaggagcaatccgctataagatgggc

SEQ ID NO: 4378 - DNA, 225 bp, unidentified
  misc_feature 1..225: note = bacterial strain Ascusb_1149B encodes 16S rRNA
  source 1..225: mol_type = genomic DNA
agagtttgatcctggctcaggacgaacgctggcggcgtgcctaacacatgcaagtcgaacggagtgattcgaaagcttgcttttgaatcacttagtggcggacgggtgagtaacgcgtgagtaacctgcctttcagagggggataacatcctgaaaaggatgctaataccgcatgacatatcgaggccgcatggtcttggtatcaaaggagcaatccgctgagag

SEQ ID NO: 4379 - DNA, 225 bp, unidentified; identical to SEQ ID NO: 4103
  misc_feature 1..225: note = bacterial strain Ascusb_2710B encodes 16S rRNA
  source 1..225: mol_type = genomic DNA

SEQ ID NO: 4380 - DNA, 225 bp, unidentified; identical to SEQ ID NO: 4103
  misc_feature 1..225: note = bacterial strain Ascusb_5711B encodes 16S rRNA
  source 1..225: mol_type = genomic DNA

SEQ ID NO: 4381 - DNA, 225 bp, unidentified
  misc_feature 1..225: note = bacterial strain Ascusb_548A encodes 16S rRNA
  source 1..225: mol_type = genomic DNA
agagtttgatcctggctcaggacgaacgctggcggcgtgcctaatacatgcaagtcgaacgcgtctccgttaatgattttaggtgcttgcacttgaaagatttaacattgagacgagtggcgaactggtgagtaacacgtgggtaacctgcccttgaagtaggggataacacttggaaacaggtgctaataccgtataacaaccaaaaccacctggttttggttt

SEQ ID NO: 4382 - DNA, 225 bp, unidentified
  misc_feature 1..225: note = bacterial strain Ascusb_2917B encodes 16S rRNA
  source 1..225: mol_type = genomic DNA
agagtttgatcctggctcaggacgaacgctggcggcgtgcctaatacatgcaagtcgagcgagctgaattcaaagatcccttcggggtgatttgttggatgctagcggcggatgggtgagtaacacgtgggcaatctgccctaaagactgggataccacttggaaacaggtgctaataccggataacaacatgaatcgcatgattcaagtttgaaaggcggcgta

SEQ ID NO: 4383 - DNA, 225 bp, unidentified; identical to SEQ ID NO: 4382
  misc_feature 1..225: note = bacterial strain Ascusb_555B encodes 16S rRNA
  source 1..225: mol_type = genomic DNA

SEQ ID NO: 4384 - DNA, 225 bp, unidentified
  misc_feature 1..225: note = bacterial strain Ascusb_2255C encodes 16S rRNA
  source 1..225: mol_type = genomic DNA
agagtttgatcatggctcaggacgaacgctggcggcgtgcttaacacatgcaagtcgaacgaagagcgatggaagcttgcttctatcaatcttagtggcgaacgggtgagtaacgcgtaatcaacctgcccttcagagggggacaacagttggaaacgactgctaataccgcatacgatctgacctcggcatcgaggatggatgaaaggtggcctctacatgtaa

SEQ ID NO: 4385 - DNA, 225 bp, unidentified
  misc_feature 1..225: note = bacterial strain Ascusb_4938B encodes 16S rRNA
  source 1..225: mol_type = genomic DNA
agagtttgatcatggctcaggacgaacgctggcggcgtgcctaatacatgcaagtcgagcgaaccaataagaagcttgctttttgttggttagcggcggacgggtgagtaacacgtgggtaacctgcctgtaagatcgggataactccgggaaaccggtgctaataccggatagattatctttccgcctggagagataaggaaagatggctattgccatcactta

SEQ ID NO: 4386 - DNA, 225 bp, unidentified; identical to SEQ ID NO: 4385
  misc_feature 1..225: note = bacterial strain Ascusb_5705A encodes 16S rRNA
  source 1..225: mol_type = genomic DNA

SEQ ID NO: 4387 - DNA, 225 bp, unidentified
  misc_feature 1..225: note = bacterial strain Ascusb_186A encodes 16S rRNA
  source 1..225: mol_type = genomic DNA
agagtttgatcctggctcaggacgaacgctggcggcgtgcctaacacatgcaagtcgagcgatgaaacccttcggggtgaattagcggcggacgggtgagtaacacgtgggtaacctgccttatagagggggatagccttccgaaaggaagattaataccgcatgaaatgtttttatcgcatggtagaaacatcaaaggagtaatccgctataagatggacccgc

SEQ ID NO: 4388 - DNA, 225 bp, unidentified; identical to SEQ ID NO: 4387
  misc_feature 1..225: note = bacterial strain Ascusb_371A encodes 16S rRNA
  source 1..225: mol_type = genomic DNA

SEQ ID NO: 4389 - DNA, 225 bp, unidentified
  misc_feature 1..225: note = bacterial strain Ascusb_2432C encodes 16S rRNA
  source 1..225: mol_type = genomic DNA
agagtttgatcctggctcaggatgaacgctggcggcgtgcttaacacatgcaagtcgaacgaagcatttaaaacggatttcttcgggatgaagttttttatgactgagtggcggacgggtgagtaacgcgtgggtaacctgcctcacacagggggatagcagttggaaacgactggtaataccgcataagcgcacagcttcgcatgaagcggtgtgaaaaactcc

SEQ ID NO: 4390 - DNA, 225 bp, unidentified
  misc_feature 1..225: note = bacterial strain Ascusb_338B encodes 16S rRNA
  source 1..225: mol_type = genomic DNA
agagtttgatcatggctcaggacgaacgctggcggcgtgcctaatacatgcaagtcgagcggacctgatggagtgcttgcactcctgatggttagcggcggacgggtgagtaacacgtaggcaacctgcccgtaagaccgggataactaccggaaacggtagctaataccggatacgcaagtctatcgcatggtggacttgggaaaggcggagcaatctgtcact

SEQ ID NO: 4391 - DNA, 225 bp, unidentified
  misc_feature 1..225: note = bacterial strain Ascusb_3092C encodes 16S rRNA
  source 1..225: mol_type = genomic DNA
agagtttgatcctggctcaggacgaacgctggcggcgtgcttaacacatgcaagtcgtacgaggcagattttcatcactgaactttaaagagcggactgatgagaggcgtcgtgaatgcgaagcattcaccacacttttataaagtgcttaactttaaggctgagtgatgaaaagatgccgagtggcaaacgggtgagtaacgcgtagacaacctgccgtaaaga

SEQ ID NO: 4392 - DNA, 225 bp, unidentified; identical to SEQ ID NO: 4391
  misc_feature 1..225: note = bacterial strain Ascusb_15051B encodes 16S rRNA
  source 1..225: mol_type = genomic DNA

SEQ ID NO: 4393 - DNA, 225 bp, unidentified; identical to SEQ ID NO: 4391
  misc_feature 1..225: note = bacterial strain Ascusb_1985D encodes 16S rRNA
  source 1..225: mol_type = genomic DNA

SEQ ID NO: 4394 - DNA, 225 bp, unidentified; identical to SEQ ID NO: 4391
  misc_feature 1..225: note = bacterial strain Ascusb_4173B encodes 16S rRNA
  source 1..225: mol_type = genomic DNA

SEQ ID NO: 4395 - DNA, 225 bp, unidentified; identical to SEQ ID NO: 4391
  misc_feature 1..225: note = bacterial strain Ascusb_14185C encodes 16S rRNA
  source 1..225: mol_type = genomic DNA

SEQ ID NO: 4396 - DNA, 225 bp, unidentified
  misc_feature 1..225: note = bacterial strain Ascusb_4975C encodes 16S rRNA
  source 1..225: mol_type = genomic DNA
agagtttgatcatggctcagattgaacgctggcggcaggcctaatacatgcaagtcggacggtaacataagaaaagcttgcttttcttgatgacgagtggcggacgggtgagtaatatttgggaagctacctgatagagggggacaacagttggaaacgactgctaataccgcatacagccttagggtgaaagaagaaattcgctatcagatgtgcccaaatggg

SEQ ID NO: 4397 - DNA, 225 bp, unidentified
  misc_feature 1..225: note = bacterial strain Ascusb_1195B encodes 16S rRNA
  source 1..225: mol_type = genomic DNA
agagtttgatcctggctcaggacgaacgctggcggcgtgcctaacacatgcaagtcgagcgatgaagttccctcgggaatggattagcggcggacgggtgagtaacacgtgggcaacctgcctcaaagtgggggatagccctccgaaagggggattaataccgcataatgttaagtttttgcataaaagcttaaccaaaggagtaatccgctttgagatgggccc

SEQ ID NO: 4398 - DNA, 225 bp, unidentified
  misc_feature 1..225: note = bacterial strain Ascusb_6078A encodes 16S rRNA
  source 1..225: mol_type = genomic DNA
agagtttgatcatggctcaggacgaacgctggcggcgtgcctaatacatgcaagtcgagcggagttgatcgggagcttgctcctgattaacttagcggcggacgggtgagtaacacgtaggcaacctgcccgtaagaccgggataactaccggaaacggtagctaataccggataatcaagcctctcgcatgagaggcttgggaaaggcggagcaatctgtcact

SEQ ID NO: 4399 - DNA, 225 bp, unidentified
  misc_feature 1..225: note = bacterial strain Ascusb_3175B encodes 16S rRNA
  source 1..225: mol_type = genomic DNA
agagtttgatcatggctcaggatgaacgctggcggcgtgcctaacacatgcaagtcgaacgagcgagagatgaaacctagtgattttcgagcgagtggcggacgggtgagtaacgcgtgggtaacctgccttacagagggggataacagtttgaaaagactgctaataccgcataagcacacagtaccgcatggtacagggtgaaaagatttatcactgtaagat

SEQ ID NO: 4400 - DNA, 225 bp, unidentified; identical to SEQ ID NO: 4399
  misc_feature 1..225: note = bacterial strain Ascusb_992B encodes 16S rRNA
  source 1..225: mol_type = genomic DNA

SEQ ID NO: 4401 - DNA, 225 bp, unidentified; identical to SEQ ID NO: 4399
  misc_feature 1..225: note = bacterial strain Ascusb_12024B encodes 16S rRNA
  source 1..225: mol_type = genomic DNA

SEQ ID NO: 4402 - DNA, 225 bp, unidentified; identical to SEQ ID NO: 4399
  misc_feature 1..225: note = bacterial strain Ascusb_5433B encodes 16S rRNA
  source 1..225: mol_type = genomic DNA

SEQ ID NO: 4403 - DNA, 225 bp, unidentified
  misc_feature 1..225: note = bacterial strain Ascusb_238A encodes 16S rRNA
  source 1..225: mol_type = genomic DNA
agagtttgatcctggctcaggacgaacgctggcggcgtgcttaacacatgcaagtcgagcgatgaagcttccttcgggaagtggattagcggcggacgggtgagtaacacgtgggaaacctgcctcaaagaggggaatagccctccgaaaggaggattaataccgcataaagttagagtttcgcatgaaactttaaccaaaggagtaatccgctttgagatgggc

SEQ ID NO: 4404 - DNA, 225 bp, unidentified
  misc_feature 1..225: note = bacterial strain Ascusb_1657A encodes 16S rRNA
  source 1..225: mol_type = genomic DNA
agagtttgatcatggctcaggacgaacgctggcggcgtgcctaatacatgcaagtcgagcggacctgatggagtgcttgcactcctgacggttagcggcggacgggtgagtaacacgtaggcaacctgcccgtaagaccgggataactaccggaaacggtagctaataccggataatcaagcctctcgcatgaggggcttgggaaaggcggttctgaatttattc

SEQ ID NO: 4405 - DNA, 225 bp, unidentified
  misc_feature 1..225: note = bacterial strain Ascusb_3123B encodes 16S rRNA
  source 1..225: mol_type = genomic DNA
agagtttgatcatggctcaggatgaacgctagctacaggcttaacacatgcaagtcgaggggaaacgacatagagtgcttgcactttatgggcgtcgaccggcgaatgggtgagtaacgcgtatccaacctgcccttgaccgagggatagcccagtgaaaactgaattaatacctcatgttctcctcagacggcatcagacgaggagcaaagattaatcggtcaa

SEQ ID NO: 4406 - DNA, 225 bp, unidentified
  misc_feature 1..225: note = bacterial strain Ascusb_2743A encodes 16S rRNA
  source 1..225: mol_type = genomic DNA
agagtttgatcctggctcaggatgaacgctggcggcgtgcctaatacatgcaagtcgagcgagaaattctttaatgaatcttcggaggatttagagaatgggcagcggcggacgggtgagtaacgcgtaggcaacctgcctcacacagagggatagccattggaaacgatgaataatacctcatgaaaccggaacaacacatgttgatccggtcaaagatttatc

SEQ ID NO: 4407 - DNA, 225 bp, unidentified
  misc_feature 1..225: note = bacterial strain Ascusb_6203A encodes 16S rRNA
  source 1..225: mol_type = genomic DNA
agagtttgatcctggctcaggacgaacgctggcggcgtgcctaatacatgcaagtcgagcggagttaatcgggagcttgctcctgattaacttagcggcggacgggtgagtaacacgtaggcaacctgcccgtaagaccgggataactagcggaaacgttagctaataccggataatcaagtttctcgcatgggggacttgggaaaggcggagcaatctgtcact

SEQ ID NO: 4408 - DNA, 225 bp, unidentified; identical to SEQ ID NO: 4263
  misc_feature 1..225: note = bacterial strain Ascusb_12676A encodes 16S rRNA
  source 1..225: mol_type = genomic DNA

SEQ ID NO: 4409 - DNA, 225 bp, unidentified; identical to SEQ ID NO: 4263
  misc_feature 1..225: note = bacterial strain Ascusb_7893A encodes 16S rRNA
  source 1..225: mol_type = genomic DNA

SEQ ID NO: 4410 - DNA, 225 bp, unidentified; identical to SEQ ID NO: 4263
  misc_feature 1..225: note = bacterial strain Ascusb_1155A encodes 16S rRNA
  source 1..225: mol_type = genomic DNA

SEQ ID NO: 4411 - DNA, 225 bp, unidentified; identical to SEQ ID NO: 4362
  misc_feature 1..225: note = bacterial strain Ascusb_20688A encodes 16S rRNA
  source 1..225: mol_type = genomic DNA

SEQ ID NO: 4412 - DNA, 225 bp, unidentified; identical to SEQ ID NO: 4362
  misc_feature 1..225: note = bacterial strain Ascusb_1720A encodes 16S rRNA
  source 1..225: mol_type = genomic DNA

SEQ ID NO: 4413 - DNA, 225 bp, unidentified; identical to SEQ ID NO: 4362
  misc_feature 1..225: note = bacterial strain Ascusb_265A encodes 16S rRNA
  source 1..225: mol_type = genomic DNA

SEQ ID NO: 4414 - DNA, 225 bp, unidentified
  misc_feature 1..225: note = bacterial strain Ascusb_2594C encodes 16S rRNA
  source 1..225: mol_type = genomic DNA
agagtttgatcctggctcaggatgaacgctggcggcgtgcctaacacatgcaagtcgaacgagcgagagatgaaacctagtgattctcgagcgagtggcggacgggtgagtaacgcgtgggtaacctgccttacagagggggataacagtttgaaaagactgctaataccgcataagcacacagtaccgcatggtacagggtgaaaagatttatcactgtaagat

SEQ ID NO: 4415 - DNA, 225 bp, unidentified
  misc_feature 1..225: note = bacterial strain Ascusb_5320A encodes 16S rRNA
  source 1..225: mol_type = genomic DNA
agagtttgatcatggctcaggacgaacgctggcggcgtgcctaatacatgcaagtcgtgcggactttttaaaagcttgcttctaaaaagttagcggcggacgggtgagtaacacgtgggcaacctgcctgtaagatcgggataacgccgggaaaccggggctaataccggatagttttttcctccgcatggaggaaaaaggaaagacggcttttgctgtcactta

SEQ ID NO: 4416 - DNA, 225 bp, unidentified
  misc_feature 1..225: note = bacterial strain Ascusb_1147B encodes 16S rRNA
  source 1..225: mol_type = genomic DNA
agagtttgatcctggctcaggatgaacgctggcggcgtgcctaatacatgcaagtcgagcgaatggattaagagcttgctcttatgaagttagcggcggacgggtgagtaacacgtgggtaacctgcccataagactgggataactccgggaaaccggggctaataccggataacattttgaactgcatggttcgaaattgaaaggcggcttcggctgtcactta

SEQ ID NO: 4417 - DNA, 225 bp, unidentified
  misc_feature 1..225: note = bacterial strain Ascusb_4552B encodes 16S rRNA
  source 1..225: mol_type = genomic DNA
agagtttgatcatggctcagattgaacgctggcggcaggcctaatacatgcaagtcggacggtaacataagaaaagcttgcttttcttgatgacgagtggcggacgggtgagtaagatttgggaaactacctgatagagggggacaacagttggaaacgactgctaataccgcatacagccttagggtgaaagaagcgattcgctatcagatgtgcccaaacggg

SEQ ID NO: 4418 - DNA, 225 bp, unidentified
  misc_feature 1..225: note = bacterial strain Ascusb_2272C encodes 16S rRNA
  source 1..225: mol_type = genomic DNA
agagtttgatcctggctcaggacgaacgctggcggcgtgcttaacacatgcaagtcgaacgggaagaaaagaaagagcttgctctttcttggattctagtggcaaacgggtgagtaacacgtaaacaacctgccttcaggatggggacaacagacggaaacgactgctaataccgaataccttccaatttccgcatggagataggaagaaagggtggcctctact

SEQ ID NO: 4419 - DNA, 225 bp, unidentified; identical to SEQ ID NO: 4407
  misc_feature 1..225: note = bacterial strain Ascusb_9859B encodes 16S rRNA
  source 1..225: mol_type = genomic DNA

SEQ ID NO: 4420 - DNA, 225 bp, unidentified; identical to SEQ ID NO: 4406
  misc_feature 1..225: note = bacterial strain Ascusb_4154A encodes 16S rRNA
  source 1..225: mol_type = genomic DNA

SEQ ID NO: 4421 - DNA, 225 bp, unidentified
  misc_feature 1..225: note = bacterial strain Ascusb_3469A encodes 16S rRNA
  source 1..225: mol_type = genomic DNA
agagtttgatcatggctcaggacgaacgctggcggcgtgcttaacacatgcaagtcgaacgaagagcgacggaagcttgcttctatcaatcttagtggcgaacgggtgagtaacgcgtaatcaacctgcccttcagagggggacaacagttggaaacgactgctaataccgcatacgatctgacctcggcatcgaggatggatgaaaggtggcctctacatgtaa

SEQ ID NO: 4422 - DNA, 225 bp, unidentified
  misc_feature 1..225: note = bacterial strain Ascusb_688C encodes 16S rRNA
  source 1..225: mol_type = genomic DNA
agagtttgatcatggctcaggacgaacgctggcggcgtgcctaatacatgcaagtcgagcggacctgatggagtgcttgcactcctgatggttagcggcggacgggtgagtaacacgtaggcaacctgcccgtaagaccgggataactaccggaaacggtagctaataccggataatcaagtcttccgcatgggaggcttgggaaaggcggttctgaatttattc

SEQ ID NO: 4423 - DNA, 225 bp, unidentified; identical to SEQ ID NO: 4368
  misc_feature 1..225: note = bacterial strain Ascusb_19458A encodes 16S rRNA
  source 1..225: mol_type = genomic DNA

SEQ ID NO: 4424 - DNA, 225 bp, unidentified
  misc_feature 1..225: note = bacterial strain Ascusb_2680A encodes 16S rRNA
  source 1..225: mol_type = genomic DNA
agagtttgatcctggctcaggacgaacgctggcggcgtgcctaatacatgcaagtcgtgcggaccttttaaaagcttgcttttaaaaggttagcggcggacgggtgagtaacacgtgggcaacctgcctgtaagactgggataacgccgggaaaccggggctaataccagatagttttttcctccgcatggaggaaaaaggaaaggcggcttcggctgccactta

SEQ ID NO: 4425 - DNA, 225 bp, unidentified; identical to SEQ ID NO: 4261
  misc_feature 1..225: note = bacterial strain Ascusb_3590B encodes 16S rRNA
  source 1..225: mol_type = genomic DNA

SEQ ID NO: 4426 - DNA, 225 bp, unidentified
  misc_feature 1..225: note = bacterial strain Ascusb_21D encodes 16S rRNA
  source 1..225: mol_type = genomic DNA
agagtttgatcctggctcagattgaacgctggcggcaggcctaacacatgcaagtcgaacggtaacaggaagaagcttgcttctttgctgacgagtggcggacgggtgagtaatgtctgggaaactgcctgatggagggggataactactggaaacggtagctaataccgcataatgtcgcaagaccaaagtgggggaccttcgggcctcatgccatcagatgtg

SEQ ID NO: 4427 - DNA, 225 bp, unidentified; identical to SEQ ID NO: 4426
  misc_feature 1..225: note = bacterial strain Ascusb_17947D encodes 16S rRNA
  source 1..225: mol_type = genomic DNA

SEQ ID NO: 4428 - DNA, 225 bp, unidentified
  misc_feature 1..225: note = bacterial strain Ascusb_987B encodes 16S rRNA
  source 1..225: mol_type = genomic DNA
agagtttgatcatggctcagattgaacgctggcggcaggcctaatacatgcaagtcgaacggtaacataagaaaagcttgcttttcttgatgacgagtggcggacgggtgagtaatatttgggaagctacctgatagagggggacaacagttggaaacgactgctaataccgcatacagccttagggtgaaagaagaaattcgctatcagatgtgcccaaacggg

SEQ ID NO: 4429 - DNA, 225 bp, unidentified
  misc_feature 1..225: note = bacterial strain Ascusb_10845B encodes 16S rRNA
  source 1..225: mol_type = genomic DNA
agagtttgatcatggctcaggacgaacgctggcggcgtgcctaatacatgcaagtcgtgcggaccttttaaaagcttgcttttaaaaggttagcggcggacgggtgagtaacacgtgggcaacctgcctgtaagatcgggataacgccgggaaaccggggctaataccggatagttttttcctccgcatggaggagaaaggaaagacggcttcggctgtcactta

SEQ ID NO: 4430 - DNA, 225 bp, unidentified; identical to SEQ ID NO: 4406
  misc_feature 1..225: note = bacterial strain Ascusb_3680A encodes 16S rRNA
  source 1..225: mol_type = genomic DNA

SEQ ID NO: 4431 - DNA, 225 bp, unidentified; identical to SEQ ID NO: 4406
  misc_feature 1..225: note = bacterial strain Ascusb_1626A encodes 16S rRNA
  source 1..225: mol_type = genomic DNA

SEQ ID NO: 4432 - DNA, 225 bp, unidentified
  misc_feature 1..225: note = bacterial strain Ascusb_14905A encodes 16S rRNA
  source 1..225: mol_type = genomic DNA
agagtttgatcatggctcaggacgaacgctggcggcgtgcctaacacatgcaagtcgaacggagtgattcgaaagcttgcttttgaatcacttagtggcggacgggtgagtaacgcgtgagtaacctgcctttcagagggggataacatcctgaaaaggatgctaataccgcatgacatatcgaggccgcatggtcttggtatcaaaggagcaatccgctgagag

SEQ ID NO: 4433 - DNA, 225 bp, unidentified
  misc_feature 1..225: note = bacterial strain Ascusb_464A encodes 16S rRNA
  source 1..225: mol_type = genomic DNA
agagtttgatcatggctcaggacgaacgctggcggcgtgcctaacacatgcaagtcgagcgaggtgatttccttcgggaatgaacctagcggcggacgggtgagtaacacgtgggcaacctgccttatagaggggaatagcctcccgaaagggagattaataccgcataatattgaagcttcgcatgaagcttcaatcaaaggagcaatccgctataagatgggc

SEQ ID NO: 4434 - DNA, 225 bp, unidentified
  misc_feature 1..225: note = bacterial strain Ascusb_197B encodes 16S rRNA
  source 1..225: mol_type = genomic DNA
agagtttgatcatggctcagattgaacgctggcggcaggcctaacacatgcaagtcgagcggtaacaggggaagcttgcttctcgctgacgagcggcggacgggtgagtaatgtatggggatctgcccgatagagggggataactactggaaacggtggctaataccgcataatctcttaggagcaaagcaggggaccttcgggccttgcgctgtcggatgaacc

SEQ ID NO: 4435 - DNA, 225 bp, unidentified; identical to SEQ ID NO: 4121
  misc_feature 1..225: note = bacterial strain Ascusb_1665B encodes 16S rRNA
  source 1..225: mol_type = genomic DNA

SEQ ID NO: 4436 - DNA, 225 bp, unidentified; identical to SEQ ID NO: 4049
  misc_feature 1..225: note = bacterial strain Ascusb_2516B encodes 16S rRNA
  source 1..225: mol_type = genomic DNA

SEQ ID NO: 4437 - DNA, 225 bp, unidentified
  misc_feature 1..225: note = bacterial strain Ascusb_5764A encodes 16S rRNA
  source 1..225: mol_type = genomic DNA
agagtttgatcatggctcaggatgaacgctggcggcgtgcttaacacatgcaagtcgaacggggttaataagtggaagtcttcggatggaagcttgttaacctagtggcggacgggtgagtaacgcgtgggtaacctgccttatacagggggataacagccggaaacggttgctaataccgcataagcatacagtgccgcatggtacagtgtgaaaaagattaag

SEQ ID NO: 4438 - DNA, 225 bp, unidentified
  misc_feature 1..225: note = bacterial strain Ascusb_3082A encodes 16S rRNA
  source 1..225: mol_type = genomic DNA
agagtttgatcctggctcaggacgaacgctggcggcgtgcctaatacatgcaagtcgagcggacctgatggagtgcttgcactcctgatggttagcggcggacgggtgagtaacacgtaggcaacctgcccgtaagaccgggataactaccggaaacggtagctaataccggataatcaagtctctcgcatgggaggcttgggaaaggcggagcaatctgtcact

SEQ ID NO: 4439 - DNA, 225 bp, unidentified
  misc_feature 1..225: note = bacterial strain Ascusb_108B encodes 16S rRNA
  source 1..225: mol_type = genomic DNA
agagtttgatcatggctcaggacgaacgctggcggcgtgcctaacacatgcaagtcgagcgagaagaactccttcgggagggattctagcggcggacgggtgagtaacacgtgggcaacctgccttagtgagggggatagcctcccgaaagggagattaataccgcataacattattctaccgcatgatagaataatcaaaggagtaatccgcactaagatgggc

SEQ ID NO: 4440 - DNA, 225 bp, unidentified
  misc_feature 1..225: note = bacterial strain Ascusb_2792C encodes 16S rRNA
  source 1..225: mol_type = genomic DNA
agagtttgatcatggctcaggacgaacgctggcggcgtgcctaatacatgcaagtcgagcggagttaatcgggagcttgctcctgattaacttagcggcggacgggtgagtaacacgtgggtaacctgcctcatagaggggaatagcctcccgaaagggagattaataccgcataatgtatgagaatcgcatgatttttgtaccaaaggagcaatccgctatgag

SEQ ID NO: 4441 - DNA, 225 bp, unidentified
  misc_feature 1..225: note = bacterial strain Ascusb_3321A encodes 16S rRNA
  source 1..225: mol_type = genomic DNA
agagtttgatcatggctcaggacgaacgctggcggcgtgcctaatacatgcaagtcgagcggagttaatcgggagcttgctcctgattaacttagcggcggacgggtgagtaacacgtgggtaacctgcctcaaagtgggggatagccttccgaaaggaagattaataccgcataacataagagaatcgcatgattttcttatcaaagatttattgctttgagat

SEQ ID NO: 4442 - DNA, 225 bp, unidentified
  misc_feature 1..225: note = bacterial strain Ascusb_1161B encodes 16S rRNA
  source 1..225: mol_type = genomic DNA
agagtttgatcctggctcaggacgaacgctggcggcgtgcttaacacatgcaagtcgaacggagaactttcttcggaatgttcttagtggcgaacgggtgagtaacgcgtaggcaacctgccctctggttggggacaacattccgaaagggatgctaataccgaatgagatcctctttccgcatggagagaggatgaaagatggcctctacttgtaagctatcgc

SEQ ID NO: 4443 - DNA, 225 bp, unidentified
  misc_feature 1..225: note = bacterial strain Ascusb_738A encodes 16S rRNA
  source 1..225: mol_type = genomic DNA
agagtttgatcctggctcaggatgaacgctagctacaggcttaacacatgcaagtcgaggggcagcatgaagtttgcttgcaaactttgatggcgaccggcgcacgggtgagtaacgcgtatccaaccttccctatactagaggatagcccggcgaaagtcggattaatactctatgttcttcgtagaagacatctgaaatgaagcaaaggtttaccggtatagg

SEQ ID NO: 4444 - DNA, 225 bp, unidentified
  misc_feature 1..225: note = bacterial strain Ascusb_15659B encodes 16S rRNA
  source 1..225: mol_type = genomic DNA
agagtttgatcctggctcaggatgaacgctagctacaggcttaacacatgcaagtcgaggggaaacgacagagagtgcttgcactttttgggcgtcgaccggcgaatgggtgagtaacgcgtatccaacctgcccttgactgagggatagcccagtgaaaactgaattaatacctcatatcctcctccgacggcatcagacgaggagtaaagatttatcggtcaa

SEQ ID NO: 4445 - DNA, 225 bp, unidentified
  misc_feature 1..225: note = bacterial strain Ascusb_379B encodes 16S rRNA
  source 1..225: mol_type = genomic DNA
agagtttgatcatggctcaggatgaacgctggcggcgtgcctaatacatgcaagtcgagcgaatggattaagagcttgctcttatgaagttagcggcggacgggtgagtaacacgtgggtaacctgcccataagactgggataactccgggaaaccggggctaataccggatgacattttgaactgcatggttcgaaattgaaaggcggcttcggctgtcactta

SEQ ID NO: 4446 - DNA, 225 bp, unidentified
  misc_feature 1..225: note = bacterial strain Ascusb_3326B encodes 16S rRNA
  source 1..225: mol_type = genomic DNA
agagtttgatcatggctcaggacgaacgctggcggcgtgcctaacacatgcaagtcgagcgatgaagttccttcgggaatggattagcggcggacgggtgagtaacacgtgggcaacctgcctcaaagtgggggatagcctcccgaaagggagattaataccgcataacattatctctttgcatgaagagataatcaaaggagcaatccgctttgagatgggccc

SEQ ID NO: 4447 - DNA, 217 bp, unidentified
  misc_feature 1..217: note = bacterial strain Ascusb_740A encodes 16S rRNA
  source 1..217: mol_type = genomic DNA
agagtttgatcctggctcaggacgaacgctggcggcgtgcctaatacatgcaagtcgagcggacctgatggagtgcttgcactcctgatggttagcggcggacgggtgagtaacacgtaggtaacctgcctgtaagactgggataactagcggaaacgttagctaataccggataatttattttctcgcatgggaagataatgaaagacggagcaat

SEQ ID NO: 4448 - DNA, 225 bp, unidentified; identical to SEQ ID NO: 4362
  misc_feature 1..225: note = bacterial strain Ascusb_2413B encodes 16S rRNA
  source 1..225: mol_type = genomic DNA

SEQ ID NO: 4449 - DNA, 217 bp, unidentified; identical to SEQ ID NO: 4447
  misc_feature 1..217: note = bacterial strain Ascusb_15001A encodes 16S rRNA
  source 1..217: mol_type = genomic DNA

SEQ ID NO: 4450 - DNA, 217 bp, unidentified; identical to SEQ ID NO: 4447
  misc_feature 1..217: note = bacterial strain Ascusb_13183A encodes 16S rRNA
  source 1..217: mol_type = genomic DNA

SEQ ID NO: 4451 - DNA, 225 bp, unidentified
  misc_feature 1..225: note = bacterial strain Ascusb_429A encodes 16S rRNA
  source 1..225: mol_type = genomic DNA
agagtttgatcctggctcaggatgaacgctggcggcgtgcttaacacatgcaagtcgaacggagtttataagcagagcccttcggggtaaagcttataaacttagtggcggacgggtgagtaacgcgtgggtaacctgccttacacagggggataacaactggaaacggttgctaataccgcataagcgcacggtatcgcatgatacagtgtgaaaagatttatc

SEQ ID NO: 4452 - DNA, 225 bp, unidentified
  misc_feature 1..225: note = bacterial strain Ascusb_19080B encodes 16S rRNA
  source 1..225: mol_type = genomic DNA
agagtttgatcatggctcaggatgaacgctagctacaggcttaacacatgcaagtcgaggggaaacgacagagagtgcttgcactttttgggcgtcgaccggcgaatgggtgagtaacgcgtatccaacctgcccttgactgagggatagcccagtgaaaactgaattaatacctcatgttctcctcagacggcatcagacgaggagcaaagattaatcggtcaa

SEQ ID NO: 4453 - DNA, 225 bp, unidentified
  misc_feature 1..225: note = bacterial strain Ascusb_888B encodes 16S rRNA
  source 1..225: mol_type = genomic DNA
agagtttgatcatggctcaggatgaacgctggcggcgtgcctaacacatgcaagtcgaacggagtttatttatttgagaccttcgggtggattatttataaacttagtggcggacgggtgagtaacgcgtgggcaacctgcctcatactgggggataacagttggaaacgactgttaataccgcataagcgcacggtgtcgcatgacacagtgtgaaaaactccg

SEQ ID NO: 4454 - DNA, 225 bp, unidentified; identical to SEQ ID NO: 2056
  misc_feature 1..225: note = bacterial strain Ascusb_15117C encodes 16S rRNA
  source 1..225: mol_type = genomic DNA

SEQ ID NO: 4455 - DNA, 225 bp, unidentified; identical to SEQ ID NO: 2056
  misc_feature 1..225: note = bacterial strain Ascusb_10375B encodes 16S rRNA
  source 1..225: mol_type = genomic DNA

SEQ ID NO: 4456 - DNA, 225 bp, unidentified; identical to SEQ ID NO: 2056
  misc_feature 1..225: note = bacterial strain Ascusb_10976C encodes 16S rRNA
  source 1..225: mol_type = genomic DNA

SEQ ID NO: 4457 - DNA, 225 bp, unidentified; identical to SEQ ID NO: 2056
  misc_feature 1..225: note = bacterial strain Ascusb_15111C encodes 16S rRNA
  source 1..225: mol_type = genomic DNA

SEQ ID NO: 4458 - DNA, 225 bp, unidentified
  misc_feature 1..225: note = bacterial strain Ascusb_318C encodes 16S rRNA
  source 1..225: mol_type = genomic DNA
agagtttgatcatggctcagattgaacgctggcggcaggcctaatacatgcaagtcgaacggtaacataagaaaagcttgcttttcttgatgacgagtggcggacgggtgagtaagatttgggaaactacctgatagagggggacaacagttggaaacgactgctaataccgcatacagccttagggtgaaagaagaaattcgctatcagatgtgcccaaacggg

SEQ ID NO: 4459 - DNA, 225 bp, unidentified
  misc_feature 1..225: note = bacterial strain Ascusb_18705B encodes 16S rRNA
  source 1..225: mol_type = genomic DNA
agagtttgatcatggctcagattgaacgctggcggcaggcctaacacatgcaagtcgagcggtagcacagagagcttgctctcgggtgacgagcggcggacgggtgagtaatgtctgggaaactgcctgatggagggggataactactggaaacggtagctaataccgcataatgtcgcaagaccaaagtgggggaccttagggcctcatgccatcagatgtgcc

SEQ ID NO: 4460 - DNA, 225 bp, unidentified; identical to SEQ ID NO: 4049
  misc_feature 1..225: note = bacterial strain Ascusb_1588B encodes 16S rRNA
  source 1..225: mol_type = genomic DNA

SEQ ID NO: 4461 - DNA, 225 bp, unidentified; identical to SEQ ID NO: 4362
  misc_feature 1..225: note = bacterial strain Ascusb_9933B encodes 16S rRNA
  source 1..225: mol_type = genomic DNA

SEQ ID NO: 4462 - DNA, 225 bp, unidentified; identical to SEQ ID NO: 4434
  misc_feature 1..225: note = bacterial strain Ascusb_4663B encodes 16S rRNA
  source 1..225: mol_type = genomic DNA

SEQ ID NO: 4463 - DNA, 225 bp, unidentified
  misc_feature 1..225: note = bacterial strain Ascusb_338C encodes 16S rRNA
  source 1..225: mol_type = genomic DNA
agagtttgatcatggctcaggatgaacgctggcggcgtgcctaatacatgcaagtcgagcgagaaattctttaatgaatcttcggaggaattagaggatggacagcggcggacgggtgagtaacgcgtaggcaacctgcctcacacagagggatagccattggaaacgatgaataatacctcatgaaaccggaataacacatgttgatccggtcaaagatttatc

SEQ ID NO: 4464 - DNA, 225 bp, unidentified; identical to SEQ ID NO: 4434
  misc_feature 1..225: note = bacterial strain Ascusb_6110B encodes 16S rRNA
  source 1..225: mol_type = genomic DNA

SEQ ID NO: 4465 - DNA, 225 bp, unidentified
  misc_feature 1..225: note = bacterial strain Ascusb_3141A encodes 16S rRNA
  source 1..225: mol_type = genomic DNA
agagtttgatcatggctcaggacgaacgctggcggcgtgcctaatacatgcaagtggaacgcatgattgataccgtagcttgctacaccattaatcatgagtcgcgaacgggtgagtaacgcgtaggtaacctaccttctagcgggggataactattggaaacgatagctaataccgcataacagtttttaacacatgttagaaatttaaaaggagcaattgctt

SEQ ID NO: 4466 - DNA, 225 bp, unidentified; identical to SEQ ID NO: 4119
  misc_feature 1..225: note = bacterial strain Ascusb_2027C encodes 16S rRNA
  source 1..225: mol_type = genomic DNA

SEQ ID NO: 4467 - DNA, 225 bp, unidentified; identical to SEQ ID NO: 4119
  misc_feature 1..225: note = bacterial strain Ascusb_724C encodes 16S rRNA
  source 1..225: mol_type = genomic DNA

SEQ ID NO: 4468 - DNA, 225 bp, unidentified
  misc_feature 1..225: note = bacterial strain Ascusb_2786C encodes 16S rRNA
  source 1..225: mol_type = genomic DNA
agagtttgatcatggctcaggacgaacgctggcggcgtgcctaatacatgcaagtcgagcggagttaattaggagcttgctcttgattaacttagcggcggacgggtgagtaacacgtgggtaacctgcctcaaagtgggggatagccttccgaaaggaagattaataccgcataatatgagagaatcgcatgattttcttatcaaagatttattgctttgagat

SEQ ID NO: 4469 - DNA, 225 bp, unidentified
  misc_feature 1..225: note = bacterial strain Ascusb_514C encodes 16S rRNA
  source 1..225: mol_type = genomic DNA
agagtttgatcctggctcagattgaacgctggcggcaggcctaatacatgcaagtcgaacggtaacataggaaaagcttgcttttcctgatgacgagtggcggacgggtgagtaagatttgggaagctacctgatagagggggacaacagttggaaacgactgctaataccgcatacagcctgagggtgaaagcagcaatgcgctatcagatgtgcccaaatggg

SEQ ID NO: 4470 - DNA, 225 bp, unidentified; identical to SEQ ID NO: 4469
  misc_feature 1..225: note = bacterial strain Ascusb_4119D encodes 16S rRNA
  source 1..225: mol_type = genomic DNA

SEQ ID NO: 4471 - DNA, 225 bp, unidentified
  misc_feature 1..225: note = bacterial strain Ascusb_3973A encodes 16S rRNA
  source 1..225: mol_type = genomic DNA
agagtttgatcatggctcaggacgaacgctggcggcgtgcctaatacatgcaagtcgagcggagtttatcgggagcttgctcctgatgaacttagcggcggacgggtgagtaacacgtaggcaacctgcccgtaagactgggataactaccggaaacggtagctaataccggatacgcaagtctctcgcatgagggacttgggaaaggcggagcaatctgtcact

SEQ ID NO: 4472 - DNA, 225 bp, unidentified
  misc_feature 1..225: note = bacterial strain Ascusb_2442B encodes 16S rRNA
  source 1..225: mol_type = genomic DNA
agagtttgatcctggctcaggacgaacgctggcggcgtgcctaatacatgcaagtcgagcggagttaatcgggagcttgctcctgattagcttagcggcggacgggtgagtaacacgtaggcaacctgcctgtaagactgggataactaccggaaacggtagctaataccggatacgcaagtctatcgcatggtggacttgggaaagacggagcaatctgtcact

SEQ ID NO: 4473 - DNA, 225 bp, unidentified; identical to SEQ ID NO: 4384
  misc_feature 1..225: note = bacterial strain Ascusb_431B encodes 16S rRNA
  source 1..225: mol_type = genomic DNA

SEQ ID NO: 4474 - DNA, 225 bp, unidentified; identical to SEQ ID NO: 4463
  misc_feature 1..225: note = bacterial strain Ascusb_847C encodes 16S rRNA
  source 1..225: mol_type = genomic DNA

SEQ ID NO: 4475 - DNA, 225 bp, unidentified; identical to SEQ ID NO: 4121
  misc_feature 1..225: note = bacterial strain Ascusb_896B encodes 16S rRNA
  source 1..225: mol_type = genomic DNA

SEQ ID NO: 4476 - DNA, 225 bp, unidentified; identical to SEQ ID NO: 4362
  misc_feature 1..225: note = bacterial strain Ascusb_3868B encodes 16S rRNA
  source 1..225: mol_type = genomic DNA

SEQ ID NO: 4477 - DNA, 225 bp, unidentified
  misc_feature 1..225: note = bacterial strain Ascusb_917B encodes 16S rRNA
  source 1..225: mol_type = genomic DNA
agagtttgatcatggctcaggatgaacgctggcggcgtgcctaacacatgcaagtcgaacgagcgagagatgaaacctagtgattctcgagcgagtggcggacgggtgagtaacgcgtgggtaacctgccttacagagggggataacagtttgaaaagactgctaataccgcataagcacacagtaccgcatggtacagggtgaaaagatctatcgctgtaagat

SEQ ID NO: 4478 - DNA, 225 bp, unidentified
  misc_feature 1..225: note = bacterial strain Ascusb_1379B encodes 16S rRNA
  source 1..225: mol_type = genomic DNA
agagtttgatcctggctcaggacgaacgctggcggcgtgcctaatacatgcaagtcgagcggactttaaaagcttgcttttaaagttagcggcggacgggtgagtaacacgtgggtaacctgcctcaaagtgggggatagccttccgaaaggaagattaataccgcataatatgagagaatcgcatgattttcttatcaaagatttattgctttgagatggaccc

SEQ ID NO: 4479 - DNA, 217 bp, unidentified
  misc_feature 1..217: note = bacterial strain Ascusb_1305B encodes 16S rRNA
  source 1..217: mol_type = genomic DNA
agagtttgatcatggctcaggacgaacgctggcggcgtgcctaatacatgcaagtcgagcggacttgatggagagcttgctctccagagagttagcggcggacgggtgagtaacacgtaggtaacctgcctgtaagactgggataactagcggaaacgttagctaataccggataatttattttctcgcatgggaagataatgaaagacggagcaat

SEQ ID NO: 4480 - DNA, 217 bp, unidentified; identical to SEQ ID NO: 4479
  misc_feature 1..217: note = bacterial strain Ascusb_589B encodes 16S rRNA
  source 1..217: mol_type = genomic DNA

SEQ ID NO: 4481 - DNA, 217 bp, unidentified; identical to SEQ ID NO: 4479
  misc_feature 1..217: note = bacterial strain Ascusb_9116A encodes 16S rRNA
  source 1..217: mol_type = genomic DNA

SEQ ID NO: 4482 - DNA, 225 bp, unidentified; identical to SEQ ID NO: 2308
  misc_feature 1..225: note = bacterial strain Ascusb_799B encodes 16S rRNA
  source 1..225: mol_type = genomic DNA

SEQ ID NO: 4483 - DNA, 225 bp, unidentified; identical to SEQ ID NO: 2308
  misc_feature 1..225: note = bacterial strain Ascusb_678B encodes 16S rRNA
  source 1..225: mol_type = genomic DNA

SEQ ID NO: 4484 - DNA, 225 bp, unidentified; identical to SEQ ID NO: 2308
  misc_feature 1..225: note = bacterial strain Ascusb_560B encodes 16S rRNA
  source 1..225: mol_type = genomic DNA

SEQ ID NO: 4485 - DNA, 225 bp, unidentified
  misc_feature 1..225: note = bacterial strain Ascusb_3969B encodes 16S rRNA
  source 1..225: mol_type = genomic DNA
agagtttgatcatggctcaggacgaacgctggcggcgtgcttaacacatgcaagtcgaacgagaagagatgagaagcttgcttcttattgattcgagtggcaaacgggtgagtaacgcgtaagcaacctgcccttcagatggggacaacagctggaaacggctgctaataccgaatacgttctttctgccgcatgacagagagaagaaagggaggctcttcggag

SEQ ID NO: 4486 - DNA, 225 bp, unidentified
  misc_feature 1..225: note = bacterial strain Ascusb_2148A encodes 16S rRNA
  source 1..225: mol_type = genomic DNA
agagtttgatcatggctcaggacgaacgctggcggcgtgcttaacacatgcaagtcgaacggggcaattgaaagcttgcttttgagagcctagtggcaaacgggtgagtaacgcgtaggaaacctgcctccgggatggggacaaccgtccgaaaggacagctaataccgaatgaagtacggctgacacatgtcagcggtatgaaagatggcctctatatataagc

SEQ ID NO: 4487 - DNA, 225 bp, unidentified
  misc_feature 1..225: note = bacterial strain Ascusb_2590D encodes 16S rRNA
  source 1..225: mol_type = genomic DNA
agagtttgatcatggctcaggacgaacgctggcggcgtgcctaatacatgcaagtcgtgcggaccttttaaaagcttgcttttaaaaggttagcggcggacgggtgagtaacacgtgggtaacctgcctcaaagtgggggatagccttccgaaaggaagattaataccgcataatatgagagaatcgcatgattttcttatcaaagatttattgctttgagatgg

SEQ ID NO: 4488 - DNA, 225 bp, unidentified
  misc_feature 1..225: note = bacterial strain Ascusb_21571A encodes 16S rRNA
  source 1..225: mol_type = genomic DNA
agagtttgatcctggctcaggatgaacgctagctacaggcttaacacatgcaagtcgaggggaaacgatattgaaagcttgctttctttaggcgtcgaccggcgaatgggtgagtaacgcgtatccaacctgcccctgagtaagggatagcccatcgaaagatggattaataccttatggtctcctttgcagacatctaattaggagtaaagatttatcgctgag

SEQ ID NO: 4489 - DNA, 225 bp, unidentified
  misc_feature 1..225: note = bacterial strain Ascusb_1532B encodes 16S rRNA
  source 1..225: mol_type = genomic DNA
agagtttgatcctggctcaggatgaacgctggcggcgtgcctaacacatgcaagtcgagcgggaagctcacaaatgattcttcggatgaatgcgtgagtggacagcggcggacgggtgagtaacgcgtgggcaacctgccccttactgaaggatagccgagggaaacttcgagtaatacttcataatgcattttcttcacatgaagggaatgccaaagatttatc

SEQ ID NO: 4490 - DNA, 225 bp, unidentified
  misc_feature 1..225: note = bacterial strain Ascusb_1268A encodes 16S rRNA
  source 1..225: mol_type = genomic DNA
agagtttgatcctggctcaggatgaacgctagctacaggcttaacacatgcaagtcgaggggcagcatgagagtagcttgctactcttgatggcgaccggcgcacgggtgcgtaacgcgtatccaacctgccgtgtactccgggatagccctctgaaaggaggattaataccggatgtggtcgggtgaagacatctttactcgattaaagatttatcggtacacc

SEQ ID NO: 4491 - DNA, 225 bp, unidentified
  misc_feature 1..225: note = bacterial strain Ascusb_9421B encodes 16S rRNA
  source 1..225: mol_type = genomic DNA
agagtttgatcctggctcaggatgaacgctagctacaggcttaacacatgcaagtcgaggggtaacgacagcgaaagcttgcttttgctgggcgacgaccggcgcacgggtgagtaacgcgtatccaacctgcccataactaagggataatccgtagaaatgcggtctaataccttatgtgttccgaagaagacatctgaattggaataaagatttatcggttat

SEQ ID NO: 4492 - DNA, 225 bp, unidentified
  misc_feature 1..225: note = bacterial strain Ascusb_8024A encodes 16S rRNA
  source 1..225: mol_type = genomic DNA
agagtttgatcatggctcaggatgaacgctagctacaggcttaacacatgcaagtcgaggggcagcataacgaaagcttgcttttgttgatggcgaccggcgcacgggtgagtaacgcgtatccaaccttccctatagtagagaatagcccggcgaaagtcggattaatgctctatgttgtatttagaggacatctgaagaataccaaaggtttaccgctatagg

SEQ ID NO: 4493 - DNA, 225 bp, unidentified; identical to SEQ ID NO: 4492
  misc_feature 1..225: note = bacterial strain Ascusb_3879A encodes 16S rRNA
  source 1..225: mol_type = genomic DNA

SEQ ID NO: 4494 - DNA, 225 bp, unidentified; identical to SEQ ID NO: 4405
  misc_feature 1..225: note = bacterial strain Ascusb_9365A encodes 16S rRNA
  source 1..225: mol_type = genomic DNA

SEQ ID NO: 4495 - DNA, 225 bp, unidentified
  misc_feature 1..225: note = bacterial strain Ascusb_21B encodes 16S rRNA
  source 1..225: mol_type = genomic DNA
agagtttgatcatggctcaggacgaacgctggcggcgtgcttaacacatgcaagtcgagcgatgaaatcccttcggggatggattagcggcggacgggtgagtaacacgtgggcaacctgcctcaaagtgggggatagccttccgaaagggagattaataccgcataacattagtttttcacatgaagtactaattaaaggagtaatccgctttgagatgggccc

SEQ ID NO: 4496 - DNA, 225 bp, unidentified
  misc_feature 1..225: note = bacterial strain Ascusb_19172A encodes 16S rRNA
  source 1..225: mol_type = genomic DNA
agagtttgatcatggctcagattgaacgctggcggcaggcctaatacatgcaagtcgaacggtaacagagagatagcttgctatctctgctgacgagtggcggacgggtgagtaaagtctgggaaactgcctgatagagggggacaacagctggaaacggctgctaataccgcatacgccctgagggggaaagcagcaatgcgctatcagatgtgcccagatggg

SEQ ID NO: 4497 - DNA, 225 bp, unidentified; identical to SEQ ID NO: 2047
  misc_feature 1..225: note = bacterial strain Ascusb_2294A encodes 16S rRNA
  source 1..225: mol_type = genomic DNA

SEQ ID NO: 4498 - DNA, 225 bp, unidentified
  misc_feature 1..225: note = bacterial strain Ascusb_4670A encodes 16S rRNA
  source 1..225: mol_type = genomic DNA
agagtttgatcatggctcaggacgaacgctggcggcgtgcctaatacatgcaagtcgaacgcttttctttccaccggagcttgctccaccggaaagaaaagagtggcgaacgggtgagtaacacgtgggtaacctgccctcaagcgggggataacacttggaaacaggtgctaataccgcataacaatagaaggagcatttcttctgtttgaaagtcgcaactgc

SEQ ID NO: 4499 - DNA, 225 bp, unidentified
  misc_feature 1..225: note = bacterial strain Ascusb_18705A encodes 16S rRNA
  source 1..225: mol_type = genomic DNA
agagtttgatcctggctcaggatgaacgctagctacaggcttaacacatgcaagtcgaggggaaacgacagagagtgcttgcactttttgggcgtcgaccggcgaatgggtgagtaacgcgtatccaacctgcctttgactgagggatagcccagtgaaaactgaattaatacctcatgttctcctcagacggcatcagacgaggagcaaagattaatcggtcaa

SEQ ID NO: 4500 - DNA, 225 bp, unidentified
  misc_feature 1..225: note = bacterial strain Ascusb_221A encodes 16S rRNA
  source 1..225: mol_type = genomic DNA
agagtttgatcctggctcaggacgaacgctggcggcgtgcctaatacatgcaagtcgaacgaaactttcttacaccgaatgcttgcattcatcgtaagaagttgagtggcggacgggtgagtaacacgtgggtaacctgcctaaaagaaggggataacacttggaaacaggtgctaataccgtatatctctaaggatcgcatgatccttagatgaaagatggttc

SEQ ID NO: 4501 - DNA, 225 bp, unidentified; identical to SEQ ID NO: 381
  misc_feature 1..225: note = bacterial strain Ascusb_1630A encodes 16S rRNA
  source 1..225: mol_type = genomic DNA

SEQ ID NO: 4502 - DNA, 225 bp, unidentified
  misc_feature 1..225: note = bacterial strain Ascusb_83A encodes 16S rRNA
  source 1..225: mol_type = genomic DNA
agagtttgatcctggctcaggacgaacgctggcggcgtgcctaacacatgcaagtcgagcggagatgatctgaagtttactttgggttgtcttagcggcggacgggtgagtaacgcgtgggcaacctgcctttcacagggggataacacagggaaacttgtgctaataccgcataacacagcgaggtagcattaccttgttgtcaaaggagcaatccggtgatag

SEQ ID NO: 4503 - DNA, 225 bp, unidentified; identical to SEQ ID NO: 4502
  misc_feature 1..225: note = bacterial strain Ascusb_2633A encodes 16S rRNA
  source 1..225: mol_type = genomic DNA

SEQ ID NO: 4504 - DNA, 225 bp, unidentified; identical to SEQ ID NO: 4502
  misc_feature 1..225: note = bacterial strain Ascusb_8244A encodes 16S rRNA
  source 1..225: mol_type = genomic DNA

SEQ ID NO: 4505 - DNA, 225 bp, unidentified; identical to SEQ ID NO: 4243
  misc_feature 1..225: note = bacterial strain Ascusb_624A encodes 16S rRNA
  source 1..225: mol_type = genomic DNA

SEQ ID NO: 4506 - DNA, 225 bp, unidentified
  misc_feature 1..225: note = bacterial strain Ascusb_5149A encodes 16S rRNA
  source 1..225: mol_type = genomic DNA
agagtttgatcatggctcaggatgaacgctagctacaggcttaacacatgcaagtcgaggggcagcgagaagaaagcttgctttctttgtcggcgaccggcgcacgggtgagtaacgcgtatccaaccttccccatagtagggaatagcccggcgaaagtcggattaatgccctatgttgtattatgaggacatctgattaataccaaagattcatcgctatggg

SEQ ID NO: 4507 - DNA, 225 bp, unidentified
  misc_feature 1..225: note = bacterial strain Ascusb_344B encodes 16S rRNA
  source 1..225: mol_type = genomic DNA
agagtttgatcatggctcaggatgaacgctagctacaggcttaacacatgcaagtcgaggggaaacgacatagagtgcttgcactttttgggcgtcgaccggcgaatgggtgagtaacgcgtatccaacctgcccttgactgagggatagcccagtgaaaactgaattaatacctcatgttctcctcagacggcatcagacgaggagtaaagattaatcggtcaa

SEQ ID NO: 4508 - DNA, 225 bp, unidentified
  misc_feature 1..225: note = bacterial strain Ascusb_2535A encodes 16S rRNA
  source 1..225: mol_type = genomic DNA
agagtttgatcctggctcaggatgaacgctagctacaggcttaacacatgcaagtcgaggggaaacgatgagagagcttgctctctcaggcgtcgaccggcgcacgggtgagtaacacgtatccaacctgcctttttccagggaataaccttgcgaaagtaagactaatgccctatgtgtcctttgacggcatcagacgaggacgaaagatttatcggaaaggga

SEQ ID NO: 4509 - DNA, 225 bp, unidentified
  misc_feature 1..225: note = bacterial strain Ascusb_877A encodes 16S rRNA
  source 1..225: mol_type = genomic DNA
agagtttgatcatggctcaggatgaacgctagctacaggcttaacacatgcaagtcgaggggaaacgatattgaaagcttgctttctttaggcgtcgaccggcgaatgggtgagtaacgcgtatccaacctgcccctgagtaagggatagcccatcgaaagatggattaataccttatggtttcctttgaaggcatctgattaggaataaagatttatcgctgag

SEQ ID NO: 4510 - DNA, 225 bp, unidentified; identical to SEQ ID NO: 4275
  misc_feature 1..225: note = bacterial strain Ascusb_325B encodes 16S rRNA
  source 1..225: mol_type = genomic DNA

SEQ ID NO: 4511 - DNA, 225 bp, unidentified
  misc_feature 1..225: note = bacterial strain Ascusb_3758B encodes 16S rRNA
  source 1..225: mol_type = genomic DNA
agagtttgatcatggctcaggacgaacgctggcggcgtgcttaacacatgcaagtcgagcgatgaagcttcttcgggagtggattagcggcggacgggtgagtaacacgtgggtaacctgcctcatagaggggaatagcctttcgaaaggaagattaataccgcatatggtagctttatcgcatggtaatgctattaaaggagtaatccgctatgagatggaccc

SEQ ID NO: 4512 - DNA, 225 bp, unidentified
  misc_feature 1..225: note = bacterial strain Ascusb_2378A encodes 16S rRNA
  source 1..225: mol_type = genomic DNA
agagtttgatcatggctcaggataaacgccggcggcgtgcctaatacatgcaagtcgaacgagtgcagcaatgcacgagtggcgtacgggtgagtaacacgttggtaacctgccccacagaccgggataccctagtgaaaactgggctaataccggatgacatcctctgagcgcaagctctaaggatcaaaggcggcttcggccgcgctgcgggatggacctgcg

SEQ ID NO: 4513 - DNA, 225 bp, unidentified; identical to SEQ ID NO: 4512
  misc_feature 1..225: note = bacterial strain Ascusb_150A encodes 16S rRNA
  source 1..225: mol_type = genomic DNA

SEQ ID NO: 4514 - DNA, 225 bp, unidentified
  misc_feature 1..225: note = bacterial strain Ascusb_1149A encodes 16S rRNA
  source 1..225: mol_type = genomic DNA
agagtttgatcctggctcaggacgaacgctggcggcgtgcttaacacatgcaagtcgaacgagaagagatgagaagcttgcttcttattgattcgagtggcaaacgggtgagtaacgcgtaagcaacctgcccttcagatggggacaacagctggaaacggctgctaataccgaatatgttctttttgtcgcatggcagagggaagaaagggaggctcttcggag

SEQ ID NO: 4515 - DNA, 225 bp, unidentified
  misc_feature 1..225: note = bacterial strain Ascusb_3011A encodes 16S rRNA
  source 1..225: mol_type = genomic DNA
agagtttgatcatggctcaggacgaacgctggcggcgtgcttaacacatgcaagtcgaacgaggtgattgaaagcttgcttttgagaaccgagtggcaaacgggtgagtaacgcgtagacaacctgccgcaaagatggggacaacagtccgaaaggactgctaataccgaatgttgtcaagcttccgcatgggagtttgattaaagatggcctctacttgtaagc

SEQ ID NO: 4516 - DNA, 225 bp, unidentified
  misc_feature 1..225: note = bacterial strain Ascusb_198A encodes 16S rRNA
  source 1..225: mol_type = genomic DNA
agagtttgatcatggctcaggatgaacgccggcggtgtgcctaatacatgcaagtcgaacgcgttggcccaactgattgattgtgcttgcacaggattgacgttggtttcccaacgagtggcggacgggtgagtaacacgtaggcaacctgccccgaagcgggggacaacatttggaaacaagtgctaataccgcataacaactttgaccgcctggtcaaagctt

SEQ ID NO: 4517 - DNA, 225 bp, unidentified
  misc_feature 1..225: note = bacterial strain Ascusb_2381A encodes 16S rRNA
  source 1..225: mol_type = genomic DNA
agagtttgatcctggctcaggacgaacgctggcggtatgcttaacacatgcaagtcgaacgagacgcttttgatagacccttcgggggaaatcgggagcagacagtggcgaacgggtgagtaacgcgtgggcaacctacctatcggagcgggatagcctcgagaaatcgggagtaaaaccgcataacacaatagcgtcgcatgacggaattgtcaaaactccggt

SEQ ID NO: 4518 - DNA, 225 bp, unidentified; identical to SEQ ID NO: 3308
  misc_feature 1..225: note = bacterial strain Ascusb_7938A encodes 16S rRNA
  source 1..225: mol_type = genomic DNA

SEQ ID NO: 4519 - DNA, 225 bp, unidentified
  misc_feature 1..225: note = bacterial strain Ascusb_1882A encodes 16S rRNA
  source 1..225: mol_type = genomic DNA
agagtttgatcatggctcaggacgaacgctggcggcgtgcctaatacatgcaagtcgagcggagttaatcgggagcttgctcctgattaacttagcggcggacgggtgagtaacacgtaggcaacctgcccgtaagaccgggataactaccggaaacggtagctaataccggatacgcaagtctatcgcatggtggacttgggaaaggcggagcaatctgtcact

SEQ ID NO: 4520 - DNA, 225 bp, unidentified
  misc_feature 1..225: note = bacterial strain Ascusb_2191B encodes 16S rRNA
  source 1..225: mol_type = genomic DNA
agagtttgatcctggctcagattgaacgctggcggcaggcctaacacatgcaagtcgagcggtagcacagagagcttgctctcgggtgacgagcggcggacgggtgagtaatgtctgggaaactgcctgatggagggggataactactggaaacggtagctaataccgcataacgtcgcaagaccaaagagggggaccttcgggcctcttgccatcagatgtgcc

SEQ ID NO: 4521 - DNA, 225 bp, unidentified
  misc_feature 1..225: note = bacterial strain Ascusb_620A encodes 16S rRNA
  source 1..225: mol_type = genomic DNA
agagtttgatcctggctcaggacgaacgctggcggcgtgcctaacacatgcaagtcgaacggggattttgtttcggcagaatcctagtggcgaacgggtgagtaacgcgtaggcaacctgccctccagacggggacaacattccgaaaggggtgctaataccggatacgaaggagccatcgcatggtggttctttgaaagatggcctctatttataagctatcgc

SEQ ID NO: 4522 - DNA, 225 bp, unidentified; identical to SEQ ID NO: 4208
  misc_feature 1..225: note = bacterial strain Ascusb_3160A encodes 16S rRNA
  source 1..225: mol_type = genomic DNA

SEQ ID NO: 4523 - DNA, 225 bp, unidentified; identical to SEQ ID NO: 4208
  misc_feature 1..225: note = bacterial strain Ascusb_1776A encodes 16S rRNA
  source 1..225: mol_type = genomic DNA

SEQ ID NO: 4524 - DNA, 225 bp, unidentified; identical to SEQ ID NO: 4208
  misc_feature 1..225: note = bacterial strain Ascusb_2924A encodes 16S rRNA
  source 1..225: mol_type = genomic DNA

SEQ ID NO: 4525 - DNA, 225 bp, unidentified; identical to SEQ ID NO: 4452
  misc_feature 1..225: note = bacterial strain Ascusb_804A encodes 16S rRNA
  source 1..225: mol_type = genomic DNA

SEQ ID NO: 4526 - DNA, 225 bp, unidentified; identical to SEQ ID NO: 4452
  misc_feature 1..225: note = bacterial strain Ascusb_2188A encodes 16S rRNA
  source 1..225: mol_type = genomic DNA

SEQ ID NO: 4527 - DNA, 225 bp, unidentified
  misc_feature 1..225: note = bacterial strain Ascusb_1244A encodes 16S rRNA
  source 1..225: mol_type = genomic DNA
agagtttgatcatggctcaggacgaacgctggcggcgtgcttaacacatgcaagtcgaacggagagcgatggaagcttgcttctatcaatcttagtggcgaacgggtgagtaacgcgtaggtaacctgcctactagcgggggataactattggaaacgatagctaataccgcataacagcatttaacacatgttagatgcttgaaaggagcaattgcttcactag

SEQ ID NO: 4528 - DNA, 225 bp, unidentified
  misc_feature 1..225: note = bacterial strain Ascusb_799A encodes 16S rRNA
  source 1..225: mol_type = genomic DNA
agagtttgatcctggctcaggatgaacgctagcgacaggcttaacacatgcaagtcgaggggcatcgggattgtagcaatacaattgccggcgaccggcgcacgggtgagtaacgcgtatgcaacctacctatcagaggagaataacccggcgaaagtcggactaatactccataaaacagggatcccgcctgggaatatttgttaaagattaatcgctgataga

SEQ ID NO: 4529 - DNA, 225 bp, unidentified; identical to SEQ ID NO: 4528
  misc_feature 1..225: note = bacterial strain Ascusb_678A encodes 16S rRNA
  source 1..225: mol_type = genomic DNA

SEQ ID NO: 4530 - DNA, 225 bp, unidentified; identical to SEQ ID NO: 4528
  misc_feature 1..225: note = bacterial strain Ascusb_560A encodes 16S rRNA
  source 1..225: mol_type = genomic DNA

SEQ ID NO: 4531 - DNA, 225 bp, unidentified
  misc_feature 1..225: note = bacterial strain Ascusb_3689A encodes 16S rRNA
  source 1..225: mol_type = genomic DNA
agagtttgatcatggctcaggattaacgctggcggcgtgcctaatacatgcaagtcgaatggtagcaataccatggcgaacgggtgagtaacacgtaggtaacctgtctttaagacgaggataaccgttggaaacgacggataatactcgataggtaattttagggcatcctaggattattaaagatttatcacttagagaggggcctgcggcgcattagctaga

SEQ ID NO: 4532 - DNA, 225 bp, unidentified; identical to SEQ ID NO: 4520
  misc_feature 1..225: note = bacterial strain Ascusb_994A encodes 16S rRNA
  source 1..225: mol_type = genomic DNA

SEQ ID NO: 4533 - DNA, 225 bp, unidentified
  misc_feature 1..225: note = bacterial strain Ascusb_5201A encodes 16S rRNA
  source 1..225: mol_type = genomic DNA
agagtttgatcctggctcaggacgaacgctggcggcgtgcctaacacatgcaagtcgagcgatgaagcccttcggggtgaattagcggcggacgggtgagtaacacgtgggtaacctgccttatagagggggatagccttccgaaaggaagattaataccgcatgaaatgtttttatcgcatggtagaaacatcaaaggagtaatccgctataagatggacccgc

SEQ ID NO: 4534 - DNA, 225 bp, unidentified; identical to SEQ ID NO: 4520
  misc_feature 1..225: note = bacterial strain Ascusb_3089B encodes 16S rRNA
  source 1..225: mol_type = genomic DNA

SEQ ID NO: 4535 - DNA, 225 bp, unidentified
  misc_feature 1..225: note = bacterial strain Ascusb_2177A encodes 16S rRNA
  source 1..225: mol_type = genomic DNA
agagtttgatcatggctcaggacgaacgctggcggcgtgcttaacacatgcaagtcgaacgaggtgattgaaagcttgcttttgagaaccgagtggcaaacgggtgagtaacgcgtagacaacctgccgcaaagatggggacaacagtccgaaaggactgctaataccgaatgttgtgcaacctccgcatggaggatgcattaaagatggcctctacttgtaagc

SEQ ID NO: 4536 - DNA, 225 bp, unidentified
  misc_feature 1..225: note = bacterial strain Ascusb_5891A encodes 16S rRNA
  source 1..225: mol_type = genomic DNA
agagtttgatcatggctcaggatgaacgctagctacaggcttaacacatgcaagtcgaggggcagcatggtctagcaatagactgatggcgaccggcgcacgggtgagtaacacgtatccaacctaccggttattccgggatagcctttcgaaagaaagattaataccggatagtatagcgagaaggcatcttcttgttattaaagaatttcgataaccgatggg

SEQ ID NO: 4537 - DNA, 225 bp, unidentified; identical to SEQ ID NO: 4536
  misc_feature 1..225: note = bacterial strain Ascusb_8962A encodes 16S rRNA
  source 1..225: mol_type = genomic DNA

SEQ ID NO: 4538 - DNA, 225 bp, unidentified; identical to SEQ ID NO: 4536
  misc_feature 1..225: note = bacterial strain Ascusb_3705A encodes 16S rRNA
  source 1..225: mol_type = genomic DNA

SEQ ID NO: 4539 - DNA, 225 bp, unidentified
  misc_feature 1..225: note = bacterial strain Ascusb_2594A encodes 16S rRNA
  source 1..225: mol_type = genomic DNA
agagtttgatcatggctcaggacgaacgctggcggcgtgcctaacacatgcaagtcgagcgaggagattcccttcggggatgaacctagcggcggacgggtgagtaacacgtgggcaacctgccttatagaggggaatagccttccgaaaggaagattaataccgcataacattacattttcgcatgaagaagtaattaaaggagtaatccgctataagatgggc

SEQ ID NO: 4540 - DNA, 225 bp, unidentified
  misc_feature 1..225: note = bacterial strain Ascusb_18804A encodes 16S rRNA
  source 1..225: mol_type = genomic DNA
agagtttgatcatggctcaggacgaacgctggcggcgtgcctaatacatgcaagtcgaacgcattttctttcaccgtagcttgctacaccgaaagaaaatgagtggcgaacgggtgagtaacacgtgggtaacctgcccatcagcgggggataacacttggaaacaggtgctaataccgcataattccatttaccgcatggtagatgggtgaaaggcgcttttgc

SEQ ID NO: 4541 - DNA, 225 bp, unidentified
  misc_feature 1..225: note = bacterial strain Ascusb_344A encodes 16S rRNA
  source 1..225: mol_type = genomic DNA
agagtttgatcctggctcaggacgaacgctggcggcgtgcttaacacatgcaagtcgagcgatgaagcttcttcgggagtggattagcggcggacgggtgagtaacacgtgggtaacctgcctcatagaggggaatagcctttcgaaaggaagattaataccgcatatggtagctttatcgcatggtaatgctattaaaggagtaatccgctatgagatggaccc

SEQ ID NO: 4542 - DNA, 225 bp, unidentified
  misc_feature 1..225: note = bacterial strain Ascusb_3349A encodes 16S rRNA
  source 1..225: mol_type = genomic DNA
agagtttgatcctggctcaggacgaacgctggcggcgtgcctaatacatgcaagtcgaacgcattttctttcaccgtagcttgctacaccgaaagaaaatgagtggcgaacgggtgagtaacacgtgggtaacctgcccatcagcgggggataacacttggaaacaggtgctaataccgcataattccatttaccgcatggtaaatggatgaaaggcgcttttgc

SEQ ID NO: 4543 - DNA, 225 bp, unidentified
  misc_feature 1..225: note = bacterial strain Ascusb_317A encodes 16S rRNA
  source 1..225: mol_type = genomic DNA
agagtttgatcctggctcaggatgaacgctagctacaggcttaacacatgcaagtcgaggggcagcatagggtttgcttgcaaaccctgatggcgaccggcgcacgggtgagtaacgcgtatccaacctgcccatggctagggaatagcccgttgaaaagcggattaatgccctatggcgtcctttgcagacatctaacgaggactaaaggtttaccggccatgg

SEQ ID NO: 4544 - DNA, 225 bp, unidentified
  misc_feature 1..225: note = bacterial strain Ascusb_2425A encodes 16S rRNA
  source 1..225: mol_type = genomic DNA
agagtttgatcatggctcagaacgaacgctggtggcgtgtcttatacatgcaagtcgagcggtccgcaaggatagcggcgaacgggtgagtaacgcgtaagcaatctgccccgcatattgggatagccgtgccaacgcgcggataataccgaataacgtggccccggacatccggggttgacgaaagattcatcgatgcgggatgagcttgcgtccgattagcta

SEQ ID NO: 4545 - DNA, 225 bp, unidentified; identical to SEQ ID NO: 4516
  misc_feature 1..225: note = bacterial strain Ascusb_1661A encodes 16S rRNA
  source 1..225: mol_type = genomic DNA

SEQ ID NO: 4546 - DNA, 225 bp, unidentified
  misc_feature 1..225: note = bacterial strain Ascusb_7297B encodes 16S rRNA
  source 1..225: mol_type = genomic DNA
agagtttgatcatggctcaggacgaacgctggcggcgtgcttaacacatgcaagtcgaacggagcacccttgacagagacttcggtcaatagataggaatgcttagtggcggactggtgagtaacgcgtgaggaacctgcctttcagagggggacaacagttagaaatgactgctaataccgcatgatgcatagaggtcgcatggcctttatgtcaaagatttat

SEQ ID NO: 4547 - DNA, 225 bp, unidentified
  misc_feature 1..225: note = bacterial strain Ascusb_991A encodes 16S rRNA
  source 1..225: mol_type = genomic DNA
agagtttgatcctggctcaggacgaacgctggcggcgtgcttaacacatgcaagtcgaacgaggtgattgaaagcttgcttttgagaaccgagtggcaaacgggtgagtaacgcgtagacaacctgccgcaaagatggggacaacagtccgaaaggactgctaataccgaatgttgtatcgtttccgcatggagatgatattaaagatggcctctacttgtaagc

SEQ ID NO: 4548 - DNA, 225 bp, unidentified
  misc_feature 1..225: note = bacterial strain Ascusb_275A encodes 16S rRNA
  source 1..225: mol_type = genomic DNA
agagtttgatcatggctcaggacgaacgctggcggcgtgcttaacacatgcaagtcgaacgaggtgattgaaagcttgcttttgagaaccgagtggcaaacgggtgagtaacgcgtagacaacctgccgcaaagatggggacaacagtccgaaaggactgctaataccgaatgttgtcagttttccgcatgggagactgattaaagatggcctctacttgtaagc

SEQ ID NO: 4549 - DNA, 225 bp, unidentified
  misc_feature 1..225: note = bacterial strain Ascusb_3264B encodes 16S rRNA
  source 1..225: mol_type = genomic DNA
agagtttgatcctggctcaggacgaacgctggcggcgtgcctaacacatgcaagtcgagcggagaaagttcttcggaactttcttagcggcggacgggtgagtaacacgtgggtaacctgccttatagagggggatagccttccgaaaggaagattaataccgcataacatttttgtttcgcatgaaataaaaatcaaaggagcaatccgctataagatggaccc

SEQ ID NO: 4550 - DNA, 225 bp, unidentified
  misc_feature 1..225: note = bacterial strain Ascusb_2272A encodes 16S rRNA
  source 1..225: mol_type = genomic DNA
agagtttgatcctggctcaggacgaacgctggcggcgtgcctaacacatgcaagtcgagcggagttaattgaaagcttgcttttgattaacttagcggcggacgggtgagtaacgcgtgggcaacctgcctgttacagggggataacacagggaaacttgtgctaataccgcataacacaacgagaaagcattttcttgttgtcaaaggagcaatccggtaacag

SEQ ID NO: 4551 - DNA, 225 bp, unidentified
  misc_feature 1..225: note = bacterial strain Ascusb_3013A encodes 16S rRNA
  source 1..225: mol_type = genomic DNA
agagtttgatcctggctcaggacgaacgctggcggcgtgcttaacacatgcaagtcgagcgaggaaattgcttcggtaatttcctagcggcggacgggtgagtaacacgtgggcaacctgcctgatagagggggatagcctcccgaaagggagattaataccgcataaagtcaaatgaaggcatcttcaaatgaccaaaggagtaatccgctatcagatgggccc

SEQ ID NO: 4552 - DNA, 225 bp, unidentified
  misc_feature 1..225: note = bacterial strain Ascusb_233A encodes 16S rRNA
  source 1..225: mol_type = genomic DNA
agagtttgatcatggctcaggatgaacgctagctacaggcttaacacatgcaagtcgaggggcagcgggggcttagcttgctaagcttgccggcgaccggcgcacgggtgagtaacgcgtatccaaccttcccgcaggtagggaacagcccggcgaaagtcggattaatgccctatgatttcctttgatggcatctgatgaggaataaagatttatcgccggcgg

SEQ ID NO: 4553 - DNA, 225 bp, unidentified; identical to SEQ ID NO: 4552
  misc_feature 1..225: note = bacterial strain Ascusb_5387A encodes 16S rRNA
  source 1..225: mol_type = genomic DNA

SEQ ID NO: 4554 - DNA, 225 bp, unidentified; identical to SEQ ID NO: 987
  misc_feature 1..225: note = bacterial strain Ascusb_211A encodes 16S rRNA
  source 1..225: mol_type = genomic DNA

SEQ ID NO: 4555 - DNA, 225 bp, unidentified
  misc_feature 1..225: note = bacterial strain Ascusb_4058B encodes 16S rRNA
  source 1..225: mol_type = genomic DNA
agagtttgatcctggctcaggacgaacgctggcggcgtgtctaatacatgcaagtcgagcgagctgaattcaaagatcccttcggggtgatttgttggacgctagcggcggatgggtgagtaacacgtgggcaatctgccctaaagactgggataccacttggaaacaggtgctaataccggataacaacatgaatcgcatgattcaagtttgaaaggcggcgca

SEQ ID NO: 4556 - DNA, 225 bp, unidentified
  misc_feature 1..225: note = bacterial strain Ascusb_724A encodes 16S rRNA
  source 1..225: mol_type = genomic DNA
agagtttgatcctggctcaggatgaacgctagctacaggcttaacacatgcaagtcgaggggaaacgacatagagtgcttgcactttatgggcgtcgaccggcgaatgggtgagtaacgcgtatccaacctgcccttgaccgagggatagcccagtgaaaactgaattaatacctcatgttctcctcagacggcatcagacgaggagcaaagattaatcggtcaa

SEQ ID NO: 4557 - DNA, 225 bp, unidentified; identical to SEQ ID NO: 4556
  misc_feature 1..225: note = bacterial strain Ascusb_2027A encodes 16S rRNA
  source 1..225: mol_type = genomic DNA

SEQ ID NO: 4558 - DNA, 225 bp, unidentified; identical to SEQ ID NO: 4556
  misc_feature 1..225: note = bacterial strain Ascusb_2886B encodes 16S rRNA
  source 1..225: mol_type = genomic DNA

SEQ ID NO: 4559 - DNA, 225 bp, unidentified
  misc_feature 1..225: note = bacterial strain Ascusb_2684A encodes 16S rRNA
  source 1..225: mol_type = genomic DNA
agagtttgatcatggctcaggatgaacgctggcggcgtgcttaacacatgcaagtcgaacgaactgtattaaaggaagttttcggatggaatttaatatagttagtggcggacgggtgagtaacgcgtgggaaacctgccctatacagggggatagcctcgggaaaccgggattaataccccatgaagctctaatatcgcatgatatatgggtcaaagatttatc

SEQ ID NO: 4560 - DNA, 225 bp, unidentified; identical to SEQ ID NO: 4559
  misc_feature 1..225: note = bacterial strain Ascusb_12328A encodes 16S rRNA
  source 1..225: mol_type = genomic DNA

SEQ ID NO: 4561 - DNA, 225 bp, unidentified; identical to SEQ ID NO: 4559
  misc_feature 1..225: note = bacterial strain Ascusb_10412A encodes 16S rRNA
  source 1..225: mol_type = genomic DNA

SEQ ID NO: 4562 - DNA, 225 bp, unidentified; identical to SEQ ID NO: 4559
  misc_feature 1..225: note = bacterial strain Ascusb_7360B encodes 16S rRNA
  source 1..225: mol_type = genomic DNA

SEQ ID NO: 4563 - DNA, 225 bp, unidentified
  misc_feature 1..225: note = bacterial strain Ascusb_168B encodes 16S rRNA
  source 1..225: mol_type = genomic DNA
agagtttgatcatggctcaggatgaacgctgacagaatgcttaacacatgcaagtctacttgaattcacttcggtgatagtaaggtggcggacgggtgagtaacacgtaaagaacttgccttgcagtctgggacaactattggaaacgatagctaataccggatattatgcgtgagtcgcatgactcatgtatgaaagctatatgcgctgcgagagagctttgcg

SEQ ID NO: 4564 - DNA, 225 bp, unidentified; identical to SEQ ID NO: 4208
  misc_feature 1..225: note = bacterial strain Ascusb_4736A encodes 16S rRNA
  source 1..225: mol_type = genomic DNA

SEQ ID NO: 4565 - DNA, 225 bp, unidentified
  misc_feature 1..225: note = bacterial strain Ascusb_1985B encodes 16S rRNA
  source 1..225: mol_type = genomic DNA
agagtttgatcatggctcaggatgaacgctagctacaggcttaacacatgcaagtcgaggggcatcattatcgaagcttgctttgatagatggcgaccggcgcacgggtgagtaacgcgtatccaaccttccccttagtagggcacagcccggcgaaagtcggattaattccctatgttgtttgatgctgacatcaaaatcaaaccaaagattcatcgctaaggg

SEQ ID NO: 4566 - DNA, 225 bp, unidentified; identical to SEQ ID NO: 4565
  misc_feature 1..225: note = bacterial strain Ascusb_14185A encodes 16S rRNA
  source 1..225: mol_type = genomic DNA

SEQ ID NO: 4567 - DNA, 225 bp, unidentified; identical to SEQ ID NO: 4565
  misc_feature 1..225: note = bacterial strain Ascusb_3092A encodes 16S rRNA
  source 1..225: mol_type = genomic DNA

SEQ ID NO: 4568 - DNA, 225 bp, unidentified; identical to SEQ ID NO: 4565
  misc_feature 1..225: note = bacterial strain Ascusb_4173A encodes 16S rRNA
  source 1..225: mol_type = genomic DNA

SEQ ID NO: 4569 - DNA, 225 bp, unidentified
  misc_feature 1..225: note = bacterial strain Ascusb_115A encodes 16S rRNA
  source 1..225: mol_type = genomic DNA
agagtttgatcctggctcagattgaacgctggcggcaggcctaacacatgcaagtcgagcggtagcacagagagcttgctctcgggtgacgagcggcggacgggtgagtaatgtctgggaaactgcctgatggagggggataactactggaaacggtagctaataccgcataatgtcgcaagaccaaagtgggggaccttcgggcctcatgccatcagatgtgcc

SEQ ID NO: 4570 - DNA, 225 bp, unidentified
  misc_feature 1..225: note = bacterial strain Ascusb_6373A encodes 16S rRNA
  source 1..225: mol_type = genomic DNA
agagtttgatcctggctcaggacgaacgctggcggcgtgcctaatacatgcaagtcgaacgaactctggtattgattggtgcttgcatcatgatttacatttgagtgagtggcgaactggtgagtaacacgtgggaaacctgcccagaagcgggggataacacctggaaacagatgctaataccgcataacaacttggaccgcatggtccgagtttgaaagatgg

SEQ ID NO: 4571 - DNA, 225 bp, unidentified; identical to SEQ ID NO: 4569
  misc_feature 1..225: note = bacterial strain Ascusb_17947B encodes 16S rRNA
  source 1..225: mol_type = genomic DNA

SEQ ID NO: 4572 - DNA, 225 bp, unidentified
  misc_feature 1..225: note = bacterial strain Ascusb_2831A encodes 16S rRNA
  source 1..225: mol_type = genomic DNA
agagtttgatcctggctcaggacgaacgctggcggcgtgcctaatacatgcaagtcgagcgatgtctttgggggcttgcccccgaagatgtagcggcggacgggtgagtaacacgtgggcaacctgcctgtaagactgggataacttcgggaaaccggagctaataccggataactcaagaaaccacatggtttcttgctaaaagatggctccggctatcactta

SEQ ID NO: 4573 - DNA, 225 bp, unidentified
  misc_feature 1..225: note = bacterial strain Ascusb_1139B encodes 16S rRNA
  source 1..225: mol_type = genomic DNA
agagtttgatcatggctcaggatgaacgctagctacaggcttaacacatgcaagtcgaggggcagcgtgtacaggtgcttgcaccagtatgacggcgaccggcgcacgggtgagtaacgcgtatccaacctgccatatactcgggtatagcccggtgaaaaccgaattaacccccgatagtgtcctttgcaggcatctaattaggactaaagttcacggtatatg

SEQ ID NO: 4574 - DNA, 225 bp, unidentified
  misc_feature 1..225: note = bacterial strain Ascusb_10375A encodes 16S rRNA
  source 1..225: mol_type = genomic DNA
agagtttgatcctggctcaggacgaacgctggcggcgtgcttaacacatgcaagtcgaacgagacgaattagaagcttgcttttgacgagtcgagtggcaaacgggtgagtaacgcgtagacaacctgccgcaaagatggggacaacagtccgaaaggactgctaataccgaatgttgtatctccaccgcatggaagagatattaaagatggcctctacttgtaa

SEQ ID NO: 4575 - DNA, 225 bp, unidentified; identical to SEQ ID NO: 4574
  misc_feature 1..225: note = bacterial strain Ascusb_15111A encodes 16S rRNA
  source 1..225: mol_type = genomic DNA

SEQ ID NO: 4576 - DNA, 225 bp, unidentified; identical to SEQ ID NO: 4574
  misc_feature 1..225: note = bacterial strain Ascusb_10976A encodes 16S rRNA
  source 1..225: mol_type = genomic DNA

SEQ ID NO: 4577 - DNA, 225 bp, unidentified
  misc_feature 1..225: note = bacterial strain Ascusb_8024B encodes 16S rRNA
  source 1..225: mol_type = genomic DNA
agagtttgatcatggctcaggatgaacgctagctacaggcttaacacatgcaagtcgaggggaaacgatgagagagcttgctctctcaggcgtcgaccggcgcacgggtgagtaacacgtatccaacctgcctttttccagggaataaccttgcgaaagtaagactaatgccctatgtgtccttcgacggcatcagacgaggacgaaagattcatcggaaaggga

SEQ ID NO: 4578 - DNA, 225 bp, unidentified
  misc_feature 1..225: note = bacterial strain Ascusb_120B encodes 16S rRNA
  source 1..225: mol_type = genomic DNA
agagtttgatcctggctcaggacgaacgctggcggcgtgcttaacacatgcaagtcgaacggaacacccttgacagaggtttcggccaatgaagaggaatgtttagtggcggactggtgagtaacgcgtgaggaacctgcctttcagagggggacaacagttggaaacgactgctaataccgcatgaagcaacgaggggacatccccttgctgtcaaagatttat

SEQ ID NO: 4579 - DNA, 225 bp, unidentified
  misc_feature 1..225: note = bacterial strain Ascusb_1187A encodes 16S rRNA
  source 1..225: mol_type = genomic DNA
agagtttgatcatggctcaggacgaacgctggcggcgtgcctaacacatgcaagtcgagcggagatgatttgaagtttactttgggttgtcttagcggcggacgggtgagtaacgcgtgggcaacctgcctttcacagggggataacacagggaaacttgtgctaataccgcataacacagcgaggtagcattaccttgttgtcaaaggagcaatccggtgatag

SEQ ID NO: 4580 - DNA, 225 bp, unidentified
  misc_feature 1..225: note = bacterial strain Ascusb_10663A encodes 16S rRNA
  source 1..225: mol_type = genomic DNA
agagtttgatcctggctcaggacgaacgctggcggcgtgcttaacacatgcaagtcgaacgagacgattttaagcttgcttagatgagtcgagtggcaaacgggtgagtaacgcgtagacaacctgccgcaaagatggggacaacagtccgaaaggactgctaataccgaatgttgtgcaacctccgcatggaggatgcattaaagatggcctctacttgtaagc

SEQ ID NO: 4581 - DNA, 225 bp, unidentified; identical to SEQ ID NO: 3703
  misc_feature 1..225: note = bacterial strain Ascusb_1989A encodes 16S rRNA
  source 1..225: mol_type = genomic DNA

SEQ ID NO: 4582 - DNA, 225 bp, unidentified; identical to SEQ ID NO: 3703
  misc_feature 1..225: note = bacterial strain Ascusb_132B encodes 16S rRNA
  source 1..225: mol_type = genomic DNA

SEQ ID NO: 4583 - DNA, 225 bp, unidentified; identical to SEQ ID NO: 3703
  misc_feature 1..225: note = bacterial strain Ascusb_3718B encodes 16S rRNA
  source 1..225: mol_type = genomic DNA

SEQ ID NO: 4584 - DNA, 225 bp, unidentified
  misc_feature 1..225: note = bacterial strain Ascusb_1203A encodes 16S rRNA
  source 1..225: mol_type = genomic DNA
agagtttgatcatggctcaggacgaacgctggcggcgtgcctaatacatgcaagtcgaacgaactctggtattgattggtgcttgcatcatgatttacatttgagtgagtggcgaactggtgagtaacacgtgggaaacctgcccagaagcgggggataacacctggaaacagatgctaataccgcataacaacttggaccgcatggtccaagtttgaaagatgg

SEQ ID NO: 4585 - DNA, 225 bp, unidentified
  misc_feature 1..225: note = bacterial strain Ascusb_112A encodes 16S rRNA
  source 1..225: mol_type = genomic DNA
agagtttgatcatggctcaggacgaacgctggcggcgtgcttaacacatgcaagtcgaacgaggtgattgaaagcttgcttttgagaaccgagtggcaaacgggtgagtaacgcgtagacaacctgccgcaaagatggggacaacagtccgaaaggactgctaataccgaatgttgtcaagtttccgcatgggagcttgattaaagatggcctctacttgtaagc

SEQ ID NO: 4586 - DNA, 225 bp, unidentified
  misc_feature 1..225: note = bacterial strain Ascusb_2434A encodes 16S rRNA
  source 1..225: mol_type = genomic DNA
agagtttgatcctggctcaggatgaacgctagctacaggcttaacacatgcaagtcgaggggaaacgacagagagtgcttgcactttttgggcgtcgaccggcgaatgggtgagtaacgcgtatccaacctgcccttgactgagggatagcccagtgaaaactgaattaatacctcatgttctcctcagacggcatcagacgaggagcaaagattaatcggtcaa

SEQ ID NO: 4587 - DNA, 225 bp, unidentified; identical to SEQ ID NO: 4586
  misc_feature 1..225: note = bacterial strain Ascusb_3663A encodes 16S rRNA
  source 1..225: mol_type = genomic DNA

SEQ ID NO: 4588 - DNA, 225 bp, unidentified; identical to SEQ ID NO: 4577
  misc_feature 1..225: note = bacterial strain Ascusb_3879B encodes 16S rRNA
  source 1..225: mol_type = genomic DNA

SEQ ID NO: 4589 - DNA, 225 bp, unidentified
  misc_feature 1..225: note = bacterial strain Ascusb_10845A encodes 16S rRNA
  source 1..225: mol_type = genomic DNA
agagtttgatcatggctcagattgaacgctggcggcaggcctaacacatgcaagtcgaacggtaacaggaagcagcttgctgcttcgctgacgagtggcggacgggtgagtaatgtctgggaaactgcctgatggagggggataactactggaaacggtagctaataccgcataacgtcgcaagaccaaagagggggaccttcgggcctcttgccatcagatgtg

SEQ ID NO: 4590 - DNA, 225 bp, unidentified; identical to SEQ ID NO: 4574
  misc_feature 1..225: note = bacterial strain Ascusb_15117A encodes 16S rRNA
  source 1..225: mol_type = genomic DNA

SEQ ID NO: 4591 - DNA, 225 bp, unidentified
  misc_feature 1..225: note = bacterial strain Ascusb_927A encodes 16S rRNA
  source 1..225: mol_type = genomic DNA
agagtttgatcctggctcaggatgaacgccggcggtgtgcctaatacatgcaagtcgaacgcgttggcccgattgattgatggtgcttgcacctgattgattttggtcgccaacgagtggcggacgggtgagtaacacgtaggtaacctgcccagaagcgggggacaacatttggaaacagatgctaataccgcataacaacgttgttcgcatgaacaacgctta

SEQ ID NO: 4592 - DNA, 225 bp, unidentified; identical to SEQ ID NO: 4135
  misc_feature 1..225: note = bacterial strain Ascusb_2143A encodes 16S rRNA
  source 1..225: mol_type = genomic DNA

SEQ ID NO: 4593 - DNA, 225 bp, unidentified
  misc_feature 1..225: note = bacterial strain Ascusb_9020A encodes 16S rRNA
  source 1..225: mol_type = genomic DNA
agagtttgatcctggctcaggatgaacgctagctacaggcttaacacatgcaagtcgaggggcagcgagaagagagcttgctttctttgtcggcgaccggcgcacgggtgagtaacgcgtatccaaccttccccatagtagaggatagcccggcgaaagtcggattaatactctatgttgtattttgaggacatctgacgaataccaaagattgatcgctatggg

SEQ ID NO: 4594 - DNA, 225 bp, unidentified
  misc_feature 1..225: note = bacterial strain Ascusb_3047A encodes 16S rRNA
  source 1..225: mol_type = genomic DNA
agagtttgatcctggctcaggatgaacgctggcggcgtgcctaacacatgcaagtcgagcgggctgacgctcaacactgagaattcagtattttgtctaaatagccaccgtcaaggacgaaagtatggagtccttcacgcgttatttaagtgacaacacatgttgcaaagtgaactgaattttgagtgttgagcggaagctagcggcggacgggtgagtaacgcg

SEQ ID NO: 4595 - DNA, 225 bp, unidentified; identical to SEQ ID NO: 4594
  misc_feature 1..225: note = bacterial strain Ascusb_1784A encodes 16S rRNA
  source 1..225: mol_type = genomic DNA

SEQ ID NO: 4596 - DNA, 225 bp, unidentified; identical to SEQ ID NO: 4041
  misc_feature 1..225: note = bacterial strain Ascusb_239B encodes 16S rRNA
  source 1..225: mol_type = genomic DNA

SEQ ID NO: 4597 - DNA, 225 bp, unidentified
  misc_feature 1..225: note = bacterial strain Ascusb_1726A encodes 16S rRNA
  source 1..225: mol_type = genomic DNA
agagtttgatcatggctcaggatgaacgctagctacaggcttaacacatgcaagtcgaggggcagcattttagtttgcttgcaaactaaagatggcgaccggcgcacgggtgagtaacacgtatccaacctgccgataactcggggatagcctttcgaaagaaagattaatatccgatggtatattaaaaccgcatggttttactattaaagaatttcggttatc

SEQ ID NO: 4598 - DNA, 225 bp, unidentified; identical to SEQ ID NO: 4597
  misc_feature 1..225: note = bacterial strain Ascusb_5956A encodes 16S rRNA
  source 1..225: mol_type = genomic DNA

SEQ ID NO: 4599 - DNA, 225 bp, unidentified
  misc_feature 1..225: note = bacterial strain Ascusb_3859A encodes 16S rRNA
  source 1..225: mol_type = genomic DNA
agagtttgatcctggctcaggatgaacgctagctacaggcttaacacatgcaagtcgaggggaaacgatgagagagcttgctctctcaggcgtcgaccggcgcacgggtgagtaacacgtatccaacctgcctttttccagggaataaccttgcgaaagtaagactaatgccctatgtgtcctttgacggcatcagacgaggacgaaagattcatcggaaaggga

SEQ ID NO: 4600 - DNA, 225 bp, unidentified
  misc_feature 1..225: note = bacterial strain Ascusb_12803A encodes 16S rRNA
  source 1..225: mol_type = genomic DNA
agagtttgatcatggctcaggacgaacgctggcggcgtgcttaacacatgcaagtcgaacgaggcagattttcaacactgaatgcttgaaggcgatgctttcgagcgtcgtgatggcgaagccatcaccacacttatataaagtgattcacataagtgatggttggtcgagcattgagtgttgaaaagatgccgagtggcaaacgggtgagtaacgcgtagacaa

SEQ ID NO: 4601 - DNA, 225 bp, unidentified; identical to SEQ ID NO: 4600
  misc_feature 1..225: note = bacterial strain Ascusb_11494A encodes 16S rRNA
  source 1..225: mol_type = genomic DNA

SEQ ID NO: 4602 - DNA, 225 bp, unidentified
  misc_feature 1..225: note = bacterial strain Ascusb_2590B encodes 16S rRNA
  source 1..225: mol_type = genomic DNA
agagtttgatcatggctcaggacgaacgctggcggcgtgcttaacacatgcaagtcgaacgagacgattgaaagcttgcttttgagagtcgagtggcaaacgggtgagtaacgcgtagacaacctgccgcaaagatggggacaacagtccgaaaggactgctaataccgaatgttgtgcaacctccgcatggaggatgcattaaagatggcctctacttgtaagc

SEQ ID NO: 4603 - DNA, 225 bp, unidentified
  misc_feature 1..225: note = bacterial strain Ascusb_2191A encodes 16S rRNA
  source 1..225: mol_type = genomic DNA
agagtttgatcatggctcaggatgaacgctagctacaggcttaacacatgcaagtcgaggggaaacgacagagagtgcttgcactttttgggcgtcgaccggcgaatgggtgagtaacgcgtatccaacctgcccttgactgagggatagcccagtgaaaactgaattaatacctcatgttctcctccgacggcatcagacgaggagcaaagattaatcggtcaa

SEQ ID NO: 4604 - DNA, 225 bp, unidentified; identical to SEQ ID NO: 4603
  misc_feature 1..225: note = bacterial strain Ascusb_3089A encodes 16S rRNA
  source 1..225: mol_type = genomic DNA

SEQ ID NO: 4605 - DNA, 225 bp, unidentified
  misc_feature 1..225: note = bacterial strain Ascusb_9216A encodes 16S rRNA
  source 1..225: mol_type = genomic DNA
agagtttgatcatggctcaggatgaacgctagctacaggcttaacacatgcaagtcgaggggcagcatggggtttgcttgcaaactctgatggcgaccggcgcacgggtgagtaacgcgtatccaacctgcccatggctagggaatagcccgttgaaaagcggattaatgccctatggcgtcctttgcagacatctaacgaggactaaaggtttaccggccatgg

SEQ ID NO: 4606 - DNA, 225 bp, unidentified
  misc_feature 1..225: note = bacterial strain Ascusb_3606A encodes 16S rRNA
  source 1..225: mol_type = genomic DNA
agagtttgatcatggctcaggacgaacgctggcggcgtgcttaacacatgcaagtcgaacgaggtgattgaaagcttgcttttgagaaccgagtggcaaacgggtgagtaacgcgtagacaacctgccgcaaagatggggacaacagtccgaaaggactgctaataccgaatgttgtcaagcttccgcatgggagcttgattaaagatggcctctacttgtaagc

SEQ ID NO: 4607 - DNA, 225 bp, unidentified
  misc_feature 1..225: note = bacterial strain Ascusb_1588A encodes 16S rRNA
  source 1..225: mol_type = genomic DNA
agagtttgatcatggctcaggacgaacgctggcggcgtgcctaacacatgcaagtcgagcgagaggaacccttcggggtgaatctagcggcggacgggtgagtaacacgtgggtaacctgcctcaaagagggggatagccctccgaaaggaggattaataccgcataaagttggtagttcgcatgaacaaccaaccaaaggagcaatccgctttgagatggaccc

SEQ ID NO: 4608 - DNA, 225 bp, unidentified
  misc_feature 1..225: note = bacterial strain Ascusb_239A encodes 16S rRNA
  source 1..225: mol_type = genomic DNA
agagtttgatcctggctcaggacgaacgctggcggcgtgcctaacacatgcaagtcgagcgaagttttcaaagcagatttcttcggaatgaaactttgattatcttagcggcggacgggtgagtaacgcgtgagaaacctgcctttcacaaagggatagcctcgggaaactgggattaataccttatgacacttaagagtcgcatgacttttaagtcaaagcgta

SEQ ID NO: 4609 - DNA, 225 bp, unidentified
  misc_feature 1..225: note = bacterial strain Ascusb_2485A encodes 16S rRNA
  source 1..225: mol_type = genomic DNA
agagtttgatcctggctcaggacgaacgctggcggcgtgcttaacacatgcaagtcgaacgagaagagatgagaagcttgcttcttattgattcgagtggcaaacgggtgagtaacgcgtaagcaacctgcccttcagatggggacaacagctggaaacggctgctaataccgaatacgttctttctgccgcatgacagagggaagaaagggaggctcttcggag

SEQ ID NO: 4610 - DNA, 225 bp, unidentified; identical to SEQ ID NO: 4609
  misc_feature 1..225: note = bacterial strain Ascusb_5231A encodes 16S rRNA
  source 1..225: mol_type = genomic DNA

SEQ ID NO: 4611 - DNA, 225 bp, unidentified
  misc_feature 1..225: note = bacterial strain Ascusb_51A encodes 16S rRNA
  source 1..225: mol_type = genomic DNA
agagtttgatcctggctcaggacgaacgctggcggcgtgcctaatacatgcaagtagaacgctgaagactttagcttgctaaagttggaagagttgcgaacgggtgagtaacgcgtaggtaacctgcctactagcgggggataactactggaaacggtagctaataccgcataacgtcgcaagaccaaagtgggggaccttcgggcctcatgccatcagatgtgc

SEQ ID NO: 4612 - DNA, 225 bp, unidentified
  misc_feature 1..225: note = bacterial strain Ascusb_5315A encodes 16S rRNA
  source 1..225: mol_type = genomic DNA
agagtttgatcatggctcaggacgaacgctggcggcgtgcttaacacatgcaagtcgaacgagaggaattgaaaagcttgctttttaatgaatcgagtggcaaacgggtgagtaacacgtaaacaacctgccttcaggatggggacaacagacggaaacgactgctaataccgaataccttccaagagccgcatgacacctggaagaaagggtggcctctacctg

SEQ ID NO: 4613 - DNA, 225 bp, unidentified
  misc_feature 1..225: note = bacterial strain Ascusb_295A encodes 16S rRNA
  source 1..225: mol_type = genomic DNA
agagtttgatcatggctcaggatgaacgctagctacaggcttaacacatgcaagtcgaggggtaacgacagcgaaagcttgcttttgctggtcgacgaccggcgaatgggtgagtaacgcgtatccaacctgccgcaaagtagggcacagccttgcgaaagtaagattaatgccctatgtgctgtgatgatgacatcagaattgcagtaaaggttcaccgctttg

SEQ ID NO: 4614 - DNA, 225 bp, unidentified
  misc_feature 1..225: note = bacterial strain Ascusb_1760A encodes 16S rRNA
  source 1..225: mol_type = genomic DNA
agagtttgatcatggctcaggacgaacgctggcggcgtgcttaacacatgcaagtcgaacgagacgattgaaagcttgcttttgaaagtcgagtggcaaacgggtgagtaacgcgtagacaacctgccgcaaagatggggacaacagtccgaaaggactgctaataccgaatgttgtatctttcctgcatgggagagatattaaagatggcctctacttgtaagc

SEQ ID NO: 4615 - DNA, 225 bp, unidentified
  misc_feature 1..225: note = bacterial strain Ascusb_2890A encodes 16S rRNA
  source 1..225: mol_type = genomic DNA
agagtttgatcatggctcaggacgaacgctggcggcgtgcttaacacatgcaagtcgaacgagacggatagaagcttgcttttagaagtcgagtggcaaacgggtgagtaacgcgtagacaacctgcctctgggatggggacaacagcccgaaagggctgctaataccgaatgaaatggtttcttctcctgaagagatcatgaaagatggcctctatttataagc

SEQ ID NO: 4616 - DNA, 225 bp, unidentified
  misc_feature 1..225: note = bacterial strain Ascusb_5168B encodes 16S rRNA
  source 1..225: mol_type = genomic DNA
agagtttgatcatggctcaggacgaacgctggcggcgtgcctactccctgcacgtcgaccgcttcctcctttctctttctccctttggaagagttgcgaacgggtgagtaacgcgtaggtaacctgcctactagcgggggataactattggaaacgatagctaataccgcataacagcatttaacacatgttagatgcttgaaaggagcaattgcttcactagta

SEQ ID NO: 4617 - DNA, 225 bp, unidentified; identical to SEQ ID NO: 4616
  misc_feature 1..225: note = bacterial strain Ascusb_6642B encodes 16S rRNA
  source 1..225: mol_type = genomic DNA

SEQ ID NO: 4618 - DNA, 225 bp, unidentified
  misc_feature 1..225: note = bacterial strain Ascusb_2987A encodes 16S rRNA
  source 1..225: mol_type = genomic DNA
agagtttgatcctggctcaggatgaacgctagctacaggcttaacacatgcaagtcgaggggaaacgacagagagtgcttgcactttttgggcgtcgaccggcgaatgggtgagtaacgcgtatccaacctgcccttgactgagggatagcccagtgaaaactgaattaatacctcatgtcctcctccgacggcatcagacgaggagcaaagattaatcggtcaa

SEQ ID NO: 4619 - DNA, 225 bp, unidentified
  misc_feature 1..225: note = bacterial strain Ascusb_4119A encodes 16S rRNA
  source 1..225: mol_type = genomic DNA
agagtttgatcatggctcaggacgaacgctggcggcgtgcctaatacatgcaagtcgaacgcttttctttccatcggagcttgctccaccggaaagaaaagagtggcgaacgggtgagtaacacgtgggtaacctgccctcaagcgggggataacacttggaaacaggtgctaataccgcataacaatagaaggagcatttcttctgtttgaaagtcgcaactgc

SEQ ID NO: 4620 - DNA, 225 bp, unidentified
  misc_feature 1..225: note = bacterial strain Ascusb_64A encodes 16S rRNA
  source 1..225: mol_type = genomic DNA
agagtttgatcctggctcaggatgaacgctagctacaggcttaacacatgcaagtcgaggggcagcatgaacttagcttgctaagtttgatggcgaccggcgcacgggtgagtaacgcgtatccaacctggcccttagtaggggatagcccggcgaaagtcggattaataccctatgttttccgaagcgagcattcaatttggaacaaagattcatcgctaaggg

SEQ ID NO: 4621 - DNA, 225 bp, unidentified
  misc_feature 1..225: note = bacterial strain Ascusb_4286A encodes 16S rRNA
  source 1..225: mol_type = genomic DNA
agagtttgatcctggctcaggacgaacgctggcggcgtgcttaacacatgcaagtcgaacgagacgattgaaagcttgcttttgagagtcgagtggcaaacgggtgagtaacgcgtagacaacctgccgcaaagatggggacaacagtccgaaaggactgctaataccgaatgttgtgcaacctccgcatggaggatgcattaaagatggcctctacttgtaagc

SEQ ID NO: 4622 - DNA, 225 bp, unidentified; identical to SEQ ID NO: 4621
  misc_feature 1..225: note = bacterial strain Ascusb_9898A encodes 16S rRNA
  source 1..225: mol_type = genomic DNA

SEQ ID NO: 4623 - DNA, 225 bp, unidentified; identical to SEQ ID NO: 4621
  misc_feature 1..225: note = bacterial strain Ascusb_430A encodes 16S rRNA
  source 1..225: mol_type = genomic DNA

SEQ ID NO: 4624 - DNA, 225 bp, unidentified
  misc_feature 1..225: note = bacterial strain Ascusb_254A encodes 16S rRNA
  source 1..225: mol_type = genomic DNA
agagtttgatcatggctcaggacgaacgctggcggcgtgcttaacacatgcaagtcgaacggagaacttatttcggtaagttcttagtggcgaacgggtgagtaacgcgtaggcaacctgccctccagttggggacaacattccgaaagggatgctaataccgaatacgatggatttcccgcatgagggatccatgaaaggcgctttcgggcgtcgctggaagat

SEQ ID NO: 4625 - DNA, 225 bp, unidentified; identical to SEQ ID NO: 1960
  misc_feature 1..225: note = bacterial strain Ascusb_9421A encodes 16S rRNA
  source 1..225: mol_type = genomic DNA

SEQ ID NO: 4626 - DNA, 225 bp, unidentified
  misc_feature 1..225: note = bacterial strain Ascusb_1618A encodes 16S rRNA
  source 1..225: mol_type = genomic DNA
agagtttgatcctggctcagattgaacgctggcggcaggcctaacacatgcaagtcgaacggtaacaggaagcagcttgctgcttcgctgacgagtggcggacgggtgagtaatgtctgggaaactgcccgatggagggggataactactggaaacggtagctaataccgcataacgtcgcaagaccaaagagggggaccttcgggcctcttgccatcggatgtg

SEQ ID NO: 4627 - DNA, 225 bp, unidentified
  misc_feature 1..225: note = bacterial strain Ascusb_20052A encodes 16S rRNA
  source 1..225: mol_type = genomic DNA
agagtttgatcatggctcaggatgaacgctggcggcgtgcctaacacatgcaagtcgaacgagatccattaattgaagcttcggcagattttaggaagatcgagtggcggacgggtgagtaacgcgtgggtaacctgccttacagagggggataacagagagaaatttctgctaataccgcataagcacacagtaccgcatggtacagggtgaaaagatttatca

SEQ ID NO: 4628 - DNA, 225 bp, unidentified
  misc_feature 1..225: note = bacterial strain Ascusb_386A encodes 16S rRNA
  source 1..225: mol_type = genomic DNA
agagtttgatcatggctcaggatgaacgctagcgacaggcttaacacatgcaagtcgaggggcatcatgatttgtagcaatacgaattgatggcgaccggcgcacgggtgagtaacgcgtatgcaacctacctatcagagagggataacccggcgaaagtcggactaatacctcataaaacaggggtcccgcatgggaatatttgttaaaggattaattgctgat

SEQ ID NO: 4629 - DNA, 225 bp, unidentified; identical to SEQ ID NO: 4628
  misc_feature 1..225: note = bacterial strain Ascusb_1419A encodes 16S rRNA
  source 1..225: mol_type = genomic DNA

SEQ ID NO: 4630 - DNA, 225 bp, unidentified
  misc_feature 1..225: note = bacterial strain Ascusb_13271A encodes 16S rRNA
  source 1..225: mol_type = genomic DNA
agagtttgatcctggctcaggacgaacgctggcggcgtgcctaacacatgcaagtcgagcgaagtttttaaagaagatttcttcggaatgaaactttaattatcttagcggcggacgggtgagtaacgcgtgagaaacctgccttttacaaagggatagcctcgggaaactgggattaataccttatgacacttaaatgtcgcatgagatttaagtcaaagcgta

SEQ ID NO: 4631 - DNA, 225 bp, unidentified
  misc_feature 1..225: note = bacterial strain Ascusb_12149A encodes 16S rRNA
  source 1..225: mol_type = genomic DNA
agagtttgatcctggctcaggacgaacgctggcggcgtgcttaacacatgcaagtcgaacgagacgattttaagcttgcttagatgagtcgagtggcaaacgggtgagtaacgcgtagacaacctgccgcaaagatggggacaacagtccgaaaggactgctaataccgaatgttgtcagtttctcgcatgagagactgattaaagatggcctctacttgtaagc

SEQ ID NO: 4632 - DNA, 225 bp, unidentified
  misc_feature 1..225: note = bacterial strain Ascusb_2606A encodes 16S rRNA
  source 1..225: mol_type = genomic DNA
agagtttgatcctggctcaggacgaacgctggcggcgtgcctaatacatgcaagtcgagcggactttaaaagcttgcttttaaagttagcggcggacgggtgagtaacacgtgggcaacctgcctgtaagactgggataacttcgggaaaccggagctaataccggataatccttttcctctcatgaggaaaagctgaaagacggtttacgctgtcacttacaga

SEQ ID NO: 4633 - DNA, 225 bp, unidentified
  misc_feature 1..225: note = bacterial strain Ascusb_4791A encodes 16S rRNA
  source 1..225: mol_type = genomic DNA
agagtttgatcatggctcaggacgaacgctggcggcgtgcttaacacatgcaagtcgaacgagaagagatgagaagcttgcttcttattgattcgagtggcaaacgggtgagtaacgcgtaggcaacctgccctccagttggggacaacattccgaaagggatgctaataccgaatacgatgggtttcccgcatgaggaacccatgaaaggcgctttcgggcgtc

SEQ ID NO: 4634 - DNA, 225 bp, unidentified
  misc_feature 1..225: note = bacterial strain Ascusb_688A encodes 16S rRNA
  source 1..225: mol_type = genomic DNA
agagtttgatcatggctcagattgaacgctggcggcaggcctaacacatgcaagtcgaacggtaacaggaagcagcttgctgcttcgctgacgagtggcggacgggtgagtaatgtctgggaaactgcctgatggagggggataactactggaaacggtagctaataccgcataatgtcgcaagaccaaagtgggggaccttcgggcctcatgccatcagatgtg

SEQ ID NO: 4635 - DNA, 225 bp, unidentified
  misc_feature 1..225: note = bacterial strain Ascusb_19080A encodes 16S rRNA
  source 1..225: mol_type = genomic DNA
agagtttgatcatggctcaggacgaacgctggcggcgtgcctaatacatgcaagtagaacgctgaagactttagcttgctaaagttggaagagttgcgaacgggtgagtaacgcgtaggtaacctgcctactagcgggggataactattggaaacgatagctaataccgcataacagtttttaacacatgttagaaatttgaaaggagcaattgcttcactagga

SEQ ID NO: 4636 - DNA, 225 bp, unidentified; identical to SEQ ID NO: 4498
  misc_feature 1..225: note = bacterial strain Ascusb_126A encodes 16S rRNA
  source 1..225: mol_type = genomic DNA

SEQ ID NO: 4637 - DNA, 225 bp, unidentified
  misc_feature 1..225: note = bacterial strain Ascusb_2792A encodes 16S rRNA
  source 1..225: mol_type = genomic DNA
agagtttgatcctggctcaggacgaacgctggcggcgtgcttaacacatgcaagtcgaacgagacggattgaaagcttgcttttgaaatgtcgagtggcaaacgggtgagtaacgcgtagacaacctgccgcaaagatggggacaacagtccgaaaggactgctaataccgaatgttgtcagttttccgcatgggagactgattaaagatggcctctacttgtaa

SEQ ID NO: 4638 - DNA, 225 bp, unidentified
  misc_feature 1..225: note = bacterial strain Ascusb_4492A encodes 16S rRNA
  source 1..225: mol_type = genomic DNA
agagtttgatcctggctcaggacgaacgctggcggcgcgcttaacacatgcaagtcgagcgatgaagttttaacagattccttcgggatgaagataaaatggattagcggcggacgggtgagtaacacgtgagtaacctgcctttgacatcgggatagcctcgggaaaccgggattaataccgaatgaaattcttaatacgcatgtataaagaatcaaaactacg

SEQ ID NO: 4639 - DNA, 225 bp, unidentified; identical to SEQ ID NO: 4092
  misc_feature 1..225: note = bacterial strain Ascusb_1961A encodes 16S rRNA
  source 1..225: mol_type = genomic DNA

SEQ ID NO: 4640 - DNA, 225 bp, unidentified
  misc_feature 1..225: note = bacterial strain Ascusb_453A encodes 16S rRNA
  source 1..225: mol_type = genomic DNA
agagtttgatcatggctcaggatgaacgctagctacaggcttaacacatgcaagtcgaggggaaacgacagagagtgcttgcactttttgggcgtcgaccggcgaatgggtgagtaacgcgtatccaacctgcccttgactgagggatagcccagtgaaaactgaattaatacctcatatcctcctcagacggcatcagacgaggagtaaagatttatcggtcaa

SEQ ID NO: 4641 - DNA, 225 bp, unidentified
  misc_feature 1..225: note = bacterial strain Ascusb_1794A encodes 16S rRNA
  source 1..225: mol_type = genomic DNA
agagtttgatcctggctcaggacgaacgctggcggcgtgcttaacacatgcaagtcgaacgaggtgattgaaagcttgcttttgagaaccgagtggcaaacgggtgagtaacgcgtagacaacctgccgcaaagatggggacaacagtccgaaaggactgctaataccgaatgttgtgcaatctccgcatggaggatgcattaaagatggcctctacttgtaagc

SEQ ID NO: 4642 - DNA, 225 bp, unidentified
  misc_feature 1..225: note = bacterial strain Ascusb_489A encodes 16S rRNA
  source 1..225: mol_type = genomic DNA
agagtttgatcctggctcagattgaacgctggcggcaggcttaacacatgcaagtcgtacggtaacagagggaagcttgcttctctgctgacgagtggcggacgggtgagtaatgtctgggaagctgcctgcttgagggggatagcggagcgaaagttccgataataccgcgtaagcccgagaggggaaagtgcgggaccgcaaggccgcacgcgagcagatgcg

SEQ ID NO: 4643 - DNA, 225 bp, unidentified
  misc_feature 1..225: note = bacterial strain Ascusb_2590A encodes 16S rRNA
  source 1..225: mol_type = genomic DNA
agagtttgatcatggctcaggatgaacgctagctacaggcttaacacatgcaagtcgaggggaaacgacatagagtgcttgcactttatgggcgtcgaccggcgaatgggtgagtaacgcgtatccaacctgcccttgactgagggatagcccagtgaaaactgaattaatacctcatgtactcctcagacggcatcagacgaggagcaaagattaatcggtcaa

SEQ ID NO: 4644 - DNA, 225 bp, unidentified
  misc_feature 1..225: note = bacterial strain Ascusb_1340A encodes 16S rRNA
  source 1..225: mol_type = genomic DNA
agagtttgatcatggctcagattgaacgctggcggcaggcctaacacatgcaagtcgagcggcagcggaaagtagcttgctactttgccggcgagcggcggacgggtgagtaatgtctgggaaactgcctgatggagggggataactactggaaacggtagctaataccgcataatgtcgcaagaccaaagtgggggaccttcgggcctcatgccatcagatgtg

SEQ ID NO: 4645 - DNA, 225 bp, unidentified; identical to SEQ ID NO: 4259
  misc_feature 1..225: note = bacterial strain Ascusb_4420A encodes 16S rRNA
  source 1..225: mol_type = genomic DNA

SEQ ID NO: 4646 - DNA, 225 bp, unidentified; identical to SEQ ID NO: 4213
  misc_feature 1..225: note = bacterial strain Ascusb_3590A encodes 16S rRNA
  source 1..225: mol_type = genomic DNA

SEQ ID NO: 4647 - DNA, 225 bp, unidentified
  misc_feature 1..225: note = bacterial strain Ascusb_4971A encodes 16S rRNA
  source 1..225: mol_type = genomic DNA
agagtttgatcatggctcaggacgaacgctggcggcgtgcttaacacatgcaagtcgaacgaggtgattgaaagcttgcttttgagaaccgagtggcaaacgggtgagtaacgcgtagacaacctgccgcaaagatggggacaacagtccgaaaggactgctaataccgaatgttgtatcgtttccgcatggagatgatattaaagatggcctctacttgtaagc

SEQ ID NO: 4648 - DNA, 225 bp, unidentified
  misc_feature 1..225: note = bacterial strain Ascusb_325A encodes 16S rRNA
  source 1..225: mol_type = genomic DNA
agagtttgatcctggctcagattgaacgctggcggcaggcctaacacatgcaagtcgagcggtaacacagggagcttgctcccgggtgacgagcggcggacgggtgagtaatgtctgggaaactgcctgatggagggggataactactggaaacggtagctaataccgcataacgtcgcaagaccaaagagggggaccttcgggcctcttgccatcagatgtgcc

SEQ ID NO: 4649 - DNA, 225 bp, unidentified
  misc_feature 1..225: note = bacterial strain Ascusb_3264A encodes 16S rRNA
  source 1..225: mol_type = genomic DNA
agagtttgatcctggctcagattgaacgctggcggcaggcctaacacatgcaagtcgagcggcagcggaaagtagcttgctactttgccggcgagcggcggacgggtgagtaatgtctgggaaactgcctgatggagggggataactactggaaacggtagctaataccgcataatgtcgcaagaccaaagagggggaccttcgggcctcttgccatcagatgtg

SEQ ID NO: 4650 - DNA, 225 bp, unidentified
  misc_feature 1..225: note = bacterial strain Ascusb_6655A encodes 16S rRNA
  source 1..225: mol_type = genomic DNA
agagtttgatcatggctcaggatgaacgctagctacaggcttaacacatgcaagtcgaggggcagcagggagatagcttgctatctttgctggcgaccggcgcacgggtgagtaacgcgtatccaaccttccccttactagaggatagcccggcgaaagtcggattaatactctatgttctcctttgcaggcatctaacgaggagcaaagattcatcggtaaggg

SEQ ID NO: 4651 - DNA, 225 bp, unidentified
  misc_feature 1..225: note = bacterial strain Ascusb_725A encodes 16S rRNA
  source 1..225: mol_type = genomic DNA
agagtttgatcatggctcaggacgaacgctggcggcgtgcctaatacatgcaagtcgaacgcattttctttcaccgtagcttgctacaccgaaagaaaatgagtggcgaacgggtgagtaacacgtgggtaacctgcccatcagcgggggataacacttggaaacaggtgctaataccgcataattccatttaccgcatggtaaatggatgaaaggcgcttttgc

SEQ ID NO: 4652 - DNA, 225 bp, unidentified
  misc_feature 1..225: note = bacterial strain Ascusb_1715A encodes 16S rRNA
  source 1..225: mol_type = genomic DNA
agagtttgatcctggctcagattgaacgctggcggcaggcctaacacatgcaagtcgagcggtaacacagggagcttgctcctgggtgacgagcggcggacgggtgagtaatgtctgggaaactgcctgatggagggggataactactggaaacggtagctaataccgcataacgtcgcaagaccaaagagggggaccttcgggcctcttgccatcagatgtgcc

SEQ ID NO: 4653 - DNA, 225 bp, unidentified
  misc_feature 1..225: note = bacterial strain Ascusb_1889A encodes 16S rRNA
  source 1..225: mol_type = genomic DNA
agagtttgatcatggctcaggacgaacgctggcggcgtgcctaatacatgcaagtcgaacgcttctttttcatcgaacttcggttcatcgaaaaagaggagtggcgaacgggtgagtaacacgtgggtaacctgcccatcagaaggggataacacttggaaacaggtgctaataccgtataatactttttctcgcatgagaggaagttgaaaggcgcttttgcgt

SEQ ID NO: 4654 - DNA, 225 bp, unidentified
  misc_feature 1..225: note = bacterial strain Ascusb_5156A encodes 16S rRNA
  source 1..225: mol_type = genomic DNA
agagtttgatcatggctcaggatgaacgctggcggcgtgcctaacacatgcaagtcgaacggaacttctttgacagaattcttcggaaggaagttgattaagtttagtggcggacgggtgagtaacgcgtgagtaacctgcctttgagaggggaataacttcccgaaagggatgctaataccgcataaagcatagaagtcgcatggcttttatgccaaagattta

SEQ ID NO: 4655 - DNA, 225 bp, unidentified
  misc_feature 1..225: note = bacterial strain Ascusb_383A encodes 16S rRNA
  source 1..225: mol_type = genomic DNA
agagtttgatcatggctcaggattaacgctggcggcatgcctaatacatgcaagtcgaatgggtagcttgctatccatggcgaacgggtgagtaacacgtaggtaacctgtctttaagacgaggataacctttggaaacgaaggataatactggataggtcgttatagatcacatgattaaacgattaaagattataatgtcacttagagaggggcctgcggcgc

SEQ ID NO: 4656 - DNA, 225 bp, unidentified; identical to SEQ ID NO: 2063
  misc_feature 1..225: note = bacterial strain Ascusb_5168A encodes 16S rRNA
  source 1..225: mol_type = genomic DNA

SEQ ID NO: 4657 - DNA, 225 bp, unidentified; identical to SEQ ID NO: 2063
  misc_feature 1..225: note = bacterial strain Ascusb_6642A encodes 16S rRNA
  source 1..225: mol_type = genomic DNA

SEQ ID NO: 4658 - DNA, 225 bp, unidentified; identical to SEQ ID NO: 2063
  misc_feature 1..225: note = bacterial strain Ascusb_4355A encodes 16S rRNA
  source 1..225: mol_type = genomic DNA

SEQ ID NO: 4659 - DNA, 225 bp, unidentified; identical to SEQ ID NO: 4064
  misc_feature 1..225: note = bacterial strain Ascusb_1305A encodes 16S rRNA
  source 1..225: mol_type = genomic DNA

SEQ ID NO: 4660 - DNA, 225 bp, unidentified; identical to SEQ ID NO: 4064
  misc_feature 1..225: note = bacterial strain Ascusb_589A encodes 16S rRNA
  source 1..225: mol_type = genomic DNA

SEQ ID NO: 4661 - DNA, 225 bp, unidentified; identical to SEQ ID NO: 4064
  misc_feature 1..225: note = bacterial strain Ascusb_19362A encodes 16S rRNA
  source 1..225: mol_type = genomic DNA

SEQ ID NO: 4662 - DNA, 225 bp, unidentified
  misc_feature 1..225: note = bacterial strain Ascusb_813A encodes 16S rRNA
  source 1..225: mol_type = genomic DNA
agagtttgatcctggctcaggacgaacgctggcggcgtgcctaacacatgcaagtcgagcgatgaaattccttcggggatggattagcggcggacgggtgagtaacacgtgggcaacctgcctcaaagtgggggatagccctccgaaaggaggattaataccgcataacattagttttccgcatgaaaaactaatcaaaggagtaatccgctttgagatgggccc

SEQ ID NO: 4663 - DNA, 225 bp, unidentified
  misc_feature 1..225: note = bacterial strain Ascusb_1259A encodes 16S rRNA
  source 1..225: mol_type = genomic DNA
agagtttgatcctggctcagattgaacgctggcggcaggcttaacacatgcaagtcgaacggtaacgggaagaaagcttgctttctttgctgacgagtggcggacgggtgagtaaggcttgggaatctggcctatggagggggataactacgggaaactgtagctaataccgcgtaatctcttaggagaaaagtgtgggatcttcggaccacatgccataggatg

SEQ ID NO: 4664 - DNA, 225 bp, unidentified
  misc_feature 1..225: note = bacterial strain Ascusb_6094A encodes 16S rRNA
  source 1..225: mol_type = genomic DNA
agagtttgatcatggctcagattgaacgctggcggcaggcctaacacatgcaagtcgaacggtaacaggaagcagcttgctgcttcgctgacgagtggcggacgggtgagtaatgtctgggaaactgcctgatggagggggataactactggaaacggtagctaataccgcataacgtcgaaagaccaaagagggggaccttcgggcctcttgccatcggatgtg

SEQ ID NO: 4665 - DNA, 225 bp, unidentified; identical to SEQ ID NO: 4062
  misc_feature 1..225: note = bacterial strain Ascusb_1139A encodes 16S rRNA
  source 1..225: mol_type = genomic DNA

SEQ ID NO: 4666 - DNA, 225 bp, unidentified
  misc_feature 1..225: note = bacterial strain Ascusb_1985A encodes 16S rRNA
  source 1..225: mol_type = genomic DNA
agagtttgatcctggctcaggatgaacgctagctacaggcttaacacatgcaagtcgaggggcagcatttttctagcaatagaagagatggcgaccggcgcacgggtgagtaacacgtatccaacctgccgataactccggaatagcctttcgaaagaaagattaataccggatagtatacgaatatcgcatgatatttttattaaagaatttcggttatcgatg

SEQ ID NO: 4667 - DNA, 225 bp, unidentified
  misc_feature 1..225: note = bacterial strain Ascusb_6413A encodes 16S rRNA
  source 1..225: mol_type = genomic DNA
agagtttgatcctggctcagattgaacgctggcggcaggcctaacacatgcaagtcgaacggtagcacagaggagcttgctccttgggtgacgagtggcggacgggtgagtaatgtctgggaaactgcccgatggagggggataactactggaaacggtagctaataccgcataacgtcgcaagaccaaagagggggaccttcgggcctcttgccatcggatgtg

SEQ ID NO: 4668 - DNA, 225 bp, unidentified
  misc_feature 1..225: note = bacterial strain Ascusb_7297A encodes 16S rRNA
  source 1..225: mol_type = genomic DNA
agagtttgatcctggctcagaacgaacgctggtggcgtgtcttatacatgcaagtcgagcggtccgcaaggatagcggcgaacgggtgagtaacgcgtaagcaatctgccccgcatattgggatagccgtgccaacgcgcggataataccgaataacgtggccccggacatccggggttgacgaaagattcatcgatgcgggatgagcttgcgtccgattagcta

SEQ ID NO: 4669 - DNA, 225 bp, unidentified; identical to SEQ ID NO: 4205
  misc_feature 1..225: note = bacterial strain Ascusb_3718A encodes 16S rRNA
  source 1..225: mol_type = genomic DNA

SEQ ID NO: 4670 - DNA, 225 bp, unidentified; identical to SEQ ID NO: 4205
  misc_feature 1..225: note = bacterial strain Ascusb_132A encodes 16S rRNA
  source 1..225: mol_type = genomic DNA

SEQ ID NO: 4671 - DNA, 225 bp, unidentified
  misc_feature 1..225: note = bacterial strain Ascusb_534A encodes 16S rRNA
  source 1..225: mol_type = genomic DNA
agagtttgatcatggctcaggacgaacgctggcggcgtgcctaatacatgcaagtagaacgctgaagactttagcttgctaaagttggaagagttgcgaacgggtgagtaacgcgtaggtaacctgcctactagcgggggataactattggaaacgatagctaataccgcataacagcatttaacacatgttagatgcttgaaaggagcaattgcttcactagta

SEQ ID NO: 4672 - DNA, 225 bp, unidentified; identical to SEQ ID NO: 4662
  misc_feature 1..225: note = bacterial strain Ascusb_1179A encodes 16S rRNA
  source 1..225: mol_type = genomic DNA

SEQ ID NO: 4673 - DNA, 225 bp, unidentified; identical to SEQ ID NO: 4662
  misc_feature 1..225: note = bacterial strain Ascusb_16442A encodes 16S rRNA
  source 1..225: mol_type = genomic DNA

SEQ ID NO: 4674 - DNA, 225 bp, unidentified
  misc_feature 1..225: note = bacterial strain Ascusb_9920A encodes 16S rRNA
  source 1..225: mol_type = genomic DNA
agagtttgatcatggctcagattgaacgctggcggcaggcctaacacatgcaagtcgagcggtaacacagggagcttgctcctgggtgacgagcggcggacgggtgagtaatgtctgggaaactgcctgatggagggggataactactggaaacggtagctaataccgcataatgtcgcaagaccaaagtgggggaccttcgggcctcatgccatcagatgtgcc

SEQ ID NO: 4675 - DNA, 225 bp, unidentified
  misc_feature 1..225: note = bacterial strain Ascusb_831A encodes 16S rRNA
  source 1..225: mol_type = genomic DNA
agagtttgatcctggctcaggatgaacgctagcgataggcctaacacatgcaagtcgaggggcatcacatgaagtagcaatacggatggtggcgaccggcgcacgggtgagtaacacgtatgcaacctgccttcaacaaggggataacccgttgaaagacggactaataccctataacacaggggtcccgcatgggaatatttgttaaaggacaaccggttgaag

SEQ ID NO: 4676 - DNA, 225 bp, unidentified; identical to SEQ ID NO: 4674
  misc_feature 1..225: note = bacterial strain Ascusb_10378A encodes 16S rRNA
  source 1..225: mol_type = genomic DNA

SEQ ID NO: 4677 - DNA, 225 bp, unidentified
  misc_feature 1..225: note = bacterial strain Ascusb_18453A encodes 16S rRNA
  source 1..225: mol_type = genomic DNA
agagtttgatcatggctcaggacgaacgctggcggcgtgcttaacacatgcaagtcgagcgatgaagcttccttcgggaagtggattagcggcggacgggtgagtaacacgtgggtaacctgcctcaaagtgggggatagccttccgaaaggaagattaataccgcataatatgagagaatcgcatgatttttttatcaaagatttattgctttgagatggaccc

SEQ ID NO: 4678 - DNA, 225 bp, unidentified
  misc_feature 1..225: note = bacterial strain Ascusb_7360A encodes 16S rRNA
  source 1..225: mol_type = genomic DNA
agagtttgatcctggctcagattgaacgctggcggcaggcctaacacatgcaagtcgaacggtaacaggaagcagcttgctgcttcgctgacgagtggcggacgggtgagtaatgtctgggaaactgcccgatggagggggataactactggaaacggtagctaataccgcataatgtcgcaagaccaaagagggggaccttcgggcctcttgccatcggatgtg

SEQ ID NO: 4679 - DNA, 225 bp, unidentified; identical to SEQ ID NO: 4678
  misc_feature 1..225: note = bacterial strain Ascusb_15382A encodes 16S rRNA
  source 1..225: mol_type = genomic DNA

SEQ ID NO: 4680 - DNA, 225 bp, unidentified; identical to SEQ ID NO: 4260
  misc_feature 1..225: note = bacterial strain Ascusb_2895A encodes 16S rRNA
  source 1..225: mol_type = genomic DNA

SEQ ID NO: 4681 - DNA, 225 bp, unidentified
  misc_feature 1..225: note = bacterial strain Ascusb_1147A encodes 16S rRNA
  source 1..225: mol_type = genomic DNA
agagtttgatcatggctcaggatgaacgctggcggcgcgcctaatacatgcaagtcgaacgggaggtagcaatacctctagtggcgaacgggtgagtaacacgttgggaatctaccccctagaccgggatacccagtcgaaagattggctaataccggatatgatgcatttacacaagtagatgtattgaaagggagctttcaagcttcgcttagggatgaacct

SEQ ID NO: 4682 - DNA, 225 bp, unidentified; identical to SEQ ID NO: 4681
  misc_feature 1..225: note = bacterial strain Ascusb_2965A encodes 16S rRNA
  source 1..225: mol_type = genomic DNA

SEQ ID NO: 4683 - DNA, 225 bp, unidentified
  misc_feature 1..225: note = bacterial strain Ascusb_4492B encodes 16S rRNA
  source 1..225: mol_type = genomic DNA
agagtttgatcatggctcaggacgaacgctggcggcgtgcctaacacatgcaagtcgagcgaagtttttaaagaagatttcttcggaatgaaactttaattatcttagcggcggacgggtgagtaacgcgtgagaaacctgccttttacaaagggatagcctcgggaaactgggattaataccttatgacacttaaatgtcgcatgagatttaagtcaaagcgta

SEQ ID NO: 4684 - DNA, 225 bp, unidentified; identical to SEQ ID NO: 4683
  misc_feature 1..225: note = bacterial strain Ascusb_2612A encodes 16S rRNA
  source 1..225: mol_type = genomic DNA

SEQ ID NO: 4685 - DNA, 225 bp, unidentified; identical to SEQ ID NO: 4683
  misc_feature 1..225: note = bacterial strain Ascusb_363A encodes 16S rRNA
  source 1..225: mol_type = genomic DNA

SEQ ID NO: 4686 - DNA, 225 bp, unidentified; identical to SEQ ID NO: 4605
  misc_feature 1..225: note = bacterial strain Ascusb_168A encodes 16S rRNA
  source 1..225: mol_type = genomic DNA

SEQ ID NO: 4687 - DNA, 225 bp, unidentified
  misc_feature 1..225: note = bacterial strain Ascusb_3123A encodes 16S rRNA
  source 1..225: mol_type = genomic DNA
agagtttgatcatggctcaggacgaacgctggcggcgtgcctaatacatgcaagtagaacgctgaagactttagcttgctaaagttggaagagttgcgaacgggtgagtaacgcgtaggtaacctaccttctagcgggggataactattggaaacgatagctaataccgcataacagtttttaacacatgttagaaatttgaaaggagcaattgcttcactagga

SEQ ID NO: 4688 - DNA, 225 bp, unidentified
  misc_feature 1..225: note = bacterial strain Ascusb_375A encodes 16S rRNA
  source 1..225: mol_type = genomic DNA
agagtttgatcatggctcaggacgaacgctggcggcgtgcttaacacatgcaagtcgaacgagacggattgaaagcttgcttttgaaatgtcgagtggcaaacgggtgagtaacgcgtagacaacctgccgcaaagatggggacaacagtccgaaaggactgctaataccgaatgttgtcaagcttccgcatgggagtttgattaaagatggcctctacttgtaa

SEQ ID NO: 4689 - DNA, 225 bp, unidentified
  misc_feature 1..225: note = bacterial strain Ascusb_3758A encodes 16S rRNA
  source 1..225: mol_type = genomic DNA
agagtttgatcctggctcaggatgaacgctagctacaggcttaacacatgcaagtcgaggggaaacgatattgaaagcttgctttctttaggcgtcgaccggcgaatgggtgagtaacgcgtatccaacctgcccctgagtaagggatagcccatcgaaagatggattaataccttatggtttcctttgaagacatctgattaggaataaagatttatcgctgag

SEQ ID NO: 4690 - DNA, 225 bp, unidentified
  misc_feature 1..225: note = bacterial strain Ascusb_5136A encodes 16S rRNA
  source 1..225: mol_type = genomic DNA
agagtttgatcctggctcaggatgaacgctagcgataggcctaacacatgcaagtcgaggggcagcattgaaatagcttgctattttagatggcgaccggcgcacgggtgagtaacacgtatgcaacctacctacaacagggaaataacccggcgaaagtcggactaatgtcctataaaacaggggtcccgcatgggaatatttgttaaagattttatcggttgt

SEQ ID NO: 4691 - DNA, 225 bp, unidentified
  misc_feature 1..225: note = bacterial strain Ascusb_2432A encodes 16S rRNA
  source 1..225: mol_type = genomic DNA
agagtttgatcctggctcaggatgaacgctggcggcgtgcctaatacatgcaagtcgaacgagaagtcctcggacttcgagtggcgaacgggtgagtaacacgtattcaatctgccctaacgactgggataccctcgggaaaccttggctaataccggataggaattttgatcgcatgatcgaaattttaaaggatcttttgattcacgataggatgagaatgcg

SEQ ID NO: 4692 - DNA, 225 bp, unidentified
  misc_feature 1..225: note = bacterial strain Ascusb_120A encodes 16S rRNA
  source 1..225: mol_type = genomic DNA
agagtttgatcatggctcaggacgaacgctggcggcgtgcttaacacatgcaagtcgaacggagaacttatttcggtaagttcttagtggcgaacgggtgagtaacgcgtaggcaacctgccctccagttggggacaacattccgaaagggatgctaataccgaatacgatggatttcccgcatgaggaatccatgaaaggcgctttcgggcgtcgctggaagat

SEQ ID NO: 4693 - DNA, 225 bp, unidentified
  misc_feature 1..225: note = bacterial strain Ascusb_1150A encodes 16S rRNA
  source 1..225: mol_type = genomic DNA
agagtttgatcctggctcaggatgaacgctggcggcgtgcttaacacatgcaagtcgaacgagacttaaatgatttcttcggattgactttaagtcgagtggcggacgggtgagtaacgcgtggggaacctgccccataccgggggataacagttggaaacggctgctaataccgcatatgcgcacgaagaggcatctctttgtgtggaaaactccggtggtatg

SEQ ID NO: 4694 - DNA, 225 bp, unidentified
  misc_feature 1..225: note = bacterial strain Ascusb_21A encodes 16S rRNA
  source 1..225: mol_type = genomic DNA
agagtttgatcatggctcaggatgaacgctggcggcgtgcctaacacatgcaagtcgagcgatttacttcggtaaagagcggcggacgggtgagtaacgcgtgggtaacctgcctcatacacatggataacataccgaaaggtatgctaatacaggataatataagagattcacatggatttcttatcaaagctccggcggtatgagatggacccgcgtctgatt

SEQ ID NO: 4695 - DNA, 225 bp, unidentified; identical to SEQ ID NO: 4694
  misc_feature 1..225: note = bacterial strain Ascusb_17947A encodes 16S rRNA
  source 1..225: mol_type = genomic DNA

SEQ ID NO: 4696 - DNA, 225 bp, unidentified
  misc_feature 1..225: note = bacterial strain Ascusb_1079A encodes 16S rRNA
  source 1..225: mol_type = genomic DNA
agagtttgatcatggctcaggatgaacgctggcggcgtgcctaacacatgcaagtcgagcgagaaatttaagaacaaagcttcggtggagtgattaaatggaaagcggcggacgggtgagtaacgcgtaggcaacctgccccttacagagggatagcctcgggaaaccgggattaaaacctcataaagcgagaagaccacatgggcttttcgccaaagatttatc

SEQ ID NO: 4697 - DNA, 225 bp, unidentified
  misc_feature 1..225: note = bacterial strain Ascusb_3851A encodes 16S rRNA
  source 1..225: mol_type = genomic DNA
agagtttgatcctggctcaggacgaacgctggcggcgcgcctaacacatgcaagtcgaacggaactgttcggatgaagttttcggatggatgaagaacagtttagtggcggacgggtgagtaacacgtgagcaacctgcctttcagaggggaataacattcggaaacgaatgctaataccgcataatgcaacgagatggcatcatcttgctgccaaagatttatc

SEQ ID NO: 4698 - DNA, 225 bp, unidentified
  misc_feature 1..225: note = bacterial strain Ascusb_1344A encodes 16S rRNA
  source 1..225: mol_type = genomic DNA
agagtttgatcctggctcaggacgaacgctggcggcgtgcctaacacatgcaagtcgagcgagatgagcccttcggggtgaatctagcggcggacgggtgagtaacacgtgggtaacctgcctcaaagagggggatagccctccgaaaggaggattaataccgcataaagttggtagttcgcatgaacaaccaaccaaaggagcaatccgctttgagatggaccc

SEQ ID NO: 4699 - DNA, 225 bp, unidentified; identical to SEQ ID NO: 4574
  misc_feature 1..225: note = bacterial strain Ascusb_2886A encodes 16S rRNA
  source 1..225: mol_type = genomic DNA

SEQ ID NO: 4700 - DNA, 225 bp, unidentified
  misc_feature 1..225: note = bacterial strain Ascusb_379A encodes 16S rRNA
  source 1..225: mol_type = genomic DNA
agagtttgatcctggctcaggatgaacgctagctacaggcttaacacatgcaagtcgaggggaaacgatattggaagcttgcttccgataggcgtcgaccggcgcacgggtgagtaacgcgtatccaacctgcccgtcacttgggaataaccttgcgaaagtaagactaatgcccaatgacatttatagaaggcatctgaaatgaattaaagatttatcggtgat

SEQ ID NO: 4701 - DNA, 225 bp, unidentified; identical to SEQ ID NO: 3662
  misc_feature 1..225: note = bacterial strain Ascusb_2179A encodes 16S rRNA
  source 1..225: mol_type = genomic DNA

SEQ ID NO: 4702 - DNA, 225 bp, unidentified; identical to SEQ ID NO: 4414
  misc_feature 1..225: note = bacterial strain Ascusb_1068A encodes 16S rRNA
  source 1..225: mol_type = genomic DNA

SEQ ID NO: 4703 - DNA, 225 bp, unidentified
  misc_feature 1..225: note = bacterial strain Ascusb_896A encodes 16S rRNA
  source 1..225: mol_type = genomic DNA
agagtttgatcatggctcaggacgaacgctggcggcgtgcctaatacatgcaagtcgaacgagaagtcttcggacttcgagtggcgaacgggtgagtaacacgtattcaatctgccctaacgactgggataccctcgggaaaccttggctaataccggataggaattttgatcgcatgatcgaaattttaaaggatcttttgattcacgataggatgagaatgcg

SEQ ID NO: 4704 - DNA, 225 bp, unidentified; identical to SEQ ID NO: 4280
  misc_feature 1..225: note = bacterial strain Ascusb_301A encodes 16S rRNA
  source 1..225: mol_type = genomic DNA

SEQ ID NO: 4705 - DNA, 225 bp, unidentified
  misc_feature 1..225: note = bacterial strain Ascusb_15140A encodes 16S rRNA
  source 1..225: mol_type = genomic DNA
agagtttgatcatggctcaggatgaacgctagctacaggcttaacacatgcaagtcgaggggaaacgatattgaaagcttgctttctttaggcgtcgaccggcgaatgggtgagtaacgcgtatccaacctacccctgagtaagggatagcccatcgaaagatggattaataccttatggtttcctttgaaggcatcggattaggaataaagatttatcgctgag

SEQ ID NO: 4706 - DNA, 225 bp, unidentified; identical to SEQ ID NO: 4705
  misc_feature 1..225: note = bacterial strain Ascusb_16891A encodes 16S rRNA
  source 1..225: mol_type = genomic DNA

SEQ ID NO: 4707 - DNA, 225 bp, unidentified
  misc_feature 1..225: note = bacterial strain Ascusb_4162A encodes 16S rRNA
  source 1..225: mol_type = genomic DNA
agagtttgatcctggctcaggacgaacgctggcggcgtgcctaacacatgcaagtcgagcgaagttttcaaagcagatttcttcggaatgaagctttgattatcttagcggcggacgggtgagtaacgcgtgagaaacctgcctttcacaaagggatagcctcgggaaactgggattaataccttatgacacttaagagtcgcatgacttttaagtcaaagcgta

SEQ ID NO: 4708 - DNA, 225 bp, unidentified
  misc_feature 1..225: note = bacterial strain Ascusb_2541A encodes 16S rRNA
  source 1..225: mol_type = genomic DNA
agagtttgatcctggctcaggacgaacgctggcggcgtgcctaatacatgcaagtagaacgctgaagactttagcttgctagagttggaagagttgcgaacgggtgagtaacgcgtaggtaacctgcctactagcgggggataactattggaaacgatagctaataccgcataatagtatttaacacatgttagagacttgaaagatgcaattgcatcactagta

SEQ ID NO: 4709 - DNA, 225 bp, unidentified; identical to SEQ ID NO: 4694
  misc_feature 1..225: note = bacterial strain Ascusb_445A encodes 16S rRNA
  source 1..225: mol_type = genomic DNA

SEQ ID NO: 4710 - DNA, 225 bp, unidentified; identical to SEQ ID NO: 2522
  misc_feature 1..225: note = bacterial strain Ascusb_2860A encodes 16S rRNA
  source 1..225: mol_type = genomic DNA

SEQ ID NO: 4711 - DNA, 225 bp, unidentified; identical to SEQ ID NO: 2522
  misc_feature 1..225: note = bacterial strain Ascusb_4385A encodes 16S rRNA
  source 1..225: mol_type = genomic DNA

SEQ ID NO: 4712 - DNA, 225 bp, unidentified
  misc_feature 1..225: note = bacterial strain Ascusb_4740A encodes 16S rRNA
  source 1..225: mol_type = genomic DNA
agagtttgatcatggctcaggacgaacgctggcggcgtgcctaacacatgcaagtcgagcgatgaagttccttcgggaatggattagcggcggacgggtgagtaacacgtgggcaacctgcctcaaagtgggggatagccctccgaaaggaggattaataccgcataatgttaagtttttgcataaaagcttaaccaaaggagtaatccgctttgagatgggccc

SEQ ID NO: 4713 - DNA, 225 bp, unidentified
  misc_feature 1..225: note = bacterial strain Ascusb_649A encodes 16S rRNA
  source 1..225: mol_type = genomic DNA
agagtttgatcatggctcaggatgaacgctagctacaggcttaacacatgcaagtcgaggggcagcatgaaggaagcttgcttcctttgatggcgaccggcgcacgggtgagtaacgcgtatccaacctgcccattacactgggatagcccgccgaaaggcgaattaatcccggatagtgttcttagatggcatcagacaaggactaaaggtttttccggtaatg

SEQ ID NO: 4714 - DNA, 225 bp, unidentified; identical to SEQ ID NO: 3974
  misc_feature 1..225: note = bacterial strain Ascusb_4058A encodes 16S rRNA
  source 1..225: mol_type = genomic DNA

SEQ ID NO: 4715 - DNA, 225 bp, unidentified
  misc_feature 1..225: note = bacterial strain Ascusb_3805A encodes 16S rRNA
  source 1..225: mol_type = genomic DNA
agagtttgatcctggctcaggataaacgctggcggcgtgcctaatacatgcaagtcgatcggagagtttcaagcttgcttgagactttcagaggcgaacgggtgagtaatacataagcaacctgcccacgaagaccgggataacatctggaaacgggtactaaaaccggataggtaatagaaccgcatggttcgattattaaaggagagaaacactggtggatgg

SEQ ID NO: 4716 - DNA, 225 bp, unidentified
  misc_feature 1..225: note = bacterial strain Ascusb_514A encodes 16S rRNA
  source 1..225: mol_type = genomic DNA
agagtttgatcctggctcaggatgaacgctggcggcgtgcctaacacatgcaagtcgaacgagcgagagatgaaacctagtgattctcgagcgagtggcggacgggtgagtaacgcgtgggtaacctgccttacagagggggataacagtttgaaaagactgctaataccgcataagcacacagtaccgcatggtacagggtgaaaagatctatcgctgtaagat

SEQ ID NO: 4717 - DNA, 225 bp, unidentified; identical to SEQ ID NO: 4490
  misc_feature 1..225: note = bacterial strain Ascusb_1953A encodes 16S rRNA
  source 1..225: mol_type = genomic DNA

SEQ ID NO: 4718 - DNA, 225 bp, unidentified; identical to SEQ ID NO: 4463
  misc_feature 1..225: note = bacterial strain Ascusb_1959A encodes 16S rRNA
  source 1..225: mol_type = genomic DNA

SEQ ID NO: 4719 - DNA, 225 bp, unidentified
  misc_feature 1..225: note = bacterial strain Ascusb_3898A encodes 16S rRNA
  source 1..225: mol_type = genomic DNA
agagtttgatcctggctcaggacgaacgctggcggcgtgcttaacacatgcaagtcgaacgaggtgattgaaagcttgcttttgagaaccgagtggcaaacgggtgagtaacgcgtagacaacctgccgcaaagatggggacaacagtccgaaaggactgctaataccgaatgttgtcagattcccgcatgggagactgattaaagatggcctctacttgtaagc

SEQ ID NO: 4720 - DNA, 225 bp, unidentified; identical to SEQ ID NO: 4591
  misc_feature 1..225: note = bacterial strain Ascusb_375B encodes 16S rRNA
  source 1..225: mol_type = genomic DNA

SEQ ID NO: 4721 - DNA, 225 bp, unidentified
  misc_feature 1..225: note = bacterial strain Ascusb_434A encodes 16S rRNA
  source 1..225: mol_type = genomic DNA
agagtttgatcctggctcaggatgaacgctggcggcgtgcctaacacatgcaagtcgaacgagcgagagatgaaacctagtgaatctcgagcgagtggcggacgggtgagtaacgcgtgggtaacctgccttacagagggggataacagtttgaaaagactgctaataccgcataagcacacagtaccgcatggtacagggtgaaaagatttatcactgtaagat

SEQ ID NO: 4722 - DNA, 225 bp, unidentified; identical to SEQ ID NO: 4721
  misc_feature 1..225: note = bacterial strain Ascusb_1135A encodes 16S rRNA
  source 1..225: mol_type = genomic DNA

SEQ ID NO: 4723 - DNA, 225 bp, unidentified; identical to SEQ ID NO: 2103
  misc_feature 1..225: note = bacterial strain Ascusb_1834A encodes 16S rRNA
  source 1..225: mol_type = genomic DNA

SEQ ID NO: 4724 - DNA, 225 bp, unidentified
  misc_feature 1..225: note = bacterial strain Ascusb_2594B encodes 16S rRNA
  source 1..225: mol_type = genomic DNA
agagtttgatcatggctcaggatgaacgctggcggcgtgcctaatacatgcaagtcgatcgggagtagcaatacttcagaggcgtacgggtgagtaacacatagggaacctgccctttagcttgggatacccagacgaaagtttggctaataccggataacaacagcagacgcatgtttgctgtttgaaaggcgctttcaagcgtcactattggatggacctgtg

SEQ ID NO: 4725 - DNA, 225 bp, unidentified
  misc_feature 1..225: note = bacterial strain Ascusb_4126A encodes 16S rRNA
  source 1..225: mol_type = genomic DNA
agagtttgatcctggctcaggacgaacgctggcggcgtgcctaatacatgcaagtcgaacgaaactttcttacaccgaatgcttgcattcaccgtaagaagttgagtggcggacgggtgagtaacacgtgggtaacctgcctaaaagaaggggataacacttggaaacaggtgctaataccgtatatctctaaggatcgcatgatccttagacgaaagatggttc

SEQ ID NO: 4726 - DNA, 225 bp, unidentified
  misc_feature 1..225: note = bacterial strain Ascusb_310A encodes 16S rRNA
  source 1..225: mol_type = genomic DNA
agagtttgatcctggctcaggacgaacgctggcggcgtgcctaacacatgcaagtcgaacggggattttgtttcggcagaatcctagtggcgaacgggtgagtaacgcgtaggcaacctgccctccagacggggacaacattccgaaaggggtgctaataccggatacgaaggagccatcgcatggtggttctttgaaagatggcctctacatgtaagctatcgc

SEQ ID NO: 4727 - DNA, 225 bp, unidentified; identical to SEQ ID NO: 4726
  misc_feature 1..225: note = bacterial strain Ascusb_211B encodes 16S rRNA
  source 1..225: mol_type = genomic DNA

SEQ ID NO: 4728 - DNA, 225 bp, unidentified; identical to SEQ ID NO: 2583
  misc_feature 1..225: note = bacterial strain Ascusb_3385A encodes 16S rRNA
  source 1..225: mol_type = genomic DNA

SEQ ID NO: 4729 - DNA, 225 bp, unidentified
  misc_feature 1..225: note = bacterial strain Ascusb_20566B encodes 16S rRNA
  source 1..225: mol_type = genomic DNA
agagtttgatcatggctcaggatgaacgctggcggcgtgcctaacacatgcaagtcgagcgatctcttcggagagagcggcggacgggtgagtaacgcgtgggtaacctgccctgtacacacggataacataccgaaaggtatactaatacgggataacatataaaagtcgcatggcttttgtatcaaagctccggcggtacaggatggacccgcgtctgattag

SEQ ID NO: 4730 - DNA, 225 bp, unidentified
  misc_feature 1..225: note = bacterial strain Ascusb_888A encodes 16S rRNA
  source 1..225: mol_type = genomic DNA
agagtttgatcatggctcaggattaacgctggcggcatgcctaatacatgcaagtcgaatgggtagcttgctatccatggcgaacgggtgagtaacacgtaggtaacctgtctttaagacgaggataacctttggaaacgaaggataatactggataggtcgttataaatcacatgattaaacgattaaagattattatgtcacttagagaggggcctgcggcgc

SEQ ID NO: 4731 - DNA, 225 bp, unidentified; identical to SEQ ID NO: 4121
  misc_feature 1..225: note = bacterial strain Ascusb_2987B encodes 16S rRNA
  source 1..225: mol_type = genomic DNA

SEQ ID NO: 4732 - DNA, 225 bp, unidentified; identical to SEQ ID NO: 4121
  misc_feature 1..225: note = bacterial strain Ascusb_2835A encodes 16S rRNA
  source 1..225: mol_type = genomic DNA

SEQ ID NO: 4733 - DNA, 225 bp, unidentified
  misc_feature 1..225: note = bacterial strain Ascusb_1731A encodes 16S rRNA
  source 1..225: mol_type = genomic DNA
agagtttgatcatggctcagattgaacgctggcggcaggcctaacacatgcaagtcgagcggtaacacagagagcttgctctcgggtgacgagcggcggacgggtgagtaatgtctgggaaactgcctgatggagggggataactactggaaacggtagctaataccgcataacgtcgcaagaccaaagtgggggaccttcgggcctcatgccatcagatgtgcc

SEQ ID NO: 4734 - DNA, 225 bp, unidentified
  misc_feature 1..225: note = bacterial strain Ascusb_1889B encodes 16S rRNA
  source 1..225: mol_type = genomic DNA
agagtttgatcatggctcaggacgaacgctggcggcgtgcttaacacatgcaagtcgaacgggaagaaaagaaagagcttgctcttttttggattctagtggcaaacgggtgagtaacacgtaaacaacctgccttcaggatggggacaacagacggaaacgactgctaataccgaataccttccaatttccgcatggagatgggaagaaagggtggcctctact

SEQ ID NO: 4735 - DNA, 225 bp, unidentified; identical to SEQ ID NO: 4734
  misc_feature 1..225: note = bacterial strain Ascusb_1829A encodes 16S rRNA
  source 1..225: mol_type = genomic DNA

SEQ ID NO: 4736 - DNA, 225 bp, unidentified; identical to SEQ ID NO: 4734
  misc_feature 1..225: note = bacterial strain Ascusb_2744A encodes 16S rRNA
  source 1..225: mol_type = genomic DNA

SEQ ID NO: 4737 - DNA, 225 bp, unidentified
  misc_feature 1..225: note = bacterial strain Ascusb_1366B encodes 16S rRNA
  source 1..225: mol_type = genomic DNA
agagtttgatcatggctcaggacgaacgctggcggcgtgcctaatacatgcaagtcgagcggagttgatggagtgcttgcactcctgatgcttagcggcggacgggtgagtaatacgtaggtaacctgcccttaagaccgggataactcacggaaacgtgggctaataccggataggcgatttcctcgcatgaggggatcgggaaaggcggagcaatctgccgct

SEQ ID NO: 4738 - DNA, 225 bp, unidentified
  misc_feature 1..225: note = bacterial strain Ascusb_2205A encodes 16S rRNA
  source 1..225: mol_type = genomic DNA
agagtttgatcatggctcaggacgaacgctggcggcgtgcctaacacatgcaagtcgagcggagaaagttcttcggaactttctcagcggcggacgggtgagtaacacgtgggtaacctgccttatagagggggatagccttccgaaaggaagattaataccgcataacatttttgtttcgcatgaaataaaaatcaaaggagcaatccgctataagatggaccc

SEQ ID NO: 4739 - DNA, 225 bp, unidentified
  misc_feature 1..225: note = bacterial strain Ascusb_352A encodes 16S rRNA
  source 1..225: mol_type = genomic DNA
agagtttgatcctggctcaggacgaacgctggcggcatgcctaacacatgcaagtcgaacgaagtaagagagaagcttgcttagctcttacttagtggcggacgggtgagtaacgcgtgagtaacctgcctttcagagggggataacgttctgaaaagaacgctaataccgcatgatatattggggtcgcatggccttggtatcaaaggagcaatccgctgaaag

SEQ ID NO: 4740 - DNA, 225 bp, unidentified
  misc_feature 1..225: note = bacterial strain Ascusb_1018A encodes 16S rRNA
  source 1..225: mol_type = genomic DNA
agagtttgatcctggctcaggacgaacgctggcggcgtgcttaacacatgcaagtcgagcgagattttaagaattagtttactaattcttgaatgacagcggcggacgggtgagtaacgcgtgggcaacctgccttgtggaaagggatagcctcgggaaaccgggattaataccttataatatttacttttcgcatgagaagtaaatcaaagatttatcgccaca

SEQ ID NO: 4741 - DNA, 225 bp, unidentified
  misc_feature 1..225: note = bacterial strain Ascusb_2776A encodes 16S rRNA
  source 1..225: mol_type = genomic DNA
agagtttgatcatggctcaggacgaacgctggcggcgtgcttaacacatgcaagtcgaacggggcgatttaaaagcttgcttttgatgagcctagtggcaaacgggtgagtaacgcgtaggcaacctgccctcaggatggggacaacggcccgaaaggaccgctaataccgaatgaagtgtcggaatcgcatgatactgataccaaaggcggagcaatccgtcac

SEQ ID NO: 4742 - DNA, 225 bp, unidentified
  misc_feature 1..225: note = bacterial strain Ascusb_2606B encodes 16S rRNA
  source 1..225: mol_type = genomic DNA
agagtttgatcctggctcaggatgaacgctggcggcgtgcttaacacatgcaagtcgagcgaagcgcagaaacggatttcttcggattgaaggttctgtgactgagcggcggacgggtgagtaacgcgtggggaacctgccctgtaccgggggataacagacagaaatgtctgctaataccgcataagcgcacgagaaggcatcttcttgtgtgaaaaactccgg

SEQ ID NO: 4743 - DNA, 214 bp, unidentified
  misc_feature 1..214: note = bacterial strain Ascusb_1150B encodes 16S rRNA
  source 1..214: mol_type = genomic DNA
agagtttgatcctggctcaggatgaacgctagcggcaggcttaacacatgcaagtcgaggggcatcgcggggtagcaataccctggcggcgaccggcgaaagggtgcgtaacgcgtgagcgacatgcccgtcacagggggataaccggcggaaacgccgcctaataccccatatgaggccaggccacatggccgggccttgaaagtcaaggcgg

SEQ ID NO: 4744 - DNA, 225 bp, unidentified
  misc_feature 1..225: note = bacterial strain Ascusb_287A encodes 16S rRNA
  source 1..225: mol_type = genomic DNA
agagtttgatcctggctcaggatgaacgctggcggcgtgcctaatacatgcaagtcgaacgaggtgtagcaatacaccgagtggcgaacgggtgagtaacacgtaggtaacctgcccctaagtctgggatacccaggggaaaccttggctaataccggatagcggcggaggggacatcccttccgcacgaaagtcgcgtttgcgacgctttcggatggacctgcg

SEQ ID NO: 4745 - DNA, 225 bp, unidentified
  misc_feature 1..225: note = bacterial strain Ascusb_301B encodes 16S rRNA
  source 1..225: mol_type = genomic DNA
agagtttgatcatggctcaggacgaacgctggcggcatgcctaacacatgcaagtcgaacggagtaagagagaagcttgcttagctcttacttagtggcggacgggtgagtaacgcgtgagtaacctgcctttcagagggggataacgttctgaaaagaacgctaataccgcatgatatattggggtcgcatggccttggtatcaaaggagcaatccgctgaaag

SEQ ID NO: 4746 - DNA, 225 bp, unidentified
  misc_feature 1..225: note = bacterial strain Ascusb_4975A encodes 16S rRNA
  source 1..225: mol_type = genomic DNA
agagtttgatcctggctcaggacgaacgctggcggcgtgcttaacacatgcaagtcgaacgagacggattgaaagcttgcttttgaaaagtcgagtggcaaacgggtgagtaacgcgtagacaacctgccgcaaagatggggacaacagtccgaaaggactgctaataccgaatgttgtgcaacttccgcatgggagatgcattaaagatggcctctacttgtaa

SEQ ID NO: 4747 - DNA, 225 bp, unidentified
  misc_feature 1..225: note = bacterial strain Ascusb_4846A encodes 16S rRNA
  source 1..225: mol_type = genomic DNA
agagtttgatcctggctcaggatgaacgctagctacaggcttaacacatgcaagtcgaggggaaacgacatagagtgcttgcactttatgggcgtcgaccggcgaatgggtgagtaacgcgtatccaacctgcccttgactgagggatagcccagtgaaaactgaattaatacctcatatcctcctccgacggcatcagacgaggagtaaagatttatcggtcaa

SEQ ID NO: 4748 - DNA, 225 bp, unidentified; identical to SEQ ID NO: 4569
  misc_feature 1..225: note = bacterial strain Ascusb_1929A encodes 16S rRNA
  source 1..225: mol_type = genomic DNA

SEQ ID NO: 4749 - DNA, 225 bp, unidentified
  misc_feature 1..225: note = bacterial strain Ascusb_2866A encodes 16S rRNA
  source 1..225: mol_type = genomic DNA
agagtttgatcctggctcaggacgaacgctggcggcgtgcttaacacatgcaagtcgaacgaggcagattttcaacactgaatgcttgaaggcgatgctttcgagcgtcgtgatggcgaagccatcaccacacttatataaagtgattaacataagtgatgggtggtcgagcattgagtgttgaaaagatgccgagtggcaaacgggtgagtaacgcgtagacaa

SEQ ID NO: 4750 - DNA, 225 bp, unidentified
  misc_feature 1..225: note = bacterial strain Ascusb_489B encodes 16S rRNA
  source 1..225: mol_type = genomic DNA
agagtttgatcctggctcaggacgaacgctggcggcgtgcttaacacatgcaagtcgaacgagaagggatgagaagcttgcttcttatcaattcgagtggcaaacgggtgagtaacgcgtaagcaacctgcccttcagatggggacaacagctggaaacggctgctaataccgaatacgttctttttgtcgcatggcagagagaagaaagggaggctcttcggag

SEQ ID NO: 4751 - DNA, 225 bp, unidentified
  misc_feature 1..225: note = bacterial strain Ascusb_3250A encodes 16S rRNA
  source 1..225: mol_type = genomic DNA
agagtttgatcctggctcaggacgaacgctggcggcgtgcttaacacatgcaagtcgaacgagacggatagaagcttgcttttagaagtcgagtggcaaacgggtgagtaacgcgtagacaacctgcctctgggatggggacaacagcccgaaagggctgctaataccgaatgaaatggtttcttctcctgaagttatcatgaaagatggcctctatttataagc

SEQ ID NO: 4752 - DNA, 225 bp, unidentified; identical to SEQ ID NO: 4751
  misc_feature 1..225: note = bacterial strain Ascusb_19138A encodes 16S rRNA
  source 1..225: mol_type = genomic DNA

SEQ ID NO: 4753 - DNA, 225 bp, unidentified; identical to SEQ ID NO: 4751
  misc_feature 1..225: note = bacterial strain Ascusb_300B encodes 16S rRNA
  source 1..225: mol_type = genomic DNA

SEQ ID NO: 4754 - DNA, 225 bp, unidentified
  misc_feature 1..225: note = bacterial strain Ascusb_2895B encodes 16S rRNA
  source 1..225: mol_type = genomic DNA
agagtttgatcctggctcaggacgaacgctggcggcgtgcctaatacatgcaagtcgagcgatatctttgggggcttgcccccgaagatgtagcggcggacgggtgagtaacacgtgggcaacctgcctgtaagactgggataacttcgggaaaccggagctaataccggataactcaagaaaccacatggtttcttgctaaaagatggctccggctatcactta

SEQ ID NO: 4755 - DNA, 225 bp, unidentified; identical to SEQ ID NO: 2965
  misc_feature 1..225: note = bacterial strain Ascusb_3533A encodes 16S rRNA
  source 1..225: mol_type = genomic DNA

SEQ ID NO: 4756 - DNA, 225 bp, unidentified
  misc_feature 1..225: note = bacterial strain Ascusb_8024C encodes 16S rRNA
  source 1..225: mol_type = genomic DNA
agagtttgatcctggctcaggacgaacgctggcggcgtgcctaatacatgcaagtcgagcgatatctttgggggcttgcccccgaagatgtagcggcggacgggtgagtaacacgtgggcaacctgcctgtaagactgggataacttcgggaaaccggagctaataccggataactcaagaaaccacatggtttcttgctaaaagatggctccagctatcactta

SEQ ID NO: 4757 - DNA, 225 bp, unidentified
  misc_feature 1..225: note = bacterial strain Ascusb_2440A encodes 16S rRNA
  source 1..225: mol_type = genomic DNA
agagtttgatcatggctcaggacgaacgctggcggcgtgcttaacacatgcaagtcgagcgatgaagttccttcgggaacggattagcggcggacgggtgagtaacacgtgggtaacctgcctcatagaggggaatagcctttcgaaaggaagattaataccgcataagattgtagtttcgcatgaaacagcaattaaaggagtaatccactatgagatggaccc

SEQ ID NO: 4758 - DNA, 225 bp, unidentified; identical to SEQ ID NO: 3486
  misc_feature 1..225: note = bacterial strain Ascusb_6714A encodes 16S rRNA
  source 1..225: mol_type = genomic DNA

SEQ ID NO: 4759 - DNA, 225 bp, unidentified
  misc_feature 1..225: note = bacterial strain Ascusb_1059A encodes 16S rRNA
  source 1..225: mol_type = genomic DNA
agagtttgatcatggctcaggatgaacgccggcggtgtgcctaatacatgcaagtcgaacgcgttggcccaattgattgatggtgctttcacctgattgattttggttgccaacgagtggcggacgggtgagtaacacgtaggtaacctgcccagaagcgggggacaacatttggaaacagatgctaataccgcataacagcgttgttcgcatgaacaacgctta

SEQ ID NO: 4760 - DNA, 225 bp, unidentified
  misc_feature 1..225: note = bacterial strain Ascusb_3342A encodes 16S rRNA
  source 1..225: mol_type = genomic DNA
agagtttgatcatggctcagattgaacgctggcggcaggcctaacacatgcaagtcgagcggcagcggaaagtagcttgctactttgccggcgagcggcggacgggtgagtaatgtctgggaaactgcctgatggagggggataactactggaaacggtagctaataccgcataatgtcgcaagaccaaagagggggaccttcgggcctcttgccatcagatgtg

SEQ ID NO: 4761 - DNA, 225 bp, unidentified; identical to SEQ ID NO: 4759
  misc_feature 1..225: note = bacterial strain Ascusb_1107A encodes 16S rRNA
  source 1..225: mol_type = genomic DNA

SEQ ID NO: 4762 - DNA, 225 bp, unidentified; identical to SEQ ID NO: 4591
  misc_feature 1..225: note = bacterial strain Ascusb_3810A encodes 16S rRNA
  source 1..225: mol_type = genomic DNA

SEQ ID NO: 4763 - DNA, 225 bp, unidentified
  misc_feature 1..225: note = bacterial strain Ascusb_2736A encodes 16S rRNA
  source 1..225: mol_type = genomic DNA
agagtttgatcatggctcaggacgaacgctggcggcgtgcttaacacatgcaagtcgagcgggaaacttcggtttccagcggcggacgggtgagtaacacgtgggcaacctgcctcacaataggggatagccctccgaaaggaggattaataccctataacacaaagaaaacgcatgttttctttgccaaagaatttcgttgtgagatgggcccgcggcgcatta

SEQ ID NO: 4764 - DNA, 225 bp, unidentified; identical to SEQ ID NO: 608
  misc_feature 1..225: note = bacterial strain Ascusb_8863A encodes 16S rRNA
  source 1..225: mol_type = genomic DNA

SEQ ID NO: 4765 - DNA, 225 bp, unidentified; identical to SEQ ID NO: 608
  misc_feature 1..225: note = bacterial strain Ascusb_1924A encodes 16S rRNA
  source 1..225: mol_type = genomic DNA

SEQ ID NO: 4766 - DNA, 225 bp, unidentified; identical to SEQ ID NO: 608
  misc_feature 1..225: note = bacterial strain Ascusb_1189A encodes 16S rRNA
  source 1..225: mol_type = genomic DNA

SEQ ID NO: 4767 - DNA, 225 bp, unidentified; identical to SEQ ID NO: 608
  misc_feature 1..225: note = bacterial strain Ascusb_2725A encodes 16S rRNA
  source 1..225: mol_type = genomic DNA

SEQ ID NO: 4768 - DNA, 225 bp, unidentified
  misc_feature 1..225: note = bacterial strain Ascusb_197A encodes 16S rRNA
  source 1..225: mol_type = genomic DNA
agagtttgatcctggctcaggacgaacgctggcggcgtgcttaacacatgcaagtcgaacgagacgattgaaagcttgcttttgagagtcgagtggcaaacgggtgagtaacgcgtagacaacctgccgcaaagatggggacaacagtccgaaaggactgctaataccgaatgttgtatcgtttccgcatggagatgatattaaagatggcctctacttgtaagc

SEQ ID NO: 4769 - DNA, 225 bp, unidentified; identical to SEQ ID NO: 4768
  misc_feature 1..225: note = bacterial strain Ascusb_4663A encodes 16S rRNA
  source 1..225: mol_type = genomic DNA

SEQ ID NO: 4770 - DNA, 225 bp, unidentified; identical to SEQ ID NO: 4768
  misc_feature 1..225: note = bacterial strain Ascusb_6110A encodes 16S rRNA
  source 1..225: mol_type = genomic DNA

SEQ ID NO: 4771 - DNA, 214 bp, unidentified
  misc_feature 1..214: note = bacterial strain Ascusb_154A encodes 16S rRNA
  source 1..214: mol_type = genomic DNA
agagtttgatcctggctcaggatgaacgctagcggcaggcttaacacatgcaagtcgaggggcatcgcggggtagcaataccctggcggcgaccggcgaaagggtgcgtaacgcgtgagcgacatgcccgtcacagggggataaccggcggaaacgccgcctaataccccatatgaggccaggccacatggctgggtcttgaaagtcaaggcgg

SEQ ID NO: 4772 - DNA, 225 bp, unidentified; identical to SEQ ID NO: 4463
  misc_feature 1..225: note = bacterial strain Ascusb_13706A encodes 16S rRNA
  source 1..225: mol_type = genomic DNA

SEQ ID NO: 4773 - DNA, 225 bp, unidentified
  misc_feature 1..225: note = bacterial strain Ascusb_631A encodes 16S rRNA
  source 1..225: mol_type = genomic DNA
agagtttgatcctggctcaggatgaacgctagctacaggcttaacacatgcaagtcgaggggcagcatgatcaaagcttgctttgattgatggcgaccggcgcacgggtgagtaacgcgtatccaaccttccctatagtagaggatagcccggcgaaagtcggattaatactctatgttttccaatgcagacatctaaaatggaacaaaggtttaccgctatagg

SEQ ID NO: 4774 - DNA, 225 bp, unidentified; identical to SEQ ID NO: 4716
  misc_feature 1..225: note = bacterial strain Ascusb_4119B encodes 16S rRNA
  source 1..225: mol_type = genomic DNA

SEQ ID NO: 4775 - DNA, 225 bp, unidentified; identical to SEQ ID NO: 4773
  misc_feature 1..225: note = bacterial strain Ascusb_7475A encodes 16S rRNA
  source 1..225: mol_type = genomic DNA

SEQ ID NO: 4776 - DNA, 225 bp, unidentified
  misc_feature 1..225: note = bacterial strain Ascusb_2817A encodes 16S rRNA
  source 1..225: mol_type = genomic DNA
agagtttgatcatggctcaggatgaacgctagctacaggcttaacacatgcaagtcgaggggtaacgatatcgaaagcttgctttcgataggcgacgaccggcgcacgggtgagtaacgcgtatccaacctgcccataactaagggataatccgtagaaatgcggtctaataccttatgtgttccgatgaggacatctgaattggaataaagatttatcggttat

SEQ ID NO: 4777 - DNA, 225 bp, unidentified; identical to SEQ ID NO: 3486
  misc_feature 1..225: note = bacterial strain Ascusb_1368A encodes 16S rRNA
  source 1..225: mol_type = genomic DNA

SEQ ID NO: 4778 - DNA, 225 bp, unidentified; identical to SEQ ID NO: 3486
  misc_feature 1..225: note = bacterial strain Ascusb_1332A encodes 16S rRNA
  source 1..225: mol_type = genomic DNA

SEQ ID NO: 4779 - DNA, 225 bp, unidentified; identical to SEQ ID NO: 3486
  misc_feature 1..225: note = bacterial strain Ascusb_12394A encodes 16S rRNA
  source 1..225: mol_type = genomic DNA

SEQ ID NO: 4780 - DNA, 225 bp, unidentified; identical to SEQ ID NO: 3486
  misc_feature 1..225: note = bacterial strain Ascusb_2017A encodes 16S rRNA
  source 1..225: mol_type = genomic DNA

SEQ ID NO: 4781 - DNA, 225 bp, unidentified; identical to SEQ ID NO: 3486
  misc_feature 1..225: note = bacterial strain Ascusb_9039A encodes 16S rRNA
  source 1..225: mol_type = genomic DNA

SEQ ID NO: 4782 - DNA, 225 bp, unidentified
  misc_feature 1..225: note = bacterial strain Ascusb_4081B encodes 16S rRNA
  source 1..225: mol_type = genomic DNA
agagtttgatcatggctcaggacgaacgctggcggcgtgcctaatacatgcaagtagaacgctgaagactttagcttgctaaagttggaagagttgcgaacgggtgagtaacgcgtaggtaacctgcctactagcgggggataactactggaaacggtagctaataccgcataacgtcgcaagaccaaagtgggggaccttcgggcctcatgccatcagatgtgc

SEQ ID NO: 4783 - DNA, 225 bp, unidentified; identical to SEQ ID NO: 4782
  misc_feature 1..225: note = bacterial strain Ascusb_9033A encodes 16S rRNA
  source 1..225: mol_type = genomic DNA

SEQ ID NO: 4784 - DNA, 225 bp, unidentified; identical to SEQ ID NO: 4782
  misc_feature 1..225: note = bacterial strain Ascusb_7414A encodes 16S rRNA
  source 1..225: mol_type = genomic DNA

SEQ ID NO: 4785 - DNA, 225 bp, unidentified
  misc_feature 1..225: note = bacterial strain Ascusb_957B encodes 16S rRNA
  source 1..225: mol_type = genomic DNA
agagtttgatcatggctcaggatgaacgctagctacaggcttaacacatgcaagtcgaggggcagcatgaagtttgcttgcaaactttgatggcgaccggcgcacgggtgagtaacgcgtatccaaccttccccttagtagggcatagcccggcgaaagtcggattaataccctatgttatccgaagatggcatctgagatggaataaagatttatcgcttatgg

SEQ ID NO: 4786 - DNA, 225 bp, unidentified; identical to SEQ ID NO: 4070
  misc_feature 1..225: note = bacterial strain Ascusb_1961B encodes 16S rRNA
  source 1..225: mol_type = genomic DNA

SEQ ID NO: 4787 - DNA, 225 bp, unidentified
  misc_feature 1..225: note = bacterial strain Ascusb_552A encodes 16S rRNA
  source 1..225: mol_type = genomic DNA
agagtttgatcatggctcaggatgaacgctagctacaggcttaacacatgcaagtcgaggggcagcattatcgaagcttgctttgatagatggcgaccggcgcacgggtgagtaacgcgtatccaaccttccccatagtagggcatagcccgtagaaatgcggattaataccctatgtattccgaggatgacatctgattcggaacaaaggttcaccgctatggg

SEQ ID NO: 4788 - DNA, 225 bp, unidentified
  misc_feature 1..225: note = bacterial strain Ascusb_11494B encodes 16S rRNA
  source 1..225: mol_type = genomic DNA
agagtttgatcatggctcaggatgaacgctggcggcgtgcctaatacatgcaagtcgaacggagcaccttggtgctcagtggcgaacgggtgaggagaacataggtaacctgcccctccgagggggacaacagctggaaacggctgctaagaccgcatagacgcattcagggcatcctggatgcgctaaatgaccggatggtcagcggggggatggacctatgca

SEQ ID NO: 4789 - DNA, 225 bp, unidentified; identical to SEQ ID NO: 4788
  misc_feature 1..225: note = bacterial strain Ascusb_12803B encodes 16S rRNA
  source 1..225: mol_type = genomic DNA

SEQ ID NO: 4790 - DNA, 225 bp, unidentified
  misc_feature 1..225: note = bacterial strain Ascusb_5156B encodes 16S rRNA
  source 1..225: mol_type = genomic DNA
agagtttgatcctggctcagattgaacgctggcggcaggcttaacacatgcaagtcgaacggtagcgggaagaaagcttgctttctttgccgacgagtggcggacgggtgagtaatgcttggggatctggcttatggagggggataacgacgggaaactgtcgctaataccgcgtaatatctttggattaaagggtgggactttcgggccacctgccataagatg

SEQ ID NO: 4791 - DNA, 225 bp, unidentified
  misc_feature 1..225: note = bacterial strain Ascusb_5179B encodes 16S rRNA
  source 1..225: mol_type = genomic DNA
agagtttgatcctggctcaggataaacgccggcggcgtgcctaatacatgcaagtcgaacgaggctcttcggagccgagtggcgtacgggtgagtaacgcgtaggtaacctgcctactagcgggggataactattggaaacgatagctaataccgcataacagcatttaacacatgttagatgcttgaaaggagcaattgcttcactagtagatggacctgcgtt

SEQ ID NO: 4792 - DNA, 225 bp, unidentified
  misc_feature 1..225: note = bacterial strain Ascusb_13706B encodes 16S rRNA
  source 1..225: mol_type = genomic DNA
agagtttgatcctggctcaggatgaacgctggcggcgtgcttaacacatgcaagtcgaacgaagcaacttatcacgattccttcgggatgacgatttgttgactgagtggcggacgggtgagtaacgcgtgggtaacctgccttatacagggggatagcagctggaaacggctgataataccgcataagcgcacagcatcgcatgatgcagtgtgaaaaactccg

SEQ ID NO: 4793 - DNA, 225 bp, unidentified; identical to SEQ ID NO: 4792
  misc_feature 1..225: note = bacterial strain Ascusb_431A encodes 16S rRNA
  source 1..225: mol_type = genomic DNA

SEQ ID NO: 4794 - DNA, 225 bp, unidentified
  misc_feature 1..225: note = bacterial strain Ascusb_624B encodes 16S rRNA
  source 1..225: mol_type = genomic DNA
agagtttgatcctggctcagattgaacgctggcggcatgctttacacatgcaagtcgaacggcagcgcggggcaacctggcggcgagtggcgaacgggtgagtaatatatcggaacgtacccaagagtgggggataacgtagcgaaagttacgctaataccgcatacgatctaaggatgaaagcaggggatcttcggaccttgtgctcctggagcggccgatatc

SEQ ID NO: 4795 - DNA, 225 bp, unidentified
  misc_feature 1..225: note = bacterial strain Ascusb_4846B encodes 16S rRNA
  source 1..225: mol_type = genomic DNA
agagtttgatcatggctcaggatgaacgctggcggcgtgcttaacacatgcaagtcgaacggagttacttgggagcttgctcttaagtaacttagtggcggacgggtgagtaacgcgtgggtaacctgccctatacagggggataacagttagaaatgactgctaacaccgcataacatcattttgttgcatgacagaatggtcaaatatttataggtataggat

SEQ ID NO: 4796 - DNA, 225 bp, unidentified
  misc_feature 1..225: note = bacterial strain Ascusb_2434B encodes 16S rRNA
  source 1..225: mol_type = genomic DNA
agagtttgatcatggctcaggatgaacgctggcggcgtgcttaacacatgcaagtcgaacggggttattaccattgagatttcggtcgatttggttttaacttagtggcggacgggtgagtaacgcgtggggaacctgcctcaatccgggggataacattcggaaacggatgctaataccgtataagcgcacagagcggcatcgctccgtgtgaaaaactccggt

SEQ ID NO: 4797 - DNA, 225 bp, unidentified; identical to SEQ ID NO: 4796
  misc_feature 1..225: note = bacterial strain Ascusb_3663B encodes 16S rRNA
  source 1..225: mol_type = genomic DNA

SEQ ID NO: 4798 - DNA, 225 bp, unidentified; identical to SEQ ID NO: 4490
  misc_feature 1..225: note = bacterial strain Ascusb_6751A encodes 16S rRNA
  source 1..225: mol_type = genomic DNA

SEQ ID NO: 4799 - DNA, 225 bp, unidentified; identical to SEQ ID NO: 4490
  misc_feature 1..225: note = bacterial strain Ascusb_16970A encodes 16S rRNA
  source 1..225: mol_type = genomic DNA

SEQ ID NO: 4800 - DNA, 225 bp, unidentified; identical to SEQ ID NO: 4490
  misc_feature 1..225: note = bacterial strain Ascusb_5611A encodes 16S rRNA
  source 1..225: mol_type = genomic DNA

SEQ ID NO: 4801 - DNA, 225 bp, unidentified
  misc_feature 1..225: note = bacterial strain Ascusb_1224A encodes 16S rRNA
  source 1..225: mol_type = genomic DNA
agagtttgatcctggctcaggacgaacgctggcggcgtgcctaatacatgcaagtagaacgctgaagactttagcttgctaaagttggaagagttgcgaacgggtgagtaatacctggggagctgcctgaatgagggggacaacacctggaaacgggtgctaataccgcgtaagccctgagggggaaaggccgggcaaccggtcgcattcagatgcgcccaggtg

SEQ ID NO: 4802 - DNA, 225 bp, unidentified; identical to SEQ ID NO: 164
  misc_feature 1..225: note = bacterial strain Ascusb_1372A encodes 16S rRNA
  source 1..225: mol_type = genomic DNA

SEQ ID NO: 4803 - DNA, 225 bp, unidentified
  misc_feature 1..225: note = bacterial strain Ascusb_64B encodes 16S rRNA
  source 1..225: mol_type = genomic DNA
agagtttgatcatggctcaggacgaacgctggcggcgtgcttaacacatgcaagtcgaacgagacggatagaagcttgcttttagaagtcgagtggcaaacgggtgagtaacgcgtagacaacctgcctctgggatggggacaacagcccgaaagggctgctaataccgaatgaaatggtttcttctcctgaagagatcatgaaagatggcctctaaattatgct

SEQ ID NO: 4804 - DNA, 225 bp, unidentified; identical to SEQ ID NO: 4256
  misc_feature 1..225: note = bacterial strain Ascusb_19281A encodes 16S rRNA
  source 1..225: mol_type = genomic DNA

SEQ ID NO: 4805 - DNA, 225 bp, unidentified; identical to SEQ ID NO: 4773
  misc_feature 1..225: note = bacterial strain Ascusb_957A encodes 16S rRNA
  source 1..225: mol_type = genomic DNA

SEQ ID NO: 4806 - DNA, 225 bp, unidentified
  misc_feature 1..225: note = bacterial strain Ascusb_1665A encodes 16S rRNA
  source 1..225: mol_type = genomic DNA
agagtttgatcctggctcaggacgaacgctggcggcgtgcctaacacatgcaagtcgagcggagatgatctgaagtttactttgggtcgtcttagcggcggacgggtgagtaacgcgtgggcaacctgcctttcacagggggataacacagggaaacttgtgctaataccgcataacacagcgaggtagcattaccttgttgtcaaaggagcaatccggtgatag

SEQ ID NO: 4807 - DNA, 225 bp, unidentified
  misc_feature 1..225: note = bacterial strain Ascusb_761A encodes 16S rRNA
  source 1..225: mol_type = genomic DNA
agagtttgatcatggctcaggacgaacgctggcggcgtgcctaacacatgcaagtcgagcggagaaagttcttcggaactttcttagcggcggacgggtgagtaacacgtgggtaacctgccttatagagggggatagccttccgaaaggaagattaataccgcataacattttcgtttcgcatgagatgaaaatcaaaggagcaatccgctataagatggaccc

SEQ ID NO: 4808 - DNA, 225 bp, unidentified; identical to SEQ ID NO: 4807
  misc_feature 1..225: note = bacterial strain Ascusb_2047A encodes 16S rRNA
  source 1..225: mol_type = genomic DNA

SEQ ID NO: 4809 - DNA, 225 bp, unidentified
  misc_feature 1..225: note = bacterial strain Ascusb_4463A encodes 16S rRNA
  source 1..225: mol_type = genomic DNA
agagtttgatcctggctcaggatgaacgctagctacaggcttaacacatgcaagtcgaggggcagcatgacgatagcttgctattgtcgatggcgaccggcgcacgggtgagtaacgcgtatccaacctgcccattactcaggtatagcccagtgaaaactggattaatccctgatgcggtctcgtgcagacatctaagcgagaccaaagttttcaacggtaatg

SEQ ID NO: 4810 - DNA, 225 bp, unidentified; identical to SEQ ID NO: 4502
  misc_feature 1..225: note = bacterial strain Ascusb_1119A encodes 16S rRNA
  source 1..225: mol_type = genomic DNA

SEQ ID NO: 4811 - DNA, 225 bp, unidentified
  misc_feature 1..225: note = bacterial strain Ascusb_2137A encodes 16S rRNA
  source 1..225: mol_type = genomic DNA
agagtttgatcctggctcaggatgaacgctagctacaggcttaacacatgcaagtcgaggggtaacatgaagaaagcttgctttctttgatgacgaccggcgcacgggtgagtatcgcgtatccaacctgcccataagtagggaatagccttgcgaaagtaagattaatgccctatggtttccgtcaaagacatctgagatggaataaagatttatcgcttatgg

SEQ ID NO: 4812 - DNA, 225 bp, unidentified
  misc_feature 1..225: note = bacterial strain Ascusb_8619A encodes 16S rRNA
  source 1..225: mol_type = genomic DNA
agagtttgatcatggctcaggacgaacgctggcggcgtgcttaacacatgcaagtcgaacgaggcgattgaaagcttgcttttgaaagccgagtggcaaacgggtgagtaacgcgtagacaacctgccgcaaagatggggacaacagtccgaaaggactgctaataccgaatgttgtgcagcttccgcatggaggatgcattaaagatggcctctacttgtaagc

SEQ ID NO: 4813 - DNA, 225 bp, unidentified; identical to SEQ ID NO: 4569
  misc_feature 1..225: note = bacterial strain Ascusb_383B encodes 16S rRNA
  source 1..225: mol_type = genomic DNA

SEQ ID NO: 4814 - DNA, 225 bp, unidentified
  misc_feature 1..225: note = bacterial strain Ascusb_341A encodes 16S rRNA
  source 1..225: mol_type = genomic DNA
agagtttgatcatggctcaggatgaacgccggcggtgtgcctaatacatgcaagtcgaacgcgttggcccaactgattgaacgtgcttgcacggacttgatgttgatttaccagcgagtggcggacgggtgagtaacacgtaggtaacctgccccaaagcgggggataacatttggaaacagatgctaataccgcataacaatttgaatcgcatgattcaaattt

SEQ ID NO: 4815 - DNA, 225 bp, unidentified; identical to SEQ ID NO: 62
  misc_feature 1..225: note = bacterial strain Ascusb_15152A encodes 16S rRNA
  source 1..225: mol_type = genomic DNA

SEQ ID NO: 4816 - DNA, 225 bp, unidentified; identical to SEQ ID NO: 4256
  misc_feature 1..225: note = bacterial strain Ascusb_20167A encodes 16S rRNA
  source 1..225: mol_type = genomic DNA

SEQ ID NO: 4817 - DNA, 225 bp, unidentified
  misc_feature 1..225: note = bacterial strain Ascusb_20150A encodes 16S rRNA
  source 1..225: mol_type = genomic DNA
agagtttgatcatggctcaggatgaacgctggcggcgtgcctaacacatgcaagtcgaacgaagcattgagatcggagattcgtcgaagattttaatgacttagtggcggacgggtgagtaatgtgtgagcaacctgcctttcagagggggacaacagttggaaacgactgctaataccgcataatgttttttaccggcatcggtaaaaaaccaaaggagcaatc

SEQ ID NO: 4818 - DNA, 225 bp, unidentified; identical to SEQ ID NO: 4256
  misc_feature 1..225: note = bacterial strain Ascusb_1125A encodes 16S rRNA
  source 1..225: mol_type = genomic DNA

SEQ ID NO: 4819 - DNA, 225 bp, unidentified; identical to SEQ ID NO: 4256
  misc_feature 1..225: note = bacterial strain Ascusb_14943A encodes 16S rRNA
  source 1..225: mol_type = genomic DNA

SEQ ID NO: 4820 - DNA, 225 bp, unidentified; identical to SEQ ID NO: 4256
  misc_feature 1..225: note = bacterial strain Ascusb_19296A encodes 16S rRNA
  source 1..225: mol_type = genomic DNA

SEQ ID NO: 4821 - DNA, 225 bp, unidentified; identical to SEQ ID NO: 4213
  misc_feature 1..225: note = bacterial strain Ascusb_310B encodes 16S rRNA
  source 1..225: mol_type = genomic DNA

SEQ ID NO: 4822 - DNA, 225 bp, unidentified; identical to SEQ ID NO: 4284
  misc_feature 1..225: note = bacterial strain Ascusb_2633B encodes 16S rRNA
  source 1..225: mol_type = genomic DNA

SEQ ID NO: 4823 - DNA, 225 bp, unidentified; identical to SEQ ID NO: 4284
  misc_feature 1..225: note = bacterial strain Ascusb_8244B encodes 16S rRNA
  source 1..225: mol_type = genomic DNA

SEQ ID NO: 4824 - DNA, 225 bp, unidentified; identical to SEQ ID NO: 4284
  misc_feature 1..225: note = bacterial strain Ascusb_83B encodes 16S rRNA
  source 1..225: mol_type = genomic DNA

SEQ ID NO: 4825 - DNA, 225 bp, unidentified
  misc_feature 1..225: note = bacterial strain Ascusb_2590C encodes 16S rRNA
  source 1..225: mol_type = genomic DNA
agagtttgatcatggctcaggatgaacgctagcgacaggcttaacacatgcaagtcgaggggcagcgcgatggtagcaatactattggcggcgaccggcgcactggtgagtaacacgtatgcgacctgccccggacagggggataaacccgggaaactgggcctaataccccataagtatcgaggatgcatgtccttgatatgaaagatccgtcggtccgggatg

SEQ ID NO: 4826 - DNA, 225 bp, unidentified
  misc_feature 1..225: note = bacterial strain Ascusb_2670A encodes 16S rRNA
  source 1..225: mol_type = genomic DNA
agagtttgatcctggctcaggatgaacgctggcggcgtgcttaacacatgcaagtcgaacgaagcatctttacacgatcccttcggggtgacgaattgatgactgagtggcggacgggtgagtaacgcgtgggaaacctgccctgtaccgggggatagcagttggaaacggctgataataccgcataagcgcacagtaagacatcttaccgtgtgaaaaactccg

SEQ ID NO: 4827 - DNA, 225 bp, unidentified; identical to SEQ ID NO: 4826
  misc_feature 1..225: note = bacterial strain Ascusb_4366A encodes 16S rRNA
  source 1..225: mol_type = genomic DNA

SEQ ID NO: 4828 - DNA, 225 bp, unidentified; identical to SEQ ID NO: 4152
  misc_feature 1..225: note = bacterial strain Ascusb_126B encodes 16S rRNA
  source 1..225: mol_type = genomic DNA

SEQ ID NO: 4829 - DNA, 225 bp, unidentified; identical to SEQ ID NO: 4569
  misc_feature 1..225: note = bacterial strain Ascusb_21056A encodes 16S rRNA
  source 1..225: mol_type = genomic DNA

SEQ ID NO: 4830 - DNA, 225 bp, unidentified; identical to SEQ ID NO: 4569
  misc_feature 1..225: note = bacterial strain Ascusb_4947A encodes 16S rRNA
  source 1..225: mol_type = genomic DNA

SEQ ID NO: 4831 - DNA, 225 bp, unidentified; identical to SEQ ID NO: 4569
  misc_feature 1..225: note = bacterial strain Ascusb_14287A encodes 16S rRNA
  source 1..225: mol_type = genomic DNA

SEQ ID NO: 4832 - DNA, 225 bp, unidentified; identical to SEQ ID NO: 4569
  misc_feature 1..225: note = bacterial strain Ascusb_3313A encodes 16S rRNA
  source 1..225: mol_type = genomic DNA

SEQ ID NO: 4833 - DNA, 225 bp, unidentified
  misc_feature 1..225: note = bacterial strain Ascusb_7687A encodes 16S rRNA
  source 1..225: mol_type = genomic DNA
agagtttgatcatggctcaggatgaacgccggcggtgtgcctaatacatgcaagtcgaacgcgttggcccaattgattgatggtgcttgcacctgatagattttggtcgccaacgagtggcggacgggtgagtaacacgtaggtaacctgcccagaagcgggggacaacatttggaaacagatgctaataccgcataacaacgttgttcgcatgaacaacgctta

SEQ ID NO: 4834 - DNA, 225 bp, unidentified; identical to SEQ ID NO: 4833
  misc_feature 1..225: note = bacterial strain Ascusb_1068B encodes 16S rRNA
  source 1..225: mol_type = genomic DNA

SEQ ID NO: 4835 - DNA, 225 bp, unidentified; identical to SEQ ID NO: 4833
  misc_feature 1..225: note = bacterial strain Ascusb_2103A encodes 16S rRNA
  source 1..225: mol_type = genomic DNA

SEQ ID NO: 4836 - DNA, 225 bp, unidentified; identical to SEQ ID NO: 4152
  misc_feature 1..225: note = bacterial strain Ascusb_5315B encodes 16S rRNA
  source 1..225: mol_type = genomic DNA

SEQ ID NO: 4837 - DNA, 225 bp, unidentified; identical to SEQ ID NO: 4149
  misc_feature 1..225: note = bacterial strain Ascusb_676A encodes 16S rRNA
  source 1..225: mol_type = genomic DNA

SEQ ID NO: 4838 - DNA, 225 bp, unidentified
  misc_feature 1..225: note = bacterial strain Ascusb_9441A encodes 16S rRNA
  source 1..225: mol_type = genomic DNA
agagtttgatcctggctcaggatgaacgctagctacaggcttaacacatgcaagtcgaggggcagcatgatcgaagcttgctttgattgatggcgaccggcgcacgggtgagtaacgcgtatccaaccttccctatagtagagaatagcccggtgaaaatcggattaatgctctatgttattcaatgcggacatctaagttgaatcaaaggtttaccgctatagg

SEQ ID NO: 4839 - DNA, 225 bp, unidentified
  misc_feature 1..225: note = bacterial strain Ascusb_2792B encodes 16S rRNA
  source 1..225: mol_type = genomic DNA
agagtttgatcatggctcaggacgaacgctggcggcgtgcttaacacatgcaagtcgtacgaggcagattttcatcactgaactttaaagagcggactgataaaagtgcttaactttaaggctgagtgatgaaaagatgccgagtggcaaacgggtgagtaacgcgtagacaacctgccgtaaagatggggacaacagttcgaaaggactgctaataccgaatgt

SEQ ID NO: 4840 - DNA, 225 bp, unidentified
  misc_feature 1..225: note = bacterial strain Ascusb_251A encodes 16S rRNA
  source 1..225: mol_type = genomic DNA
agagtttgatcctggctcaggacgaacgctggcggcgtgcctaatacatgcaagtcgagcggacttgatggagagcttgctctcctgatagttagcggcggacgggtgagtaacacgtgggcaacctgcctcaaagtgggggatagccctccgaaaggaggattaataccgcataacattagttttccgcatgaaaaactaatcaaaggagtaatccgctttgag

SEQ ID NO: 4841 - DNA, 225 bp, unidentified
  misc_feature 1..225: note = bacterial strain Ascusb_6655B encodes 16S rRNA
  source 1..225: mol_type = genomic DNA
agagtttgatcatggctcaggatgaacgctggcggcgtgcctaacacatgcaagtcgagcgatgaataaaccgacaaggtttcggccaaggaagtttattcagagcggcggatgggtgaggaacgcgtggggaacctgcctttcaccgggggataccagctggaaacggctgttaataccgcatatgctcacggtgccgcatggcacagggaggaaaactccggt

SEQ ID NO: 4842 - DNA, 225 bp, unidentified
  misc_feature 1..225: note = bacterial strain Ascusb_20912A encodes 16S rRNA
  source 1..225: mol_type = genomic DNA
agagtttgatcctggctcaggacgaacgctggcggcgtgcttaacacatgcaagtcgaacgagacgaattagaagcttgcttttaacgagtcgagtggcaaacgggtgagtaacgcgtagacaacctgccgcaaagatggggacaacagtccgaaaggactgctaataccgaatgttgtatctcctccgcatggaagagatattaaagatggcctctacttgtaa

SEQ ID NO: 4843 - DNA, 225 bp, unidentified
  misc_feature 1..225: note = bacterial strain Ascusb_1536A encodes 16S rRNA
  source 1..225: mol_type = genomic DNA
agagtttgatcatggctcagattgaacgctggcggcaggcctaatacatgcaagtcgaacggtaacatagaaaaagcttgctttttctgatgacgagtggcggacgggtgagtaaagtttgggaagctacctgatagagggggacaacagttggaaacgactgctaataccgcatacagcctgagggtgaaagcagcgatgcgctatcagatgcgcccaaatggg

SEQ ID NO: 4844 - DNA, 225 bp, unidentified
  misc_feature 1..225: note = bacterial strain Ascusb_1244B encodes 16S rRNA
  source 1..225: mol_type = genomic DNA
agagtttgatcatggctcaggacgaacgctggcggcgtgcttaacacatgcaagtcgaacgagacgattttaagcttgcttagatgagtcgagtggcaaacgggtgagtaacgcgtagacaacctgccgcaaagatggggacaacagtccgaaaggactgctaataccgaatgttgtcagtttctcgcatgggagactgattaaagatggcctctacttgtaagc

SEQ ID NO: 4845 - DNA, 225 bp, unidentified
  misc_feature 1..225: note = bacterial strain Ascusb_987A encodes 16S rRNA
  source 1..225: mol_type = genomic DNA
agagtttgatcctggctcaggacgaacgctggcggcgtgcctaatacatgcaagtcgagcgaaccaataagaagcttgctttttgttggttagcggcggacgggtgagtaacacgtgggtaacctgcctgtaagaccgggataactccgggaaaccggtgctaataccggatagattatctttccacctggagagataaggaaagatggcttttgccatcactta

SEQ ID NO: 4846 - DNA, 225 bp, unidentified
  misc_feature 1..225: note = bacterial strain Ascusb_2845A encodes 16S rRNA
  source 1..225: mol_type = genomic DNA
agagtttgatcctggctcaggatgaacgctggcggcgtgcctaatacatgcaagtcgaacgagttttggtcgatgaacggtgcttgcactgtgattcaacttaaaacgagtggcggacgggtgagtaacacgtgggtaacctgcccttaagtgggggataacatttggaaacagatgctaataccgcataaatccaagaaccgcatggttcttggctgaaagatg

SEQ ID NO: 4847 - DNA, 225 bp, unidentified; identical to SEQ ID NO: 4846
  misc_feature 1..225: note = bacterial strain Ascusb_7519A encodes 16S rRNA
  source 1..225: mol_type = genomic DNA

SEQ ID NO: 4848 - DNA, 225 bp, unidentified
  misc_feature 1..225: note = bacterial strain Ascusb_2686A encodes 16S rRNA
  source 1..225: mol_type = genomic DNA
agagtttgatcctggctcaggatgaacgctagctacaggcttaacacatgcaagtcgaggggcagcagatcgaaagcttgcttttgatgctggcgaccggcgcacgggtgagtaacgcgtatccaaccttccctatagtagagaatagcccggcgaaagtcggattaatgctctatgttgtatttagaggacatctgaagaataccaaaggtttaccgctatagg

SEQ ID NO: 4849 - DNA, 225 bp, unidentified
  misc_feature 1..225: note = bacterial strain Ascusb_2786A encodes 16S rRNA
  source 1..225: mol_type = genomic DNA
agagtttgatcctggctcaggacgaacgctggcggcgtgcttaacacatgcaagtcgaacggggcgatttaaaagcttgcttttgatgagcctagtggcaaacgggtgagtaacgcgtaggcaacctgccctcaggatggggacaacggcccgaaaggaccgctaataccgaatgaagtgtcggaatcgcatgatactgataccaaaggcggagcaatccgtcac

SEQ ID NO: 4850 - DNA, 225 bp, unidentified; identical to SEQ ID NO: 4849
  misc_feature 1..225: note = bacterial strain Ascusb_2254A encodes 16S rRNA
  source 1..225: mol_type = genomic DNA

SEQ ID NO: 4851 - DNA, 225 bp, unidentified
  misc_feature 1..225: note = bacterial strain Ascusb_688B encodes 16S rRNA
  source 1..225: mol_type = genomic DNA
agagtttgatcatggctcagattgaacgctggcggcatgctttacacatgcaagtcgaacggcagcacagggagcttgctcctgggtggcgagtggcgcacgggtgagtaatacatcggaacgtgtcctattgtgggggataactgctcgaaagggtggctaataccgcataagacctgagggtgaaagcgggggatcgcaagacctcgcgcaattggagcggcc

SEQ ID NO: 4852 - DNA, 225 bp, unidentified
  misc_feature 1..225: note = bacterial strain Ascusb_3276A encodes 16S rRNA
  source 1..225: mol_type = genomic DNA
agagtttgatcctggctcaggatgaacgctagctacaggcttaacacatgcaagtcgaggggaaacgacagagagtgcttgcactttttgggcgtcgaccggcgaatgggtgagtaacgcgtatccaacctgcccttgactgagggatagcccagtgaaaactgaattaatacctcatgtactcctcagacggcatcagacgaggagcaaagattaatcggtcaa

SEQ ID NO: 4853 - DNA, 225 bp, unidentified
  misc_feature 1..225: note = bacterial strain Ascusb_3689B encodes 16S rRNA
  source 1..225: mol_type = genomic DNA
agagtttgatcctggctcaggatgaacgctggcggcgtgcctaacacatgcaagtcgaacggaacttacaagcggaagttttcggatggaagcttataagtttagtggcggacgggtgagtaacgcgtgagcaatctacctctcagtgggggataacacatcgaaaggtgtgctaataccgcataatataacgggatcgcatggttctgttatcaaagatttatt

SEQ ID NO: 4854 - DNA, 225 bp, unidentified; identical to SEQ ID NO: 4477
  misc_feature 1..225: note = bacterial strain Ascusb_321A encodes 16S rRNA
  source 1..225: mol_type = genomic DNA

SEQ ID NO: 4855 - DNA, 225 bp, unidentified
  misc_feature 1..225: note = bacterial strain Ascusb_16972A encodes 16S rRNA
  source 1..225: mol_type = genomic DNA
agagtttgatcctggctcaggatgaacgctagctacaggcttaacacatgcaagtcgaggggcatcattatcggagcttgctttgatagatggcgaccggcgcacgggtgagtaacgcgtatccaaccttccccttagtagggcacagcccggcgaaagtcggattaattccctatgttgtttgatgctgacatcaaaatcaaaccaaagattcatcgctaaggg

SEQ ID NO: 4856 - DNA, 225 bp, unidentified; identical to SEQ ID NO: 4855
  misc_feature 1..225: note = bacterial strain Ascusb_11080A encodes 16S rRNA
  source 1..225: mol_type = genomic DNA

SEQ ID NO: 4857 - DNA, 225 bp, unidentified
  misc_feature 1..225: note = bacterial strain Ascusb_1794B encodes 16S rRNA
  source 1..225: mol_type = genomic DNA
agagtttgatcctggctcaggacgaacgctggcggcgtgcttaacacatgcaagtcgagcgatgaagctccttcgggagtggaatagcggcggacgggtgagtaacacgtgggtaacctgcctcatagaggggaatagcctttcgaaaggaagattaataccgcataagattgtagtgccgcatggcatagcaattaaaggagtaatccgctatgagatggaccc

SEQ ID NO: 4858 - DNA, 225 bp, unidentified
  misc_feature 1..225: note = bacterial strain Ascusb_51B encodes 16S rRNA
  source 1..225: mol_type = genomic DNA
agagtttgatcatggctcaggacgaacgctggcggcgtgcttaacacatgcaagtcgaacgagaggacatggaaagcttgctttttatggaatcgagtggcaaacgggtgagtaacgcgtaagcaacctgccctgcagatggggacaacagctggaaacggctgctaataccgaatacgaagcagctcccgcatgggggcagcttgaaaggatggcctctgaata

SEQ ID NO: 4859 - DNA, 225 bp, unidentified
  misc_feature 1..225: note = bacterial strain Ascusb_5859A encodes 16S rRNA
  source 1..225: mol_type = genomic DNA
agagtttgatcatggctcaggacgaacgctggcggcgtgcttaacacatgcaagtcgaacgagaggaattggaaagcttgctttttaatgaatcgagtggcaaacgggtgagtaacacgtaaacaacctgccttcaggatggggacaacagacggaaacgactgctaataccgaataccttccaagagccgcatgacagttggaagaaagggtggcctctacctg

SEQ ID NO: 4860 - DNA, 225 bp, unidentified
  misc_feature 1..225: note = bacterial strain Ascusb_3978A encodes 16S rRNA
  source 1..225: mol_type = genomic DNA
agagtttgatcctggctcaggatgaacgccggcggtgtgcctaatacatgcaagtcgaacgcgttggcccaattgattgatggtgcttgcacctgattgattttggtcgccaacgagtggcggacgggtgagtaacacgtaggtaacctgccccaaagcgggggataacatttggaaacagatgctaataccgcataacaatttgaatcgcatgattcaaattta

SEQ ID NO: 4861 - DNA, 225 bp, unidentified
  misc_feature 1..225: note = bacterial strain Ascusb_917A encodes 16S rRNA
  source 1..225: mol_type = genomic DNA
agagtttgatcctggctcaggacgaacgctggcggcgtgcttaacacatgcaagtcgaacggagaatttgcttcggtgaattcttagtggcgaacgggtgagtaacgcgtaggcaacctgccctctggttggggacaacattccgaaagggatgctaataccgaatgtgctcacacctccgcatggaggtgtgaggaaagatggcctctacttgtaagctatcgc

SEQ ID NO: 4862 - DNA, 225 bp, unidentified
  misc_feature 1..225: note = bacterial strain Ascusb_4364A encodes 16S rRNA
  source 1..225: mol_type = genomic DNA
agagtttgatcatggctcaggacgaacgctggcggcgtgcttaacacatgcaagtcgaacgagacgagttttcaacactgaatgcttaataaagcaacttgaagcgtcattgcgacgaagtcgcaatttcacttttataaagtgcttaactaagaattgagcattgagtgttgaaaatgagtcgagtggcaaacgggtgagtaacgcgtagacaacctgccgcaa

SEQ ID NO: 4863 - DNA, 225 bp, unidentified
  misc_feature 1..225: note = bacterial strain Ascusb_1906A encodes 16S rRNA
  source 1..225: mol_type = genomic DNA
agagtttgatcatggctcaggacgaacgctggcggcgtgcctaacacatgcaagtcgagcggagttaattgaaagcttgcttttgattaacttagcggcggacgggtgagtaacgcgtgggcaacctgcctgttacagggggataacacagggaaacttgtgctaataccgcataacacaacgagaaagcattttcttgttgtcaaaggagcaatccggtaatag

SEQ ID NO: 4864 - DNA, 225 bp, unidentified
  misc_feature 1..225: note = bacterial strain Ascusb_4840A encodes 16S rRNA
  source 1..225: mol_type = genomic DNA
agagtttgatcctggctcaggacgaacgctggcggcgtgcttaacacatgcaagtcgaacgaggtgattgaaagcttgcttttgagaaccgagtggcaaacgggtgagtaacgcgtagacaacctgccgcaaagatggggacaacagtccgaaaggactgctaataccgaatgttgtgcaacctccgcatgggggatgcattaaagatggcctctacttgtaagc

SEQ ID NO: 4865 - DNA, 225 bp, unidentified
  misc_feature 1..225: note = bacterial strain Ascusb_351A encodes 16S rRNA
  source 1..225: mol_type = genomic DNA
agagtttgatcctggctcaggatgaacgctagcgataggcctaacacatgcaagtcgaggggcagcatagagtagcaatactttgatggcgaccggcgcacgggtgagtaacacgtatgcaacctacctacatcaggggaataacccggagaaattcggactaataccgcataatacagggatgccgcatggcaatatttgttaaagatttatcggatgtagatg

SEQ ID NO: 4866 - DNA, 225 bp, unidentified
  misc_feature 1..225: note = bacterial strain Ascusb_13271B encodes 16S rRNA
  source 1..225: mol_type = genomic DNA
agagtttgatcatggctcaggatgaacgctggcggcgtgcctaacacatgcaagtcgagcgagggagtaccttcgggtacaaactagcggcggacgggtgagtaacacgtgggtaacctgcctcatagagggggatagccttccgaaagggagattaataccgcatattattatgaattcgcatgaatttataatgaaaggagcaatccgctatgagatggaccc

SEQ ID NO: 4867 - DNA, 225 bp, unidentified
  misc_feature 1..225: note = bacterial strain Ascusb_2612B encodes 16S rRNA
  source 1..225: mol_type = genomic DNA
agagtttgatcctggctcaggacgaacgctggcggcgtgcctaatacatgcaagtcgtgcggaccttttaaaagcttgcttttaaaaggttagcggcggacgggtgagtaacacgtgggcaacctgcctgtaagatcgggataacgccgggaaaccggggctaataccggatagtttttttctccgcatggaggaaaaaggaaagacggcttttgctgtcactta

SEQ ID NO: 4868 - DNA, 225 bp, unidentified
  misc_feature 1..225: note = bacterial strain Ascusb_2541B encodes 16S rRNA
  source 1..225: mol_type = genomic DNA
agagtttgatcatggctcaggatgaacgctggcggcgtgcctaatacatgcaagtcgagcgagaaattctttaatgaatcttcggaggatttagagaatggacagcggcggacgggtgagtaacgcgtaggcaacctgcctcacacagagggatagccattggaaacgatgaataatacctcatgaaaccggaacaacacatgttgatccggtcaaagatttatc

SEQ ID NO: 4869 - DNA, 225 bp, unidentified
  misc_feature 1..225: note = bacterial strain Ascusb_4150A encodes 16S rRNA
  source 1..225: mol_type = genomic DNA
agagtttgatcctggctcaggacgaacgctggcggcgtgcttaacacatgcaagtcgaacgaggcgattgaaagcttgcttttgaaagccgagtggcaaacgggtgagtaacgcgtagacaacctgccgcaaagatggggacaacagtccgaaaggactgctaataccgaatgttgtgcaacttccgcatgggggatgcattaaagatggcctctacttgtaagc

SEQ ID NO: 4870 - DNA, 225 bp, unidentified
  misc_feature 1..225: note = bacterial strain Ascusb_5667A encodes 16S rRNA
  source 1..225: mol_type = genomic DNA
agagtttgatcatggctcaggataaacgctggcggcgcacataagacatgcaagtcgaacggacttaattcgttagtttactaatggaagcggttagtggcggactggtgagtaacgcgtaagcaacctgcctattagtagggaataacagtgagaaatcattgctaataccgtataagctggaaacatcgcatgatgtagtcagaaaaggagcaattcgctaat

SEQ ID NO: 4871 - DNA, 225 bp, unidentified
  misc_feature 1..225: note = bacterial strain Ascusb_2173A encodes 16S rRNA
  source 1..225: mol_type = genomic DNA
agagtttgatcctggctcagattgaacgctggcggcatgccttacacatgcaagtcgaacggcagcatgatctagcttgctagattgatggcgagtggcgaacgggtgagtaatacatcggaacgtgccctgtagtgggggataactagtcgaaagattagctaataccgcatacgacctgagggtgaaagtgggggaccgcaaggcctcatgctataggagcgg

SEQ ID NO: 4872 - DNA, 225 bp, unidentified
  misc_feature 1..225: note = bacterial strain Ascusb_108A encodes 16S rRNA
  source 1..225: mol_type = genomic DNA
agagtttgatcctggctcaggatgaacgctggcggcgtgcttaacacatgcaagtcgaacgaagcaacttattacgatcccttcggggtgacgatttgttgactgagtggcggacgggtgagtaacgcgtgggtaacctaccttgtacagggggacaacagttggaaacgactgctaataccgcataagcgcacggtatcgcatgatacagtgtgaaaagttttt

SEQ ID NO: 4873 - DNA, 225 bp, unidentified
  misc_feature 1..225: note = bacterial strain Ascusb_1366A encodes 16S rRNA
  source 1..225: mol_type = genomic DNA
agagtttgatcctggctcaggatgaacgctagctacaggcttaacacatgcaagtcgaggggcagcataatcgaagcttgctttgattgatggcgaccggcgcacgggtgagtaacgcgtatccaaccttccccttagtagagaatagcccggcgaaagtcgaattaatactctatgttgttcgttgcgagcattcaagatgaaccaaaggtttaccgctaaggg

SEQ ID NO: 4874 - DNA, 225 bp, unidentified; identical to SEQ ID NO: 4860
  misc_feature 1..225: note = bacterial strain Ascusb_7156A encodes 16S rRNA
  source 1..225: mol_type = genomic DNA

SEQ ID NO: 4875 - DNA, 225 bp, unidentified; identical to SEQ ID NO: 4488
  misc_feature 1..225: note = bacterial strain Ascusb_453B encodes 16S rRNA
  source 1..225: mol_type = genomic DNA

SEQ ID NO: 4876 - DNA, 225 bp, unidentified
  misc_feature 1..225: note = bacterial strain Ascusb_4270A encodes 16S rRNA
  source 1..225: mol_type = genomic DNA
agagtttgatcctggctcaggatgaacgctggcggcgtgcctaacacatgcaagtcgagcgatgaacggatggacaaggcttcggccaaggaaatctgttcagagcggcggatgggtgaggaacgcgtggggaacctgcctttcaccgggggataccagctggaaacggctgttaataccgcatatgctcacagtgccgcatggcacagggaggaaaactccggt

SEQ ID NO: 4877 - DNA, 225 bp, unidentified
  misc_feature 1..225: note = bacterial strain Ascusb_2704A encodes 16S rRNA
  source 1..225: mol_type = genomic DNA
agagtttgatcatggctcaggatgaacgctggcggcgtgcctaatacatgcaagtcgtacggaccgcttcggcggtcagtggcgaacgggtgaggacaacataggtaacctgcccctccgagggggacaacagctggaaacggctgctaagaccgcatagacgtgcaggaggcatctcctgcacgctaaatggcccttcaaggccagcggagggatggacctatg

SEQ ID NO: 4878 - DNA, 225 bp, unidentified
  misc_feature 1..225: note = bacterial strain Ascusb_4177A encodes 16S rRNA
  source 1..225: mol_type = genomic DNA
agagtttgatcatggctcaggacgaacgctggcggcgtgcctaatacatgcaagtagaacgctgaagactttagcttgctagagttggaagagttgcgaacgggtgagtaacgcgtaggtaacctgcctattagcgggggataactattggaaacgatagctaataccgcataatagtgtttaacacatgttagagacttgaaagatgcaattgcatcactagta

SEQ ID NO: 4879 - DNA, 225 bp, unidentified; identical to SEQ ID NO: 4609
  misc_feature 1..225: note = bacterial strain Ascusb_2710A encodes 16S rRNA
  source 1..225: mol_type = genomic DNA

SEQ ID NO: 4880 - DNA, 225 bp, unidentified; identical to SEQ ID NO: 4609
  misc_feature 1..225: note = bacterial strain Ascusb_5711A encodes 16S rRNA
  source 1..225: mol_type = genomic DNA

SEQ ID NO: 4881 - DNA, 225 bp, unidentified
  misc_feature 1..225: note = bacterial strain Ascusb_3606B encodes 16S rRNA
  source 1..225: mol_type = genomic DNA
agagtttgatcatggctcaggacgaacgctggcggcgtgcttaacacatgcaagtcgagcgaggaaattccttcgggagtttcctagcggcggacgggtgagtaacacgtgggcaacctgcctgatagagggggatagcctcccgaaagggagattaataccgcataaagtcaaatgaaggcatcttcaaatgaccaaaggagtaatccgctatcagatgggccc

SEQ ID NO: 4882 - DNA, 225 bp, unidentified
  misc_feature 1..225: note = bacterial strain Ascusb_20052B encodes 16S rRNA
  source 1..225: mol_type = genomic DNA
agagtttgatcctggctcaggatgaacgctagctacaggcttaacacatgcaagtcgaggggaaacgacaaagagtgcttgcacactttgggcgtcgaccggcgaatgggtgagtaacgcgtatccaacctgcccttgactgagggatagcccagtgaaaactgaattaatacctcatgttctcctccgacggcatcagacgaggagtaaagatttatcggtcaa

SEQ ID NO: 4883 - DNA, 225 bp, unidentified; identical to SEQ ID NO: 2099
  misc_feature 1..225: note = bacterial strain Ascusb_17652A encodes 16S rRNA
  source 1..225: mol_type = genomic DNA

SEQ ID NO: 4884 - DNA, 225 bp, unidentified; identical to SEQ ID NO: 2266
  misc_feature 1..225: note = bacterial strain Ascusb_318A encodes 16S rRNA
  source 1..225: mol_type = genomic DNA

SEQ ID NO: 4885 - DNA, 225 bp, unidentified
  misc_feature 1..225: note = bacterial strain Ascusb_2516A encodes 16S rRNA
  source 1..225: mol_type = genomic DNA
agagtttgatcatggctcaggatgaacgctagctacaggcttaacacatgcaagtcgaggggcagcatttttctagcaatagaagagatggcgaccggcgcacgggtgagtaacacgtatccaacctgccgataactctggaatagcctttcgaaagaaagattaataccggatagtatacgaatatcgcatgatatttttattaaagaatttcggttatcgatg

SEQ ID NO: 4886 - DNA, 225 bp, unidentified
  misc_feature 1..225: note = bacterial strain Ascusb_7077A encodes 16S rRNA
  source 1..225: mol_type = genomic DNA
agagtttgatcatggctcaggatgaacgctggcggcgtgcctaatacatgcaagtcgaacgagttttggtcgatgaacggtgcttgcactgtgattcaacttaaaacgagtggcggacgggtgagtaacacgtgggtaacctgcccttaagtgggggataacatttggaaacagatgctaataccgcataaatccaagaaccgcatggttcttggctgaaagatg

SEQ ID NO: 4887 - DNA, 225 bp, unidentified
  misc_feature 1..225: note = bacterial strain Ascusb_5136B encodes 16S rRNA
  source 1..225: mol_type = genomic DNA
agagtttgatcctggctcaggatgaacgctagctacaggcttaacacatgcaagtcgaggggcagcattatcgaagcttgctttgatagatggcgaccggcgcacgggtgagtaacgcgtatccaaccttccccatagtagggcatagcccgtagaaatgcggattaataccctatgtattccgaggatgacatctgattcggaacaaaggttcaccgctatggg

SEQ ID NO: 4888 - DNA, 225 bp, unidentified
  misc_feature 1..225: note = bacterial strain Ascusb_156A encodes 16S rRNA
  source 1..225: mol_type = genomic DNA
agagtttgatcatggctcaggacgaacgctggcggcgtgcttaacacatgcaagtcgagcgagggagtaccttcgggtacaacctagcggcggacgggtgagtaacacgtgggcaacctgccttgtagtgggggatagccctccgaaaggaggattaataccgcataacatcattttatcgcatggtagaatgatcaaaggagtaatccgctacaagatgggccc

SEQ ID NO: 4889 - DNA, 225 bp, unidentified
  misc_feature 1..225: note = bacterial strain Ascusb_1101A encodes 16S rRNA
  source 1..225: mol_type = genomic DNA
agagtttgatcatggctcaggacgaacgctggcggcgtgcttaacacatgcaagtcgaacggggcgatttaaaagcttgcttttgatgagcctagtggcaaacgggtgagtaacgcgtaggcaacctgccctcaggatggggacaacggcccgaaaggaccgctaataccgaatgacgtatcgggatcgcatgatactgataccaaaggcggagcaatccgtcac

SEQ ID NO: 4890 - DNA, 225 bp, unidentified; identical to SEQ ID NO: 4591
  misc_feature 1..225: note = bacterial strain Ascusb_141A encodes 16S rRNA
  source 1..225: mol_type = genomic DNA

SEQ ID NO: 4891 - DNA, 225 bp, unidentified
  misc_feature 1..225: note = bacterial strain Ascusb_12866A encodes 16S rRNA
  source 1..225: mol_type = genomic DNA
agagtttgatcctggctcaggatgaacgctggcggcgtgcttaacacatgcaagtcgagcgagaaatcgcggaaggaagcttcggtagaattctgtgatggaaagcggcggacgggtgagtaacgcgtgggaaacctgcccttgacagggggacagccgagggaaacttcgattaataccccataacgcagagagaccgcatggtcattctgccaaagaattatc

SEQ ID NO: 4892 - DNA, 225 bp, unidentified
  misc_feature 1..225: note = bacterial strain Ascusb_1702A encodes 16S rRNA
  source 1..225: mol_type = genomic DNA
agagtttgatcatggctcagattgaacgctggcggcaggcctaacacatgcaagtcgaacggtaacagaaagcagcttgctgctttgctgacgagtggcggacgggtgagtaatgtctgggaaactgcctgatggagggggataactactggaaacggtagctaataccgcataacgtcgcaagaccaaagagggggaccttcgggcctcttgccatcggatgtg

SEQ ID NO: 4893 - DNA, 225 bp, unidentified
  misc_feature 1..225: note = bacterial strain Ascusb_1890A encodes 16S rRNA
  source 1..225: mol_type = genomic DNA
agagtttgatcctggctcaggatgaacgctggcggcgtgcctaatacatgcaagtcgaacgctttgtggttcaactgatttgaagagcttgctcagatatgacgatggacattgcaaagagtggcgaacgggtgagtaacacgtgggaaacctacctcttagcaggggataacatttggaaacagatgctaataccgtataacaatgacaaccgcatggttgtta

SEQ ID NO: 4894 - DNA, 225 bp, unidentified; identical to SEQ ID NO: 2092
  misc_feature 1..225: note = bacterial strain Ascusb_13587A encodes 16S rRNA
  source 1..225: mol_type = genomic DNA

SEQ ID NO: 4895 - DNA, 225 bp, unidentified; identical to SEQ ID NO: 2092
  misc_feature 1..225: note = bacterial strain Ascusb_20566A encodes 16S rRNA
  source 1..225: mol_type = genomic DNA

SEQ ID NO: 4896 - DNA, 225 bp, unidentified
  misc_feature 1..225: note = bacterial strain Ascusb_223A encodes 16S rRNA
  source 1..225: mol_type = genomic DNA
agagtttgatcatggctcaggatgaacgccggcggtgtgcctaatacatgcaagtcgaacgcgttggcccgattgattgatggtgcttgcacctgattgattttggtcgccaacgagtggcggacgggtgagtaacacgtaggtaacctgcccagaagcgggggacaacatttggaaacagatgctaataccgcataacaacgttgttcgcatgaacaacgctta

SEQ ID NO: 4897 - DNA, 225 bp, unidentified; identical to SEQ ID NO: 4896
  misc_feature 1..225: note = bacterial strain Ascusb_198B encodes 16S rRNA
  source 1..225: mol_type = genomic DNA

SEQ ID NO: 4898 - DNA, 225 bp, unidentified; identical to SEQ ID NO: 4896
  misc_feature 1..225: note = bacterial strain Ascusb_1661B encodes 16S rRNA
  source 1..225: mol_type = genomic DNA

SEQ ID NO: 4899 - DNA, 225 bp, unidentified; identical to SEQ ID NO: 4889
  misc_feature 1..225: note = bacterial strain Ascusb_300A encodes 16S rRNA
  source 1..225: mol_type = genomic DNA

SEQ ID NO: 4900 - DNA, 225 bp, unidentified; identical to SEQ ID NO: 4889
  misc_feature 1..225: note = bacterial strain Ascusb_813B encodes 16S rRNA
  source 1..225: mol_type = genomic DNA

SEQ ID NO: 4901 - DNA, 225 bp, unidentified; identical to SEQ ID NO: 4889
  misc_feature 1..225: note = bacterial strain Ascusb_3757A encodes 16S rRNA
  source 1..225: mol_type = genomic DNA

SEQ ID NO: 4902 - DNA, 225 bp, unidentified
  misc_feature 1..225: note = bacterial strain Ascusb_4971B encodes 16S rRNA
  source 1..225: mol_type = genomic DNA
agagtttgatcatggctcaggatgaacgctggcggcgtgcttaacacatgcaagtcgagcgagaaatcgcggaaggaagcttcggtagaattctgtgatggaaagcggcggacgggtgagtaacgcgtgggaaacctgcccttgacagggggacagccgagggaaacttcgattaataccccataacgcagagagaccgcatggtcattctgccaaagaattatc

SEQ ID NO: 4903 - DNA, 225 bp, unidentified; identical to SEQ ID NO: 4889
  misc_feature 1..225: note = bacterial strain Ascusb_1179B encodes 16S rRNA
  source 1..225: mol_type = genomic DNA

SEQ ID NO: 4904 - DNA, 225 bp, unidentified
  misc_feature 1..225: note = bacterial strain Ascusb_7150A encodes 16S rRNA
  source 1..225: mol_type = genomic DNA
agagtttgatcatggctcaggatgaacgctagctacaggcttaacacatgcaagtcgaggggcagcatggtcttagcttgctaagattgatggcgaccggcgcacgggtgagtaacgcgtatccaaccttccctatagtaggggatagcccgtagaaatgcggattaataccctatgttgtatttcgatgacatctgacgaataccaaaggttcaccgctatagg

SEQ ID NO: 4905 - DNA, 225 bp, unidentified
  misc_feature 1..225: note = bacterial strain Ascusb_3125A encodes 16S rRNA
  source 1..225: mol_type = genomic DNA
agagtttgatcctggctcaggatgaacgctagcgacaggcttaacacatgcaagtcgaggggcagcgcggaggtagcaatacttctggcggcgaccggcgcactggtgagtaacacgtatgcgacctgccccggacagggggataaacccgggaaactgggcctaataccccataagtatcgaggatgcatgtccttgatatgaaagatccgtcggtccgggatg

SEQ ID NO: 4906 - DNA, 225 bp, unidentified; identical to SEQ ID NO: 4033
  misc_feature 1..225: note = bacterial strain Ascusb_894A encodes 16S rRNA
  source 1..225: mol_type = genomic DNA

SEQ ID NO: 4907 - DNA, 225 bp, unidentified; identical to SEQ ID NO: 4694
  misc_feature 1..225: note = bacterial strain Ascusb_804B encodes 16S rRNA
  source 1..225: mol_type = genomic DNA

SEQ ID NO: 4908 - DNA, 225 bp, unidentified; identical to SEQ ID NO: 4694
  misc_feature 1..225: note = bacterial strain Ascusb_668A encodes 16S rRNA
  source 1..225: mol_type = genomic DNA

SEQ ID NO: 4909 - DNA, 225 bp, unidentified; identical to SEQ ID NO: 4694
  misc_feature 1..225: note = bacterial strain Ascusb_10267A encodes 16S rRNA
  source 1..225: mol_type = genomic DNA

SEQ ID NO: 4910 - DNA, 225 bp, unidentified; identical to SEQ ID NO: 4694
  misc_feature 1..225: note = bacterial strain Ascusb_2188B encodes 16S rRNA
  source 1..225: mol_type = genomic DNA

SEQ ID NO: 4911 - DNA, 225 bp, unidentified
  misc_feature 1..225: note = bacterial strain Ascusb_1785A encodes 16S rRNA
  source 1..225: mol_type = genomic DNA
agagtttgatcatggctcaggacgaacgctggcggcgtgcctaacacatgcaagtcgagcgggagacttcggtctctagcggcggacgggtgagtaacacgtgggtaacctgccttagtgagggggatagcctcccgaaagggagattaataccgcataacattgcgatatcgcatgatattgtaattaaaggagtaatccgcactaagatggacccgcggcgca

SEQ ID NO: 4912 - DNA, 225 bp, unidentified
  misc_feature 1..225: note = bacterial strain Ascusb_372A encodes 16S rRNA
  source 1..225: mol_type = genomic DNA
agagtttgatcctggctcaggacgaacgctggcggcgtgcttaacacatgcaagtcgagcgatgaagctccttcgggagtggattagcggcggacgggtgagtaacacgtgggtaacctgcctcatagaggggaatagcctttcgaaaggaagattaataccgcatatggtagctttatcgcatggtagtgctattaaaggagtaatccgctatgagatggaccc

SEQ ID NO: 4913 - DNA, 225 bp, unidentified
  misc_feature 1..225: note = bacterial strain Ascusb_1007A encodes 16S rRNA
  source 1..225: mol_type = genomic DNA
agagtttgatcatggctcaggacgaacgctggcggcgtgcttaacacatgcaagtcgaacgaggtgattgaaagcttgcttttgagaaccgagtggcaaacgggtgagtaacgcgtagacaacctgccgcaaagatggggacaacagtccgaaaggactgctaataccgaatgttgtcagtttctcgcatgggagactgattaaagatggcctctacttgtaagc

SEQ ID NO: 4914 - DNA, 225 bp, unidentified
  misc_feature 1..225: note = bacterial strain Ascusb_1212A encodes 16S rRNA
  source 1..225: mol_type = genomic DNA
agagtttgatcctggctcagattgaacgctggcggcaggcctaacacatgcaagtcgagcggcagcggaaagtagcttgctactttgccggcgagcggcggacgggtgagtaatgtctgggaaactgcctgatggagggggataactactggaaacggtagctaataccgcataacgtcgcaagaccaaagagggggaccttcgggcctcttgccatcagatgtg

SEQ ID NO: 4915 - DNA, 225 bp, unidentified; identical to SEQ ID NO: 4671
  misc_feature 1..225: note = bacterial strain Ascusb_1476A encodes 16S rRNA
  source 1..225: mol_type = genomic DNA

SEQ ID NO: 4916 - DNA, 225 bp, unidentified
  misc_feature 1..225: note = bacterial strain Ascusb_5237A encodes 16S rRNA
  source 1..225: mol_type = genomic DNA
agagtttgatcctggctcaggatgaacgctagctacaggcttaacacatgcaagtcgtggggcagcatgggggttgcttgcaatccctgatggcgaccggcgcacgggtgagtaacgcgtatccaacctggcccatagtagggaatagcccggcgaaagtcggattaatgccctatgttctcctttgatggcatctgacgaggagcaaagattcatcgctatggg

SEQ ID NO: 4917 - DNA, 225 bp, unidentified
  misc_feature 1..225: note = bacterial strain Ascusb_3521A encodes 16S rRNA
  source 1..225: mol_type = genomic DNA
agagtttgatcctggctcaggatgaacgctagctacaggcttaacacatgcaagtcgaggggcagcatatcgaaagcttgcttttgatgatggcgaccggcgcacgggtgagtaacgcgtatccaaccttccctatactagaggatagcccggcgaaagtcggattaatactctatgttcttcgtagaagacatctgaaatgaagcaaaggtttaccggtatagg

SEQ ID NO: 4918 - DNA, 225 bp, unidentified; identical to SEQ ID NO: 4916
  misc_feature 1..225: note = bacterial strain Ascusb_3379A encodes 16S rRNA
  source 1..225: mol_type = genomic DNA

SEQ ID NO: 4919 - DNA, 225 bp, unidentified; identical to SEQ ID NO: 2055
  misc_feature 1..225: note = bacterial strain Ascusb_466A encodes 16S rRNA
  source 1..225: mol_type = genomic DNA

SEQ ID NO: 4920 - DNA, 225 bp, unidentified; identical to SEQ ID NO: 4502
  misc_feature 1..225: note = bacterial strain Ascusb_6159A encodes 16S rRNA
  source 1..225: mol_type = genomic DNA

SEQ ID NO: 4921 - DNA, 225 bp, unidentified
  misc_feature 1..225: note = bacterial strain Ascusb_299A encodes 16S rRNA
  source 1..225: mol_type = genomic DNA
agagtttgatcatggctcaggacgaacgctggcggcgtgcttaacacatgcaagtcgaacgaggtgattgaaagcttgcttttgagaaccgagtggcaaacgggtgagtaacgcgtagacaacctgccgcaaagatggggacaacagtccgaaaggactgctaataccgaatgttgtcagtttctcgcatgagagactgattaaagatggcctctacttgtaagc

SEQ ID NO: 4922 - DNA, 225 bp, unidentified; identical to SEQ ID NO: 4921
  misc_feature 1..225: note = bacterial strain Ascusb_346A encodes 16S rRNA
  source 1..225: mol_type = genomic DNA

SEQ ID NO: 4923 - DNA, 225 bp, unidentified
  misc_feature 1..225: note = bacterial strain Ascusb_2179B encodes 16S rRNA
  source 1..225: mol_type = genomic DNA
agagtttgatcctggctcaggacgaacgctggcggcgtgcctaatacatgcaagtggaacgcatgattgataccgtagcttgctacaccattaatcatgagtcgcgaacgggtgagtaacgcgtaggtaacctgcctactagcgggggataactattggaaacgatagctaataccgcataaaaggatttaacccatgttaaaactttgaaagaagcaagagctt

SEQ ID NO: 4924 - DNA, 225 bp, unidentified
  misc_feature 1..225: note = bacterial strain Ascusb_4208A encodes 16S rRNA
  source 1..225: mol_type = genomic DNA
agagtttgatcctggctcaggatgaacgctggcggcgtgcctaacacatgcaagtcgagcgagggagcaccttcgggtacaaactagcggcggacgggtgagtaacacgtgggtaacctgcctcatagagggggatagccttccgaaagggagattaataccgcatattattatgaattcgcatgaatttataatgaaaggagtaatccgctatgagatggaccc

SEQ ID NO: 4925 - DNA, 225 bp, unidentified; identical to SEQ ID NO: 4148
  misc_feature 1..225: note = bacterial strain Ascusb_9477A encodes 16S rRNA
  source 1..225: mol_type = genomic DNA

SEQ ID NO: 4926 - DNA, 225 bp, unidentified; identical to SEQ ID NO: 4148
  misc_feature 1..225: note = bacterial strain Ascusb_4760A encodes 16S rRNA
  source 1..225: mol_type = genomic DNA

SEQ ID NO: 4927 - DNA, 225 bp, unidentified
  misc_feature 1..225: note = bacterial strain Ascusb_1532A encodes 16S rRNA
  source 1..225: mol_type = genomic DNA
agagtttgatcctggctcaggacgaacgctggcggcgtgcttaacacatgcaagtcgagcgatgaaattccttcgggaatagattagcggcggacgggtgagtaacacgtgggtaacctgcctcatagaggggaatagcctttcgaaaggaagattaataccgcataagattgtagtgtcgcatggcatagcaattaaaggagtaatccgctatgagatggaccc

SEQ ID NO: 4928 - DNA, 225 bp, unidentified; identical to SEQ ID NO: 4917
  misc_feature 1..225: note = bacterial strain Ascusb_7836A encodes 16S rRNA
  source 1..225: mol_type = genomic DNA

SEQ ID NO: 4929 - DNA, 225 bp, unidentified
  misc_feature 1..225: note = bacterial strain Ascusb_5587A encodes 16S rRNA
  source 1..225: mol_type = genomic DNA
agagtttgatcatggctcaggacgaacgctggcggcgtgcttaacacatgcaagtcgagcgatgaaatcccttcggggatggattagcggcggacgggtgagtaacacgtgggcaacctgcctcaaagtgggggatagccttccgaaaggaagattaataccgcataacattagtatttcacatgaagtactaattaaaggagtaatccgctttgagatgggccc

SEQ ID NO: 4930 - DNA, 225 bp, unidentified; identical to SEQ ID NO: 3106
  misc_feature 1..225: note = bacterial strain Ascusb_2341A encodes 16S rRNA
  source 1..225: mol_type = genomic DNA

SEQ ID NO: 4931 - DNA, 225 bp, unidentified; identical to SEQ ID NO: 4929
  misc_feature 1..225: note = bacterial strain Ascusb_6424A encodes 16S rRNA
  source 1..225: mol_type = genomic DNA

SEQ ID NO: 4932 - DNA, 225 bp, unidentified; identical to SEQ ID NO: 2052
  misc_feature 1..225: note = bacterial strain Ascusb_1079B encodes 16S rRNA
  source 1..225: mol_type = genomic DNA

SEQ ID NO: 4933 - DNA, 225 bp, unidentified; identical to SEQ ID NO: 4790
  misc_feature 1..225: note = bacterial strain Ascusb_9544A encodes 16S rRNA
  source 1..225: mol_type = genomic DNA

SEQ ID NO: 4934 - DNA, 225 bp, unidentified; identical to SEQ ID NO: 4649
  misc_feature 1..225: note = bacterial strain Ascusb_5179A encodes 16S rRNA
  source 1..225: mol_type = genomic DNA

SEQ ID NO: 4935 - DNA, 225 bp, unidentified
  misc_feature 1..225: note = bacterial strain Ascusb_295B encodes 16S rRNA
  source 1..225: mol_type = genomic DNA
agagtttgatcctggctcaggatgaacgctggcggcgtgcctaatacatgcaagtcgagcgagaaattctttaatgaatcttcggaggatttaaagaatggacagcggcggacgggtgagtaacgcgtaggcaacctgcctcacacagagggatagccattggaaacgatgaataatacctcatgaaaccggaacaacacatgttgatccggtcaaagatttatc

SEQ ID NO: 4936 - DNA, 225 bp, unidentified; identical to SEQ ID NO: 4233
  misc_feature 1..225: note = bacterial strain Ascusb_4081A encodes 16S rRNA
  source 1..225: mol_type = genomic DNA

SEQ ID NO: 4937 - DNA, 225 bp, unidentified
  misc_feature 1..225: note = bacterial strain Ascusb_820A encodes 16S rRNA
  source 1..225: mol_type = genomic DNA
agagtttgatcctggctcaggatgaacgccggcggtgtgcctaatacatgcaagtcgaacgcgttggcccaattgattgatggtgcttgcacctgattgattttggccgccaacgagtggcggacgggtgagtaacacgtaggtaacctgcccagaagcgggggacaacatttggaaacagatgctaataccgcataacaacgttgttcgcatgaacaacgctta

SEQ ID NO: 4938 - DNA, 225 bp, unidentified
  misc_feature 1..225: note = bacterial strain Ascusb_57A encodes 16S rRNA
  source 1..225: mol_type = genomic DNA
agagtttgatcctggctcaggatgaacgctagctacaggcttaacacatgcaagtcgaggggaaacgagagagaagcttgcttttcttgtcgtcgaccggcgcacgggtgagtaacgcgtatccaacctgcccctggctaagggataacccgtagaaatgcggcctaataccttatgatctccgaagaagacatctgacttggagtaaagatttatcggcgaggg

SEQ ID NO: 4939 - DNA, 225 bp, unidentified; identical to SEQ ID NO: 4938
  misc_feature 1..225: note = bacterial strain Ascusb_17128A encodes 16S rRNA
  source 1..225: mol_type = genomic DNA

SEQ ID NO: 4940 - DNA, 225 bp, unidentified
  misc_feature 1..225: note = bacterial strain Ascusb_1312A encodes 16S rRNA
  source 1..225: mol_type = genomic DNA
agagtttgatcatggctcaggatgaacgctggcggcgtgcctaacacatgcaagtcgagcgatgaacggatggacaaggcttcggccaaggaaatctgttcagagcggcggatgggtgaggaacgcgtggggaacctgcctttcaccgggggataccagctggaaacggctgttaataccgcatatgctcacagtgccgcatggcacagggaggaaaactccggt

SEQ ID NO: 4941 - DNA, 225 bp, unidentified
  misc_feature 1..225: note = bacterial strain Ascusb_4803A encodes 16S rRNA
  source 1..225: mol_type = genomic DNA
agagtttgatcctggctcaggacgaacgctggcggcgtgcttaacacatgcaagtcgaacgagacgattgaaagcttgcttttgagagtcgagtggcaaacgggtgagtaacgcgtagacaacctgccgcaaagatggggacaacagtccgaaaggactgctaataccgaatgttgtatcgtttccacatggagatgatattaaagatggcctctacttgtaagc

SEQ ID NO: 4942 - DNA, 225 bp, unidentified; identical to SEQ ID NO: 4343
  misc_feature 1..225: note = bacterial strain Ascusb_16442C encodes 16S rRNA
  source 1..225: mol_type = genomic DNA

SEQ ID NO: 4943 - DNA, 225 bp, unidentified
  misc_feature 1..225: note = bacterial strain Ascusb_17A encodes 16S rRNA
  source 1..225: mol_type = genomic DNA
agagtttgatcctggctcaggacgaacgctggcggcgtgcctaacacatgcaagtcgaacgaagcactggaaatgattccttcgggttgattttcctttgactgagtggcggacgggtgagtaacacgtgagcaacctgcctttcagagcgggatagcagttggaaacgactgataataccgcatgacatgtctcttccgcatgagagagacatcaaatgatttt

SEQ ID NO: 4944 - DNA, 225 bp, unidentified; identical to SEQ ID NO: 4715
  misc_feature 1..225: note = bacterial strain Ascusb_409A encodes 16S rRNA
  source 1..225: mol_type = genomic DNA

SEQ ID NO: 4945 - DNA, 225 bp, unidentified
  misc_feature 1..225: note = bacterial strain Ascusb_17848A encodes 16S rRNA
  source 1..225: mol_type = genomic DNA
agagtttgatcatggctcaggatgaacgctagctacaggcttaacacatgcaagtcgaggggaaacggcagtctagcttgctagagtggacgtcgaccggcgaatgggtgagtaacgcgtatccaaccttccgcgaagtacggaatagccttgcgaaagtaagattaatgccgtatgtggtgtttggaagacatctgaagaacactaaagattcatcgcttcgcg

SEQ ID NO: 4946 - DNA, 225 bp, unidentified; identical to SEQ ID NO: 2234
  misc_feature 1..225: note = Ascusbbf_6176, encodes 16S rRNA
  source 1..225: mol_type = genomic DNA

SEQ ID NO: 4947 - DNA, 225 bp, unidentified
  misc_feature 1..225: note = Ascusbbf_22143, encodes 16S rRNA
  source 1..225: mol_type = genomic DNA
agagtttgatcctggctcaggatgaacgctagctacaggcttaacacatgcaagtcgcggggcagcatgtaggttgcttgcaacctatgatggcgaccggcgcacgggtgcgtaacgcgtatccaaccttcccttcagcagggcacagcccgttgaaagacggattaattccctatgttctcctttgcgggcatctgatgaggagtaaaggctttagccgctgaa

SEQ ID NO: 4948 - DNA, 225 bp, unidentified
  misc_feature 1..225: note = Ascusbbf_4883, encodes 16S rRNA
  source 1..225: mol_type = genomic DNA
agagtttgatcatggctcaggatgaacgctagctacaggcttaacacatgcaagtcgaggggcagcatattggtagcttgctaccaatgatggcgaccggcgcacgggtgagtaacgcgtatccaaccttccccatagtagggcatagcccgtagaaatgcggattaataccctatgttttccgaagatgacatctgatttggaacaaaggttcaccgctatggg

SEQ ID NO: 4949 - DNA, 225 bp, unidentified
  misc_feature 1..225: note = Ascusbbf_13543, encodes 16S rRNA
  source 1..225: mol_type = genomic DNA
agagtttgatcatggctcaggacgaacgctggcggcgtgcttaacacatgcaagtcgaacgggattgattgaaagcttgcttttgagagatctagtggcaaacgggtgagtaacgcgtaggcaacctacccttgggatggggacaacaggacgaaagccctgctaataccgaatgaagcatcccttccgcatggaggggatatgaaagatggcctctacttgtaa

SEQ ID NO: 4950 - DNA, 225 bp, unidentified
  misc_feature 1..225: note = Ascusbbf_152, encodes 16S rRNA
  source 1..225: mol_type = genomic DNA
agagtttgatcatggctcaggacgaacgctggcggcgtgcttaacacatgcaagtcgaacgagaatccgtggaaagagttttcggacaatggaagcggaggaaagtggcggacgggtgagtaacgcgtgaggaacctgccttggagagggggacaacagctggaaacggctgctaataccgcatgatgcattggggtcgcatggctctgatgccaaagatttatc

SEQ ID NO: 4951 - DNA, 225 bp, unidentified
  misc_feature 1..225: note = Ascusbbf_707, encodes 16S rRNA
  source 1..225: mol_type = genomic DNA
agagtttgatcctggctcaggatgaacgctagctacaggcttaacacatgcaagtcgaggggcagcgagaggaaagcttgctttccttgtcggcgaccggcgcacgggtgagtaacgcgtatccaaccttccccttagtagggcatagcccggcgaaagtcggattaataccctatgttttccaatgaggacatctgagctggaacaaagatttatcgctaaggg

SEQ ID NO: 4952 - DNA, 225 bp, unidentified
  misc_feature 1..225: note = Ascusbbf_1238, encodes 16S rRNA
  source 1..225: mol_type = genomic DNA
agagtttgatcctggctcagaacgaacgctggtggagtgtcttatacatgcaagtcgagcgaggacgtagcaatacgagccgagcggcgaatgggtgagtaacgcgtaagcaatctgccccgcattccggaacaaccgtgccaacgcgcggctaatgccgggagccgtggcggtccacatgggccgttgacgaaagatttatcgatgcgggatgagcttgcgtcc

SEQ ID NO: 4953 - DNA, 225 bp, unidentified; identical to SEQ ID NO: 718
  misc_feature 1..225: note = Ascusbbf_5588, encodes 16S rRNA
  source 1..225: mol_type = genomic DNA

SEQ ID NO: 4954 - DNA, 225 bp, unidentified
  misc_feature 1..225: note = Ascusbbf_4691, encodes 16S rRNA
  source 1..225: mol_type = genomic DNA
agagtttgatcctggctcaggatgaacgctggcggcgtgcctaacacatgcaagtcgaacgaagcatcttcctcagagattcgtcgaagagggatttgacttagtggcggacgggtgagtaatgtatgagcaacctgcctttcagagggggacaacagttggaaacgactgctaataccgcataatgtatcgagggggcatccctttgataccaaaggagcaatc

SEQ ID NO: 4955 - DNA, 225 bp, unidentified
  misc_feature 1..225: note = Ascusbbf_59499, encodes 16S rRNA
  source 1..225: mol_type = genomic DNA
agagtttgatcctggctcaggatgaacgctggcggcgtgcctaacacatgcaagtcgaacgaagcacttttaccggagattcgtcgaaggtgaatttgacttagtggcggacgggtgagtaatgtatgagcaacctgcctttcagtgggggacaacagttggaaacgactgctaataccgcataacgtatcgagggggcatccccatgataccaaaggatttatt

SEQ ID NO: 4956 - DNA, 225 bp, unidentified
  misc_feature 1..225: note = Ascusbbf_9770, encodes 16S rRNA
  source 1..225: mol_type = genomic DNA
agagtttgatcatggctcaggatgaacgctggcggcgtgcctaatacatgcaagtcgagcgaggtagcttgctacctagcggcgaacgggtgagtaacacgtaggtaacctgcctttaagactgggatacccgagggaaacttcggctaataccggataacaacggggatggcatcatctccgcttgaaaggtgcgtttgcaccacttttagatggacctgcggc

SEQ ID NO: 4957 - DNA, 225 bp, unidentified
  misc_feature 1..225: note = Ascusbbf_123632, encodes 16S rRNA
  source 1..225: mol_type = genomic DNA
agagtttgatcatggctcagaacgaacgctggcggcgcgtcttaaccatgcaagtcggacggcaaggcgggagcttgctcctgccctagagtggcggactggtgagtaacacgtgggtgacgaaccctgctgactgggatagccgctagaaatagcggataataccggatacggccgtatgtatcagaagcatacggggaaagggagcttaggctccgcaggagg

SEQ ID NO: 4958 - DNA, 225 bp, unidentified
  misc_feature 1..225: note = Ascusbbf_14146, encodes 16S rRNA
  source 1..225: mol_type = genomic DNA
agagtttgatcctggctcaggatgaacgctagctacaggcttaacacatgcaagtcgaggggcagcattttagtttgcttgcaaactaaagatggcgaccggcgcacgggtgagtaacacgtatccaacctgccgataactcggggatagcctttcgaaagaaagattaatatccgatagtatattaaaaccgcatggttttactattaaagaatttcggttatc

SEQ ID NO: 4959 - DNA, 225 bp, unidentified
  misc_feature 1..225: note = Ascusbbf_1103, encodes 16S rRNA
  source 1..225: mol_type = genomic DNA
agagtttgatcatggctcaggatgaacgctggcggcgtgcttaacacatgcaagtcgaacggagtattgagaatgaagttttcggatggatttttcaatacttagtggcggacgggtgagtaacgcgtgggtaacctgcctcacacagggggataacagttggaaacgactgttaataccgcataagaccacagtaccgcatggtacaggggtaaaaactccggt

SEQ ID NO: 4960 - DNA, 225 bp, unidentified
  misc_feature 1..225: note = Ascusbbf_498, encodes 16S rRNA
  source 1..225: mol_type = genomic DNA
agagtttgatcatggctcaggatgaacgctggcggcgtgcctaacacatgcaagtcgagcggagagccgtaacggaagccttcgggcggaagatgcggttacttagcggcggacgggtgagtaacgcgtggataacctggctcatacagggggataacagagagaaatctctgctaataccgcataagcgcacagtgctgcatggcacagtgtgaaaagccgaga

SEQ ID NO: 4961 - DNA, 225 bp, unidentified
  misc_feature 1..225: note = Ascusbbf_13717, encodes 16S rRNA
  source 1..225: mol_type = genomic DNA
agagtttgatcctggctcaggatgaacgctagctacaggcttaacacatgcaagtcgaggggcagcatggaggttgcttgcaacttccgatggcgaccggcgcacgggtgagtaacacgtatccaaccttccccgcggtagggaacagcccgctgaaaggcggattaatgccctatggtctcctttgcaggcatctaacgaggagtaaagattgatcgccgcggg

SEQ ID NO: 4962 - DNA, 225 bp, unidentified
  misc_feature 1..225: note = Ascusbbf_876, encodes 16S rRNA
  source 1..225: mol_type = genomic DNA
agagtttgatcctggctcaggatgaacgctggcggcgtgcctaacacatgcaagtcgagcggagtgaagagagcttgcttttttcacttagcggcggatgggtgaggaacgcgtggggaacctgcctctcacagggggataacagctggaaacggctgttaataccgcatatgcacacagtgccgcatggcacagggtggaaagaaattcggtgagagatggacc

SEQ ID NO: 4963 - DNA, 225 bp, unidentified; identical to SEQ ID NO: 3917
  misc_feature 1..225: note = Ascusbbf_612, encodes 16S rRNA
  source 1..225: mol_type = genomic DNA

SEQ ID NO: 4964 - DNA, 225 bp, unidentified
  misc_feature 1..225: note = Ascusbbf_4936, encodes 16S rRNA
  source 1..225: mol_type = genomic DNA
agagtttgatcatggctcaggacgaacgctggcggcgtgcttaacacatgcaagtcgaacggggcgattagaagcttgcttttatgagcctagtggcaaacgggtgagtaacgcgtaggcaacctgcctctaagatggggacaacagcccgaaagggctgctaataccgaatgttgtaagtaactcgcatgagagacttaccaaagatggcctctacttgtaagc

SEQ ID NO: 4965 - DNA, 225 bp, unidentified
  misc_feature 1..225: note = Ascusbbf_6809, encodes 16S rRNA
  source 1..225: mol_type = genomic DNA
agagtttgatcctggctcaggatgaacgctagctacaggcttaacacatgcaagtcgaggggcagcatgacgatagcttgctattgttgatggcgaccggcgcacgggtgagtaacgcgtatccaaccttcccatagctagggaataaccttgcgaaagtaagactaatgccctataatattctttgcagacatctaaagagaattaaagatttatcggctatgg

SEQ ID NO: 4966 - DNA, 225 bp, unidentified
  misc_feature 1..225: note = Ascusbbf_113152, encodes 16S rRNA
  source 1..225: mol_type = genomic DNA
agagtttgatcctggctcaggatgaacgctggcggcgtgcttaacacatgcaagtcgaacggactttacatgaagcctagcgattgtaaagttagtggcggacgggtgagtaacgcgtgaataacctgccctgtaccgggggacaacagttggaaacgactgctaataccgcataagcgcacggttccgcatggaacagtgtgaaaaactccggtggtacaggat

SEQ ID NO: 4967 - DNA, 225 bp, unidentified
  misc_feature 1..225: note = Ascusbbf_18, encodes 16S rRNA
  source 1..225: mol_type = genomic DNA
agagtttgatcctggctcaggacgaacgctggcggcgtgcctaacacatgcaagtcgaacggaactgcttcgaaggatttcttcggaatgacattgattcagtttagtggcggacgggtgagtaacgcgtgagtaacctgccttcaagagggggataacattctgaaaagaatgctaataccgcatgacatatgattgtcgcatggcagacatatcaaagattta

SEQ ID NO: 4968 - DNA, 225 bp, unidentified; identical to SEQ ID NO: 3235
  misc_feature 1..225: note = Ascusbbf_9031, encodes 16S rRNA
  source 1..225: mol_type = genomic DNA

SEQ ID NO: 4969 - DNA, 225 bp, unidentified
  misc_feature 1..225: note = Ascusbbf_11823, encodes 16S rRNA
  source 1..225: mol_type = genomic DNA
agagtttgatcctggctcagaacgaatgctggcggtgcgtcttaagcatgcaagtcgaacggcaagggtagcttgctacccctagagtggcggactggtgagtaacgcgtaggtgatgtacctttcggatggggatagccagtagaaatattggataataccgaatacgatttcatatcttagaagtatgaaatgaaaagagctatggctctgccgatagaacgg

SEQ ID NO: 4970 - DNA, 225 bp, unidentified
  misc_feature 1..225: note = Ascusbbf_1007, encodes 16S rRNA
  source 1..225: mol_type = genomic DNA
agagtttgatcctggctcaggatgaacgctagcgacaggcttaacacatgcaagtcgaggggcagcgtggcggtagcaatactgccgacggcgaccggcgcactggtgagtaacacgtatgcaacctgcccctggttgggggataacccgcggaaacgcggcctaataccccgtatgcgccgaggccgcatgacttcggcgtgatagaacttcgtccagggatgg

SEQ ID NO: 4971 - DNA, 225 bp, unidentified; identical to SEQ ID NO: 237
  misc_feature 1..225: note = Ascusbbf_24422, encodes 16S rRNA
  source 1..225: mol_type = genomic DNA

SEQ ID NO: 4972 - DNA, 225 bp, unidentified
  misc_feature 1..225: note = Ascusbbf_951, encodes 16S rRNA
  source 1..225: mol_type = genomic DNA
agagtttgatcctggctcaggatgaacgctggcggcgcgcctaacacatgcaagtcgaacggttaaagcaccttcgggtgtgtataaagtggcgaacggctgagtaacacgtgggcaacctgcccctcgcaccgggatagcctcgggaaaccgtggttaataccggatactccgggacccccgcatgggggtgccgggaaagccctgacggcgagggatgggccc

SEQ ID NO: 4973 - DNA, 225 bp, unidentified
  misc_feature 1..225: note = Ascusbbf_80169, encodes 16S rRNA
  source 1..225: mol_type = genomic DNA
agagtttgatcctggctcaggatgaacgctggcggcgtgcctaacacatgcaagtcgaacgaagcgattttgcggaagttttcggatggaagtaaaattgactgagtggcggacgggtgagtaacgcgtgggtaacctgcctcacactgggggacaacagttagaaatgactgctaataccgcataagcgcacagtaccgcatggtacggtgtgaaaaactccgg

SEQ ID NO: 4974 - DNA, 225 bp, unidentified
  misc_feature 1..225: note = Ascusbbf_5699, encodes 16S rRNA
  source 1..225: mol_type = genomic DNA
agagtttgatcatggctcagaacgaacgctggcggcgcgtcttaagcatgcaagtcgagcgggattgggtagcttgctatccatgagagcggcggactggtgagtaacgcgtgggtgacgtaccctttagacggggatagctcctagaaataggaggtaataccggatacgatagtgagtgtcagaggctcattatgaaaggttcttttgaaccgctgaaggagc

SEQ ID NO: 4975 - DNA, 225 bp, unidentified; identical to SEQ ID NO: 3152
  misc_feature 1..225: note = Ascusbbf_130, encodes 16S rRNA
  source 1..225: mol_type = genomic DNA

SEQ ID NO: 4976 - DNA, 225 bp, unidentified
  misc_feature 1..225: note = Ascusbbf_10109, encodes 16S rRNA
  source 1..225: mol_type = genomic DNA
agagtttgatcctggctcaggacgaacgctggcggcgtgcttaacacatgcaagtcgaacggagaatttgcttcggtgaattcttagtggcgaacgggtgagtaacgcgtaggcaacctgccctctggttggggacaacattccgaaagggatgctaataccgaatgtgctcacacttccgcatggaggtgtgaggaaagatggcctctacttgtaagctatcgc

SEQ ID NO: 4977 - DNA, 225 bp, unidentified
  misc_feature 1..225: note = Ascusbbf_29797, encodes 16S rRNA
  source 1..225: mol_type = genomic DNA
agagtttgatcctggctcaggatgaacgctagcgacaggcttaacacatgcaagtcgaggggcagcatgggaggtggcaacaccacccgatggcgaccggcgcactggtgagtaacacgtatgcaacctgccccctacagggggataatccagagaaatttggtctaataccccgtagtcagcgagagggcatcctctcactgggaaagctccggcggtagggga

SEQ ID NO: 4978 - DNA, 225 bp, unidentified
  misc_feature 1..225: note = Ascusbbf_24410, encodes 16S rRNA
  source 1..225: mol_type = genomic DNA
agagtttgatcctggctcaggacgaacgctggcggcgtgcttaacacatgcaagtcgaacgaggattacgagattgagagcttcggcaggattgatcgtaattcgagtggcggacgggtgagtaacgcgtgagcaatctgtcccagacaggggaataacacttggaaacaggtgctaataccgcataagaccacagtatcgcatggtacaggggtaaaaggagga

SEQ ID NO: 4979 - DNA, 225 bp, unidentified
  misc_feature 1..225: note = Ascusbbf_54068, encodes 16S rRNA
  source 1..225: mol_type = genomic DNA
agagtttgatcctggctcaggatgaacgctggcggcgtgcctaacacatgcaagtcgaacggagtttttattgatttcttcggattgatatagaaacttagtggcggacgggtgagtaacacgtgggtaacctgccttacagagggggatagcagctggaaacggctgataataccgcataagcacacagtaccgcatggtacagggtgaaaagatttatcactg

SEQ ID NO: 4980 - DNA, 225 bp, unidentified
  misc_feature 1..225: note = Ascusbbf_7003, encodes 16S rRNA
  source 1..225: mol_type = genomic DNA
agagtttgatcctggctcaggatgaacgctggcggcgtgcctaacacatgcaagtcgaacgaggtaaatgagatgaagttttcggatggattcttatttaccgagtggcggacgggtgagtaacgcgtgggtaacctgcctcatacagggggataacgattggaaacgattgctaataccgcataagcgcacagtaccacatggtacagtgtgaaaaactccggt

SEQ ID NO: 4981 - DNA, 225 bp, unidentified
  misc_feature 1..225: note = Ascusbbf_23, encodes 16S rRNA
  source 1..225: mol_type = genomic DNA
agagtttgatcctggctcaggatgaacgctggcggcgtgcttaacacatgcaagtcgaacggagaactgcccttcgggacggttcttagtggcggacgggtgagtaacgcgtgaggaacctgccttggagtggggaataacggctggaaacggccgctaataccgcataatgcagttgggtcgcatggctctgactgccaaagatttattgctctgagatggcct

SEQ ID NO: 4982 - DNA, 225 bp, unidentified
  misc_feature 1..225: note = Ascusbbf_1697, encodes 16S rRNA
  source 1..225: mol_type = genomic DNA
agagtttgatcctggctcaggatgaacgctagctacaggcttaacacatgcaagtcgaggggcagcaggatcttagcttgctaagattgctggcgaccggcgcacgggtgagtaacgcgtatccaaccttccccttagtagggcatagcccgatgaaaatcggattaataccctatgttttccaatgaggacatctgagctggaacaaagattcatcgctaaggg

SEQ ID NO: 4983 - DNA, 225 bp, unidentified
  misc_feature 1..225: note = Ascusbbf_24513, encodes 16S rRNA
  source 1..225: mol_type = genomic DNA
agagtttgatcctggctcagaacgaacgctggcggcgcgtcttaagcatgcaagtcgagcgggattcatgtgcttgcacatgatgagagcggcggactggtgagtaacacgtaggtgacgtaccttgaggacggggacagccggcagaaatgccgggtaataccggataagctcgcgcgagccggaatcgcgcgaggaaaggagctaaggctccgcctccagagc

SEQ ID NO: 4984 - DNA, 225 bp, unidentified
  misc_feature 1..225: note = Ascusbbf_7586, encodes 16S rRNA
  source 1..225: mol_type = genomic DNA
agagtttgatcctggctcaggatgaacgctagctacaggcttaacacatgcaagtcgaggggcagcatgaggtttgcttgcaaaccttgatggcgaccggcgcacgggtgcgtaacgcgtatccaaccttccagctactagggaatagcccgttgaaagacggattaatgccctatgtgttcattagatggcatcagatgttgaacaaagattcatcggtagctg

SEQ ID NO: 4985 - DNA, 225 bp, unidentified
  misc_feature 1..225: note = Ascusbbf_27854, encodes 16S rRNA
  source 1..225: mol_type = genomic DNA
agagtttgatcctggctcaggatgaacgctagcgacaggcttaacacatgcaagtcgaggggcagcggggctgaaagcttgctttcagctgccggcgaccggcgcacgggtgagtaacacgtatgcaacctggccgtgacagatggataaccgggagaaattccgcctaatacagcataacaccactggatgacatcctccggtggtcaaaggaggcgactccgg

SEQ ID NO: 4986 - DNA, 225 bp, unidentified
  misc_feature 1..225: note = Ascusbbf_1034, encodes 16S rRNA
  source 1..225: mol_type = genomic DNA
agagtttgatcctggctcaggatgaacgctggcggcgtgcctaacacatgcaagtcgaacgaagcacttctggtttgagattcgtcaagaaccgggattgacttagtggcggacgggtgagtaatgtatgagcaacctgcctttcagagggggacaacagttggaaacgactgctaataccgcataatgtatttgggtggcatcacttggataccaaaggagcaa

SEQ ID NO: 4987 - DNA, 225 bp, unidentified
  misc_feature 1..225: note = Ascusbbf_23134, encodes 16S rRNA
  source 1..225: mol_type = genomic DNA
agagtttgatcatggctcaggatgaacgctagcggcaggcttaacacatgcaagtcgaggggcatcgcggtgtagcaatacactggcggcgaccggcggaagggtgcgtaacgcgtgagcaacatgcccgtggcagggggataatcgatggaaacgtcgtctaagaccccgtaacaactgggagcgcatgttcctggtttgaaagcttcggcggccacggattgg

SEQ ID NO: 4988 - DNA, 225 bp, unidentified
  misc_feature 1..225: note = Ascusbbf_7027, encodes 16S rRNA
  source 1..225: mol_type = genomic DNA
agagtttgatcatggctcagaatgaacgctggcggcaggcctaacacatgcaagtcgaacgcatccttcggggtgagtggcggacgggtgagtaacacgtgggaacgtaccctttgctacggaatagtctcgggaaactgggggtaataccgtatgtgccctacgggggaaagatttatcggcaaaggatcggcccgcgttggattaggtagttggtggggtaat

SEQ ID NO: 4989 - DNA, 225 bp, unidentified
  misc_feature 1..225: note = Ascusbbf_43679, encodes 16S rRNA
  source 1..225: mol_type = genomic DNA
agagtttgatcatggctcaggatgaacgctagcggcaggcttaacacatgcaagtcgaggggcagcgcggtgtagcaatacactggcggcgaccggcgcaagggtgcgtaacgcgtgagcgacatacccgtgactggggcataaccgatggaaacgtcgcctaattccccataatacaagggaccgcatgattccttgttgaaaacttcggtggtcacggattgg

SEQ ID NO: 4990 - DNA, 225 bp, unidentified
  misc_feature 1..225: note = Ascusbbf_63954, encodes 16S rRNA
  source 1..225: mol_type = genomic DNA
agagtttgatcctggctcaggatgaacgctagcggtaggcttaacacatgcaagtcgaggggcagcgtatcgagtagcaatacttgatgacggcgaccggcggatgggtgagtaacgcgtatgcaacctaccttgtacagggggatagacactggaaacggtgcgtaatatcccgtaatgttgtggagaggcatcttttcacaaagaaaggagcgatctggtata

SEQ ID NO: 4991 - DNA, 225 bp, unidentified
  misc_feature 1..225: note = Ascusbbf_1517, encodes 16S rRNA
  source 1..225: mol_type = genomic DNA
agagtttgatcatggctcaggacgaacgctggcggcgtgcctaacacatgcaagtcgaacggggattttgtttcggcagaatcctagtggcgaacgggtgagtaacgcgtaggcaacctgccctccggccggggacaacactccgaaaggggtgctaataccggatacgaagtctgtgccgcatggtacggatttgaaagatggcctctatttataagctatcgc

SEQ ID NO: 4992 - DNA, 225 bp, unidentified
  misc_feature 1..225: note = Ascusbbf_104, encodes 16S rRNA
  source 1..225: mol_type = genomic DNA
agagtttgatcctggctcaggataaacgctggcggcgtgcctaatacatgcaagtcgaacgaggaagacccagcttgctgggttgaccgagtggcgaacgggtgagtaatacataagcaacctgcccacggagaccgggataatctctggaaacggggactaaaaccggataggcagcaatgaggcatctcaatgctgttaaaggtgagagacactggtggatgg

SEQ ID NO: 4993 - DNA, 225 bp, unidentified; identical to SEQ ID NO: 64
  misc_feature 1..225: note = Ascusbbf_148, encodes 16S rRNA
  source 1..225: mol_type = genomic DNA

SEQ ID NO: 4994 - DNA, 225 bp, unidentified
  misc_feature 1..225: note = Ascusbbf_944, encodes 16S rRNA
  source 1..225: mol_type = genomic DNA
agagtttgatcctggctcaggatgaacgctagctacaggcttaacacatgcaagtcgaggggtaacatgaagaaagcttgctttctttgatgacgaccggcgcacgggtgagtatcgcgtatccaacctgcccataagtagggaatagccttgcgaaagtaagattaatgccctatggtttccattgaagacatctgagatggaataaagatttatcgcttatgg

SEQ ID NO: 4995 - DNA, 225 bp, unidentified
  misc_feature 1..225: note = Ascusbbf_76009, encodes 16S rRNA
  source 1..225: mol_type = genomic DNA
agagtttgatcctggctcaggatgaacgctggcggcgtgcctaacacatgcaagtcgaacgaagcttctcttatgattttttcggaatgattaagagaatgacttagtggcggacgggtgagtaacgcgtggataacctgccctttgcagggggataacagttagaaatgactgctaataccgcataagcgcacactaccgcatggtagagtgtgaaaagcgtat

SEQ ID NO: 4996 - DNA, 225 bp, unidentified
  misc_feature 1..225: note = Ascusbbf_23033, encodes 16S rRNA
  source 1..225: mol_type = genomic DNA
agagtttgatcctggctcaggatgaacgctggcggcgtgcttaatacatgcaagtcgaacggatgagatcaggcagcttgctgtctgattgatttagtggcgaacgggtgagtaatacgtaggcaacctgccccaaagcgggggatagcagttggaaacgactattaataccgcataggtaatcttgaggcatcttgagattattaaaggtgcgtttgcaccgct

SEQ ID NO: 4997 - DNA, 225 bp, unidentified
  misc_feature 1..225: note = Ascusbbf_20389, encodes 16S rRNA
  source 1..225: mol_type = genomic DNA
agagtttgatcctggctcaggacgaacgctggcggcgtgcttaacacatgcaagtcgaacgatgaagtggtgcttgcaccatggattagtggcgaacgggtgagtaacacgtgagtaacctgcccctaactttgggataactccgggaaaccggggctaataccggatatgagatttcaccgcatggtggggtttggaaagttttttcggttagggatgggctcg

SEQ ID NO: 4998 - DNA, 225 bp, unidentified
  misc_feature 1..225: note = Ascusbbf_2600, encodes 16S rRNA
  source 1..225: mol_type = genomic DNA
agagtttgatcctggctcagattgaacgctggcggcatgccttacacatgcaagtcgaacggcagcgggggagcttgctcctgccggcgagtggcgaacgggtgagtaatgcatcggaacgtgtcctgtcgtgggggataactggccgaaaggtcagctaataccgcatgagacccgagggtgaaagcgggggatcgcaagacctcgcgcgactggagcggccga

SEQ ID NO: 4999 - DNA, 225 bp, unidentified
  misc_feature 1..225: note = Ascusbbf_8118, encodes 16S rRNA
  source 1..225: mol_type = genomic DNA
agagtttgatcctggctcaggatgaacgctagctacaggcttaacacatgcaagtcgaggggcatcatgtgaggacttcggtcctttcgatggcgaccggcgaatgggtgagtaacacgtatccgacctgccctgtactggaggatagcctcccgaaagggaaattaatactccatgtgtcatgttgcttcatggtggcatgatgaaagatttatcggtacagga

SEQ ID NO: 5000 - DNA, 225 bp, unidentified
  misc_feature 1..225: note = Ascusbbf_201, encodes 16S rRNA
  source 1..225: mol_type = genomic DNA
agagtttgatcctggctcaggatgaacgctagctacaggcttaacacatgcaagtcgaggggcagcatatagatagcttgctatttatgatggcgaccggcgcacgggtgagtaacgcgtatccaaccttccctatactagagaatagcccggcgaaagtcggattaatgctctatgttcttctttgatggcatctgacgagaagcaaaggtttaccggtatagg

SEQ ID NO: 5001 - DNA, 225 bp, unidentified
  misc_feature 1..225: note = Ascusbbf_6315, encodes 16S rRNA
  source 1..225: mol_type = genomic DNA
agagtttgatcatggctcagaacgaacgctggcggcgcgtcttaagcatgcaagtcggacggcaagagaagtgcttgcacttctcctagagtggcggactggtgagtaacaggtgggtgacatacccttcagatggggatagccggtagaaataccgggtaataccgaatacgctcgtacatctcggaagtgtacgaggaaaggagctacggcttcgctgttgga

SEQ ID NO: 5002 - DNA, 225 bp, unidentified
  misc_feature 1..225: note = Ascusbbf_10712, encodes 16S rRNA
  source 1..225: mol_type = genomic DNA
agagtttgatcctggctcaggacgaacgctggcggcgtgcttaacacatgcaagtcgaacgagaagagatgagaagcttgcttcttatctcttcgagtggcaaacgggtgagtaacgcgtaagcaacctgcccttcagatggggacaacagctggaaacggctgctaataccgaatacgttctttttgtcgcatggcagagggaagaaagggaggctcttcggag

SEQ ID NO: 5003 - DNA, 225 bp, unidentified
  misc_feature 1..225: note = Ascusbbf_6012, encodes 16S rRNA
  source 1..225: mol_type = genomic DNA
agagtttgatcctggctcagattgaacgctggcggcaggcctaatacatgcaagtcgaacggcagcagggggagtgcttgcacttcccgctggcgagtggcggacgggtgagtagtgcctgggaagctgcctggcagagggggacaacagctggaaacggctgctgataccgcatattaccccgagggggaaaggagagatccgctgccggatgcgcccaggcgg

SEQ ID NO: 5004 - DNA, 225 bp, unidentified; identical to SEQ ID NO: 2225
  misc_feature 1..225: note = Ascusbbf_2297, encodes 16S rRNA
  source 1..225: mol_type = genomic DNA

SEQ ID NO: 5005 - DNA, 225 bp, unidentified
  misc_feature 1..225: note = Ascusbbf_9540, encodes 16S rRNA
  source 1..225: mol_type = genomic DNA
agagtttgatcctggctcaggatgaacgctagctacaggcttaacacatgcaagtcgaggggcagcatggagtcagcttgctgactttgatggcgaccggcgcacgggtgcgtaacacgtatccaatctacccatggctctgggatagcctttcgaaagaaagattaataccggatggccttacggagagacatctctctgtaagtaaagatttatcggcgatgg

SEQ ID NO: 5006 - DNA, 225 bp, unidentified
  misc_feature 1..225: note = Ascusbbf_873, encodes 16S rRNA
  source 1..225: mol_type = genomic DNA
agagtttgatcctggctcaggacgaacgctggcggcgtgcttaacacatgcaagtcgaacgagaatctgtggatcgaggattcgtccaagtgaagcagaggacagtggcggacgggtgagtaacgcgtgaggaacctgcctttcagagggggacaacagttggaaacgactgctaataccgcatgacacattcgagcggcatcgcttgaatgtcaaagatttatc

SEQ ID NO: 5007 - DNA, 225 bp, unidentified; identical to SEQ ID NO: 2521
  misc_feature 1..225: note = Ascusbbf_87102, encodes 16S rRNA
  source 1..225: mol_type = genomic DNA

SEQ ID NO: 5008 - DNA, 225 bp, unidentified
  misc_feature 1..225: note = Ascusbbf_77105, encodes 16S rRNA
  source 1..225: mol_type = genomic DNA
agagtttgatcatggctcagattgaacgctggcggcaggcctaacacatgcaagtcgagcggaagaagggagcttgctcccggattcagcggcggacgggtgagtaatgcctgggaatctgcctggtagtgggggataacgtccggaaacgggcgctaataccgcatacgtcctacgggagaaagcaggggatcttcggaccttgcgctatcagatgagcccagg

SEQ ID NO: 5009 - DNA, 225 bp, unidentified
  misc_feature 1..225: note = Ascusbbf_269, encodes 16S rRNA
  source 1..225: mol_type = genomic DNA
agagtttgatcctggctcaggacgaacgctggcggcgtgcttaacacatgcaagtcgaacggaaaggccccgctcgcggggtactcgagtggcgaacgggtgagtaacacgtgggtgatctgccctgcacttcgggataagcctgggaaactgggtctaataccggatatgacctccctttagtgtggggggtggaaagatttatcggtgcaggatgagcccgcg

SEQ ID NO: 5010 - DNA, 225 bp, unidentified; identical to SEQ ID NO: 894
  misc_feature 1..225: note = Ascusbbf_41015, encodes 16S rRNA
  source 1..225: mol_type = genomic DNA

SEQ ID NO: 5011 - DNA, 225 bp, unidentified
  misc_feature 1..225: note = Ascusbbf_32877, encodes 16S rRNA
  source 1..225: mol_type = genomic DNA
agagtttgatcctggctcaggacgaacgctggcggcgtgcttaacacatgcaagtcgaacggagaactttcttcggaatgttcttagtggcgaacgggtgagtaacgcgtaggcaacctgccctctggttggggacaacattccgaaagggatgctaataccgaatgtgatccttctttcgcatgaaggaaggatgaaagatggcctctacttgtaagctatcgc

SEQ ID NO: 5012 - DNA, 225 bp, unidentified
  misc_feature 1..225: note = Ascusbbf_57294, encodes 16S rRNA
  source 1..225: mol_type = genomic DNA
agagtttgatcctggctcaggatgaacgctggcggcgtgcttaacacatgcaagtcgagcgaagcacttaagtctgattcttcggatgaagacttttgtgactgagcggcggacgggtgagtaacgcgtgggtaacctgcctcatacagggggataacagttagaaatgactgctaataccgcataagaccacggtaccgcatggtacagtggtaaaaactccgg

SEQ ID NO: 5013 - DNA, 225 bp, unidentified
  misc_feature 1..225: note = Ascusbbf_27932, encodes 16S rRNA
  source 1..225: mol_type = genomic DNA
agagtttgatcatggctcaggatgaacgctggcggcgtgcctaacacatgcaagtcgaacgaagtttgtttctacccgacggattatcttcggataagaagtcatttgaaacgcttagtggcggacgggtgagtaacgcgtgggcaacctgccctgcacagggggatagcagttggaaacgactggtaataccgcatatattgcatttgccgcatgacagatgca

SEQ ID NO: 5014 - DNA, 225 bp, unidentified; identical to SEQ ID NO: 1071
  misc_feature 1..225: note = Ascusbbf_22558, encodes 16S rRNA
  source 1..225: mol_type = genomic DNA

SEQ ID NO: 5015 - DNA, 225 bp, unidentified
  misc_feature 1..225: note = Ascusbbf_983757, encodes 16S rRNA
  source 1..225: mol_type = genomic DNA
agagtttgatcctggctcaggatgaacgctagctacaggcttaacacatgcaagtcgaggggcagcatgagggtagcaatacctttgatggcgaccggcgcacgggtgcgtaacacgtatccaatctacccatggctcgggaatagcctttcgaaagaaagattaatgcccgatggtctgcgattgagacatctcgattacagtaaagatttatcggcgatggat

SEQ ID NO: 5016 - DNA, 225 bp, unidentified
  misc_feature 1..225: note = Ascusbbf_52330, encodes 16S rRNA
  source 1..225: mol_type = genomic DNA
agagtttgatcatggctcaggatgaacgctggcggcgtgcctaacacatgcaagtcgaacggaaattactgattgaagctttcgggcggatttcagtaattttagtggcggacgggtgagtaacacgtgggtaacctgccctgtaccgggggataacagttggaaacggctgttaataccgcataagcgcacagctccgcatggagcagtgtgaaaaactccggt

SEQ ID NO: 5017 - DNA, 225 bp, unidentified
  misc_feature 1..225: note = Ascusbbf_88445, encodes 16S rRNA
  source 1..225: mol_type = genomic DNA
agagtttgatcctggctcaggatgaacgctggcggcatgcctaagacatgcaagtcgaacgagacggcccaatgaagtggagtgcttgcacaaagcggacttggatcaccgtctagtggcgcaagggtgagtaacgcgtaggtaatctgccttcgagtctggaataacagttagaaatgattgctaatgccggattatatatagaatgatacgtctatctatatt

SEQ ID NO: 5018 - DNA, 225 bp, unidentified
  misc_feature 1..225: note = Ascusbbf_4111, encodes 16S rRNA
  source 1..225: mol_type = genomic DNA
agagtttgatcatggctcaggacgaacgctggcggcgtgcttaacacatgcaagtcgaacgatgaagccgcttcggtggtggattagtggcgaacgggtgagtaacacgtgggcaatctgccctgcactctgggacaagccctggaaacggggtctaataccggatatgacacgggatcgcatggtctccgtgtggaaagctccggcggtgcaggatgagcccgc

SEQ ID NO: 5019 - DNA, 225 bp, unidentified; identical to SEQ ID NO: 4742
  misc_feature 1..225: note = Ascusbbf_1085, encodes 16S rRNA
  source 1..225: mol_type = genomic DNA

SEQ ID NO: 5020 - DNA, 225 bp, unidentified
  misc_feature 1..225: note = Ascusbbf_154, encodes 16S rRNA
  source 1..225: mol_type = genomic DNA
agagtttgatcatggctcagattgaacgctggcggcaggcctaatacatgcaagtcgaacggtaacataggaaaagcttgcttttcctgatgacgagtggcggacgggtgagtaaagtttgggaagctacctgatagagggggacaacagttggaaacgactgctaataccgcatacagcctgagggtgaaagcagcaatgcgctatcagatgcgcccaaatggg

SEQ ID NO: 5021 - DNA, 225 bp, unidentified
  misc_feature 1..225: note = Ascusbbf_1010, encodes 16S rRNA
  source 1..225: mol_type = genomic DNA
agagtttgatcctggctcaggacgaacgctggcggcgtgcttaacacatgcaagtcgaacgagacgatttagaagcttgcttttattgagtcgagtggcaaacgggtgagtaacgcgtagacaacctgccgcaaagatggggacaacagtccgaaaggactgctaataccgaatgttgtatctcctccgcatggaagagatattaaagatggcctctacttgtaa

SEQ ID NO: 5022 - DNA, 225 bp, unidentified
  misc_feature 1..225: note = Ascusbbf_5575, encodes 16S rRNA
  source 1..225: mol_type = genomic DNA
agagtttgatcctggctcaggacgaacgctggcggcgtgcttaacacatgcaagtcgaacgagaagagatgagaagcttgcttcttatcgattcgagtggcaaacgggtgagtaacgcgtaagcaacctgccctctagatggggacaacagctggaaacggctgctaataccgaatacgttctttctgtcgcatggcagagggaagaaagggaggctcttcggag

SEQ ID NO: 5023 - DNA, 225 bp, unidentified; identical to SEQ ID NO: 2592
  misc_feature 1..225: note = Ascusbbf_775, encodes 16S rRNA
  source 1..225: mol_type = genomic DNA

SEQ ID NO: 5024 - DNA, 225 bp, unidentified
  misc_feature 1..225: note = Ascusbbf_19348, encodes 16S rRNA
  source 1..225: mol_type = genomic DNA
agagtttgatcctggctcaggatgaacgctggcggcgtgcctaacacatgcaagtcgaacggagtttactcgctgaagcggcttcggccaattcttgagtaaacttagtggcggacgggtgagtaacgcgtgggcaacctgcctcatactgggggatagcagttggaaacgactgataataccgcataagcgcacagtatcgcatgatacagtgtgaaaaactcc

SEQ ID NO: 5025 - DNA, 225 bp, unidentified
  misc_feature 1..225: note = Ascusbbf_24302, encodes 16S rRNA
  source 1..225: mol_type = genomic DNA
agagtttgatcatggctcaggacgaacgctggcggcgtgcttaacacatgcaagtcgagcgatgaagctccttcgggagcggattagcggcggacgggtgagtaacacgtgggtaacctgcctcatagaggggaatagcctttcgaaaggaagattaataccgcataagattgtagtgccgcatggcatagcaattaaaggagtaatccgctatgagatggaccc

SEQ ID NO: 5026 - DNA, 225 bp, unidentified
  misc_feature 1..225: note = Ascusbbf_1, encodes 16S rRNA
  source 1..225: mol_type = genomic DNA
agagtttgatcctggctcagattgaacgctggcggcaggcctaatacatgcaagtcgaacggtaacataagaaaagcttgcttttcttgatgacgagtggcggacgggtgagtaacatttgggaaactacctgatagagggggacaacagttggaaacgactgctaataccgcatacagcctaagggtgaaagaagcaattcgctatcagatgtgcccaaacggg

SEQ ID NO: 5027 - DNA, 225 bp, unidentified
  misc_feature 1..225: note = Ascusbbf_52548, encodes 16S rRNA
  source 1..225: mol_type = genomic DNA
agagtttgatcatggctcaggatgaacgctggcggcgtgcttaacacatgcaagtcgaacgaagcgcattgtttgaattcttcggaaggaagataatgtgactgagtggcggacgggtgagtaacgcgtgggtaacctgccatgtacagggggacaacagttggaaacggctgctaataccgcataagcgcacgagattgcatgatctagtgtgaaaaactccgg

SEQ ID NO: 5028 - DNA, 225 bp, unidentified
  misc_feature 1..225: note = Ascusbbf_50658, encodes 16S rRNA
  source 1..225: mol_type = genomic DNA
agagtttgatcatggctcaggacgaacgctggcggcgtgcctaacacatgcaagtcgagcggagacatacagcggataggaagttttcggatggaattgaagaagtatgttttagcggcggacgggtgagtaacgcgtgagcaatctgtccttcacagggggataacacagcgaaagttgtactaataccgcataagaccacggtgttgcatgacacaggggtca

SEQ ID NO: 5029 - DNA, 225 bp, unidentified
  misc_feature 1..225: note = Ascusbbf_850, encodes 16S rRNA
  source 1..225: mol_type = genomic DNA
agagtttgatcctggctcaggataaacgctggcggcgtgcttaacacatgcaagtcgaacgaggaacagaagatgaggtcttcggattaaattgactgttccgagtggcggacgggtgagtaacgcgtggggaacctgccttatactgagggacaacagctggaaacggctgctaatacctcatatgcgcacaggaaggcatcttccggtgtggaaagaaattcg

SEQ ID NO: 5030 - DNA, 225 bp, unidentified
  misc_feature 1..225: note = Ascusbbf_25259, encodes 16S rRNA
  source 1..225: mol_type = genomic DNA
agagtttgatcctggctcaggatgaacgctagcgacaggcctaacacatgcaagtcgagcggcagcacctcgggtggcgagcggcgcacgggtgagtaacgcgtatgtaacctacccatgagtgggggatagcccagcgaaagctggattaataccgcatgatactgattgaaggcatcggatatcagttaaagatttattgctcatggatggacatgcgtccga

SEQ ID NO: 5031 - DNA, 225 bp, unidentified; identical to SEQ ID NO: 4556
  misc_feature 1..225: note = Ascusbbf_4, encodes 16S rRNA
  source 1..225: mol_type = genomic DNA

SEQ ID NO: 5032 - DNA, 225 bp, unidentified
  misc_feature 1..225: note = Ascusbbf_5131, encodes 16S rRNA
  source 1..225: mol_type = genomic DNA
agagtttgatcctggctcaggatgaacgctagctacaggcttaacacatgcaagtcgaggggcagcattaagtcagcttgctgatttagatggcgaccggcgcacgggtgagtaacgcgtatccaacctgccccctacccggggatagccttgcgaaagtaagattaatacccggtgcagttatgattccgcatgggaatataacgaaagattcatcggtagggg

SEQ ID NO: 5033 - DNA, 225 bp, unidentified; identical to SEQ ID NO: 3166
  misc_feature 1..225: note = Ascusbbf_8600, encodes 16S rRNA
  source 1..225: mol_type = genomic DNA

SEQ ID NO: 5034 - DNA, 225 bp, unidentified; identical to SEQ ID NO: 2453
  misc_feature 1..225: note = Ascusbbf_1273, encodes 16S rRNA
  source 1..225: mol_type = genomic DNA

SEQ ID NO: 5035 - DNA, 225 bp, unidentified; identical to SEQ ID NO: 2984
  misc_feature 1..225: note = Ascusbbf_39159, encodes 16S rRNA
  source 1..225: mol_type = genomic DNA

SEQ ID NO: 5036 - DNA, 225 bp, unidentified
  misc_feature 1..225: note = Ascusbbf_9751, encodes 16S rRNA
  source 1..225: mol_type = genomic DNA
agagtttgatcatggctcaggatgaacgctggcggcgtgcctaacacatgcaagtcgaacggggtaaggacaccggatgaagattcgtcagattccaccgtccttacttagtggcggacgggtgagtaacgcgtgggcaacctgccctgtacaggggaatagcagctggaaacggctggtaaaaccgcatatgcgcgcagtaccgcatggtacagcgcggaaaac

SEQ ID NO: 5037 - DNA, 225 bp, unidentified; identical to SEQ ID NO: 2059
  misc_feature 1..225: note = Ascusbbf_318, encodes 16S rRNA
  source 1..225: mol_type = genomic DNA

SEQ ID NO: 5038 - DNA, 225 bp, unidentified
  misc_feature 1..225: note = Ascusbbf_7046, encodes 16S rRNA
  source 1..225: mol_type = genomic DNA
agagtttgatcatggctcaggacgaacgctggcggcgtgcttaacacatgcaagtcgagcggtaaggccccttcgggggtacacgagcggcgaacgggtgagtaacacgtgagtaacctgcccctgactctgggataagcctgggaaactgggtctaataccggatatgacctcgtgccgcatggtgtggggtggaaaggtgtttttccggtcagggatgggctc

SEQ ID NO: 5039 - DNA, 225 bp, unidentified
  misc_feature 1..225: note = Ascusbbf_25993, encodes 16S rRNA
  source 1..225: mol_type = genomic DNA
agagtttgatcatggctcaggatgaacgctggcggcgtgcctaacacatgcaagtcgaacgaagcatatttggcagagattcgtcgaagccggatatgacttagtggcggacgggtgagtaatgtatgagcaacctgcctttcagagggggacaacagttggaaacgactgctaataccgcataatgtatggaggggacatccccatcataccaaaggagcaatc

SEQ ID NO: 5040 - DNA, 225 bp, unidentified; identical to SEQ ID NO: 4988
  misc_feature 1..225: note = Ascusbbf_7027, encodes 16S rRNA
  source 1..225: mol_type = genomic DNA

SEQ ID NO: 5041 - DNA, 225 bp, unidentified
  misc_feature 1..225: note = Ascusbbf_1372985, encodes 16S rRNA
  source 1..225: mol_type = genomic DNA
agagtttgatcatggctcaggatgaacgctagcggcaggcttaacacatgcaagtcgaggggcatcgcggggtagcaataccctggcggcgaccggcgaaagggtgcgtaacgcgtgagcgacatgcccgtcacagggggacaaccggcggaaacgccgcctaataccccatatgaggccaggccacatggccgggccttgaaagtcaaggcggtgacggattgg

SEQ ID NO: 5042 - DNA, 225 bp, unidentified
  misc_feature 1..225: note = Ascusbbf_23253, encodes 16S rRNA
  source 1..225: mol_type = genomic DNA
agagtttgatcctggctcaggatgaacgctagcggcaggcttaacacatgcaagtcgaggggcatcgcggtgtagcaatacactggcggcgaccggcgtaagggtgcgtaacgcgtgagcaacatgcccgtcacagggggataatccatggaaacgtggtctaacaccgcatagataaaccggtatggcatcatactgtttagaaattttgattaaggtgacgga

SEQ ID NO: 5043 - DNA, 225 bp, unidentified
  misc_feature 1..225: note = Ascusbbf_121971, encodes 16S rRNA
  source 1..225: mol_type = genomic DNA
agagtttgatcctggctcaggatgaacgctagcggcaggcttaacacatgcaagtcgaggggcaacgcggtgtagcaatacactggcggcgaccggcggaagggtgcgtaacgcgtgagcaacatgcccgtcacagggggataatccatggaaacgtggtctaacaccgcatagattatagggaggacatcctctttataagaaattcgcaagaaggtgacggat

SEQ ID NO: 5044 - DNA, 225 bp, unidentified
  misc_feature 1..225: note = Ascusbbf_5251, encodes 16S rRNA
  source 1..225: mol_type = genomic DNA
agagtttgatcatggctcagaacgaacgctggcggcgcgtcttaagcatgcaagtcgagcggtaagattggtgcttgcactaatcctagagcggcggactggtgagtaacgcgtgggtgacgtacctctgtgacggggacagctcctagaaataggagataataccggatacgctgtgtgcagtcagagtgcacacaggaaaggatcttttgattcgcacagaga

SEQ ID NO: 5045 - DNA, 225 bp, unidentified
  misc_feature 1..225: note = Ascusbbf_6716, encodes 16S rRNA
  source 1..225: mol_type = genomic DNA
agagtttgatcctggctcaggacgaacgctggcggcgtgcttaacacatgcaagtcgaacggatcatctttacttcggttttggtggttagtggcgaacgggtgagtaacacgtgagcaacctgcccttcactgggggataactgtgggaaacttcagctaataccgcatgtacaccttccgtcgcatggtggttggtggaaagttttttcggtgggggatgggc

SEQ ID NO: 5046 - DNA, 490 bp, unidentified
  misc_feature 1..490: note = Ascusbbf_100, encodes 16S rRNA
  source 1..490: mol_type = genomic DNA
agagtttgatcctggctcaggatgaacgctagctacaggcttaacacatgcaagtcgaggggaaacgatgagagagcttgctctctcaggcgtcgaccggcgcacgggtgagtaacacgtatccaacctgcctttttccagggaataaccttgcgaaagtaagactaatgccctatgtgtcctttgacggcatcagacgaggacgaaagattcatcggaaagggatggggatgcgcctgattaggcagttggcggggcaacggcccaccaaaccgacgatcagtaggggttctgagaggaaggtcccccacattggaactgagacacggtccaaactcctacgggaggcagcagtgaggaatattggtcaatgggcgagagcctgaaccagccaagtagcgtgcaggatgacggccctatgggttgtaaactgcttttgtacggggataaagtgagtcacgtgtggcttattgcaggtaccgtacgaata

SEQ ID NO: 5047 - DNA, 490 bp, unidentified
  misc_feature 1..490: note = Ascusbbf_20584, encodes 16S rRNA
  source 1..490: mol_type = genomic DNA
agagtttgatcctggctcaggatgaacgctggcggcgtgcctaatacatgcaagtcgaacgaggtgtagcaatacaccgagtggcgaacgggtgagtaacacgtaggtaacctgcccctaagtctgggatacccaggggaaaccttggctaataccggatagcggcggaggggacatcccttccgcacgaaagtcgcgtttgcgacgctttcggatggacctgcggcacattagctagttggcggggcaacggcccaccaaggcgaggatgtgtagccgacctgagagggtgaacggccacaatggaactgagacacggtccatactcctacgggaggcagcagtagggagttttcggcaatgggcgaaagcctgaccgagcaacgccgcgtgagtgagaaggtcttcggattgtaaagctctgttacgagggacgaacggtggggtcaggaaatgggccccaattgacggtacctcgccagaaagtgac

SEQ ID NO: 5048 - DNA, 490 bp, unidentified
  misc_feature 1..490: note = Ascusbbf_4317, encodes 16S rRNA
  source 1..490: mol_type = genomic DNA
agagtttgatcctggctcaggatgaacgctagctacaggcttaacacatgcaagtcgaggggcatcatggagattgcttgcaatctttgatggcgaccggcgcacgggtgagtaacgcgtatccaacctgcctgcaagtagggaatagcccggagaaatccggattaatgccctatgtggcccttagatgacatctgaagagggttaaagatttatcgcttgcggatggggatgcgtccgattaggcagacggcggggtaacggcccaccgtgccatcgatcggtaggggttctgagaggaaggtcccccacactggtactgagacacggaccagactcctacgggaggcagcagtgaggaatattggtcaatggtcgtaagactgaaccagccaagtagcgtgcaggatgacggccctacgggttgtaaactgcttttatagggggataatatgcgggacgtgtcctgtattgcaggtaccctatgaat

SEQ ID NO: 5049 - DNA, 490 bp, unidentified
  misc_feature 1..490: note = Ascusbbf_6, encodes 16S rRNA
  source 1..490: mol_type = genomic DNA
agagtttgatcctggctcaggatgaacgctagctacaggcttaacacatgcaagtcgaggggtaacgacagcgaaagcttgcttttgctgggcgacgaccggcgaatgggtgagtaacgcgtatccaacctgccgcaaagtagggcacagccttgcgaaagtaagattaatgccctatgtgctgtgatgatgacatcagaattgcagtaaaggttcaccgctttgcgatggggatgcgtctgattaggttgttggcggggtaacggcccaccaagcccgcgatcagtaggggttctgagaggaaggtcccccacattggaactgagacacggtccaaactcctacgggaggcagcagtgaggaatattggtcaatgggcgagagcctgaaccagccaagtagcgtgcgggacgaaggccctatgggttgtaaaccgcttttacggggggataaagtgagtgacgtgtcattcattgcaggtaccccgcga

SEQ ID NO: 5050 - DNA, 490 bp, unidentified
  misc_feature 1..490: note = Ascusbbf_19022, encodes 16S rRNA
  source 1..490: mol_type = genomic DNA
agagtttgatcctggctcaggatgaacgctggcggcgtgcctaatacatgcaagtcgagcgagaaattaagaagaagcgttttcgaacaattcatcttaatggaaagcggcggacgggtgagtaacgcgtaggcaacctgcccttagcagagggatagccattggaaacgatgattaaaacctcataacgctgagataacacatgttatctttgccaaagatttatcggctaaggatgggcctgcgtctgattaactagttggtgaggtaacggctcaccaaggtgacgatcagtagccgacctgagagggtgatcggccacattggaactgagacacggtccaaacttctacggaaggcagcagtaaggaatcttgcacaatgggggaaaccctgatgcagcaacgccgcgtgaacgatgaaggccttcgggttgtaaagttctgatctgagggaagaaaaaaatgacggtacctcaggagaaagcccc

SEQ ID NO: 5051 - DNA, 490 bp, unidentified
  misc_feature 1..490: note = Ascusbbf_2624, encodes 16S rRNA
  source 1..490: mol_type = genomic DNA
agagtttgatcatggctcaggatgaacgctggcggcgtgcttaacacatgcaagtcgaacgaagcaatttatcacgatcccttcggggtgacgatttattgactgagtggcggacgggtgagtaacgcgtgggtaacctaccttgtacagggggataacagttggaaacgactgctaataccgcataagcgcacagcttcgcatgaagcagtgtgaaaagtttttcggtataagatggacccgcgtctgattagctagttggtgaggtaacggcccaccaaggcgacgatcagtagccgacctgagagggtgaccggccacattgggactgagacacggcccaaactcctacgggaggcagcagtggggaatattgcacaatgggcgaaagcctgatgcagcgacgccgcgtgagcgaagaagtatttcggtatgtaaagctctatcagcagggaagataatgacggtacctgactaagaagcaccggct

SEQ ID NO: 5052 - DNA, 490 bp, unidentified
  misc_feature 1..490: note = Ascusbbf_3427, encodes 16S rRNA
  source 1..490: mol_type = genomic DNA
agagtttgatcatggctcaggatgaacgctagcggcaggcttaacacatgcaagtcgaggggtaacaggggatgtagcaatacatcctgctgacgaccggcgcacgggtgcgtaacgcgtatgcaacctgcccgcaacaggggtataacggagtgaaaattccactaatcccccatattgtcattaggccgcatggctttatgacgaaaggttttttctggttgcggatgggcatgcgtgacattaggtagttggcggggtaacggcccaccaagccgacgatgtctaggggagctgagaggcttatcccccacactggtactgagacacggaccagactcctacgggaggcagcagtgaggaatattggtcaatgggcggaagcctgaaccagccatgccgcgtggaggaagaaggtcctatgggttgtaaactccttttgtaccggagtaataaggtctttgcgaaggccgatgagagtacggtacga

SEQ ID NO: 5053 - DNA, 490 bp, unidentified
  misc_feature 1..490: note = Ascusbbf_5005, encodes 16S rRNA
  source 1..490: mol_type = genomic DNA
agagtttgatcctggctcaggatgaacgctagctacaggcttaacacatgcaagtcgaggggcagcattgagatagcttgctatttcagatggcgaccggcgcacgggtgagtaacgcgtatccaacctggcccgtagtagggaacagcccggcgaaagtcggattaatgccctatgttctccgacgaagacatctgagttggagcaaagattcatcgctacgggatggggatgcgtctgattaggtagtaggcggggtaacggcccacctagccaacgatcagtaggggttctgagaggaaggtcccccacattggtactgagacacggaccaaactcctacgggaggcagcagtgaggaatattggtcaatgggcgagagcctgaaccagccaagtagcgtgcaggacgactgccctatgggttgtaaactgcttttatgcggggataaagtgaggcatgtatgcctttttgcaggtaccgcatgaat

SEQ ID NO: 5054 - DNA, 490 bp, unidentified
  misc_feature 1..490: note = Ascusbbf_69, encodes 16S rRNA
  source 1..490: mol_type = genomic DNA
agagtttgatcctggctcaggatgaacgctagctacaggcttaacacatgcaagtcgaggggcagcatgatcgaagcttgctttgattgatggcgaccggcgcacgggtgagtaacgcgtatccaaccttccctatagtagagaatagcccggcgaaagtcggattaatgctctatgttgtatttagaagacatctgaagaataccaaaggtttaccgctataggatggggatgcgtctgattaggtagtaggcggggtaacggcccacctagccgacgatcagtaggggttctgagaggaaggtcccccacattggaactgagacacggtccaaactcctacgggaggcagcagtgaggaatattggtcaatggacggaagtctgaaccagccaagtagcgtgcaggatgacggccctatgggttgtaaactgcttttatatagggataaagtcggggacgtgtccccgtttgtaggtactatatgaat

SEQ ID NO: 5055 - DNA, 490 bp, unidentified
  misc_feature 1..490: note = Ascusbbf_8082, encodes 16S rRNA
  source 1..490: mol_type = genomic DNA
agagtttgatcctggctcaggacgaacgctggcggcgtgcttaacacatgcaagtcgaacggggaattctgcttcggtggaattcctagtggcgaacgggtgagtaacgcgtaggcaacctgcccttcagacggggacaacatcccgaaaggggtgctaataccggatacgaagctcctgccgcatgacgggagcttgaaaggcgcaaacaagcgccgctgagggatgggcctgcgtccgattagcttgttggtggggtaacggcccaccaaggcgacgatcggtagccggtctgagaggatgaacggccacattgggactgagacacggcccagactcctacgggaggcagcagtggggaatcttccgcaatgggcgaaagcctgacggagcaacgccgcgtgagtgaagaagttcttcggaacgtaaagctctgttgttcacgacgaacggggggaccaggaaatgggtttccagtgacggtagtgaa

SEQ ID NO: 5056 - DNA, 490 bp, unidentified
  misc_feature 1..490: note = Ascusbbf_95, encodes 16S rRNA
  source 1..490: mol_type = genomic DNA
agagtttgatcctggctcaggatgaacgctagctacaggcttaacacatgcaagtcgaggggcagcgagaaggaagcttgctttctttgtcggcgaccggcgcacgggtgagtaacgcgtatccaaccttccccttagtagggcatagcccggcgaaagtcggattaacaccctatgttatccgaagaggacatctgaattggattaaaggtttaccgctaagggatggggatgcgtctgattaggtagtaggcggggtaacggcccacctagccgacgatcagtaggggttctgagaggaaggtcccccacattggaactgagacacggtccaaactcctacgggaggcagcagtgaggaatattggtcaatgggcgagagcctgaaccagccaagtagcgtgcaggatgacggccctatgggttgtaaactgcttttatacggggataaagtgagggacgtgtccctttttgtaggtaccgtatgaat

SEQ ID NO: 5057 - DNA, 490 bp, unidentified
  misc_feature 1..490: note = Ascusbbf_1136, encodes 16S rRNA
  source 1..490: mol_type = genomic DNA
agagtttgatcctggctcaggatgaacgctggcggcgtgcctaacacatgcaagtcgaacggtgtaatgattgaagttttcggacagatttcattacatagtggcggacgggtgagtaacgcgtggagaacctgcactgtactgggggatagcagctggaaacggctggtaataccgcatgagaccacgggagggcatcctcctgaggcaaaagatttatcggtacaggatggatccgcgtttgattagccagttggcggggtaacggcccaccaaagcgacgatcaatagccggcctgagagggcggacggccacattgggactgagacacggcccagactcctacgggaggcagcagtgggggatattgcacaatggacgaaagtctgatgcagcgacgccgcgtgagtgaagaagtatttcggtatgtaaagctctatcagcagggaagaaaggctccggaaggagagatgacggtacctgagtaag

SEQ ID NO: 5058 - DNA, 490 bp, unidentified
  misc_feature 1..490: note = Ascusbbf_2770, encodes 16S rRNA
  source 1..490: mol_type = genomic DNA
agagtttgatcctggctcaggataaacgccggcggcgtgcctaatacatgcaagtcgaacgaggctcttcggagccgagtggcgtacgggtgagtaacacgttggtaacctgccctccagaccggaataccagagagaaatctctgctaatgccggatgacgtcatatggtcgcaagaccacttgaccaaaggcggcaactgccgcgctgaaggatggacctgcgtcgcattagctagttggcgggataatggcccaccaaggcgaggatgcgtagccgagctgagaggctaaacggccacattgggactgagacacggcccagactcctacgggaggcagcagtagggagtatttggcaatgggggaaaccctgaccgagcaacgccgcgtgtgtgatgaaggccttcgggtcgtaaaacactgtgattctctgggaaactcatggggagtggaaagcctcatgactgaccggactattagaaagcaac

SEQ ID NO: 5059 - DNA, 490 bp, unidentified
  misc_feature 1..490: note = Ascusbbf_1629, encodes 16S rRNA
  source 1..490: mol_type = genomic DNA
agagtttgatcatggctcaggatgaacgctggcggcgtgcctaatacatgcaagtcgagcgaaccacttcggtggtgagcggcgaacgggtgagtaacacgtaggtgatctgcccatcagacggggacaacgattggaaacgatcgctaataccggataggacgaaagtttaaaggtgctcctggcaccgctgatggatgagcctgcggcgcattagctagttggtagggtaaaggcctaccaaggcgacgatgcgtagccgacctgagagggtgaacggccacactgggactgagacacggcccagactcctacgggaggcagcagtagggaatcttcggcaatgggcgaaagcctgaccgagcaacgccgcgtgaatgatgaaggccttcgggttgtaaaattctgttataagggaagaacgactttagtaggaaatggctaaagtgtgacggtaccttatgagaaagccacggctaactacgtgcca

SEQ ID NO: 5060 - DNA, 490 bp, unidentified
  misc_feature 1..490: note = Ascusbbf_1821, encodes 16S rRNA
  source 1..490: mol_type = genomic DNA
agagtttgatcctggctcaggatgaacgctagctacaggcttaacacatgcaagtcgaggggcagcacggagactgcttgcagtctctggtggcgaccggcggatgggtgagtaacgcgtatccaacctgcccgtgacccggggacagccttccgaaaggaagattaatacccgatgttccggcgtgcgcgcatgcgctgcgccggcaaagtttttctgcggtgacggatggggatgcgtctgattaggcagcaggcggggtaacggcccacctggccatcgatcagtaggggttctgagaggaaggtcccccacattggaactgagacacggtccaaactcctacgggaggcagcagtgaggaatattggtcaatgggcgcaagcctgaaccagccaagtagcgtgcaggatgacggccctacgggttgtaaactgcttttgcgcgggagcaaagaggggcacgtgtgccccgttgcgcgtaccgcgtg

SEQ ID NO: 5061 - DNA, 490 bp, unidentified
  misc_feature 1..490: note = Ascusbbf_56782, encodes 16S rRNA
  source 1..490: mol_type = genomic DNA
agagtttgatcatggctcaggatgaacgctagctacaggcttaacacatgcaagtcgaggggcagcatgatcaaagcttgctttgattgatggcgaccggcgcacgggtgagtaacgcgtatccaaccttccctatagtagtggatagcccggcgaaagtcggattaatacactatgttgtatttagaggacatctgaagaataccaaaggcttgccgctataggatggggatgcgtctgattagatagtaggcggggtaacggcccacctagtcgacgatcagtaggggttctgagaggaaggtcccccacattggaactgagacacggtccaaactcctacgggaggcagcagtgaggaatattggtcaatggacgggagtctgaaccagccaagtagcgtgcaggatgacggccctatgggttgtaaactgcttttatcgggggataaagtcacccacgtgtgggtgtttgtaggtacccgatgaat

SEQ ID NO: 5062 - DNA, 490 bp, unidentified
  misc_feature 1..490: note = Ascusbbf_92, encodes 16S rRNA
  source 1..490: mol_type = genomic DNA
agagtttgatcctggctcaggatgaacgctggcggcgcgcctaacacatgcaagtcgaacggccggacccacctcggtgggcgaggcagtggcgaacggctgagtaacacgtgggcaacctgcccccctccccgggacagcctcgggaaaccgtgggtaataccggatactccgccccctccgcatgggaggggcgggaaagctccggcggggggggatgggcccgcggcctgttagctagttggcggggcaacggcccaccaaggcgactatgggtagctgggttgagagaccgaccagccagattgggactgagacacggcccagactcctacgggaggcagcagtggggaatcttgcgcaatgggcggaagcctgacgcagcgacgccgcgtgcgggaggaaggccctcgggtcgtaaaccgctttcagcagggacgaggccgcaaggtgacggtacctgcagaagaagccccggctaactacgtgc

SEQ ID NO: 5063 - DNA, 490 bp, unidentified
  misc_feature 1..490: note = Ascusbbf_118, encodes 16S rRNA
  source 1..490: mol_type = genomic DNA
agagtttgatcctggctcaggatgaacgctagctacaggcttaacacatgcaagtcgaggggcagcatgatttgtgcttgcacagattgatggcgaccggcgcacgggtgagtaacgcgtatccaaccttccctatagtagaggatagcccggcgaaagtcggattaatactctatgttattcaatgcggacatctaagttgaatcaaagattaatcgctataggatggggatgcgtctgattaggttgttggcggggtaacggcccaccaagcctacgatcagtaggggttctgagaggaaggtcccccacattggaactgagacacggtccaaactcctacgggaggcagcagtgaggaatattggtcaatgggcgagagcctgaaccagccaagtagcgtgcaggatgacggccctatgggttgtaaactgcttttatacggggataaagtgagggacgtgtcccttattgtaggtaccgtatgaat

SEQ ID NO: 5064 - DNA, 230 bp, unidentified
  misc_feature 1..230: note = Ascusbbf_5429, encodes 16S rRNA
  source 1..230: mol_type = genomic DNA
agagtttgatcctggctcagattgaacgctggcggcaggcttaacacatgcaagtcgtacggtaacagagggaagcttgcttctctgctgacgagtggcggacgggtgagtaatgtctgggaagctgcctgcttgagggggatagcggagcgaaagttccgataataccgcgtaagcccgagaggggaaagtgcgggaccgcaaggccgcacgccagcagccgcggtaat

SEQ ID NO: 5065 - DNA, 490 bp, unidentified
  misc_feature 1..490: note = Ascusbbf_3, encodes 16S rRNA
  source 1..490: mol_type = genomic DNA
agagtttgatcctggctcagattgaacgctggcggcaggcttaacacatgcaagtcgtacggtaacagagggaagcttgcttctctgctgacgagtggcggacgggtgagtaatgtctgggaagctgcctgcttgagggggatagcggagcgaaagttccgataataccgcgtaagcccgagaggggaaagtgcgggaccgcaaggccgcacgcgagcagatgcgcccagatgggattaggcagttggggaggtaacggctcaccaaaccgatgatctctagctggtttgagaggacaatcagccacattggaattgagaaacggaccaaactcctacgggaggcagcagtggggaatattgcacaatgggggaaaccctgatgcagccatgccgcgtgtgtgaagaaggccttcgggttgtaaagcacttttgcattcgaggaagacagcacgtaaataaacgtgttatttgacgttagagtgtgaata

SEQ ID NO: 5066 - DNA, 490 bp, unidentified
  misc_feature 1..490: note = Ascusbbf_10576, encodes 16S rRNA
  source 1..490: mol_type = genomic DNA
agagtttgatcctggctcaggatgaacgctagctacaggcttaacacatgcaagtcgaggggcagcatgacgatagcttgctattgtcgatggcgaccggcgcacgggtgagtaacgcgtatccaaccttccccatagtagggcatagcccgtagaaatgcggattaataccctatgttttccgaagcagacatctaatttggaacaaaggttcaccgctatgggatggggatgcgtctgattaggttgttggcggggtaacggcccaccaagccatcgatcagtaggggttctgagaggaaggtcccccacattggaactgagacacggtccaaactcctacgggaggcagcagtgaggaatattggtcaatgggcgagagcctgaaccagccaagtagcgtgcaggaagacggccctatgggttgtaaactgcttttatgcggggataaagttggctacgtgtagccatttgcaggtaccgcatgaat

SEQ ID NO: 5067 - DNA, 490 bp, unidentified
  misc_feature 1..490: note = Ascusbbf_729, encodes 16S rRNA
  source 1..490: mol_type = genomic DNA
agagtttgatcctggctcaggatgaacgctagctacaggcttaacacatgcaagtcgaggggcatcagggtctgtgcttgcacagattgctggcgaccggcgcacgggtgagtaacgcgtatccaaccttccccttagtagaggatagcccggcgaaagtcggattaatactctatgttgttcaatgcggacatctaagttgaaccaaaggtttaccgctaagggatggggatgcgtctgattaggtagtaggcggggtaacggcccacctagccaacgatcagtaggggttctgagaggaaggtcccccacattggaactgagacacggtccaaactcctacgggaggcagcagtgaggaatattggtcaatggacgagagtctgaaccagccaagtagcgtgcaggatgacggccctatgggttgtaaactgcttttatgcggggataaagtgagggacgtgtcccttattgtaggtaccgcatgaat

SEQ ID NO: 5068 - DNA, 490 bp, unidentified
  misc_feature 1..490: note = Ascusbbf_201, encodes 16S rRNA
  source 1..490: mol_type = genomic DNA
agagtttgatcctggctcaggatgaacgctagctacaggcttaacacatgcaagtcgaggggcagcatatagatagcttgctatttatgatggcgaccggcgcacgggtgagtaacgcgtatccaaccttccctatactagagaatagcccggcgaaagtcggattaatgctctatgttcttctttgatggcatctgacgagaagcaaaggtttaccggtataggatggggatgcgtctgattaggttgttggcggggtaacggcccaccaagcctacgatcagtaggggttctgagaggaaggtcccccacattggtactgagacacggaccaaactcctacgggaggcagcagtgaggaatattggtcaatgggcgagagcctgaaccagccaagtagcgtgcaggatgactgccctatgggttgtaaactgcttttataggggaataaagtgaggtatgcatacctttttgtatgtaccctatgaat

SEQ ID NO: 5069 - DNA, 490 bp, unidentified
  misc_feature 1..490: note = Ascusbbf_416, encodes 16S rRNA
  source 1..490: mol_type = genomic DNA
agagtttgatcctggctcaggatgaacgctagctacaggcttaacacatgcaagtcgaggggcatcatggagtttgcttgcaaactctgatggcgaccggcgcacgggtgagtaacgcgtatccaaccttccctatagtagaggatagcccggcgaaagtcggattaatactctatgttttccgttgcagacatctaagatggaacaaaggcttgccgctataggatggggatgcgtctgattaggtagtcggcggggtaacggcccaccgagccatcgatcagtaggggttctgagaggaaggtcccccacattggaactgagacacggtccaaactcctacgggaggcagcagtgaggaatattggtcaatgggcgcgagcctgaaccagccaagtagcgtgcaggacgacggccctatgggttgtaaactgcttttatgcggggataaagttcactacgtgtagtgttttgtaggtaccgcatgaat

SEQ ID NO: 5070 - DNA, 490 bp, unidentified
  misc_feature 1..490: note = Ascusbbf_15806, encodes 16S rRNA
  source 1..490: mol_type = genomic DNA
agagtttgatcctggctcaggatgaacgctagctacaggcttaacacatgcaagtcgaggggcagcatgatcttagcttgctaagattgatggcgaccggcgcacgggtgagtaacgcgtatccaaccttccctatagtagaggatagcccggcgaaagtcggattaatactctatgttttccgttgcagacatctaaaatggaacaaaggtttaccgctataggatggggatgcgtctgattaggttgttggcggggtaacggcccaccaagccttcgatcagtaggggttctgagaggaaggtcccccacattggaactgagacacggtccaaactcctacgggaggcagcagtgaggaatattggtcaatgggcgagagcctgaaccagccaagtagcgtgcaggaagacggccctatgggttgtaaactgcttttatacagggataaagtgtgccacgtgtggcgttttgtaggtactgtatgaat

SEQ ID NO: 5071 - DNA, 490 bp, unidentified
  misc_feature 1..490: note = Ascusbbf_6115, encodes 16S rRNA
  source 1..490: mol_type = genomic DNA
agagtttgatcctggctcaggatgaacgctggcggcgtgcctaacacatgcaagtcgaacggaaatgttttgatgaagatttcggttggattcatttcattttagtggcggacgggtgagtaacacgtgggtaacctgccctgtaccgggggataacacttagaaataggtgataataccgcataagcgcacactgacgcatgtcagagtgtgaaaaactccggtggtacaggatggacccgcgtctgattagcttgttggcggggtaacggcccaccaaggcgacgatcagtagccggcctgagagggtgaacggccacattgggactgagacacggcccagactcctacgggaggcagcagtgggggatattgcacaatgggggaaaccctgatgcagcgacgccgcgtgagtgatgaagtatttcggtatgtaaagctctatcagcagggaagataatgacggtacctgactaagaagccccggcta

SEQ ID NO: 5072 - DNA, 490 bp, unidentified
  misc_feature 1..490: note = Ascusbbf_1325058, encodes 16S rRNA
  source 1..490: mol_type = genomic DNA
agagtttgatcctggctcaggacgaacgctggcggcgtgcttaacacatgcaagtcgaacggggcgaagaagagcttgctcttcctagcctagtggcaaacgggtgagtaacgcgtaggcaacctgcccttcggatggggacaacatctcgaaaggaatgctaataccgaatgaagtgcattggccgcatggccgatgcaccaaaggccgggcaaccggtcactgaaggatgggcctgcgtctgattagctagttggtggggtaacggcccaccaaggcgacgatcagtagccggtctgagaggcggaacggccacattgggactgcgacacgaccaaaactcctacgggaggcagcagtggggaatcttccgcaatgggcgaaagcctgacggagcaacgccgcgtgagtgaagaaggttttcggatcgtaaagctctgttgtcagggacgagagacttgatcaggaagtgggtcaaggaggacggtac

SEQ ID NO: 5073 - DNA, 490 bp, unidentified
  misc_feature 1..490: note = Ascusbbf_28350, encodes 16S rRNA
  source 1..490: mol_type = genomic DNA
agagtttgatcctggctcaggatgaacgctagctacaggcttaacacatgcaagtcgcggggtaacgagaggaaagcttgctttccttgtcgacgaccggcgcacgggtgagtaacgcgtatccaacctgcccattaccacgggatagcccgtcgaaaggcggattaataccgtatgaacttcatggatggcatctgatatgaagtaaaggtttagcggtaatggatggggatgcgtccgattagatagttggtgaggcaacggctcaccaagtcgacgatcggtaggggttctgagaggaaggtcccccacattggaactgagacacggtccaaactcctacgggaggcagcagtgaggaatattggtcaatgggcgagagcctgaaccagccaagtagcgtgcaggacgacggccctatgggttgtaaactgcttttatctggggataaagtgcgggacgcgtcccgctttgcaggtaccagatgaat

SEQ ID NO: 5074 - DNA, 490 bp, unidentified
  misc_feature 1..490: note = Ascusbbf_372, encodes 16S rRNA
  source 1..490: mol_type = genomic DNA
agagtttgatcctggctcaggatgaacgctagcgacaggcttaacacatgcaagtcgaggggcagcgggcgagtggcaacacttgctgtcggcgaccggcgcactggtgagtaacacgtatgcaacctgcccccttctgggagataacccatagaaatgtggcctaatatcccatagtcggtccagccgcatggccgggccgggaaaggcgagccggaaggggatgggcatgcggcgcattagctagttggcggggcagaggcccaccaaggcgacgatgcgtaggggttctgagaggaaggtcccccacattggtactgagacacggaccaaactcctacgggaggcagcagtgaggaatattggtcaatgggcgggagcctgaaccagccaagtcgcgtgagggaggaaggtcctacggattgtaaacctctttagccggggagcaacgtgcgccacgtgtggcgcagtgagagtacccggagaataa

SEQ ID NO: 5075 - DNA, 490 bp, unidentified
  misc_feature 1..490: note = Ascusbbf_667, encodes 16S rRNA
  source 1..490: mol_type = genomic DNA
agagtttgatcctggctcaggacgaacgctggcggcatgcctaacacatgcaagtcgaacggagattatttcggtaatcttagtggcgaacgggtgagtaacgcgtaggcaacctgccctttagttggggacaacatcccgaaaggggtgctaataccgaatgtgatcgcttcctcgcatgagagagcgatgaaagatggcctctatttataagctatcgctaaaggatgggcctgcgtctgattagctagttggtggggtaacggcctaccaaggcgatgatcagtagccggtctgagaggatgaacggccacattgggactgagacacggcccagactcctacgggaggcagcagtggggaatcttccgcaatgggcgaaagcctgacggagcaatgccgcgtgagtgatgaaggaattcgttccgtaaagctcttttgtttatgacgaatgtgcagactgtgaataatggtttgtaatgacggtagt

SEQ ID NO: 5076 - DNA, 490 bp, unidentified
  misc_feature 1..490: note = Ascusbbf_1207, encodes 16S rRNA
  source 1..490: mol_type = genomic DNA
agagtttgatcatggctcaggatgaacgctagcgacaggcctaacacatgcaagtcgaggggcagcgggattgaagcttgctttaattgccggcgaccggcgcacgggtgcgtaacaggtgtgcaatctgtccatagtcggggaatagcccagcgaaagttggattaatgctccatgtgaatcgagaccgcatgatcttgatttgaaacgtaaggactatgggtgagcacgcttctgattagatagttggtgaggtaacggctcaccaagtcgacgatcagtaggggttctgagaggaaggtcccccacattggaactgagacacggtccaaactcctacgggaggcagcagtgaggaatattggtcaatgggcgagagcctgaaccagccaagtcgcgtgaaggatgaaggttctatggattgtaaacttcttttgtccgagggtaaaaaaggctacgtgtagcttcttgcaagtatcggacgaataag

SEQ ID NO: 5077 - DNA, 490 bp, unidentified
  misc_feature 1..490: note = Ascusbbf_3875, encodes 16S rRNA
  source 1..490: mol_type = genomic DNA
agagtttgatcctggctcaggatgaacgctggcggcgtgcctaatacatgcaagtcgaacggagtgtgccattgatgaagcttcggcggattcgccggtacacttagtggcggacgggtgagtaacgcgtggataacctgcctcacacagggggatagcagctggaaacggctgataataccgcataagcgcacagtgacgcatgtcacagtgtgaaaaactccggtggtgtgagatggatccgcgtctgattagcttgttggcggggtaacggcccaccaaggcgacgatcagtagccggcctgagagggtgaacggccacattgggactgagacacggcccagactcctacgggaggcagcagtagggaatattgcacaatggggggaaccctgatgcagcgacgccgcgtgaaggaagaagtatttcggtatgtaaacttctatcagcagggaagataatgacggtacctgactaagaagccccggc

SEQ ID NO: 5078 - DNA, 490 bp, unidentified
  misc_feature 1..490: note = Ascusbbf_72889, encodes 16S rRNA
  source 1..490: mol_type = genomic DNA
agagtttgatcatggctcaggatgaacgctggcggcgtgcctaacacatgcaagtcgagcggaccttagaaagtgaacagcttgctgggatctttcgaaaggttagcggcggacgggtgagtaacgcgtgggtaacctgcctcatacagggggatagcagttggaaacgactggtaataccgcataagcgcacagtgccgcatggtacggtgtgaaaaactccggtggtatgagatggacccgcgtccgattagccagttggcggggtaacggcccaccaaagcgacgatcggtagccggcctgagagggcggacggccacattgggactgagacacggcccagactcctacgggaggcagcagtgggggatattgcacaatggaggaaactctgatgcagcgacgccgcgtgggtgaagaagtatttcggtatgtaaagccctatcagcagggacgataatgacggtacctgactaagaagccccggct

SEQ ID NO: 5079 - DNA, 490 bp, unidentified
  misc_feature 1..490: note = Ascusbbf_106863, encodes 16S rRNA
  source 1..490: mol_type = genomic DNA
agagtttgatcctggctcaggatgaacgctagcgacaggcttaacacatgcaagtcgaggggcagcgcgagggtagcaatacctttggcggcgaccggcgcactggtgagtaacacgtatgcgacctgccccggacagggggataaacccgggaaactgggcctaataccccatacgcctattgatcgcatggtcattaggtgaaagatccgtcggtccgggatgggcatgcggcgcattagctagttggcggggcaacggcccaccaaggcgacgatgcgtaggggttctgagaggaaggtcccccacactggtactgagacacggaccagactcctacgggaggcagcagtgaggaatattggtcaatggacgcgagtctgaaccagccaagtcgcgtgcgggaagaaggccctccgggtcgtaaaccgctttagccggggagtaacgtgggggacgcgtccctcagtgagagtacccggagaataag

SEQ ID NO: 5080 - DNA, 490 bp, unidentified
  misc_feature 1..490: note = Ascusbbf_120, encodes 16S rRNA
  source 1..490: mol_type = genomic DNA
agagtttgatcctggctcaggatgaacgctagctacaggcttaacacatgcaagtcgaggggcagcatattggtagcttgctactaatgatggcgaccggcgcacgggtgagtaacgcgtatccaaccttccctatactagaggatagcccggcgaaagtcggattaatactctatgttcttcgtagatgacatctgaaatgaagcaaagatttatcggtataggatggggatgcgtctgattaggttgttggcggggtaacggcccaccaagcctgcgatcagtaggggttctgagaggaaggtcccccacattggaactgagacacggtccaaactcctacgggaggcagcagtgaggaatattggtcaatggacgagagtctgaaccagccaagtagcgtgcaggatgacggccctatgggttgtaaactgcttttatatagggataaagtgatctacgtgtagatttttgtaggtactatatgaat

SEQ ID NO: 5081 - DNA, 490 bp, unidentified
  misc_feature 1..490: note = Ascusbbf_930, encodes 16S rRNA
  source 1..490: mol_type = genomic DNA
agagtttgatcctggctcaggatgaacgctagctacaggcttaacacatgcaagtcgaggggcagcatgatcttagcttgctaagattgatggcgaccggcgcacgggtgagtaacgcgtatccaaccttccctgtactaggggatagcccggcgaaagtcggattaataccctatgttttccgaagcgagcatttaatttggaacaaaggtttaccggtataggatggggatgcgtctgattagatagtaggcggggtaacggcccacctagtcgacgatcagtaggggttctgagaggaaggtcccccacattggaactgagacacggtccaaactcctacgggaggcagcagtgaggaatattggtcaatgggcgagagcctgaaccagccaagtagcgtgcaggatgacggccctatgggttgtaaactgcttttatatagggataaagtgagggacgtgtcccttattgtaggtactatatgaat

SEQ ID NO: 5082 - DNA, 490 bp, unidentified
  misc_feature 1..490: note = Ascusbbf_279562, encodes 16S rRNA
  source 1..490: mol_type = genomic DNA
agagtttgatcctggctcaggatgaacgctggcggcgtgcttaacacatgcaagtcgaacggagtacccttgacggagttttcggacaacagataggactacttagtggcggacgggtgagtaacgcgtgaggaacctgccttggagaggggaataacacagagaaatttgtgctaataccgcatgaagcagctggatcgcatgatcctggctgccaaagatttatcgctctgagatggcctcgcgtctgattaggtagttggtggggtaacggcccaccaagccgacgatcagtagccggactgagaggttggccggccacattgggactgagacacggcccagactcctacgggaggcagcagtggggaatattgggcaatgggcgcaagcctgacccagcaacgccgcgtgaaggaagaaggctttcgggttgtaaacttcttttatgagggacgaaggaagtgacggtacctcatgaataagctcc

SEQ ID NO: 5083 - DNA, 490 bp, unidentified
  misc_feature 1..490: note = Ascusbbf_1492973, encodes 16S rRNA
  source 1..490: mol_type = genomic DNA
agagtttgatcatggctcagaacgaacgctggcggcgcgttttaagcatgcaagtcgagcggcagtagcaatacgagagcggcggacgggtgagtaacacgtgggtaatctgccctccagtcggggatagcctgtggaaacacaggataataccggatgcgatggcgtccacacaagtgggtgtcaggaaaggggccaaggccccgctggaggatgagcccgcgtcccattagcttgatggtggggtacaggcccaccatggcgatgatgggtagccggcctgagagggtgaacggccacattggaactgagacacggtccagactcctacggaaggcagcagctaagaatcttccacaatggacgaaagtctgatggagcgacgccgcgtgggcgatgaaggccgtgaggttgtaaagcccttttcttgagggggaatgatgcaggcagggaatggcctgcggatgacgtgaatcaaggaataagcccc

SEQ ID NO: 5084 - DNA, 490 bp, unidentified
  misc_feature 1..490: note = Ascusbbf_1098850, encodes 16S rRNA
  source 1..490: mol_type = genomic DNA
agagtttgatcatggctcaggatgaacgctggcggcgtgcttaacacatgcaagtcgaacgattaagccggcttcggccgggcatagagtggcgaacgggtgagtaacacgtgaccaacctgccccgcgcgccgggacagcctcgcgaaagcgggattaataccggatactccgggggcggcgcatgccgcccccgggaaagctccggcggcgcgggatggggtcgcggcccatcaggtagtaggtcgggcagcggccgacctagccgacgacgggtagccgggttgagagaccgaccggccacattgggactgagatacggcccagactcctacgggaggcagcagtggggaatattgcgcaatgggggcaaccctgacgcagcaacgccgcgtgcgggatgaaggccttcgggttgtaaaccgctttcagcagggaagatggtgacagtacctgcacaagaagccccggctaactacgtgccagcagc

SEQ ID NO: 5085 - DNA, 490 bp, unidentified
  misc_feature 1..490: note = Ascusbbf_16099, encodes 16S rRNA
  source 1..490: mol_type = genomic DNA
agagtttgatcatggctcaggatgaacgctggcggcgtgcctaatacatgcaagtcgaacgagggtgcttgcaccctagtggcgaacgggtgagtaacacgtaggtaacctgcccttaagcttgggatacccagaggaaactttggctaataccggataacaacagaggaggcatctcctttgcttgaaaggccctttcgggtcacttaaggatggacctgcggcgcattagctagttggtgagataacagcccaccaaggcgaggatgcgtagccgaactgagaggttgatcggccacattggaactgagacacggtccaaactcctacgggaggcagcagtaaggagttttcggcaatgggggaaaccctgaccgagcaacgccgcgtgagtgatgacggccctatgggttgtaaagctcttttataagggacgaatggtagtgctaggaaatgagcgctatttgacggtaccttttgaataagccac

SEQ ID NO: 5086 - DNA, 490 bp, unidentified
  misc_feature 1..490: note = Ascusbbf_293927, encodes 16S rRNA
  source 1..490: mol_type = genomic DNA
agagtttgatcctggctcaggatcaacgctggcggcgtgcctaatgcatgcaagtcgaacggggtcatcttcggatgacttacgtggcggacgggtgaggaacgcgtggccaacctgccctttggtgggggataaccgctggaaacagtgggtaataccgcatgagaccttttgccgagtggggtgaaaggggaaagccgcaaggcgccgaaggagggggctgcgtccgattagctagacggtggggtaacggcctaccgtggcagtgatcggtagctggtttgagaggatgatcagccacacggggactgagacacggccccgactcctacgggaggcagcagcaaggaattttccgcaatgggcgcaagcctgacggagcaacgccgcgtgtgggatgacgcttttcggagtgtaaaccactgttcatggggacgaagcactgacggtacccatggaggaaggcccggctaactacgtgccagcagcc

SEQ ID NO: 5087 - DNA, 489 bp, unidentified
  misc_feature 1..489: note = Ascusbbf_77334, encodes 16S rRNA
  source 1..489: mol_type = genomic DNA
agagtttgatcctggctcagaacgaacgctggcggcatggattaggcatgcaagtcgaacgaagcagcaatgcttagtggcgcaagggtgaggaacacgtgagtgacctgcccacaagtttggaacagctcctggaaacgggaattaataccggatgtgatcgatgaactgcatggtttattgattaaagcagcaatgcgcttgtggatgggctcgcgtcccattagctagttggtgaggtaacggcccaccaaggccatgatgggtagctggtctgagaggacgaccagccacactggggctgagaactgcccagactcctacgggaggctgcagtcgagaattttgggcaatggacgaaagtctgacccagcaatgccgcgtgcgggatgaaggtcttcggattgtaaaccgctgtttggagggacgaaagatgacggtacttccagagaaagccacggctaactacgtgccagcagccgcggtaat

SEQ ID NO: 5088 - DNA, 490 bp, unidentified
  misc_feature 1..490: note = Ascusbbf_52448, encodes 16S rRNA
  source 1..490: mol_type = genomic DNA
agagtttgatcatggctcagattgaacgctggcggcaggcttaacacatgcaagtcgaacggtaacgggcgagagcttgctcttgtgccgacgagtggcggacgggtgagtaatgcttgggaatctggcttatggagggggataactactggaaacggtagctaataccgcgtaatgtctgtggactaaagggtgggactttcgggccacctgccataagatgagcccaagtgggattaggtagttggtgaggtaaaggctcaccaagcccgcgatctctagctggtctgagaggatgaccagccacactggaactgagacacggtccagactcctacgggaggcagcagtggggaatattgcacaatggggggaaccctgatgcagccatgccgcgtgaatgaagaaggccttcgggttgtaaagttctttcggtgacgaggaaggcggacttgttaatagcaagtttgattgacgttaatcacagaag

SEQ ID NO: 5089 - DNA, 490 bp, unidentified
  misc_feature 1..490: note = Ascusbbf_45796, encodes 16S rRNA
  source 1..490: mol_type = genomic DNA
agagtttgatcctggctcaggatgaacgctggcggcgtgcctaacacatgcaagtcgagcgagaatttgtggaagtttcccttcggggaaacggaagcgaaggaaagcggcggacgggtgagtaacgcgtaggtaacctgcccttcacacggggatagccaccggaaacggtgattaatacccgatagtccggaccatcacatggtgatccggggaaagatttatcggtgaaggatggacctgcgtctgattagctagttggtgaggtaatggctcaccaaggcaatgatcagtagccgacctaagagggtgaccggccacactgggactgagacacggcccagactcctacgggaggcagcagtgggggatattgcgcaatgggcgaaagcctgacgcagcaacgccgcgtgaacgaggaagctcttcggagtgtaaagttctgtcctatgggaagaagatgacggtaccataggaggaagccccggct

SEQ ID NO: 5090 - DNA, 490 bp, unidentified
  misc_feature 1..490: note = Ascusbbf_5691, encodes 16S rRNA
  source 1..490: mol_type = genomic DNA
agagtttgatcatggctcaggatgaacgctagcggcaggcttaacacatgcaagtcgaggggcagcgcggagtagcaatactctggcggcgaccggcggaagggtgcgtaacacgtgagcaacttgcccgtgacagggggataagcgatggaaacgtcgtctaacatcccgtaacacgaggggaggcatctcccttcgttgaaaactccggtggtcacggatgggctcgcgggacattagctagttggcggggcaacggcccaccaaggcgacgatgtctaggggttctgagaggaagatcccccacactggaactgagacacggtccagactcctacgggaggcagcagtgaggaatattggacaatggaggcaactctgatccagccatgccgcgtgaaggacgaaggccctatgggtcgtaaacttcttttgtcagggagcaataagggtcacgcgtggcccgacgagagtacctggcgaataagca

SEQ ID NO: 5091 - DNA, 490 bp, unidentified
  misc_feature 1..490: note = Ascusbbf_2033, encodes 16S rRNA
  source 1..490: mol_type = genomic DNA
agagtttgatcatggctcagaacgaacgctggcggcgcgtcttaagcatgcaagtcgaacggcaagattggtgcttgcaccgatcctagagtggcggactggtgagtaacacgtgggtgacgtaccctctgaatggggatagccggtagaaataccggataataccgaataaccttgcacctttagagtggtgtaagaaaaggagcttcggcttcgtcggaggaacggcccgcgcactattagctagttggtgaggtaacggcccaccaaggcgacgatagttatccggcctaagagggtgaacggacacattgggactgagatacggcccagactcctacgggaggcagcagctaagaatattccgcaatggaggaaactctgacggagcgacgccgcgtggatgatgaaggccggaaggttgtaaaatccttttgtttgtgaggaataagtcgtataggaaatgatatgatgatgactgtagcaaatg

SEQ ID NO: 5092 - DNA, 490 bp, unidentified
  misc_feature 1..490: note = Ascusbbf_64715, encodes 16S rRNA
  source 1..490: mol_type = genomic DNA
agagtttgatcatggctcaggatgaacgctggcggcgtgcctaacacatgcaagtcgaacggagcagtcacgctgatgatggagatgcttgcatcaaaagaatcttgtggcagcttagtggcggacgggtgagtaacgtgtggataacctggtccatccagggggacagcagctggaaacggctgataataccgcataagcgcacactatcgcatgatagagtgtgaaaagagatatcgggatggaatggatccgcatctgattagccagttggcggggtagaagcccaccaaagcgacgatcagtagccggcctgagagggcggacggccacattgggactgagacacggcccagactcctacgggaggcagcagtgggggatattgcacaatggggggaaccctgatgcagcgacgccgcgtgggtgaagaagtatttcggtatgtaaagccctatcagcagggaagataatgacggtacctgagtaa

SEQ ID NO: 5093 - DNA, 490 bp, unidentified
  misc_feature 1..490: note = Ascusbbf_54541, encodes 16S rRNA
  source 1..490: mol_type = genomic DNA
agagtttgatcatggctcagagttaacgctggcatcgtgcataacacatgcaagtcgaacgggacttgatttgtagcttgctatagattaagtttagtggcagacgggtgagtaatgtataagaaacctacctctgagtggggaataacagtccgaaaggattgctaataccccataacataacctagtggcatcacttagttatcaaagatttatcgcttggagatggtcttatattctatcagctagttggcagtgtaacggactaccaaggctacgacggatagccggcctgaaagggcgaccggccacaagggcactgagacacgggccctactcctacgggaggcagcagtggggaattttggacaatgggcgaaagcctgatccagcaacgatgcgtggaggacgaaggttctcggattgtaaactccttttgtgagggaagaaaaaaatgacggtacctcacgaataagccacggctaactac

SEQ ID NO: 5094 - DNA, 490 bp, unidentified
  misc_feature 1..490: note = Ascusbbf_4784, encodes 16S rRNA
  source 1..490: mol_type = genomic DNA
agagtttgatcatggctcaggatgaacgctggcggcgtgcctaacacatgcaagtcgagcgagaaatcccgaaaagattcttcggaagatttaagggatggatagcggcggacgggtgagtaacgcgtgggcaacctgcccctcactgagggatagccgagggaaacttcgagtaatacctcataacgcataaccgttgcatagcggatatgccaaagatttatcggtgagggatgggcccgcgtctgattagccagttggtgaggtagcggctcaccaaagcgacgatcagtagccggcctgagagggcggacggccacattggaactgagacacggtccagactcctacgggaggcagcagtggggaatattgcacaatgggggaaaccctgatgcagcgacgccgcgtgaaggaagaaggccttcgggtcgtaaacttctgtcctaggggaagaagaactgacggtacccttggaggaagccccggc

SEQ ID NO: 5095 - DNA, 490 bp, unidentified
  misc_feature 1..490: note = Ascusbbf_7656, encodes 16S rRNA
  source 1..490: mol_type = genomic DNA
agagtttgatcatggctcaggacgaacgctggcggcatgcttaacacatgcaagtcgaacgaacttgattccttcgggatgaaaagttagtggcggacgggtgagtaatgtatgagcaatctgcccttttcatcgggataacatagggaaacttatgctaataccgaatatgaccacggtatcgcatggtactgcggtgaaagctccggcggaaaaggatgagctcatatcctattagttagttggtgagataacagcccaccaagacagcgatgggtagccgagctgagaggctgatcggccacattgggactgaaacacggcccagacttctacggaaggcagcagtggggaatattggtcaatggaggcaactctgaaccagcaatgccgcgtgagtgatgaaaatcttacgattgtaaagctctaaacttagagacgataatgacggtatctaaggataagccccggctaactacgtgccagcagc

SEQ ID NO: 5096 - DNA, 490 bp, unidentified
  misc_feature 1..490: note = Ascusbbf_56837, encodes 16S rRNA
  source 1..490: mol_type = genomic DNA
agagtttgatcatggctcaggatgaacgctggcggcgtgcctaacacatgcaagtcgaacgaagcacttctcccgtcaaagtagattagcttgctatgaagcggagacatttgaagtgacttagtggcggacgggtgagtaacgcgtgggtaacctgccctgtactgggggacaacagttggaaacggctgctaataccgcataagcgcacagcatcgcatggtgcagtgtgaaaaactccggtggtacaggatggacccgcgtctgattagctagttggtggggtaacggcctaccaaggcgacgatcagtagccggcctgagagggtgaacggccacattgggactgagacacggcccagactcctacgggaggcagcagtggggaatattgcacaatgggggaaaccctgatgcagcgacgccgcgtgagtgatgaagtatttcggtatgtaaagctctatcagcagggaagaaaatgacggtacct

SEQ ID NO: 5097 - DNA, 490 bp, unidentified
  misc_feature 1..490: note = Ascusbbf_2728, encodes 16S rRNA
  source 1..490: mol_type = genomic DNA
agagtttgatcatggctcagagtgaacgctggcgacgtggctaagacatgcaagtcgagcgagaaggtgccttcgggtgcctgaaagcggcaaacgggtgcgtaacacgtaagtaacctgcccttaagacgggaatagcttgatgaaaattgagataatgcccgatatcaaattcttccgcatggaagaagtttgaaaggtttgtgatgacgcttaaggaggggcttgcggcctatcagcttgttggcggtgtgaaagaccaccaaggctaagacgggtagccggtctgagaggatggacggccacattggaactgagatacggtccaaacacctacgggtggcagcagtttcgaatcattcacaatgggcgaaagcctgatggtgcgacgtcgcgtggaggatgaaggtcttcggattgtaaactcctgtcatcggtgagcaaaaggtcggtgaagaatcgattttgagttaagccgaagaggaagcag

SEQ ID NO: 5098 - DNA, 490 bp, unidentified
  misc_feature 1..490: note = Ascusbbf_15146, encodes 16S rRNA
  source 1..490: mol_type = genomic DNA
agagtttgatcatggctcaggataaacgctggcggcgcacataagacatgcaagtcgaacggaagtcgttatactgattttgaaatgaacggagaacttgttcaaagggactggatgaagatttataacaatggctttagtggcggactggtgagtaatacgtaagcaacctgcctattagaggggaacaacagttagaaatgactgctaataccgcatatgccataggagccacatggttctagtgggaaaggagcaatccgctaatagatgggcttacggctgattagctagttggtggggtaatggcctaccaaggcgacgatcagtagccggactgagaggttcaacggccacattgggactgagatacggcccagactcctacgggaggcagcagtcgggaattttgcgcaatggaggaaactctgacgcagtgacgccgcgtgcaggaagaaggttttcggattgtaaactgctttagacaggg

SEQ ID NO: 5099 - DNA, 486 bp, unidentified
  misc_feature 1..486: note = Ascusbbf_561, encodes 16S rRNA
  source 1..486: mol_type = genomic DNA
agagtttgatcctggctcagaacgaacgctggcggcacgcttaacacatgcaagtcgaacggtgcaatggggcttgctctattgcatagtggcggacgggtgagtaacacgtaggaacctgcctggtaatggtggatagcttcgggaaactggaggtaatacagcatgagctcgagagaggaaaggccttagggtcgttaccagaggggcctgcggatgattaggtagttggtggggtaagagcctaccaagccgacgatcaatagctggtctgagaggatgatcagccacactggaactgagatacggtccagactcctacgggaggcagcagtggggaatattggacaatggggggaaccctgatccagcgatgccgcgtgagtgaagaaggccttagggttgtaaagctcttttgacagggacgatgatgacggtacctgtagaataagcaccggctaactctgtgccagcagccgcggtaat

SEQ ID NO: 5100 - DNA, 490 bp, unidentified
  misc_feature 1..490: note = Ascusbbf_1071, encodes 16S rRNA
  source 1..490: mol_type = genomic DNA
agagtttgatcctggctcaggatgaacgctggcggcgtgcctaatacatgcaagtcgaacgaggtggacggaagcttgcttcctgatacctagtggcgaacgggtgagtaacacgtaggtaacctgcctttaggactgggatacccagacgaaagtttggctaataccggataacaacggggatcgcatgatctccgcttgaaagttgcgtttgcaacacctttagatggacctgcggcacattagctagttggtgagataacagcccaccaaggcaaggatgtgtagccgatctgagaggatgaccggccacaatgggactgagacacggcccatactcctacgggaggcagcagtagggagttttcggcaatgggggaaaccctgaccgagcaacgccgcgtgagtgattaaggtcttcggattgtaaagctctgttacgcaggacgaataactcgagtaggaaatgcctcgagtctgacggtactgc

SEQ ID NO: 5101 - DNA, 490 bp, unidentified
  misc_feature 1..490: note = Ascusbbf_6745, encodes 16S rRNA
  source 1..490: mol_type = genomic DNA
agagtttgatcctggctcaggatgaacgctagcggcaggcttaacacatgcaagtcgaggggcatcgcgggtagcaatacctggcggcgaccggcggaagggtgcgtaacgcgtgagcgacatgcccgtgacagggggataacagatggaaacgtctcctaataccccatatgatcatatatcgcatggtatgtgattgaaaggtgagaaccggtcacggattggctcgcgtcccatcaggtagacggcggggcagcggcccgccgtgccgacgacgggtaggggctctgagaggagtgacccccacaatggaactgagacacggtccatactcctacgggaggcagcagtgaggaatattggtcaatgggcggaagcctgaaccagccatgccgcgtgcgggaggacggccctatgggttgtaaaccgcttttgagtgagagcaataaggttcacgtgtggaccgatgagagtatcattcgaataagca

SEQ ID NO: 5102 - DNA, 490 bp, unidentified
  misc_feature 1..490: note = Ascusbbf_9083, encodes 16S rRNA
  source 1..490: mol_type = genomic DNA
agagtttgatcctggctcaggatgaacgctggcggcgtgcataacacattcaagtcgaacggagttgcgatagaaagaggcttcggccaatggaaattgtaacttagtggcggacgggtgagtaacgcgtgagcaacctacctatgcgcgggggacaacagttggaaacgactgctaataccgcataaatcatggtaaaggcatctttagcatggcaaagattaattgcgcatagatgggctcgcgtccgattagatagttggtgaggtaacggcccaccaagtcgacgatcggtagccggactgagaggttgaacggccacattggaactgagagacggtccagactcctacgggaggcagcagtggggaatattgggcaatgggcgaaagcctgacccagcgacgccgcgtgagtgaagaaggtcttcggattgtaaagcttagttattggggaagaagaaagtgacggtacccaaagagaaagccac

SEQ ID NO: 5103 - DNA, 490 bp, unidentified
  misc_feature 1..490: note = Ascusbbf_66486, encodes 16S rRNA
  source 1..490: mol_type = genomic DNA
agagtttgatcctggctcagaacgaacgctggtggcgtgtcttatacatgcaagtcgagcggggcagcaatgcccagcggcgaacgggtgagtaacgcgtaagcaatctgccccatatcaggaaatacccgtgccaacgcgcggttaatgtccaggagcgtggcttcccgcatggggagttgacaagagatttatcggtatgggatgagcttgcgtccgattagctagttggcggggcaacggcccaccaaggcgacgatcggtagccggcctgagagggtgatcggccacattgggactgagatacggcccagactcctacgggaggcagcagtagggaatattgcacaatgggggaaaccctgatgcagcaacgccacgtgtgggaagaagcatttcggtgtgtaaaccactgtcgtgagggaataaggcgtcttctcggagacgttgaatgtacctcgaaaggaagcaccggcaaacttcgtgccag

SEQ ID NO: 5104 - DNA, 490 bp, unidentified
  misc_feature 1..490: note = Ascusbbf_11104, encodes 16S rRNA
  source 1..490: mol_type = genomic DNA
agagtttgatcatggctcaggatgaacgctagcggcaggcctaatacatgcaagtcgaacggtaaatgccccttcgggggcatgagagtggcgcacgggtgcgtaacgcgtatgcaacccacccgctgccgggggatagcccggagaaattcggattaataccccatgaggagcgaggaaggcatcttccacgtttcaaaacttcggtggcggcggacgggcatgcgtgccattagatagttggcggggtaacggcccaccaagtcgacgatggctaggggatctgagaggacggtcccccacactggtactgagacacggaccagactcctacgggaggcagcagtaagggatattggtcaatggggggaaccctgaaccagccatgccgcgtgagggaggaaggccctacgggtcgtaaacctcttttgccgggggataaggacgggaacgcgttcccgtttgaaggtacccggagaataagcatcgg

SEQ ID NO: 5105 - DNA, 490 bp, unidentified
  misc_feature 1..490: note = Ascusbbf_20364, encodes 16S rRNA
  source 1..490: mol_type = genomic DNA
agagtttgatcatggctcaggacgaacgctggcggcgtgcttaacacatgcaagtcgagcggaaaggcccttcggggtactcgagcggcgaacgggtgagtaacacgtgagcaacctgccctaggctttgggataaccctcggaaacgggggctaataccggatattcacttgcggacgcatgtttgtgggtggaaagtttttcggcttgggatgggctcgcggcctatcagcttgttggtggggtgatggcctaccaaggcgacgacgggtagccggcctgagagggcgaccggccacactgggactgagacacggcccagactcctacgggaggcagcagtgggaatattgcacaatgggcggaagcctgatgcagcgacgccgcgtgagggatgacggccttcgggttgtaaacctctttcagcagggacgaagcgtgagtgacggtacctgcagaagaagcgccggccaactacgtgccagcagcc

SEQ ID NO: 5106 - DNA, 490 bp, unidentified
  misc_feature 1..490: note = Ascusbbf_47649, encodes 16S rRNA
  source 1..490: mol_type = genomic DNA
agagtttgatcctggctcaggatgaacgctagctacaggcctaacacatgcaagtcgcggggcagcatggattctgcttgcagtatccgatggcgaccggcgcacgggtgagtaacgcgtatccaacctgcctccatgcagggcacagcccggcgaaagtcggattaattccctatgccctccctcgcggacatccaatggggaggaaaggcttcggccgcatggagatggggatgcgtaggattagcttgacggcggggtgacggcccaccgtggcaacgatccttaggggttctgagaggaaagtcccccacactggtactgagacacggaccagactcctacgggaggcagcagtgaggaatattggtcaatggtcggaagactgaaccagccaagtagcgtgcaggacgacggccctacgggttgtaaactgcttttatgcggggataaccggcggcactagtgccgccctgcaggtaccgcatga

SEQ ID NO: 5107 - DNA, 490 bp, unidentified
  misc_feature 1..490: note = Ascusbbf_60332, encodes 16S rRNA
  source 1..490: mol_type = genomic DNA
agagtttgatcatggctcaggacgaacgctggcggcgtgcttaacacatgcaagtcgagcggtaaggctccttcgggagtacacgagcggcgaacgggtgagtaacacgtgagtaacctgccccattcatcggaataaccagtggaaacgctggctaatgccgaatacgaccaccgaaggcatcttctggtggtggaaagctccggcggagtgggatggactcgcggcctatcagcttgttggtgaggtaacggctcaccaaggcgacgacgggtagccggcctgagagggtgaccggccacactgggactgagacacggcccagactcctacgggaggcagcagtggggaatattggacaatgggcgaaagcctgatccagcaacgccgcgtgagggatgacggccttcgggttgtaaacctctttcagcagggacgaagcgaaagtgacggtacctgcagaagaaggaccggccaactacgtgccagc

SEQ ID NO: 5108 - DNA, 490 bp, unidentified
  misc_feature 1..490: note = Ascusbbf_17599, encodes 16S rRNA
  source 1..490: mol_type = genomic DNA
agagtttgatcatggctcaggatgaacgctggcggcgtgcctaatacatgcaagtcgaacgggcgagatccagcttgctggatttagctagtggcgaacgggtgagtaatacgtaagcaacctgcctgcaaggaccgggataacacctggaaacgggcgctaataccggataggtaacgagggggcatcctcttgttattaaaggttagaaacacaagcagatgggcttacggtgcattagctagttggtgaggtaacggcccaccaaggcgatgatgcatagccggcctgagagggtgaacggccacattgggactgagacacggcccagactcctacgggaggcagcagtagggaattttcggcaatgggcgcaagcctgaccgagcaacgccgcgtgagtgatgaaggttttcggattgtaaagctctgttgtaagggaagaatggtgcggatagaatctgcaaatgacggtaccttaccagaaagc

SEQ ID NO: 5109 - DNA, 490 bp, unidentified
  misc_feature 1..490: note = Ascusbbf_19107, encodes 16S rRNA
  source 1..490: mol_type = genomic DNA
agagtttgatcatggctcaggacgaacgctggcggcgtgcttaacacatgcaagtcgagcggaaaggcccttcggggtactcgagcggcgaacgggtgagtaacacgtgagcaacctgccctaggctttgggataaccctcggaaacgggggctaataccggataagaccttgccttgcatgaggcttggtggaaagtttttcggcctgggatgggctcgcggcctatcagcttgttggtggggtgatggcctaccaaggcgacgacgggtagccggcctgagagggcgaccggccacactgggactgagacacggcccagactcctacgggaggcagcagtggggaatattgcacaatgggcggaagcctgatgcagcgacgccgcgtgagggatgacggccttcgggttgtaaacctctttcagcagggacgaagcgcaagtgacggtacctgcagaagaagcaccggccaactacgtgccagcagcc

SEQ ID NO: 5110 - DNA, 490 bp, unidentified
  misc_feature 1..490: note = Ascusbbf_44971, encodes 16S rRNA
  source 1..490: mol_type = genomic DNA
agagtttgatcatggctcaggatgaacgctagcgacaggcctaacacatgcaagtcgaggggtaacagggagcttgctccgctgacgaccggcgcacgggtgagtaacgcgtatgcaaccttcccgcgggatcgggatagccccccgaaagggggattaacaccggatgaggcctaagggcggcatcgcccggaggtcaaatgcgaagcttgcggatgggcatgcgtctgattagcttgttggcggggtaacggcccaccaaggcgacgatcagtaggggttctgagaggaaggtcccccacattggtactgagacacggaccaaactcctacgggaggcagcagtgaggaatattggtcaatgggcgagagcctgaaccagccatgtcgcgtgcaggaatacggccctatgggttttaaactgcttttgccgggggataaagtggcggacgcgtccgctattgcaggtacccggcgaataaggatcggc

SEQ ID NO: 5111 - DNA, 490 bp, unidentified
  misc_feature 1..490: note = Ascusbbf_61263, encodes 16S rRNA
  source 1..490: mol_type = genomic DNA
agagtttgatcctggctcaggatgaacgctagcggcaggcttaacacatgcaagtcgaggggcatcgtggagtagcaatactctgacggcgaccggcgaaagggtgagtaacgcgtgagcaacatgcccgtgtgagggggatagtcattggaaacgatgcgtaataccccgtaacatcagttaccgcatggtagttgattgaaagattaatcgcacacggattggctcgcgtaccattagctagttggcggggtaacggcccaccaaggcgacgatggttaggggttctgagaggaaggtcccccacattggaactgagacacggtccagactcctacgggaggcagcagtgaggaatattggacaatggccgagaggctgatccagccatgccgcgtgcgggaggacggccctatgggttgtaaaccgcttttgtcagggggcaataaggtctacgtgtagactgatgagagtacctggcgaataagca

SEQ ID NO: 5112 - DNA, 490 bp, unidentified
  misc_feature 1..490: note = Ascusbbf_50568, encodes 16S rRNA
  source 1..490: mol_type = genomic DNA
agagtttgatcatggctcaggacgaacgctggcggcgtgcctaatacatgcaagtagaacgctgaccactttagcttgctagagtgtgatgagttgcgaacgggtgagtaacgcgtaggtaacctgcctggtagcgggggataactattggaaacgatagctaataccgcataacagttttggtcgcatgaccgaggcttgaaaggaacaattgtttcactaccagatggacctgcgttgtattagctagttggtgaggtaacggctcaccaaggcgacgatacatagccgacctgagagggtgatcggccacactgggactgagacacggcccagactcctacgggaggcagcagtagggaatcttcggcaatgggggcaaccctgaccgagcaacgccgcgtgagtgaagaaggttttcggatcgtaaagctctgttgtaagtcaagaataggtgtgggagtggaaagtccacactatgacggtagct

SEQ ID NO: 5113 - DNA, 490 bp, unidentified
  misc_feature 1..490: note = Ascusbbf_19804, encodes 16S rRNA
  source 1..490: mol_type = genomic DNA
agagtttgatcatggctcaggatgaacgctagcggcaggcttaacacatgcaagtcgaggggcagcgcgttgtagcaatacgatggcggcgaccggcgcaagggtgcgtaacgcgtgagcaacatgcccgcaacagagggataaccggaggaaactccgactaatacctcataaggatgtagtacggcatcgtgcagcatctaaacttacgagggttgcggattggctcgcgagacattaggtagacggcggggtaacggcccaccgtgccgacgatgtctaggggttctgagaggaaggtcccccacactggaactgagacacggtccagactcctacgggaggcagcagtgaggaatattggacaatggtcggaagactgatccagccatgccgcgtgcaggaagacggtcctatggattgtaaactgcttttgtacgggagcaataagggtgtcgtgacatccgatgagagtaccgtacgaataagc

SEQ ID NO: 5114 - DNA, 490 bp, unidentified
  misc_feature 1..490: note = Ascusbbf_106427, encodes 16S rRNA
  source 1..490: mol_type = genomic DNA
agagtttgatcatggctcagaacgaacgccggcggcgcgtcttaagcatgcaagtcgggcgggatcagggtgcttgcaccctgtgagagcggcggactggcgaggaacgcgtgggcgacgcaccccctgcaccgggacagccggcagaaatgccgggtgatacgggatgagctcgttttctgtggtggagaacgaggaaagcggctacggccgcggcaggggagcggcccgcgtcccatcagctagtaggcggggcaaaagcccacctaggcaacgacgggtacccggactgagaggtcggacgggcgcattgggactgagatacggcccagactcctacgggaggcagcagctaagaatattccgcaatgggggaaaccctgacggagcgacgccgcgtggacgatggaggccggaaggttgtaaagtcctctggcgcctgaggaagaacccgggcagggaatggcccgggagtgactgtagggcgaga

SEQ ID NO: 5115 - DNA, 490 bp, unidentified
  misc_feature 1..490: note = Ascusbbf_1058404, encodes 16S rRNA
  source 1..490: mol_type = genomic DNA
agagtttgatcatggctcaggatgaacgctagcggcaggcttaacacatgcaagtcgaggggcagcatgagagcgtagcaatacattcttgatggcgaccggcgcaagggtgcgtaacgcgtgagcaacttgcccgcatcaggggcataatcggtggaaacgccgtctaactccccataacataggaggtggcatcgccttctattgaaatccttggaggatgcggatgggctcgcgtgacattaggcagttggcggggtaacggcccaccaaaccgacgatgtctaggggaactgagaggttaatcccccacactggaactgagacacggcccagactcctacgggaggcagcagtgaggaatattggacaatggagggaactctgatccagccatgccgcgtgcaggataaggtcctatggattgtaaactgctttttgtatgagagcaataaggattacgtgtaatccgatgagagtatcatacgga

SEQ ID NO: 5116 - DNA, 490 bp, unidentified
  misc_feature 1..490: note = Ascusbbf_284732, encodes 16S rRNA
  source 1..490: mol_type = genomic DNA
agagtttgatcctggctcagaacgaacgctggcggcgcgtcttaagcatgcaagtcgagcggcaagctgccttcgggcagcctagagcggcggactggtgagtaacgcgtggatgacgcaccctcctgatcgggatagcctgtggaaacacagggtaataccgggtaagcccgcccgcgttggaggcgagcggggaaaggggctattgccccgctggaggagcggtccgcgtcccatcagcttgtaggcggtgtaacggaccacctaggccatgacgggtacccggcctgagagggcgatcgggcacattgggactgagatacggcccagactcctacgggaggcagcagctaagaatattccgcaatgggggaaaccctgacggagcgacgccgcgtggacgatgaaggccggaaggttgcagagtcctttggcgcgcgaggaaggagagggggagtggaaagcctcctcggtgactgtagcgcgagaa

SEQ ID NO: 5117 - DNA, 490 bp, unidentified
  misc_feature 1..490: note = Ascusbbf_52292, encodes 16S rRNA
  source 1..490: mol_type = genomic DNA
agagtttgatcatggctcaggacgaacgctggcggcgtgcctaacacatgcaagtcgaacggagttataaagacggaacccttcggggggacagaaatataacttagtggcggacgggtgagtaacgcgtgagtaacctgcctttgagagggggataacgttctgaaaaggacgctaataccgcataacatattgaagccgcatgactttgatatcaaagattttatcgctcaaagatggactcgcgtccgattagttagttggtggggtaacggcctaccaagacgacgatcggtagccggactgagaggttgaacggccacattgggactgagacacggcccagactcctacgggaggcagcagtgggggatattgcgcaatgggggcaaccctgacgcagcaacgccgcgtgaaggatgaaggttttcggattgtaaacttcttttgttagggacgaaaaatgacggtacctaacgaataagctccg

SEQ ID NO: 5118 - DNA, 490 bp, unidentified
  misc_feature 1..490: note = Ascusbbf_51185, encodes 16S rRNA
  source 1..490: mol_type = genomic DNA
agagtttgatcatggctcaggatgaacgctagcggcaggcttaacacatgcaagtcgaggggcagcgggtcgtagcaatacgatgccggcgaccggcgcaagggtgcgtaacgcgtgagcaatctgcccgtatcagggggataagcgatggaaacgtcgtctaataccgcataacaacattggaggcatctccgatgtttgaaagcttcggtggatacggatgagctcgcgagacattagttagttggcggggtaacggcccaccaagaccgcgatgtctaggggaactgagaggttggtcccccacactggaactgagacacggtccagactcctacgggaggcagcagtgaggaatattggacaatggccggaaggctgatccagccatgccgcgtgaaggataaggtcctatggattgtaaacttcttttgagtgggagcaataagggtctcgtgaggcccgatgagagtaccattcgaataagcat

SEQ ID NO: 5119 - DNA, 490 bp, unidentified
  misc_feature 1..490: note = Ascusbbf_29488, encodes 16S rRNA
  source 1..490: mol_type = genomic DNA
agagtttgatcatggctcaggattaacgctggcggcatgcctaatacatgcaagtcaaacgggaagcttcggcttctagtggcgaacgggtgagtaacacgtaggcaatctgtcctaaagcttgggataacagctggaaacggctgataataccggataacaaattggattgcatgatctaattttgaaagatgcaaatgtatcacttttggaggagcctgcggcgcattagatagttggtgaggtaacggcccaccaagtcgatgatgcgtagctgcgctgagaggcgaaacagccacattgggactgagaacggcccaaactcctacgggaggcagcagtagggaattttcggcaatgggggaaaccctgaccgagcaatgccgcgtgaatgatgacgatcttcggattgtaaagttctgttgtagaggacgaatggtaagtggagtggaacgccatttatttgacggtactttactagaaagccccg

SEQ ID NO: 5120 - DNA, 490 bp, unidentified
  misc_feature 1..490: note = Ascusbbf_104542, encodes 16S rRNA
  source 1..490: mol_type = genomic DNA
agagtttgatcctggctcaggatgaacgctagctacaggcctaacacatgcaagtcgaggggcatcgcggcgtggagcgatccatgctggcggcgaccggcggatgggtgagtaacgcgtatccaacctgccccatgcccgggcacagcccctggaaacggggagtgactcccggcggcgccgttatgccgcatggcttgacggctaaatttcgaggcatgggatgggggtgcgtccgattaggtagttggcggggcaacggcccaccaagcccacgatcggtaggggttctgagaggaaggtcccccacattgggactgagacacggcccaaactcctacgggaggcagcagtgaggaatattggtcaatgggcggaagcctgaaccagccaagtagcgtggaggatgacggccctacgggttgtaaactcctttagcgcgggaataacagtcgccacgtgtggcgttttgcaggtaccgcgagaataa

SEQ ID NO: 5121 - DNA, 490 bp, unidentified
  misc_feature 1..490: note = Ascusbbf_124033, encodes 16S rRNA
  source 1..490: mol_type = genomic DNA
agagtttgatcatggctcaggatgaacgctagctacaggcttaacacatgcaagtcgaggggcagcatgtcgtgtgcttgcacacgatgatggcgaccggcgcacgggtgcgtaacgcgtatccaaccttcccgcaagccggggatagcccggcgaaagtcggattaatacccgatgtggtgctttgaggacatctgactggcactaaaggcttgccgcttgcggatggggatgcgtacgattaggtagacggcggggtaacggcccaccgtgccatcgatcgttaggggttctgagaggaaggtcccccacactggtactgagacacggaccagactcctacgggaggcagcagtgaggaatattggtcaatgggcgcgagcctgaaccagccaagtagcgtggaggaagacggccctacgggttgtaaactccttttatgcggggataaagtgccctacgtgtagggttttgcaggtaccgcatgaat

SEQ ID NO: 5122 - DNA, 490 bp, unidentified
  misc_feature 1..490: note = Ascusbbf_712468, encodes 16S rRNA
  source 1..490: mol_type = genomic DNA
agagtttgatcatggctcagaacgaacgctggtagcgtggattaggcatgcaagtcgaacgggatccggatggtagcaatattgtctggtgagagtggcggattggggaggaacacgtgagcaacctgcccttgagttggggaaaaccgttggaaacgacggctaataccggatgtggcgtcctgtggcatcacgggaacgctaaagggggccgcaaggctctcgctcgaggaggggctcgcgcaccatcagctagttggcggggtaacggcccaccaaggcttacggttagctggtctgagaggatgaccagccccactgggactgagatactgcccagactcctacgggaggctgcagtcgaggatcattcgcaatggacgaaagtctgacgatgcgacgctgcgtggaggatgaaggccttcgggtcgtaaactcctgtcatgagggaaaaggcgagggggcccaatacgctccttagttgatggta

SEQ ID NO: 5123 - DNA, 490 bp, unidentified
  misc_feature 1..490: note = Ascusbbf_733362, encodes 16S rRNA
  source 1..490: mol_type = genomic DNA
agagtttgatcatggctcaggacgaacgctggcggcgtgcctaatacatgcaagtcgaacgcattttctttcaccgtagcttgctacaccgaaagaaaatgagtggcgaacgggtgagtaacacgtgggtaacctgcccatcagcgggggataacacttggaaacaggtgctaataccgcataattctatttaccgcatggtagatggatgaaaggcgcttttgcgtcactgatggatggacccgcggtgcattagctagttggtggggtaacggcctaccaaggctgcgatgcatagccgacctgagagggtgatcggccacactgggactgagacacggcccagactcctacgggaggcagcagtagggaatcttcggcaatggacgcaagtctgaccgagcaacgccgcgtgagtgaagaaggttttcggatcgtaaaactctgttgttagagaagaacaaggatgagagtggaaagttcatccctt

SEQ ID NO: 5124 - DNA, 490 bp, unidentified
  misc_feature 1..490: note = Ascusbbf_95269, encodes 16S rRNA
  source 1..490: mol_type = genomic DNA
agagtttgatcctggctcaggatgaacgctggcggcgtgcttaacacatgcaagtcgaacgatgaagctccagcttgctggagtggattagtggcgaacgggtgagtaacacgtgagcaacctgccccggactttgggataacagttggaaacagctgctaataccgaatacgcaccagaacggcatcgttactggtgggaaagatttttcggtccgggaggggctcgcggcctatcagcttgttggtgaggtaacggctcaccaaggcgtcgacgggtagccggcctgagagggtgaccggccacactgggactgagacacggcccagactcctacgggaggcagcagtggggaatattgcacaatgggcgcaagcctgatgcagcaacgccgcgtgagggatgacggccttcgggttgtaaacctcttttagttgggaagaagccttcgggtgacggtaccttcagaaaaagcgccggctaactacgt

SEQ ID NO: 5125 - DNA, 490 bp, unidentified
  misc_feature 1..490: note = Ascusbbf_1598189, encodes 16S rRNA
  source 1..490: mol_type = genomic DNA
agagtttgatcctggctcaggatgaacgctggcggcgtgcctaacacatgcaagtcgaacggtgatgatttgaaattttcggatggattttcatcatagtggcggacgggtgagtaacgcgtggataacctgcctctttctgggggatagcagctggaaacggctggtaataccgcataagctcctttacctgcatgggtaagggaggaaagatttatcgggaagagatggatccgcgtctgattagccagttggcggggtaacggcccaccaaagcgacgatcagtagccggcctgagagggtgatcggccacattgggactgagacacggcccaaactcctacgggaggcagcagtgggggatattgcacaatgggcgcaagcctgatgcagcgacgccgcgtgagtgaagaagtatttcggtatgtaaagctctatcggcagggaagaaaggcccgcaagggagatgacggtacctgactaagaagc

SEQ ID NO: 5126 - DNA, 490 bp, unidentified
  misc_feature 1..490: note = Ascusbbf_261207, encodes 16S rRNA
  source 1..490: mol_type = genomic DNA
agagtttgatcctggctcagagttaacgctggcggcgtgcctaacacatgcaagtcgggcggggagtggcagagtaccgcgctcccagcggcagacgggtgagtaacgcgtaggcaacatgcccataagagggagacaaccagccgaaaggttggctaatatcccgtaaaacccgggggaggcatcttttccgggttaaagcagcgatgcgcttatggagtggcctgcggcctatcagctagttggtgaggtaacggcccaccaaggcatagacgggtagccgatctaaaaggatgaccggccacaaggggactgagacacggcccctactcctacgggaggcagcagtggggaattttggacaatgggggaaaccctgatccagcgacgccgcgtgaaggatgaaggttttcggattgtaaacttcttttgcagggggcaaaggccggcaacggcgtgatggtaccctgtgaataagccacggctaact

SEQ ID NO: 5127 - DNA, 490 bp, unidentified
  misc_feature 1..490: note = Ascusbbf_173824, encodes 16S rRNA
  source 1..490: mol_type = genomic DNA
agagtttgatcatggctcaggacgaacgctggcggcgtgcctaacacatgcaagtcgagcggagaccagggaagagcttgctcggaactggtttcagcggcggacgggtgagtaacgcgtgagcaatctgcctcggacaggggaataacgcatcgaaagatgtgctaataccgcataagaccacgcctgtgcatgcaggagaggtcaaaggagcaatccggtctgagatgagctcgcgtccgattagctggttggtgagataacagcccaccaaggcgacgatcggtagccgacctgagagggtgatcggccacattggaactgagagacggtccagactcctacgggaggcagcagtgggaatattgggcaatgggcgaaagcctgacccagcaacgccgcgtgagggaagaagggtttcggctcgtaaacctctgtcctatgggacgaaggaagtgacggtaccataggaggaagccccggctaacta

SEQ ID NO: 5128 - DNA, 490 bp, unidentified
  misc_feature 1..490: note = Ascusbbf_161792, encodes 16S rRNA
  source 1..490: mol_type = genomic DNA
agagtttgatcctggctcaggacgaacgctggcggcgtgcttaacacatgcaagtcgaacggaggcttttccttcgggggaagccttagtggcggacgggtgagtaacgcgtgagcaatctgccttgcacagggggataacaactggaaacggttgctaataccgcataacgtaacggggaggcatctttctgttaccaaaggagcaatccggtgcaagatgagctcgcgtccgattagatagttggcggggcaacggcccaccaagtcaacgatcggtagccggactgagaggttgaccggccacattgggactgagacacggcccagactcctacgggaggcagcagtggggaatattgggcaatgggcgaaagcctgacccagcaacgccgcgtgaaggatgaaggttttcggattgtaaacttctttgactgaggacgacaaaaggacggtactcagaaaacaagccacggctaactacgtgccag

SEQ ID NO: 5129 - DNA, 490 bp, unidentified
  misc_feature 1..490: note = Ascusbbf_66576, encodes 16S rRNA
  source 1..490: mol_type = genomic DNA
agagtttgatcatggctcaggacgaacgctggcggcgtgcttaatacatgcaagtcgaacggagcatttaggtagcttgctatttgaatgcttagtggcggacgggtgagtaacgcgtgaacaatctgccttttgcagggggacaacagttagaaatgactgctaataccgcataagaccacaactcggcatcgagaaggggtaaaaggagcaatccggcaaaagatgagtttgcgtatcattagctagttggtgaggtaacggcccaccaaggcgacgatggttagccgacctgagagggtgatcggccacactggaactgagacacggtccagactcctacgggaggcagcagtaaggaatattgggcaatggaggaaactctgacccagcaacgccgcgtgaaggaagaaggtcttcggattgtaaacttctgttatgagggaagaagatagtgacggtacctcatgagaaagccccggcaaactat

SEQ ID NO: 5130 - DNA, 490 bp, unidentified
  misc_feature 1..490: note = Ascusbbf_121661, encodes 16S rRNA
  source 1..490: mol_type = genomic DNA
agagtttgatcctggctcaggattaacgctggcaccatgcctaatacatgcatgtcgagcggagtttagagagcttgctttctaaacttagcggcaaatgggtgagtaacacgtaaggaacctgcctaagcgacgaggacaacggttggaaacgactgctaatactggatagtataagaaaccgcatgatttcttatttaaaggtccgtttggaccacgcttagatggccttgcggcgcattagatagttggtgaggtaacggcccaccaagtcaatgatgcgtagctgcactgagaggtgaaacagccacactgggactgagacacggcccagactcctacgggaggcagcagtagggaattttcggcaatgggcgaaagcctgaccgagcaatggtgcgtgaacgatgaaggtccttggatcgtaaagttcttttataagggaagaatacactatgtaggaaatgacatagtgctgacggtacctttt

SEQ ID NO: 5131 - DNA, 490 bp, unidentified
  misc_feature 1..490: note = Ascusbbf_544913, encodes 16S rRNA
  source 1..490: mol_type = genomic DNA
agagtttgatcatggctcaggatgaacgctagctacaggcttaacacatgcaagtcgaggggcagcattaagttagcttgctaacttagatggcgaccggcgcacgggtgagtaacgcgtatccaaccttccccctgctcagggatagcccgctgaaaggcggattaacacctgatagcttcactagatggcatctgacggtgaataaagataacggcaagggatggggatgcgtctgattagcttgttggcggggtaacggcccaccaaggcgacgatcagtaggggttctgagaggaaggtcccccacatcggtactgagacacggaccaaactcctacgggaggcagcagtgaggaatattggtcaatgggcgagagcctgaaccagccaagtagcgtgcaggacgactgccctatgggttgtaaactgcttttatcagggaataaagtgcggcacgtgtgccgttttgtatgtacctgatgaataa

SEQ ID NO: 5132 - DNA, 490 bp, unidentified
  misc_feature 1..490: note = Ascusbbf_169036, encodes 16S rRNA
  source 1..490: mol_type = genomic DNA
agagtttgatcatggctcaggatgaacgctggcggcgtgcttaacacatgcaagtcgaacggagctttttaagaacaagacttcggtcaagtgatttctaagcttagtggcggacgggtgagtaacgcgtgagcaacctgcctttcagagggggataacgtttggaaacagacgctaataccgcataacatagttttatcgcatgataggactatcaaaggagcaatccgctgaaagatgggctcgcgtccgattaggtagttggtgaggtaacggcccaccaagccgacgatcggtagccggactgagaggttgaacggccacattgggactgagacacggcccagactcctacgggaggcagcagtggggaatattgcacaatgggcgaaagcctgatgcagcaacgccgcgtgaaggaagacggttttcggattgtaaacttctgttcttggtgaagaaacaaatgacattagccaaggagcaagcc

SEQ ID NO: 5133 - DNA, 490 bp, unidentified
  misc_feature 1..490: note = Ascusbbf_333954, encodes 16S rRNA
  source 1..490: mol_type = genomic DNA
agagtttgatcctggctcaggacgaacgctggcggcgtgcctaacacatgcaagtcgagcggagccaattgacggatcccttcggggagaagacgaggaagcttagcggcggacgggtgagtaacgcgtgagtaacctgcctgtaagagggggataattcctggaaacggggactaataccgcatattgagcacatatcgcatggtatatgcttgaaagatttatcgcttacagatggactcgcgtctgattagcttgttggcggggtaacggcccaccaaggcgacgatcagtagccgaactgagaggttgatcggccacattgggactgagacacggcccagactcctacgggaggcagcagtgggggatattgcgcaatgggggaaaccctgacgcagcaacgccgcgtgatggaagaaggccttcgggttgtaaacatctgttgcaagggaagaaaaaaatgacggtaccttgtgaggaagccacg

SEQ ID NO: 5134 - DNA, 490 bp, unidentified
  misc_feature 1..490: note = Ascusbbf_1848402, encodes 16S rRNA
  source 1..490: mol_type = genomic DNA
agagtttgatcatggctcaggacgaacgctggcggcgtgcctaatacatgcaagtcgagcgctggagcgtttccttcgggagacaatccggagcggcggacgggtgagtaacacgtaggcaacctgcccgtaagactgggataactaccggaaacggtagctaataccggataggtggcttcttcgcatggagaagccaagaaacgcggttccgattcgttcggggctgcggcttacggatgggcctgcggcgcattagctagttggcagggtaatggcctaccaaggcgacgatgcgtagccgacctgagagggtgatcggccacactgggactgagacacggcccagactcctacgggaggcagcagtagggaatcttccgcaatgggcgaaagcctgacggagcaacgccgcgtgagtgatgaaggttttcggatcgtaaagctctgttgccaaggaagaacggcccggagggtaactactccggga

SEQ ID NO: 5135 - DNA, 490 bp, unidentified
  misc_feature 1..490: note = Ascusbbf_738464, encodes 16S rRNA
  source 1..490: mol_type = genomic DNA
agagtttgatcatggctcaggacgaacgctggcggcgtgcctaatacatgcaagtcgaacgcaatcttttaacaatgagtgcttgcactcagcgttttaagtgcgagtggcgaacgggtgagtaacacgtgggcaatctgcccaaaagtgggggataacacttggaaacaggtgctaataccgcatcaaccggctgaccgcatggtcggccgggcaaagacggcgtcagctgtcgcttttggatgagcccgcggcgtattaactagttggtaaggtaacggcttaccaaggtgatgatacgtagccgaactgagaggttgatcggccacattgggactgagacacggcccaaactcctacgggaggcagcagtagggaatcttccacaatggacgcaagtctgatggagcaacgccgcgtgtatgaagaaggtcttcggatcgtaaaatactgttgtcagagaagaacacgtgatagagtaactgctatg

SEQ ID NO: 5136 - DNA, 490 bp, unidentified
  misc_feature 1..490: note = Ascusbbf_721637, encodes 16S rRNA
  source 1..490: mol_type = genomic DNA
agagtttgatcatggctcagattgaacgctggcggcatgctttacacatgcaagtcggacggcagcgcgggcttcggcctggcggcgagtggcggacgggtgagtaagacatcggaacgtgccacggggtgggggacaaccagccgaaaggttggctaataccgcatggcatccacggattaaagcgggggacccttcggggcctcgcgccctgtgagcggccgatggctgattagctagttggtggggtaacggcctaccaaggcgacgatcagtagctggtctgagaggacgaccagccacattgggactgagacacggcccaaactcctacgggaggcagcagtggggaattttggacaatgggggcaaccctgatccagcaatgccgcgtgagtgaagaaggccttcgggttgtaaagctcttttgtcagggaagaaaagggggcggttaagagctgttcctgctgacggtacctgaagaataagc

SEQ ID NO: 5137 - DNA, 490 bp, unidentified
  misc_feature 1..490: note = Ascusbbf_225956, encodes 16S rRNA
  source 1..490: mol_type = genomic DNA
agagtttgatcctggctcaggatgaacgctagcggcaggcctaacacatgcaagtcgaacgggatccaccagcttgctggtggtgagagtggcgcacgggtgagtaacgcgtatgcaacctacctcttacagtgggatagcccagagaaatttggattaataccgcatagtatgcacttccggcattgggagtacattaaacattcatgggtaagagatgggcatgcgttctattagttagttggagtggtaacggcaccccaagacagcgatagataggggccctgagagggggatcccccacactggtactgagacacggaccagactcctacgggaggcagcagtgaggaatattggacaatgggcgcaagcctgatccagccatgccgcgtgcaggaagacggccctatgggttgtaaactgcttttatacaggaagaaacacccccacgtgtgggggcttgacggtactgtaggaataaggatcg

SEQ ID NO: 5138 - DNA, 490 bp, unidentified
  misc_feature 1..490: note = Ascusbbf_407301, encodes 16S rRNA
  source 1..490: mol_type = genomic DNA
agagtttgatcctggctcaggattaacgctggcggcgcacataagacatgcaagtcgaacggaagtcgttattaaaaggagtgaagatttatcggaacaatttttggtaacaatggctttagtggcggactggtgagtaacacgtaagtaacctgcctatcagaggggaataacagtgagaaatcattgctaataccgcataagcttacagtattgcatgatacagtaagaaaaggagaaatccgctgatagatggacttgcggccgattagccagttggtggggtaacggcctaccaaagcaacgatcggtagccgagctgagaggctcaacggccacattgggactgagatacggcccagactcctacgggaggcagcagtcgggaatattgcgcaatggaggaaactctgacgcagtgacgccgcgtataggaagaaggttttcggattgtaaactattttagacagggaagaaattgacagtacct

SEQ ID NO: 5139 - DNA, 490 bp, unidentified
  misc_feature 1..490: note = Ascusbbf_1051792, encodes 16S rRNA
  source 1..490: mol_type = genomic DNA
agagtttgatcatggctcaggatgaacgctggcggcgtgcataacacattcaagtcgaacggtgaagtttcttcggaaacggatcagtggcggacgggtgagtaacgcgtgagcaacctgccgtatagtgggggataacacagggaaacttgtgctaataccgcataacacacggggatcgcatggtacccgtgtcaaagatttattgctgtacgatgggctcgcgtatgattagacagttggcagggtaacggcctaccaaatcaacgatcattagccgaactgagaggttgaacggccacattggaactgagaaacggtccagactcctacgggaggcagcagtggggaatattgggcaatgggcgaaagcctgacccagcgacgccgcgtgagggaagaaggtcttcggattgtaaacctctttcagcagggaagaagtaagtgacggtacctgcagaagaagtcacggctaactacgtgccagcag

SEQ ID NO: 5140 - DNA, 490 bp, unidentified
  misc_feature 1..490: note = Ascusbbf_924463, encodes 16S rRNA
  source 1..490: mol_type = genomic DNA
agagtttgatcatggctcaggacgaacgctggcggcgtgcttaacacatgcaagtcgaacggggcttatgtagcttgctagataagcctagtggcaaacgggtgagtaacgcgtaggcaacctgcccctgggacggggacaacatcccgaaagggatgctaataccggatgaagcacgaacctcgcatggggtacgtgctaaaggtgggtcaaaccaccgccgagggatgggcctgcgtctgattagccagttggcggggtaacggcccaccaaagcgacgatcagtagccggtctgagaggatgaacggccacattgggactgagacacggcccagactcctacgggaggcagcagtggggaatcttccgcaatgggcgaaagcctgacggagcaacgccgcgtgagtgatgaaggccttcgggtcgtaaagctctgttgccggggacgagagacggagggaggaaatgctctccgcaggacggtacct

SEQ ID NO: 5141 - DNA, 490 bp, unidentified
  misc_feature 1..490: note = Ascusbbf_734811, encodes 16S rRNA
  source 1..490: mol_type = genomic DNA
agagtttgatcatggctcaggacgaacgctggcggcatgcctaacacatgcaagtcgaacggagcaaagggggcttgccctctttgcttagtggcggacgggcgagtaacgcgtgagcaacctgcccctcagaggggaataacgtccggaaacggacgctaataccgcataacgcagcgggagcgcatgcttctgctgccaaaggagcaatccgctgagggatgggctcgcgtccgattagctggttggcggggtaacggcccaccaaggcgacgatcggtagccgaactgagaggttgatcggccgcattgggactgagacacggcccagactcctacgggaggcagcagtgggggatattgcacaatggaggaaactctgatgcagcaatgccgcgtgagggaagacggtcttcggattgtaaacctaagtagacaggaacgatgatgacggtacctgtaaagtaagctccggctaactacgtgccag

SEQ ID NO: 5142 - DNA, 490 bp, unidentified
  misc_feature 1..490: note = Ascusbbf_734493, encodes 16S rRNA
  source 1..490: mol_type = genomic DNA
agagtttgatcctggctcaggacgaacgctggcggcgtgcctaacacatgcaagtcgagcggggacatcgggatagcttgctaaactgatgttccagcggcggacgggtgagtaacgcgtgaacaatctgtcccggacagggggataacacttggaaacaggtgctaataccgcataagcccacgttgtcacatgacagagggggaaaaggaggaatccggttcggggtgagttcgcgtccgattagatagttggtgaggtaacggcccaccaagtcaacgatcggtagccgacctgagagggtgatcggccacattggaactgagacacggtccaaactcctacgggaggcagcagtggggaatattgggcaatgggcgaaagcctgacccagcaacgccgcgtgagggaagaaggttttcggattgtaaacctctgtcctcagggacgaaggaagtgacggtacctgaggaggaagccccggctaact

SEQ ID NO: 5143 - DNA, 490 bp, unidentified
  misc_feature 1..490: note = Ascusbbf_264703, encodes 16S rRNA
  source 1..490: mol_type = genomic DNA
agagtttgatcatggctcaggatgaacgctggcggcgtgcctaatacatgcaagtcgaacgaattttaaggagcttgctccttgaagttagtggcgaacgggtgaataacacgtaggtaacctgccctttagcttgggatacccagaggaaactttggctaataccggataacaacagaagaggcatctcttcagtttgaaaggccctttacggggtcacttaaggatggacctgcggcgcattagttagttggtgagataacagcccaccaagacgaggatgcgtagccgacctgagagggtgatcggccacataggtactgagacacggacctaactcctacgggaggcagcagtaaggagttttcggcaatgggggaaaccctgaccgagcaacgccgcgtgagtgatgacggccctatgggttgtaaagctctgttagataaggacgaatgactagcttaggaaatgaagttagtttgacggtact

SEQ ID NO: 5144 - DNA, 490 bp, unidentified
  misc_feature 1..490: note = Ascusbbf_1804044, encodes 16S rRNA
  source 1..490: mol_type = genomic DNA
agagtttgatcctggctcaggataaacgctggcggcgtgcctaatacatgcaagtcgaacgatgaagttctcaagcttgcttgagaatagattagtggcgaacgggtgagtaatacataagcaacctacccatgaagactgggataatctctggaaacggggactaataccggataggtaagcggaccgcatgatctgcttattaaaggttaaaaacactgatggatgggcttatggcgcattagctagttggagaggtaacggctcaccaaggcgatgatgcgtagccggcctgagagggtgaacggccacattgggactgagacacggcccagactcctacgggaggcagcagtagggaattttcggcaatgggggaaaccctgaccgagcaacgccgcgtgagtgctaaggccttcgggttgtaaagctctgttgtaagggaagaacggtatgttgagaaaacataagtgacggtaccttacgagga

SEQ ID NO: 5145 - DNA, 490 bp, unidentified
  misc_feature 1..490: note = Ascusbbf_394766, encodes 16S rRNA
  source 1..490: mol_type = genomic DNA
agagtttgatcctggctcaggatgaacgctggcggcatgcctaagacatgcaagtcgtacgaggcggcccattgattcagattgagatctggagtgcttgcacaaaggaaggatttctgatgacgtggatcctccgcctagtggcaaacgggtgagtaacacgtgggttacctgcctcatagaccgggataccgtttggaaacgaacgttaataccggatgttgtctacggactaaagggagcctttaaagctccgctatgagatgggcctgcggtgcattagatagttggtgaggtaacggcccaccaagtcgacgatgcatagctgaactgagaggttgatcggccacactgggactgatacacggcccagactcctacgggagacagcagttaggaatattcgtcaatgggggaaaccctgaacgagcaatgccgcgtgaatgatgaaggccctatgggttgtaaaattctgttgtttgggaagaac

SEQ ID NO: 5146 - DNA, 490 bp, unidentified
  misc_feature 1..490: note = Ascusbbf_61588, encodes 16S rRNA
  source 1..490: mol_type = genomic DNA
agagtttgatcatggctcaggatgaacgctagcggcaggcctaacacatgcaagtcgaggggtagagttagcttgctaacttgagaccggcgcacgggtgcgtaacgcgtatgcaatctaccttatactgagggatagcccggagaaatccggattaataccttatagttaataaaaaaggcatcttttatattataaagatttattggtataagatgagcatgcgtcccattagttagttggtgtggtaacggcacaccaagacgatgatgggtaggggtcctgagagggagatcccccacactggtactgagacacggaccagactcctacgggaggcagcagtgaggaatattggtcaatggaggcaactctgaaccagccatgccgcgtgcaggatgacggtcctatggattgtaaactgcttttgtacaggaagaaaaagagttacgtgtagcttattgacggtactgtaagaataaggatcggc

SEQ ID NO: 5147 - DNA, 490 bp, unidentified
  misc_feature 1..490: note = Ascusbbf_101282, encodes 16S rRNA
  source 1..490: mol_type = genomic DNA
agagtttgatcctggctcaggacgaacgctggcggcgtgcttaacacatgcaagtcgaacggaagtatatattaagcttgctttttgtatactttagtggcggacgggtgagtaacgcgtgaggacttgtccactccagggggacaacagttggaaacagctgctaataccccataagcctaagggttaaaggagcaatccgggagaggagagactcgcgtcctatcagctagtaggtgagataatggctcacctaggctaagacgggtaaccggactgagaggtcgaacggtcacactggaactgagacacggtccagactcctacgggaggcagcagtggggaatcttgggcaatgggggcaaccctgacccagcgacgccgcgtgggtgaagaaattcttcggaatgtaaagccctgttgtatgggaagataatgacggtaccataccagaaagccccggcaaactacgtgccagcagccgcggtaa

SEQ ID NO: 5148 - DNA, 490 bp, unidentified
  misc_feature 1..490: note = Ascusbbf_360670, encodes 16S rRNA
  source 1..490: mol_type = genomic DNA
agagtttgatcctggctcaggatgaacgctagcggcaggcctaacacatgcaagtcgaggggtaagaggcattagcttcctagaccggcgtacgggtgcgtaacgcgtatacaatctaccttttacttagggatagcccggagaaatttggattaatacctaatagtactatataacggcatcgttatatagttaaagcgttagtggtaagagatgagtatgcgtcctattagctagttggtaaggtaacggcttaccaaggctacgataggtaggggtcctgagagggagatcccccacactggtactgagacacggaccagactcctacgggaggcagcagtgaggaatattggtcaatgggcggaagcctgaaccagccatgccgcgtgcaggaagacggccttatgggttgtaaactgcttttgtaagggaagaataatctttacgtgtagagagatgacggtaccttatgaataagcatcggcta

SEQ ID NO: 5149 - DNA, 490 bp, unidentified
  misc_feature 1..490: note = Ascusbbf_431634, encodes 16S rRNA
  source 1..490: mol_type = genomic DNA
agagtttgatcatggctcaggatgaacgctggcggcgtgcctaacacatgcaagtcgaacgaagctgcgaggaaggagacttcggtcaacggaattgtagacttagtggcggacgggtgagtaacgcgtgagcaacctgcctcagagtgggggacaacagctggaaacggctgctaataccgcatgacatttaaggaaggcatcttctttaaatcaaagcttaatgtgctctgagatgggctcgcgtctgattagctagatggtgaggtaatggctcaccatggcgacgatcagtagccggactgagaggttgaacggccacattgggactgagatacggcccagactcctacgggaggcagcagtggggaatattggtcaatgggggaaaccctgaaccagcaacgccgcgtgaaggaagaaggctttcgggttgtaaacttcttttatctgagacgatagtgacggtatcagatgaataagctacggc

SEQ ID NO: 5150 - DNA, 490 bp, unidentified
  misc_feature 1..490: note = Ascusbbf_36008, encodes 16S rRNA
  source 1..490: mol_type = genomic DNA
agagtttgatcatggctcaggatgaacgctggcggcgtgcataacacattcaagtcgaacggtgaagtcccttcggggacggatcagtggcggacgggtgagtaacgcgtgagcaacctgccatacagtgggggataacacagggaaacttgtgctaataccgcatgacacatcgggatcgcatgtttctgatgtcaaagagcaattgctgtatgatgggctcgcgtatgattagacagttggcagggtaacggcctaccaaatccacgatcattagccgaactgagaggttgaacggccacattggaactgagaaacggtccagactcctacgggaggcagcagtggggaatattgggcaatgggcgaaagcctgacccagcgacgccgcgtgagggaagaaggtcttcggattgtaaacctctttcagcagggaagaaggaagtgacggtacctgcagaagaagtcacggctaactacgtgccagcag

SEQ ID NO: 5151 - DNA, 490 bp, unidentified
  misc_feature 1..490: note = Ascusbbf_20210, encodes 16S rRNA
  source 1..490: mol_type = genomic DNA
agagtttgatcctggctcaggatgaacgctggcggcgtgcctaacacatgcaagtcgaacgaagcgtcccgcccgaagagaaggagtgcttgcacaaatttaattcaattggggcgacttagtggcggacgggtgagtaacgcgtgggtaacctgccttatacagggggataacagttagaaatgactgctaataccgcataagcgcacagaatcgcatgatacagtgtgaaaagccgagacggtataagatggacccgcgtctgattagccagttggcagggtaacggcctaccaaagcgacgatcagtagccggcctgagagggtgaacggccacattgggactgagacacggcccaaactcctacgggaggcagcagtgggggatattgcacaatgggggaaaccctgatgcagcgacgccgcgtgagcgaagaagtatttcggtatgtaaagctctatcagcagggaagaaaatgacggtacctga

SEQ ID NO: 5152 - DNA, 490 bp, unidentified
  misc_feature 1..490: note = Ascusbbf_1901558, encodes 16S rRNA
  source 1..490: mol_type = genomic DNA
agagtttgatcatggctcaggacgaacgctggcggcgtgcttaacacatgcaagtcgaacggggcgattgaaagcttgcttttatgagcctagtggcaaacgggtgagtaacgcgtgggcaacctaccggaaagatggggacaacatcccgaaaggggtgctaataccgaatgttgtacaggggacgcatgttccttgtattaaaggattttatccgctttccgatgggcccgcgtccgattagctagttgggggggtagcggcccaccaaggcgacgatcggtagccggcctgagagggtggacggccacattgggactgagacacggcccagactcctacgggaggcagcagtggggaatcttccgcaatgggcgcaagcctgacggagcaacgccgcgtgagtgaagaaggccttcgggccgtaaagctctgttgccggggaagagtggcaggaggggactcctgcagggacggtacccggcgagga

SEQ ID NO: 5153 - DNA, 490 bp, unidentified
  misc_feature 1..490: note = Ascusbbf_6729, encodes 16S rRNA
  source 1..490: mol_type = genomic DNA
agagtttgatcctggctcagattgaacgctggcggcatgccttacacatgcaagtcgaacggcagcatgatctagcttgctagattgatggcgagtggcgaacgggtgagtaatacatcggaacgtgccctgtagtgggggataactagtcgaaagattagctaataccgcatacgacctgagggtgaaagtgggggaccgcaaggcctcatgctataggagcggccgatgtctgattagctagttggtgaggtaaaggctcaccaaggcgacgatcagtagctggtctgagaggacgatcagccacactgggactgagacacggcccagactcctacgggaggcagcagtggggaattttggacaatgggcgaaagcctgatccagcaatgccgcgtgtgtgaagaaggccttcgggttgtaaagcacttttgtccggaaagaaatggctctggttaatacctggggtcgatgacggtaccggaagaat

SEQ ID NO: 5154 - DNA, 490 bp, unidentified
  misc_feature 1..490: note = Ascusbbf_2122, encodes 16S rRNA
  source 1..490: mol_type = genomic DNA
agagtttgatcatggctcagaacgaacgctggcggcatggattaggcatgcaagtcgaacggtgcagcaatgcatagtggcgcaagggtgaggaacgcgtgagtaatctgccctcaagttgggaacagcttctggaaacggaaattaataccgaatgtgatctcagggaggcatctttctgggattaaaggccgcaaggtcgcttgaggaggggctcgcgtcccattatgctagttggtgaggtaacggcccaccaaggcgaagatgggtagctggtctgagaggacgatcagccacactgggactgagaactgcccagactcctacgggaggctgcagtcgagaattttgggcaatggacgaaagtctgacccagcaatgccgcgtgcgggatgaaggtcttcggattgtaaaccgctgtcaagtgggacgaaacaaatgacggtaccgctgaaggaagtcacggctaactacgtgccagcagccgcgg

SEQ ID NO: 5155 - DNA, 490 bp, unidentified
  misc_feature 1..490: note = Ascusbbf_56285, encodes 16S rRNA
  source 1..490: mol_type = genomic DNA
agagtttgatcctggctcaggacgaacgctggcggcgcgcctaacacatgcaagtcgaacgggactagtgaccggagtgcagagaggatctgtgttgcgatcactagttcagtggcggacgggtgagtaaagcatgagcaacctggctactagagggggatagcttttggaaacagaagataataccgcatacatcaaagatttcgcatgagatttttggaaaaggagcaatccgctaatagatgggctcatgtccgattagctagttggtagggtaaaggcctaccaaggcgacgatcggtagccgtactgagaggttcaacggccacattgggactgagacacggcccagactcctacgggaggcagcagtgaggaatattgcgcaatggagggaactctgacgcagcgacgccgcgtgagggaagaaggttttcgaattgtaaacctctgtcctcagggaagaaaagaatgacggtacctggggagg

SEQ ID NO: 5156 - DNA, 490 bp, unidentified
  misc_feature 1..490: note = Ascusbbf_70836, encodes 16S rRNA
  source 1..490: mol_type = genomic DNA
agagtttgatcctggctcaggatgaacgctagcggcaggcttaacacatgcaagtcgaggggcagcgagatgtagcaatacattgtcggcgaccggcgcacgggtgcgtaacgcgtatgcaacctaccatatacaggaggataaccattcgaaagaatgactaatactccatagtattattttgaggcatcttagaataattaaagaatttcggtatatgctgggcatgcgtgacattagctagttggagaggtaacggctcaccaaggctacgatgtctaggggttttgagaggaagatcccccacactggtactgagacacggaccagactcctacgggaggcagcagtgaggaatattggtcaatggacggaagtctgaaccagccatgccgcgtgaaggaagactgccctatgggttgtaaacttcttttatacggggataaacctatctttgcgaagatagctgaaggtaccgtatgaataagca

SEQ ID NO: 5157 - DNA, 490 bp, unidentified
  misc_feature 1..490: note = Ascusbbf_31846, encodes 16S rRNA
  source 1..490: mol_type = genomic DNA
agagtttgatcctggctcaggatgaacgctggcggcgtgcctaacacatgcaagtcgagcgagaagctcatgatcgaaacttcggttgattgattgagtggaaagcggcggacgggtgagtaacgcgtaggcaacctgccccttgcagagggatagcctcgggaaaccgggattaaaacctcataatgcagaagagagacatctttcctctgccaaagatttatcggcaagggatgggcctgcgtctgattagttagttggtggggtaacggcctaccaaggcagcgatcagtagccgacctgagagggtgatcggccacattggaactgagacacggtccaaactcctacgggaggcagcagtggggaatattgcacaatgggcgaaagcctgatgcagcaacgccgcgtgaaggatgaaggcccttgggtcgtaaacttctgttctaagggaagataatgacggtaccttaggagcaagtcccggcta

SEQ ID NO: 5158 - DNA, 490 bp, unidentified
  misc_feature 1..490: note = Ascusbbf_160461, encodes 16S rRNA
  source 1..490: mol_type = genomic DNA
agagtttgatcatggctcaggatgaacgctagcggcaggcctaacacatgcaagtcgaggggtagaacacttcggtgtttgagaccggcgcacgggtgcgtaacgcgtatgcaatctaccttgtacagagggatagcccagagaaatttggattaatacctcatagtataatttaatggcatcatttgattattaaagttccaacggtacaagatgagcatgcgtcccattagttagttggtgtggtaacggcacaccaagacgatgatgggtaggggtcctgagagggagatcccccacactggtactgagacacggaccagactcctacgggaggcagcagtgaggaatattggtcaatggaggcaactctgaaccagccatgccgcgtgcaggaagacggttctatggattgtaaactgcttttgtacaggaagaaattatccctcgtgagggagcttgacagtactgtaagaataaggatcggcta

SEQ ID NO: 5159 - DNA, 490 bp, unidentified
  misc_feature 1..490: note = Ascusbbf_57053, encodes 16S rRNA
  source 1..490: mol_type = genomic DNA
agagtttgatcctggctcaggatgaacgctagcgggaggcctaacacatgcaagccgagcggtagaagtccttcgggactttgagagcggcgtacgggtgcgtaacacgtgtgcaacctgcctttatctgggggatagcctttcgaaaggaagattaataccccataatatagtgactggcatcagttactattgaaaactccggtggatagagatgggcacgcgcaagattagatagttggtgaggtaacggctcaccaagtctgtgatctttagggggcctgagagggtgatcccccacactggtactgagacacggaccagactcctacgggaggcagcagtgaggaatattggacaatgggtgagagcctgatccagccatcccgcgtgaaggacgacggccctatgggttgtaaacttcttttgtacagggataaacccagatacgtgtatctggctgaaggtactgtacgaataagcaccggct

SEQ ID NO: 5160 - DNA, 490 bp, unidentified
  misc_feature 1..490: note = Ascusbbf_7025, encodes 16S rRNA
  source 1..490: mol_type = genomic DNA
agagtttgatcctggctcaggatgaacgctggcggcgtgcttaacacatgcaagtcgaacggagagatattacagaagttttcggatggaagtgatagatcttagtggcggacgggtgagtaacgcgtaaacaatctgccttagagagggggacaacagatagaaatatctgctaataccgcataagaccacaggtaggcatctactaggggtaaaaggagaaatccactttaagatgagtttgcgtactattagctagttggtgaggtaacggcccaccaaggcgacgatggttagccggcctgagagggtgaacggccacattggaactgagatacggtccagactcctacgggaggcagcagtgaggaatattgggcaatgggcgaaagcctgacccagcaacgccgcgtgaaggaagaaggttttaggattgtaaacttctgttgtaagggaaaaagaaagtgatggtaccttacgaggaagctac

SEQ ID NO: 5161 - DNA, 490 bp, unidentified
  misc_feature 1..490: note = Ascusbbf_27749, encodes 16S rRNA
  source 1..490: mol_type = genomic DNA
agagtttgatcatggctcagattgaacgctggcggcacgcctaacacatgcaagtcgagcggtaacagtagtagtagcaatactattagctgacgagcggcggacgggtgaggaacacgtaggaacctaccctcaagcgggggatacccaagggaaactttggttaataccgcatagattcgagagaggaaagttgccgagaggtgacacttgaggaagggcctgcgtccgattagctagttggtggggtaagagcttaccaaggcgatgatcggtaactggtctgagaggacgaccagtcacactgggactgagacacggcccagactcctacgggaggcagcagtggggaatattggacaatgggggcaaccctgatccagcgatgccgcgtgagtgaagaaggccctcgggtcgtaaagctctttaggtcaggaagaaggttattggaggataatgctgataacttgacggtactgacagaataagc

SEQ ID NO: 5162 - DNA, 490 bp, unidentified
  misc_feature 1..490: note = Ascusbbf_13225, encodes 16S rRNA
  source 1..490: mol_type = genomic DNA
agagtttgatcatggctcagaacgaacgctggcggcgcgtcttaagcatgcaagtcgagcggtaaggaggtagcttgctacttccctagagcggcggactggtgagtaacgcgtgggtgacgtaccctttggttggggatagccggtagaaataccgggtaataccgaataagacctctgatagaaagatcagagaggaaagcggctccggccgcgccgaaggaacggcccgcgtactattagctggttggtgaggtaacggcccaccaaggcgacgatagttatccggcctaagagggtgaacggacacattgggactgagatacggcccagactcctacgggaggcagcagctaagaatattccgcaatggggggaaccctgacggagcgacgccgcgtggatgatgaaggccggaaggttgtaaagtccttttgagtgtgatgaataaagcctgcagggaatggcaggaagatgaccgtagcacttg

SEQ ID NO: 5163 - DNA, 470 bp, unidentified
  misc_feature 1..470: note = Ascusbbf_952514, encodes 16S rRNA
  source 1..470: mol_type = genomic DNA
agagtttgatcctggctcagaacgaacgctggcggcaggcctaacacatgcaagtcgagcgctctcttcggagagagcggcagacgggtgagtaacgcgtgggaacgtgcccgaaggtacggaacaaccgctggaaacggcgactgataccgtatgtcccctgagggggaaagatttatcgccttcggatcggcccgcgtcggattagctagttggcggggtaacggcccaccaaggcgacgatccgtagctggtttgagaggatgatcagccacactgggactgagacacggcccagactcctacgggaggcagcagtggggaatcttggacaatgggggcaaccctgatccagccatgccgcgtgagcgatgaaggccttagggttgtaaagctctttcacccgtgaagataatgacggtagcgggagaagaagccccggctaactccatgccagcagccgcggtaat

SEQ ID NO: 5164 - DNA, 490 bp, unidentified
  misc_feature 1..490: note = Ascusbbf_1372257, encodes 16S rRNA
  source 1..490: mol_type = genomic DNA
agagtttgatcctggctcaggacgaacgctggcggcgtgcttaacacatgcaagtcgaacggtaaggccctttcgggggtacacgagtggcgaacgggtgagtaacacgtgggtaatctgccctgcacttcggtataagcctgggaaactgggtctaataccggatatgagctctcaccgcatggtgggggttggaaagtttttcggtgcaggatgagcccgcggcctatcagcttgttggtggggtaatggcctaccaaggcgacgacgggtagccggcctgagagggtgatcggccacagtgggaaggggacacggcacagactcgtacgggaggcagcagaggggaatattgcacaatgggcggaagccggatgcagcgaggccgcgtgggggatgacggtcttcggattgtaaacccctttcagtagggacgaagcgcaagtgacggtacctgcagaagaagcaccggccaactacgtgccagcag

SEQ ID NO: 5165 - DNA, 490 bp, unidentified
  misc_feature 1..490: note = Ascusbbf_778268, encodes 16S rRNA
  source 1..490: mol_type = genomic DNA
agagtttgatcctggctcagattgaacgctggcggcaggcttaacacatgcaagtcgagcggtaacaggtccagcttgctggatgctgacgagcggcggacgggtgagtaatgcataggaatctgcccggtagtgggggataacctggggaaacccaggctaataccgcatacgtcctacgggagaaagcaggggaccttcgggctttgcgctatcggatgagcctatgccggattagctagttggtgaggtaatggctcaccaaggcagcgatccgtagctggtctgagaggatgatcagccacactgggactgagacacggcccagactcctacgggaggcagcagtggggaatattggacaatgggggcaaccctgatccagccatgccgcgtgtgtgaagaaggctttcgggttgtaaagcactttcagcggggaagaaggccttcgggataataccccggaggaaggacatcacccgcagaagaa

SEQ ID NO: 5166 - DNA, 490 bp, unidentified
  misc_feature 1..490: note = Ascusbbf_813581, encodes 16S rRNA
  source 1..490: mol_type = genomic DNA
agagtttgatcatggctcaggatgaacgctagcggcaggcctaacacatgcaagtcgaggggcagcgatctgtgcttgcacagagtcggcgaccggcgcacgggtgcgcaacgcgtatggaacctgcccgttacgggggaatagcccggggaaacccggattaatgccccatgttgaccttgcgcggcatcgcgctaggtccaaaggcttcggccggtaacggatggccatgcgtaccattagcaagttggcggggtaacggcccaccaatgctacgatggttaggggccctgagaggggggccccccacactggtactgagacacggaccagactcctacgggaggcagcagtgaggaatattggacaatgggcgggagcctgatccagccatgccgcgtgcgggaagaaggccctacgggtcgtaaaccgcttttgtacgggaagaacgaggggcacgcgtgcccccttgacggtaccgtaagaataa

SEQ ID NO: 5167 - DNA, 490 bp, unidentified
  misc_feature 1..490: note = Ascusbbf_21628, encodes 16S rRNA
  source 1..490: mol_type = genomic DNA
agagtttgatcctggctcaggacgaacgctggcggcgtgcttcatacatgcaagtcgaacgagaagcagtcttcggactgtggaaagtggcggacgggtgagtaatatgtagagaatctgccctagagcgggggacaacagttggaaacgactgctaataccccatatgcgcgtacttgagatagtattcgtgaaaactccggtgctctaggatgagtctgcatctgattagctagttgggggtgtaatggaccaccaaggcgacgatcagtagctggtttgagaggatgatcagccacaatgggactgagacacggcccatactcctacgggaggcagcagtagggaattttgcgcaatgggggaaaccctgacgcagcaacgccgcgtgattgaataagcccttcggggtgtaaagatctgtcagtggggacgaaacttgacggtacccacagaggaagcatcggctaactccgtgccagcagccgcg

SEQ ID NO: 5168 - DNA, 490 bp, unidentified
  misc_feature 1..490: note = Ascusbbf_7920, encodes 16S rRNA
  source 1..490: mol_type = genomic DNA
agagtttgatcatggctcaggacgaacgctggcggcgtgcttaacacatgcaagtcgaacggagttagacgctggattgatgccagcttgctggtggatttccttgtctaacttagtggcggacgggtgagtaacgcgtgagtaacctgccctcgagtggggaataacgttctgaaaagatcgctaataccgcataacacatactggtcgcatggtcggtatgtcaaagatttatcgctcgaggatggactcgcgtccgattagcttgttggcggggtaacggcccaccaaggcgacgatcggtagccggactgagaggttgaacggccacattgggactgagacacggcccagactcctacgggaggcagcagtgggggatattgcgcaatgggggaaaccctgacgcagcaacgccgcgtggaggatgacggttttcggattgtaaactccttttatgggggacgaactaagacggtaccccatgaat

SEQ ID NO: 5169 - DNA, 490 bp, unidentified
  misc_feature 1..490: note = Ascusbbf_27321, encodes 16S rRNA
  source 1..490: mol_type = genomic DNA
agagtttgatcatggctcaggatgaacgctagctacaggcttaacacatgcaagtcgaggggcagcacgggagttgcttgcaacttctggtggcgaccggcgaatgggtgagtaacgcgtatccaacctgccctgtgcccgggaatagcccttggaaacgaggattaacgcccgatggcgtgcattgaccgcatgggaaatgcactaaatgcgaaggcacgggatggggatgcgttccattaggttgttggcggggtaacggcccaccaagccttcgatggataggggttctgagaggaaggtcccccacattggaactgagacacggtccaaactcctacgggaggcagcagtgaggaatattggtcaatgggcggaagcctgaaccagccaagtagcgtgagggatgacggccctacgggttgtaaacctcttttatgcggggataaagtgctccacgcgtggagttttgcaggtaccgcatgaataa

SEQ ID NO: 5170 - DNA, 490 bp, unidentified
  misc_feature 1..490: note = Ascusbbf_44947, encodes 16S rRNA
  source 1..490: mol_type = genomic DNA
agagtttgatcctggctcagattgaacgctggcggcaggcttaacacatgcaagtcgaacgatgatgtctagcttgctagacggattagtggcgaacgggtgagtaatgcttaggaatctgcctggtagtgggggacaacattccgaaaggaatgctaataccgcatacgacctacgggtgaaagggggcgcaagctctcgctatcagatgagcctaagtcggattagctagttggtggggtaaaggcctaccaaggcgacgatctgtagctggtcttagaggatgatcagccacactgggactgagacacggcccagactcctacgggaggcagcagtggggaatattggacaatgggcgaaagcctgatccagccatgccgcgtgtgtgaagaaggccttttggttgtaaagcactttaagtggggaggaaaagcttgtggttaatacccacaagccctgacgttacccacagaataagcaccggcta

SEQ ID NO: 5171 - DNA, 490 bp, unidentified
  misc_feature 1..490: note = Ascusbbf_65370, encodes 16S rRNA
  source 1..490: mol_type = genomic DNA
agagtttgatcctggctcaggacgaacgctggcggcgtgcctaacacatgcaagtcgagcggaggtagacaaggagtaatctgagtttaccttagcggcggacgggtgagtaacgcgtgagcaacctgcctttcacagggggataaggcggcgaaagccgctctaataccgcatgagaccacggtgatgatattacaggggtcaaaggagcaatccggtgaaagatgggctcgcgtccgattaggtagttggtggggtagaggctcaccaagccaatgatcggtagccggcctgagagggtgaacggccacattggaactgagagacggtccaaactcctacgggaggcagcagtggggaatattgggcaatgggcgaaagcctgacccagcaacgccgcgtgaaggaagaaggttttcggattgtaaacttctgttcttggggaagagaagaagacggtacccaaggaggaagccccggctaactacgt

SEQ ID NO: 5172 - DNA, 490 bp, unidentified
  misc_feature 1..490: note = Ascusbbf_105858, encodes 16S rRNA
  source 1..490: mol_type = genomic DNA
agagtttgatcctggctcagattgaacgctggcggcatgctttacacatgcaagtcgaacggcagcgggggtttaagcttgcttaaacctgccggcgagtggcgaacgggtgagtacaacatcggaacgtgtccgtttgtgggggacaactgctcgaaagggtagctaataccgcataagacctgagggtgaaagtgggggatcgcaagacctcacgcgaacggagcggccgatgactgattaggtagttggtgaggtaaaggcccaccaagccgacgatcagtagctggtctgagaggacgaccagccacactggaactgagacacggtccagactcctacgggaggcagcagtggggaattttggacaatgggggaaaccctgatccagccatgccgcgtgcgggaagaaggccttcgggttgtaaaccgcttttgtcagggacgaaaagtcgtatttaaataaagtacgatgctgacggtacctgaa

SEQ ID NO: 5173 - DNA, 490 bp, unidentified
  misc_feature 1..490: note = Ascusbbf_122105, encodes 16S rRNA
  source 1..490: mol_type = genomic DNA
agagtttgatcatggctcaggacgaacgctggcggcgtgcctaacacatgcaagtcgaacggggtccaagagagcttgctctcggaagacctagtggcgaacgggtgagtaacacgtgagaaacctgcctcggagtggggaataactcggggaaactcgagctaataccgcataccttcagacggtcgcatggctgactgaagaaagaatttcgctctgagagggtctcgcggcctatcagcttgttggtggggtaatggcctaccaaggcaacgacgggtagctggattgagagatcgatcagccacactggaactgagacacggtccagactcctacgggaggcagcagtggggaatcttgcgcaatgggcgaaagcctgacgcagcaacgccgcgtgcgggatgacggccttcgtggttgtaaaccgctttcagcagggacgaaaatgacggtacctgcagaagaagccccggctaactacgtgcca

SEQ ID NO: 5174 - DNA, 487 bp, unidentified
  misc_feature 1..487: note = Ascusbbf_234273, encodes 16S rRNA
  source 1..487: mol_type = genomic DNA
agagtttgatcctggctcaggatgaacgctggcggcgtgcctaacacatgcaagtcgagcgaggacttcggtcctagcggcggacgggtgagtaacgcgtgggtaatctgcctcatacacacggataacataccgaaaggtatgctaatacgagataatattaagaaatggcatcatttcttaatcaaagaatttcggtatgagatgagcccgcgtcccattagctagttggtaaggtaaaagcttaccaaggcgacgatgggtagccgacctgagagggtgatcggccacactggaactgagacacggtccagactcctacgggaggcagcagtggggaatattgcacaatgggcgaaagcctgatgcagcaacgccgcgtgagcgatgaaggtcttcggatcgtaaagctctgtcctcaaggaagaattttgacggtacttgaggaggaagccccggctaactacgtgccagcagccgcggtaat

SEQ ID NO: 5175 - DNA, 490 bp, unidentified
  misc_feature 1..490: note = Ascusbbf_150424, encodes 16S rRNA
  source 1..490: mol_type = genomic DNA
agagtttgatcatggctcaggacgaacgctggcggcgtggattaggcatgcaagtcgagcgatatccaaccttcgggttggtgaaagcggcgaacgggtgagtaacacgtgaacaacctgccctcacattccggataatagaccgaaaggtcttgtaatacgggcgaggattctcctttggcatcttaggagaagggaaggcgcaagccgtgcgaggaggggttcgcggattatcaggtagatggtggggtaacggcctaccatgccgacgacgattagctggtctgagaggatggtcagccacactgggactgagacactgcccagactcctacgggaggctgcagtcgagaatcttgcacaatgtacgaaagtatgatgcagcgacgccgcgtgaaggatgaaggcccttgggtcgtaaacttcttttatcggggaagaataaatgacggtacccgatgaataagccacggctaactacgtgccagca

SEQ ID NO: 5176 - DNA, 490 bp, unidentified
  misc_feature 1..490: note = Ascusbbf_1571154, encodes 16S rRNA
  source 1..490: mol_type = genomic DNA
agagtttgatcctggctcagaacgaacgctggcggcgcgtcttaagcatgcaagtcgaacgagaatctttagcttgctaaagaggaaagtggcggacgggtgagtaaaatgtagagaatctgccctagagagtgggacaacagagggaaacttctgctaataccgcatatgcgcgtatctgaaatggtattcgtgaaaactccggtgctctgggatgagtctgcatctgattagctagttgggggtgtaatggaccaccaaggcgacgatcagtagctggtttgagaggatgatcagccacaatgggactgagacacggcccatactcctacgggaggcagcagtagggaattttgcgcaatgggggaaaccctgacgcagcaacgccgcgtgattgaaaaagcccttcggggtgtaaagatctgtcagtggggacgaaacttgacggtacccacagaggaagcatcggctaactccgtgccagcagccg

SEQ ID NO: 5177 - DNA, 490 bp, unidentified
  misc_feature 1..490: note = Ascusbbf_12241, encodes 16S rRNA
  source 1..490: mol_type = genomic DNA
agagtttgatcatggctcaggatgaacgctagctacaggcttaacacatgcaagtcgaggggtaacaggagggaagcttgctttcctcgctgacgaccggcgaatgggtgagtaacgcgtatccaacctgccgcacgcccgggaacagcccttggaaacgaggattaaatcccgataccttgcccttccgcatgaaggggcaagaaaacaggcatgcgatggggatgcgtctgattagcttgttggcggggtaacggcccaccaaggcgacgatcagtaggggttctgagaggaaggtcccccacattggaactgagacacggtccaaactcctacgggaggcagcagtgaggaatattggtcaatgggcgagagcctgaaccagccaagtagcgtgagggatgactgccctacgggttgtaaacctcttttgtccaggaataaaaaaggcctcgtgaggcctcttgcaggtactggttgaataaggacc

SEQ ID NO: 5178 - DNA, 490 bp, unidentified
  misc_feature 1..490: note = Ascusbbf_2630, encodes 16S rRNA
  source 1..490: mol_type = genomic DNA
agagtttgatcatggctcagaatgaacgttggcggcatggattaggcatgcaagtcgtacggtgaaggggagcttgctcctccgatcagtggcgaaagggatagtaacgcgtagacacctaccttctggacggggatagctgcgggaaactgcaggtaatacccgataatgacgagagtccaaaggtgtaattccttcagaagacggatctgcgtcctaccagatagttggcggggtaacggcccaccaagtctaagacgggtagcgggtgtgagagcatgacccgcatcactgggactgagacactgcccagacacctacgggtggctgcagtcgagaatcttcgtcaatgggcgaaagcctgaacgagcgatgccgcgtgcgggatggaggccttcgggttgtaaaccgctgtcgaattggaggaaatgcatagtgtagaattatgcttgactgatagtagaaggaaggacgggctaagttcgtgcca

SEQ ID NO: 5179 - DNA, 490 bp, unidentified
  misc_feature 1..490: note = Ascusbbf_8430, encodes 16S rRNA
  source 1..490: mol_type = genomic DNA
agagtttgatcatggctcaggacgaacgctggcggcgtgcctaatacatgcaagtcgagcgaatctgatgggagcttgctccctgatgattagcggcggacgggtgagtaacacgtgggtaacctgcctgtaagactgggataactccgggaaaccggggctaataccggataacttttttcttcgcatgagggagaattgaaagatggcctcggctatcacttacagatggacccgcggcgcattagctagttggtgaggtaacggctcaccaaggcgacgatgcgtagccgacttgagagggtgatcggccacactgggactgagacacggcccagactcctacgggaggcagcagtagggaatcttccgcaatggacgaaagtctgacggagcaacgccgcgtgagtgatgaaggttttcggatcgtaaaactctgttgttagggaagaacaagtatcgttcgaatagggcggtaccttgacggtac

SEQ ID NO: 5180 - DNA, 490 bp, unidentified
  misc_feature 1..490: note = Ascusbbf_5064, encodes 16S rRNA
  source 1..490: mol_type = genomic DNA
agagtttgatcctggctcaggataaacgctggcggcgcacataagacatgcaagtcgaacgaacttaattcattcttttagattgaaagcggttagtggcggactggtgagtacaacataagcaacctgcctgtaagaggggaacaacagttagaaatgactgctaataccgcatatgccatagtaaccacatggttacagtgggaaaggagcaatccgcttatagatgggcttatgcctgattagctagttggtggggtaacggcctaccaaggcgacgatcagtagccgaactgagaggttaaacggccacattgggactgagatacggcccagactcctacgggaggcagcagtcgggaatattgcgcaatggaggaaactctgacgcagtgacgccgcgtgcaggaagaaggttttcggattgtaaactgctttagacagggaagaaaaaagacagtacctgtagaataagctccggctaactacg

SEQ ID NO: 5181 - DNA, 490 bp, unidentified
  misc_feature 1..490: note = Ascusbbf_11976, encodes 16S rRNA
  source 1..490: mol_type = genomic DNA
agagtttgatcatggctcagaacgaacgctggcggcgcgtcttaagcatgcaagtcggacggcaagatgagagcttgctctcatcctagagtggcggactggtgagtaacacgtgggtgacgtacccccgggacggggatagctcctagaaataggagataataccggatacgaccgcagacgtagaggtctgcgaggaaaggagctctggctccgcccggggaacggcctgcggcccattagctagttggtgtggtaacggcataccaaggcgatgatgggtatccggcctgagagggtgaacggacacattgggactgagatacggcccagactcctacgggaggcagcagctaagaatattccgcaatggacgaaagtctgacggagcgacgccgcgtggatgaagaaggccggaaggttgtaaaatccttttaaacgggaagaataagccttgcagggaatggcagggtggtgacggtaccgtttg

SEQ ID NO: 5182 - DNA, 490 bp, unidentified
  misc_feature 1..490: note = Ascusbbf_32755, encodes 16S rRNA
  source 1..490: mol_type = genomic DNA
agagtttgatcctggctcaggatgaacgctggcggcgtgcctaatacatgcaagtcgagcggtaaggctttcactctgtattcaaagctttgaatatagtgtgaaagtacacgagcggcggacgggtgagtaacacgtgggaatctaccccaaactgagggataagcatcggaaacggtgtctaataccgcatatggtcttcggattaaagcttcggcggtttgggaagagcccgcgcaagattagctagttggtaaggtaatggcttaccaaggcgacgatctttagctggtttgagaggatgatcagccacactggaactgagacacggtccagactcctacgggaggcagcagtaaggaattttccacaatgggggcaaccctgatggagcaacgccgcgtgcaggatgaatgccttcgggttgtaaactgcttttataagtgaagaatatgacggtaacttatgaataaggatcggctaactccgt

SEQ ID NO: 5183 - DNA, 490 bp, unidentified
  misc_feature 1..490: note = Ascusbbf_462272, encodes 16S rRNA
  source 1..490: mol_type = genomic DNA
agagtttgatcctggctcaggacgaacgctggcggtatgcttaacacatgcaagtcgaacgagacaagatggaagtgcttgcacggaaatcttagaaagtggcgaacgggtgagtaacgcgtgggtaacctgccctatggaaaggaatagcctcgggaaactgggagtaatgccttataatatagtgaagtcgcatggctttgctattaaacgctccggtgccataggatggacccgcgtcccattagctagttggtgagataacagcccaccaaggcgacgatgggtaaccggtctgagagggcgaacggtcacactggaactgagacacggtccagactcctacgggaggcagcagtggggaatattgcgcaatgggggaaaccctgacgcagcaataccgcgtgagtgaagaaggttttcggatcgtaaagctctgttattggggaagaaaaaaagacggtacccaagaagaaagtcccggctaact

SEQ ID NO: 5184 - DNA, 490 bp, unidentified
  misc_feature 1..490: note = Ascusbbf_1595610, encodes 16S rRNA
  source 1..490: mol_type = genomic DNA
agagtttgatcatggctcaggacgaacgctggcggtatgcttaacacatgcaagtcgaacgagacgagatggaatgatccttcgggagaatgaaatcttagaaagtggcgaacgggtgagtaacgcgtgggtaacctgccctatggaaaggaatagcctcgggaaactgggagtaatgccttataagatacgtttgtcgcatggcagatgtattaaacgctccggtgccataggatggacccgcgtcccattagctagttggtgagataacagcccaccaaggcgacgatgggtagccggtctgagagggcgaacggtcacactggaactgagacacggtccagactcctacgggaggcagcagtggggaatattgcgcaatgggggcaaccctgacgcagcaataccgcgtgagtgaagaaggttttcggatcgtaaagctctgttattggggaagaaaaaagacggtacccaaggagaaagtcccggc

SEQ ID NO: 5185 - DNA, 490 bp, unidentified
  misc_feature 1..490: note = Ascusbbf_171733, encodes 16S rRNA
  source 1..490: mol_type = genomic DNA
agagtttgatcctggctcaggacgaacgctggcggcgcgcctaacacatgcaagtcgaacggaacccttactgagaaattttcggatggatcgggaaggcgtttagtggcggacgggtgagtaacacgtgagcaacctgcctttcagagggggataacagttggaaacgactgctaataccgcataatataccgagacggcatcgtcatggtatcaaaggagcaatccgctgaaagatgggctcgcggccgattagctagttggtgaggtaaaggcccaccaaggcgacgatcggtagccggactgagaggttgaacggccacattgggactgagacacggcccagactcctacgggaggcagcagtgggggatattgcacaatgggcgaaagcctgatgcagcgacgccgcgtgagggaagacggttttcggattgtaaacctctgtcttaagggaagaaaatgacggtaccttaagaggaagctccgg

SEQ ID NO: 5186 - DNA, 490 bp, unidentified
  misc_feature 1..490: note = Ascusbbf_335222, encodes 16S rRNA
  source 1..490: mol_type = genomic DNA
agagtttgatcctggctcaggatgaacgctgacagaatgcttaacacatgcaagtcgatggggaagcggtgcttgcaccgtggtaaccatggcggacgggtgagtaacgcgtaaagaacttaccttttggactgggataacagagggaaacttctgctaaaactggatggagttaatatgtagcattatgtattaatgaaaaggaatgccaagagagagctttgcgtcctattagctagttggtggggtaaaggcttaccaaggcgatgataggtagccggcctgagagggtgaacggccacaaggggactgagatacggcccttactcctacgggaggcagcagtggggaatattggacaatggagggaactctgatccagcaattctgtgtgcacgaagacggttttcggattgtaaagtgcttttattagggaagaagaaagtgacggtacctaaggaataagcgacggctaaatacgtgccagcag

SEQ ID NO: 5187 - DNA, 490 bp, unidentified
  misc_feature 1..490: note = Ascusbbf_57546, encodes 16S rRNA
  source 1..490: mol_type = genomic DNA
agagtttgatcctggctcagattgaacgctagcgggatgctttacacatgcaagtcgaacggcagcgcgagaaaagcttgcttttcttggcggcgagtggcgaacgggtgagtaatatatcggaacgtgcccagtagcgggggataactacgcgaaagcgtggctaataccgcatacgccctacgggggaaagggggggatcgcaagacctctcactattggagcggccgatatcagattagctagttggtggggtaaaggcctaccaaggccacgatctgtagctggtttgagaggacgaccagccacactgggactgagacacggcccagactcctacgggaggcagcagtggggaattttggacaatgggggcaaccctgatccagccatcccgcgtgtgcgatgaaggccttcgggttgtaaagcacttttggcagggaagaaacggcgctgaataatacttggcgcaactgacggtacctgcaga

SEQ ID NO: 5188 - DNA, 490 bp, unidentified
  misc_feature 1..490: note = Ascusbbf_25556, encodes 16S rRNA
  source 1..490: mol_type = genomic DNA
agagtttgatcatggctcaggatgaacgctggcggcgtgcttaacacatgcaagtcgagcgagaagctcataagtgattcttcggatgaacgagtgagtggaaagcggcggacgggtgagtaacgcgtaggcaacctgccccgtacaaagggatagctactggaaacggtaattaatacctcataacgcagaggcatcgcatggtgcttttgccaaagatttatcggtatgggatgggcctgcgtctgattagcttgttggtgaggtaacggctcaccaaggcgacgatcagtagccgacctgagagggtaaacggccacattggaactgagacacggtccaaactcctacgggaggcagcagtggggaatattgcacaatgggggaaaccctgatgcagcaacgccgcgtgagcgaagaaggcctttgggtcgtaaagctctgtcctgaaggaagaaggaagtgacggtacttcaggaggaagccccgg

SEQ ID NO: 5189 - DNA, 490 bp, unidentified
  misc_feature 1..490: note = Ascusbbf_23638, encodes 16S rRNA
  source 1..490: mol_type = genomic DNA
agagtttgatcctggctcaggatgaacgctggcggcgtgcctaacacatgcaagtcgagcggagatacatgtctaggagatttcggtcgaattaattgtatcttagcggcggatgggtgaggaacgcgtggagaacctgcccttcacagggggataacagctggaaacggctgttaataccgcatatgctcacaggatcgcatgatccagggaggaaagccgagacggtgaaggatggctccgcgtcggattagccagttggcggggtaacggcccaccaaagcgatgatccgtagccggcctgagagggcgaccggccacattgggactgagacacggcccaaactcctacgggaggcagcagtgggggatattgcacaatgggggaaaccctgatgcagcgacgccgcgtgaaggaggaagtgcttcggcatgtaaacttctatcagcagggaagaagatgacggtacctgactaagaagccccggct

SEQ ID NO: 5190 - DNA, 490 bp, unidentified
  misc_feature 1..490: note = Ascusbbf_12234, encodes 16S rRNA
  source 1..490: mol_type = genomic DNA
agagtttgatcatggctcaggatgaacgctggcggcgtgcctaacacatgcaagtcgaacgggactgtttagtgatgatttcggtctgaactttacagtttagtggcggacgggtgagtaacgcgtggataacctgcctttcacagggggatagcagctggaaacggctggtaataccgcatacgctctttacaccgcatggtgcagagaggaaagatttatcggtgaaagatggatccgcgtctgattagccagttggcggggtaacggcccaccaaagcgacgatcagtagccggcctgagagggcggacggccacattgggactgagacacggcccagactcctacgggaggcagcagtgggggatattgcacaatgggcgcaagcctgatgcagcgacgccgcgtgagtgaagaagtatttcggtatgtaaagctctatcagcagggaagaaaggcccttttagggagatgacggtacctgactaa

SEQ ID NO: 5191 - DNA, 490 bp, unidentified
  misc_feature 1..490: note = Ascusbbf_530002, encodes 16S rRNA
  source 1..490: mol_type = genomic DNA
agagtttgatcctggctcaggacgaacgctggcggcatgcttcatacatgcaagtcgaacgtgaagccgacttcggttggtggaacgtggcggacgggtgagtaatatgtaggaaatctgcccttgagagggggacaacagagggaaacttctgctaataccccatatgagcgtacctgaaatggtatttttgaaaactccggtgctcaaggatgagcctgcatctgattagctagttggcggtgtaatggaccaccaaggcgacgatcagtagctggtttgagaggatgatcagccacaatgggactgagacacggcccatactcctacgggaggcaggagtagggaattttgcgcaatgggcgaaagcctgacgcagcaatgccgcgtgaacgtagaagcccttcggggtgtaaagttctgtcagtggggacgaattttgacggtacccacagaggaagcaccggctagctccgtgccagcagccgcg

SEQ ID NO: 5192 - DNA, 490 bp, unidentified
  misc_feature 1..490: note = Ascusbbf_26285, encodes 16S rRNA
  source 1..490: mol_type = genomic DNA
agagtttgatcctggctcaggataaacgctggcggcgcacataagacatgcaagtcgaacggacttaatcttaatatttatattgagaagcggttagtggcggactggtgagtaacgcgtaagcaatctacctattagaggggaataacagtgagaaatcattgctaataccgcatatgccataagaaccacatggttctagtgggaaaggagcaatccgctaatagatgagcttgcgtctgattagctagttggtggggtaatggcctaccaaggcaacgatcagtagccgaactgagaggttgaacggccacattgggactgagatacggcccagactcctacgggaggcagcagtcgggaatattgcgcaatggaggaaactctgacgcagtgacgccgcgtataggaagaaggttttcggattgtaaactattgtcgttggggaagataaaagacagtacccaaggaggaagctccggctaactac

SEQ ID NO: 5193 - DNA, 490 bp, unidentified
  misc_feature 1..490: note = Ascusbbf_46791, encodes 16S rRNA
  source 1..490: mol_type = genomic DNA
agagtttgatcatggctcaggacgaacgctggcggcgtgcctaacacatgcaagtcgagcggagacattaaggagcttgctccgagatgttttagcggcggacgggtgagtaacgcgtgagcaatctgtcccgtacagggggataacacttggaaacaggtgctaataccgcatgagaccacaacgtcacatggcgaaggggtcaaaggagcaatccggtatggggtgagctcgcgtccgattagctagttggtgaggtaacggcccaccaaggcgacgatcggtagccgacctgagagggtgatcggccacattggaactgagagacggtccaaactcctacgggaggcagcagtggggaatattgggcaatgggcgaaagcctgacccagcaacgccgcgtgagggaagaaggttttcggattgtaaacctctgtccttggggacgaaggaagtgacggtacccaaggaggaagccccggctaactac

SEQ ID NO: 5194 - DNA, 490 bp, unidentified
  misc_feature 1..490: note = Ascusbbf_742985, encodes 16S rRNA
  source 1..490: mol_type = genomic DNA
agatttgatcctggctcaggacgaacgctggcggcgtgcctaacacatgcaagtcgaacggactgattcccttcggggatgaaagttagtggcggacgggtgagtaacgcgtgagtaacctgcctttcagagggggataacgtttggaaacgaacgctaataccgcataacatatatttgtcgcatggcagatatatcaaaggagcaatccgctgaaagatggactcgcgtctgattagatagttggcggggcaacggcccaccaagtcgacgatcagtagccggactgagaggttgaacggccacattgggactgagacacggcccagactcctacgggaggcagcagtgagggatattgcacaatgggcgcaagcctgatgcagcaacgccgcgtgaaggatgacggttttcggattgtaaacttctgttcttagtgatgataatgacattagctaaggagaaagccacggctaactacgtgccagca

SEQ ID NO: 5195 - DNA, 490 bp, unidentified
  misc_feature 1..490: note = Ascusbbf_6748, encodes 16S rRNA
  source 1..490: mol_type = genomic DNA
agagtttgatcctggctcagagttaacgctggcatcgtgcataacacatgcaagtcgaacgggactttgcgctgtagcaatacagtgtaaagtttagtggcagacgggtgagtaatgtatgggaaatctaccttcgagtggggaataacggcccgaaagggttgctaataccccataacatttctaggtggcatcaccaagaaatcaaagatttatcgcttgaagacgatcccatattccatcagcttgttggcagtgtaacggactaccaaggcgacgacggatagccggcctgaaagggcgaccggccacaagggcactgagacacgggccctactcctacgggaggcagcagtggggaattttggacaatgggcgaaagcctgatccagcaacgatgcgtggaggatgaaggttctcggattgtaaactccttttgtgagggacgaaaaaaatgacggtacctcacgaataagccacggctaactac

SEQ ID NO: 5196 - DNA, 490 bp, unidentified
  misc_feature 1..490: note = Ascusbbf_2171, encodes 16S rRNA
  source 1..490: mol_type = genomic DNA
agagtttgatcatggctcagaacgaacgctggcggcgcgttttaagcatgcaagtcgagcgggaacaggtagcaatacctgtgagagcggcggacgggtgagtaacacgtggataatctaccctacagttggggatagcttggtgaaagccaagataataccgaatacgatgtacacgacagaagtggagtacaggaaaggggctacggccccgctgaaggatgagtctgcgtcccattagctagatggcagggtaaaggcctaccatggcgatgatgggtagccggcctaagagggtgaacggccacattgggactgagatacggcccagactcctacgggaggcagcagctaagaatcttccacaatggacggaagtctgatggagcgacgccgcgtgaatgatgaaggccgtgaggttgtaaagttcttttctggagggagaataaggcatgtagggaatgacatgccgatgacgtgaatccaggaa

SEQ ID NO: 5197 - DNA, 471 bp, unidentified
  misc_feature 1..471: note = Ascusbbf_134236, encodes 16S rRNA
  source 1..471: mol_type = genomic DNA
agagtttgatcatggctcagagcgaacgctggcggcatgcttaacacatgcaagtcgcacgaacctttcggggttagtggcggacgggtgagtaacgcgtaggaatctgtccacgggtgggggataactctgggaaactggagctaataccgcatgatacctgagggtcaaaggcgcaagtcgcctgtggaggagcctgcgttcgattagctagttggtggggtaaaggcctaccaaggcgatgatcgatagctggtttgagaggatgatcagccacactgggactgagacacggcccagactcctacgggaggcagcagtggggaatattggacaatgggggcaaccctgatccagcaatgccgcgtgtgtgaagaaggtcttcggattgtaaagcactttcgacggggacgatgatgacggtacccgtagaagaagccccggctaacttcgtgccagcagccgcgtaat

SEQ ID NO: 5198 - DNA, 490 bp, unidentified
  misc_feature 1..490: note = Ascusbbf_5020, encodes 16S rRNA
  source 1..490: mol_type = genomic DNA
agagtttgatcctggctcagagtgaacgctggcggtaggcctaacacatgcaagtcgaacggcagcgggtagggagcttgctccctatgccggcgagtggcggacgggtgaggaatacatcggaatctactctgtcgtgggggataacgtagggaaacttacgctaataccgcatacgacctacgggtgaaagtgggggaccgcaaggcctcacgcgatagaatgagccgatgtccgattagctagttggcggggtaaaggcccaccaaggcgacgatcggtagctggtctgagaggatgatcagccacactgggactgagacacggcccagactcctacgggaggcagcagtggggaatattggacaatgggcgcaagcctgatccagccataccgcgtgagtgaagaaggccctcgggttgtaaagctcttttgttgggaaagaaatcctgttggctaatacccggcagggatgacggtacccaaaga

SEQ ID NO: 5199 - DNA, 490 bp, unidentified
  misc_feature 1..490: note = Ascusbbf_7489, encodes 16S rRNA
  source 1..490: mol_type = genomic DNA
agagtttgatcatggctcaggatgaacgctggcggcaggcttaatacatgcaagtcgaacggtaaggccgagtgcagcaatgcatgaggtacacgagtggcgcacgggtgcgtaacgcgtatgcaacctgcccccaaccgggacaaaacagctggaaacggctgctaatatcccatggtcacttaaaacggcatcgttatgagtgtaaagatttattggttggggatgggcatgcgtattattaggtagttggcggggtaacggcccaccaagccgacgatgattaggggttctgagaggaaagacccccacactggaactgagacacggtccagactcctacgggaggcagcagtagggaatattgggcaatggaggcaactctgacccagccatgccgcgtgaaggaataaggccctatgggtcgtaaacttcttttaccgcagagtaaacccggggacgcgtccccggttgagagtatgcggggaat

SEQ ID NO: 5200 - DNA, 490 bp, unidentified
  misc_feature 1..490: note = Ascusbbf_33814, encodes 16S rRNA
  source 1..490: mol_type = genomic DNA
agagtttgatcatggctcaggatgaacgctagctacaggcctaacacatgcaagtcgaggggcagcatgggagaagcttgcttttcccgatggcgaccggcgaatgggtgagtcacgcgtgtccaacctgccttcagcccggggatagcccttggaaatgaggattaagacccgatatatgcgcattccgcatggcgtgcgcatgaaactggactgaagatggggacgcgtcggattagcttgacggcggggcgacggcccaccgtggcgacgatccgcaggggttctgagaggaaggtcccccacactggcactgagacacgggccagactcctacgggaggcagcagtgaggaatattggtcaatgggcgagagcctgaaccagccaagtagcgtgcaggatgacggccctacgggttgtaaactgcttttgcgggaggataaaggacactacgtgtagtgttttgcaggtatcccgtgaataaggac

SEQ ID NO: 5201 - DNA, 490 bp, unidentified
  misc_feature 1..490: note = Ascusbbf_30594, encodes 16S rRNA
  source 1..490: mol_type = genomic DNA
agagtttgatcatggctcagaacgaacgctggcggcgcgtcttaagcatgcaagtcgaacggcaaggcgggtgcttgcacctgccctagagtggcggactggtgagtaacacgtggatgacataccctccggacggggatagccggtagaaataccgggtaataccggatacggtcgtgcgggttagagccgcacgaggaaaggagctacggctccgccggaggaatggtccgcggcctattagttagttggtggggtaaaggcctaccaaggcgatgacgggtatccggcctgagagggtgaacggacacattgggactgagatacggcccagactcctacgggaggcagcagctaagaatattccgcaatggacgaaagtctgacggagcgacgccgcgtgaatgaagaaggccggaaggttgtaaagttcttttggacgtgaggaataagtgcctcagggaatgggggcgcggtgactgtagcgtct

SEQ ID NO: 5202 - DNA, 490 bp, unidentified
  misc_feature 1..490: note = Ascusbbf_361780, encodes 16S rRNA
  source 1..490: mol_type = genomic DNA
agagtttgatcatggctcaggatgaacgctggcggcgtgcctaatacatgcaagtcggacggcagcagcaatgctgtagtggcgaacgggtgagtaacacgttggtgacctgccccaaagatgggaatatcacctggaaacgggtggcaaaaccgaataagctcggcttagttagagaaggtcgagtaaaagagtgatctactttgggaggggcctgcggcccatcagttagttggtgagggtaatggcccaccaagacgaagacgggtaggggacctgagagggtggtcccccacaatggaactgaaacacggtccatacacctgcgggtggcagcagtagggaatattgctaaatgggcgaaagcctgaagcagcaacgccgcgtggacgaaggaggccttcgggtcgtaaagtcctttttataggggaaaaggaaggatggtaccctatgaataaatctcggctaactacgtgccagcagccgcggt

SEQ ID NO: 5203 - DNA, 490 bp, unidentified
  misc_feature 1..490: note = Ascusbbf_7465, encodes 16S rRNA
  source 1..490: mol_type = genomic DNA
agagtttgatcatggctcaggatgaacgctagcggcaggcttaacacatgcaagtcgaggggcagcgcgttgtagcaatacaatggcggcgaccggcgcaagggtgcgtaacgcgtgagcaatctgcccgtatcagggggataagcgatggaaacgtcgtctaataccgcataacacattgaacggcatcgtttgatgttgaaagcttcggtggatacggatgagctcgcgagacattagttagttggcggggtaacggcccaccaagaccgcgatgtctaggggaactgagaggttggtcccccacactggaactgagacacggtccagactcctacgggaggcagcagtgaggaatattggacaatggccggaaggctgatccagccatgccgcgtgaaggataaggtcctatggattgtaaacttcttttgagagggagcaataaggatgtcgtgacatccgatgagagtacctttcgaataagcat

SEQ ID NO: 5204 - DNA, 490 bp, unidentified
  misc_feature 1..490: note = Ascusbbf_16448, encodes 16S rRNA
  source 1..490: mol_type = genomic DNA
agagtttgatcatggctcagaacgaacgctggtggcgtgtcttatacatgcaagtcgagcgaggcagcaatgccgagcggcgaacgggtgagtaacgcgtaagcaatctgccccgtatcaggaaatacccgtgccaacgcgcggttaatgtccaggagagtgggagcctgcatgggctcttgactagagatttatcggtacgggatgagcttgcgtccgattagctagttggcggggcaacggcccaccaaggcgacgatcggtagccggcctgagagggtgatcggccacattgggactgagatacggcccagactcctacgggaggcagcagtagggaatattgcacaatgggggaaaccctgatgcagcaacgccacgtgtgggaagaagcatttcggtgtgtaaaccactgtcatgagggaataaggcctattttcggataggattgaatgtaccttgagaggaagcaccggcaaacttcgtgcca

SEQ ID NO: 5205 - DNA, 490 bp, unidentified
  misc_feature 1..490: note = Ascusbbf_24078, encodes 16S rRNA
  source 1..490: mol_type = genomic DNA
agagtttgatcatggctcaggatgaacgctggcggcgtgcctaacacatgcaagtcgaacggagtatatgcgctgatgatcgaagtgcttgcatagagagaatcttgcatatacttagtggcggacgggtgagtaacgtgtggataacctggtccatccagggggatagcagctggaaacggctggtaataccgcataagcgcacagcagggcatcctgcggtgtgaaaagatttatcgggatggaatggatccgcatctgattagccagtcggcggggtaacggcccaccgaagcgacgatcagtagccggcctgagagggcggacggccacattgggactgagacacggcccagactcctacgggaggcagcagtgggggatattgcacaatggggggaaccctgatgcagcgacgccgcgtgggtgaagaagtatttcggtatgtaaagccctatcagcagggaagataatgacggtacctgagtaa

SEQ ID NO: 5206 - DNA, 489 bp, unidentified
  misc_feature 1..489: note = Ascusbbf_29541, encodes 16S rRNA
  source 1..489: mol_type = genomic DNA
agagtttgatcatggctcagaacgaacgctggcggcatggattaggcatgcaagtcgaacgaagcagcaatgcttagtggcgaaagggtgaggaacgcgtgagtaatctgcccccaagttgggaataacagctggaaacggctgctaataccgaatgtggctgattgaccgcatggttgattggctaaagatttatcgcttggggatgagctcgcgtcccattagttagttggtgaggtaacggcccaccaagacgatgatgggtagctggtctgagaggatggtcagccacactgggactgagacactgcccagactcctacgggaggctgcagtcgagaatcttgggcaatgcgcgaaagcgtgacccagcaatgccgcgtgtatgatgaaggtcttcggatcgtaaaatactgtctcccgtgacgaagtaatgacggtagcggggaaggaagccacggctaactacgtgccagcagccgcggtaat

SEQ ID NO: 5207 - DNA, 490 bp, unidentified
  misc_feature 1..490: note = Ascusbbf_98493, encodes 16S rRNA
  source 1..490: mol_type = genomic DNA
agagtttgatcatggctcaggatgaacgctggcggcgtgcctaacacatgcaagtcgagcggagtcatatgttgattcttcggatgatttatatgacttagcggcggatgggtgagtaacacgtgggtaatctgccctgcactgggggataacagttggaaacgactgttaataccgcatatgcacacggggccgcatggccctgggtggaaagattcatcggtgcaggatgagcccgcgtcggattaactagttggcagggtaacggcctaccaaggtgatgatccgtagccggcctgagagggcgaccggccacattgggactgagacacggcccaaactcctacgggaggcagcagtggggaatattgcacaatgggcgcaagcctgatgcagcgacgccgcgtgaaggaagaagtatttcggtatgtaaacttctatcagcggggaagaagatgacggtacccgactaagaagccccggctaacta

SEQ ID NO: 5208 - DNA, 490 bp, unidentified
  misc_feature 1..490: note = Ascusbbf_46946, encodes 16S rRNA
  source 1..490: mol_type = genomic DNA
agagtttgatcctggctcaggacgaacgctggcggcgtgcctaacacatgcaagtcgaacgaagcttgagaacagaattcttcggaaggacgtttgatatgactgagtggcggacgggtgagtaacgcgtgagcaacctgcccttcggagggggatagtgtctggaaacggacagtaataccgcataatgttggatgatggcatcttcattcaaccaaagatttatcgccgaaggatgggctcgcgtctgattagatagttggtggggtaacggcctaccaagtcgacgatcagtagccggactgagaggttgaacggccacattgggactgagacacggcccagactcctacgggaggcagcagtggggaatattgcacaatgggcgcaagcctgatgcagcaacgccgcgtggaggaagacggttttcggattgtaaactcctgttcttagggaagaagacagtgacggtacctaaggagcaagccac

SEQ ID NO: 5209 - DNA, 468 bp, unidentified
  misc_feature 1..468: note = Ascusbbf_424219, encodes 16S rRNA
  source 1..468: mol_type = genomic DNA
agagtttgatcctggctcagaacgaacgctggcggcaggcttaacacatgcaagtcgagcgccccgcaaggggagcggcagacgggtgagtaacgcgtgggaatctacccatctctacggaacaactctgggaaactggagctaataccgtatacgtccgagaggagaaagatttatcggggatggatgagcccgcgttggattagctagttggtggggtaatggcctaccgaggcgacgatccatagctggtctgagaggatgatcagccacactgggactgagacacggcccagactcctacgggaggcagcagtggggaatattggacaatgggcgcaagcctgatccagccatgccgcgtgagtgatgaaggccctagggttgtaaagctctttcaacggtgaagataatgacggtaaccgtagaagaagccccggctaacttcgtgccagcagccgcggtaat

SEQ ID NO: 5210 - DNA, 490 bp, unidentified
  misc_feature 1..490: note = Ascusbbf_122193, encodes 16S rRNA
  source 1..490: mol_type = genomic DNA
agagtttgatcatggctcaggatgaacgctggcggcgtgcttaacacatgcaagtcgaacggagatacgtaaaagaagttttcggatggaatttacatatcttagtggcggacgggtgagtaacacgtaaacaatctgcctttgagagcgggacaacagatagaaatatctgctaataccgcataagaccacaggttcgcatgaactaggggtaaaaggggagcaatctcgctcaaagatgagtttgcggactattagctagttggtgaggtaacggcccaccaaggcaaagatggttagccgacctgagagggtgatcggccacactggaactgagaaacggtccagactcctacgggaggcagcagtgaggaatattgggcaatggaggaaactctgacccagcaacgccgcgtgaaggaagaaggttttcggattgtaaacttctgttatgggggaaaaaggaagtgatggtaccccatgagcaagc

SEQ ID NO: 5211 - DNA, 490 bp, unidentified
  misc_feature 1..490: note = Ascusbbf_1488889, encodes 16S rRNA
  source 1..490: mol_type = genomic DNA
agagtttgatcatggctcaggatgaacgctggcggcgtgcttaacacatgcaagtcgaacggagttaacgcgctgaggagagcttgctcaaatcatgcgttaacttagtggcggacgggtgagtaacgcgtggataacctgccttataccgggggataacacttagaaataggtgctaataccgcataagcgcacgctttcgcatgaaagagtgtgaaaaactccggtggtataagatggatccgcgtctgattagatagttggtgaggtaacggcccaccaagtcaacgatcagtagccggcctgagagggtgaacggccacattgggactgagacacggcccaaactcctacgggaggcagcagtggggaatattgcacaatggaggaaaccctgatgcagcgacgccgcgtgagtgaagaaatatttcggtatgtaaagctctatcagcaaggaagaaacaaatgacggtacttgactaagaagccc

SEQ ID NO: 5212 - DNA, 490 bp, unidentified
  misc_feature 1..490: note = Ascusbbf_284679, encodes 16S rRNA
  source 1..490: mol_type = genomic DNA
agagtttgatcctggctcaggatgaacgctagctacaggcctaacacatgcaagtcgaggggcagcatgaagaaagcttgctttctttgatggcgaccggcgaatgggtgagtcacgcgtgtccaacctgcccctgtcccggggatagcccttggaaatgaggattaagacccgatatgtgcctttgccgcatggcgttggcatgaaaccaggacagggatggggacgcgtcggattagctagacggcggggcaacggcccaccgtggcgacgatccgcaggggttctgagaggaaggtcccccacactggcactgagacacgggccagactcctacgggaggcagcagtgaggaatattggtcaatgggcgagagcctgaaccagccaagtagcgtgcaggatgacggccctacgggttgtaaactgcttttgcgggaggataaccggcactacgtgtagtgccctgcaggtatcccgtgaataaggac

SEQ ID NO: 5213 - DNA, 490 bp, unidentified
  misc_feature 1..490: note = Ascusbbf_195842, encodes 16S rRNA
  source 1..490: mol_type = genomic DNA
agagtttgatcctggctcaggacgaacgctggcggcgtgcctaacacatgcaagtcgaacggaaatatatgacggaagttttcggatggaagatatatattttagtggcggacgggtgagtaacgcgtgagtaacctgcctttatgagggggataacgttctgaaaaggacgctaataccgcataaagtatatttgccgcatggtagatataccaaaggagcaatccgcatagagatggactcgcgtccgattagccggttggcggggtaacggcccaccaaagcaacgatcggtagccggactgagaggttgaacggccacattgggactgagacacggcccagactcctacgggaggcagcagtgggggatattgcgcaatgggggaaaccctgacgcagcaacgccgcgtgaaggaagacggttttcggattgtaaacttcttttattaaggacgaagaatgacggtacttaatgaataagctccgg

SEQ ID NO: 5214 - DNA, 490 bp, unidentified
  misc_feature 1..490: note = Ascusbbf_98713, encodes 16S rRNA
  source 1..490: mol_type = genomic DNA
agagtttgatcctggctcaggacgaacgctggcggcgtgcttaacacatgcaagtcgaacgaagttccgttgaatgagatttcggtcaaaggagacggacacttagtggcggacgggtgagtaacgcgtgagtaacctgcctttcagaggggaataacatttggaaacgaatggtaataccgcataacatcaaggagccgcatggcactttgatcaaaggagcaatccgctgagagatggactcgcgtccgattagctagttggcgggatagaggcccaccaaggcgacgatcggtagccggactgagaggttgaacggccacattgggactgagacacggcccagactcctacgggaggcagcagtggggaatattgcacaatgggggaaaccctgatgcagcaacgccgcgtgaaggaagacggtcttcggattgtaaacttttgttcttagcgaagaaagaaatgacggtagctaaggagaaagcca

SEQ ID NO: 5215 - DNA, 490 bp, unidentified
  misc_feature 1..490: note = Ascusbbf_143680, encodes 16S rRNA
  source 1..490: mol_type = genomic DNA
agagtttgatcatggctcaggatgaacgctagctacaggcttaacacatgcaagtcgaggggcagcaggtatctagcttgctaggtacgctggcgaccggcgcacgggtgcgtaacgcgtatccaatctacccgtcacccggggatagcctttcgaaagaaagattaacacccgatggtttccctgggccgcatggtccggggagtaaaggttcaccggtggcggatggggatgcgtccgattagctggttggcggggcaacggcccaccaaggcgacgatcggtaggggttctgagaggaaggtcccccacactggaactgagacacggtccagactcctacgggaggcagcagtgaggaatattggtcaatggtcggaagactgaaccagccaagtagcgtgagggacggcggccctacgggttgtaaacctcttttgttcgggaataacaggcgccacgcgtggcgccctgcatgtaccgttcgaag

SEQ ID NO: 5216 - DNA, 490 bp, unidentified
  misc_feature 1..490: note = Ascusbbf_211323, encodes 16S rRNA
  source 1..490: mol_type = genomic DNA
agagtttgatcctggctcaggatgaacgctggcggcgtgcttaacacatgcaagtcgaacggaacttttacggaaggagacttcggtcaacggaaatttaagtttagtggcggacgggtgagtaacgcgtgagtaacctgcctttcagagggggataacgtttggaaacgaacgctaataccgcataaaacagcagtatcgcatggtacaactgtcaaagattttatcgctgaaagatggactcgcgtccgattaggcagttggcggggtaacggcccaccaaaccgacgatcggtagccggactgagaggttgaacggccacattgggactgagacacggcccagactcctacgggaggcagcagtggggaatattgcacaatgggcgcaagcctgatgcagcaacgccgcgtgagggaagacggttttcggattgtaaacctctgttcttagtgacgaagaagtgacggtagctaaggagcaagccac

SEQ ID NO: 5217 - DNA, 490 bp, unidentified
  misc_feature 1..490: note = Ascusbbf_112792, encodes 16S rRNA
  source 1..490: mol_type = genomic DNA
agagtttgatcatggctcaggattaacgctggcggcatgcctaatacatgcaagtcgaacgagcagcaatgctagtggcgaacgggtgagtaacacgtagggaacctgccctttagacgaggataactactggaaacggtagctaaaactggatagtatacattaaggcatcttgatgtatttaaaggtcctgcaagggaacactaaaggatggtcctgcggaacattagctagttggtgaggtaacggcccaccaaggcgacgatgtttagctgtactgagaggtaaaacagccacactgggactgagacacggcccagactcctacgggaggcagcagtagggaattttcggcaatgggggaaaccctgaccgagcaatgccgcgtgaatgatgaaattcttcggaatgtaaagttctgttgttagggacgaaaggtatacgtaggaaatggcgtataattgacggtacctaactagaaagccccggc

SEQ ID NO: 5218 - DNA, 490 bp, unidentified
  misc_feature 1..490: note = Ascusbbf_120210, encodes 16S rRNA
  source 1..490: mol_type = genomic DNA
agagtttgatcctggctcaggacgaacgctggcggcgtgcctaacacatgcaagtcgaacgggattccatcgaatgaggcttcggcggattttggtggacatctagtggcggacgggtgagtaacgcgtgagcaacctgcctttaagagggggataacataccgaaaggtatgctaataccgcataagatattagtaccgcatgatacagatatcaaagatttcatcgcttaaagatgggctcgcgtccgattagatagttggcggggtaacggcccaccaagtcgacgatcggtagccggactgagaggttgaacggccacattgggactgagacacggcccagactcctacgggaggcagcagtgggggatattgcgcaatggggggaaccctgacgcagcaacgccgcgtgaaggaagaaggtcttcggattgtaaacttctgtcttatgggacgaagaagtgacggtaccataggaggaagccacg

SEQ ID NO: 5219 - DNA, 490 bp, unidentified
  misc_feature 1..490: note = Ascusbbf_195188, encodes 16S rRNA
  source 1..490: mol_type = genomic DNA
agagtttgatcatggctcaggacgaacgctggcggcgtgcctaacacatgcaagtcgaacgggatcctcatgaaggagttttcggacaacggaatggggcatctagtggcggacgggtgagtaacgcgtgagcaacctgcccttcggagggggacaacagttggaaacgactgctaataccgcatgacatatacggatggcatcatctgtatatcaaagatttatcgccgagggatgggctcgcgtctgattagctagttggtgaggtaacggctcaccaaggctgcgatcagtagccggactgagaggttgaacggccacattgggactgagatacggcccagactcctacgggaggcagcagtggggaatattgggcaatgggggcaaccctgacccagcaacgccgcgtgaaggaagaaggctttcgggttgtaaacttctttgacgagggacgaagaaagtgacggtacctcgaaaacaagccacg

SEQ ID NO: 5220 - DNA, 490 bp, unidentified
  misc_feature 1..490: note = Ascusbbf_290604, encodes 16S rRNA
  source 1..490: mol_type = genomic DNA
agagtttgatcctggctcaggacgaacgctggcggcgtgcttaacacatgcaagtcgaacggacgatcacccttcggggtgtgagttagtggcggacgggtgagtaacgcgtgagtaatctgccttggagtggggaataacacagggaaacttgtgctaataccgcataacgtcatcgggtggcatcatctggtgaccaaagatttattgctccaagatgagctcgcgtccgattagatagttggcggggtaatggcccaccaagtcgacgatcggtagccggactgagaggttggccggccacattgggactgagacacggcccagactcctacgggaggcagcagtgggaatattaggcaatgggggaaaccctgacctagcgacgccgcgtgaaggatgaaggttttcggattgtaaacttctttggcaggggacgataatgacggtaccctgagaacaagccacggctaactacgtgccagcagcc

SEQ ID NO: 5221 - DNA, 490 bp, unidentified
  misc_feature 1..490: note = Ascusbbf_807408, encodes 16S rRNA
  source 1..490: mol_type = genomic DNA
agagtttgatcatggctcaggatgaacgctagctacaggcttaacacatgcaagtcgtggggcagcgctgggaatgcttgcattccctggcggcgaccggcggatgggtgagtaacgcgtatccagcctgccccgcgcccggggacagcccttagaaatgaggattaacccccgataggtgtccctgccgcatggccgggccacgaaacagacgcgggatggggatgcgttccattaggcagcaggcggggtaacggcccacctggcccgcgatggataggggttctgagaggaaggtcccccacactggaactgagacacggtccagactcctacgggaggcagcagtgaggaatattggtcaatgggcggaagcctgaaccagccaagtagcgtgcgggatgaaggccctacgggttgtaaaccgcttttgcgcggggataaagagggggacttgtcccccgttgcaggtaccgcgcgaataaggacc

SEQ ID NO: 5222 - DNA, 490 bp, unidentified
  misc_feature 1..490: note = Ascusbbf_105531, encodes 16S rRNA
  source 1..490: mol_type = genomic DNA
agagtttgatcatggctcaggatgaacgctggcggcgtgcttaacacatgcaagtcgaacggaggtatttcgctgacgaggcttcggccaaatcttgagataccttagtggcggacgggtgagtaacgcgtgggaaacctgccctatgcagggggataacagttagaaatgactgctaataccgcataagcccacggcatcgcatgatgctgcgggaaaagatttatcggcataggatggtcccgcgtcagattagccagttggcggggtaacggcccaccaaagcgacgatctgtagccgacctgagagggtgaccggccacattgggactgagacacggcccaaactcctacgggaggcagcagtggggaatattgcacaatgggggaaaccctgatgcagcgacgccgcgtgagtgaagaagtatttcggtatgtaaagctctatcagcagggaagaagatgacagtacctgagtaagaagccccgg

SEQ ID NO: 5223 - DNA, 490 bp, unidentified
  misc_feature 1..490: note = Ascusbbf_737528, encodes 16S rRNA
  source 1..490: mol_type = genomic DNA
agagtttgatcatggctcagaacgaacgctggcggcgtgccttatacatgcaagtcgagcgagggcgcagcaatgcgaaccgagcggcgaacgggtgagtaacgcgtgaacaacctgccccaaagtccgggatagcccttccaacggaggattaataccggatggcgagggttcccgcatgggagcctatccaaagtcttggcgctatgggaggggttcgcgtccgattagctagttggcggggcaacggcccaccaaggcgacgatcggtagccggcctgagagggcgaacggccacaatgggactgagatacggcccatactcctacgggaggcagcagtagggaatattgcgcaatggacggaagtctgacgcagcaacgccacgtgtgggacgaagcctttcggggtgtaaaccactgtcagcggggactagtaagcggggcaacccgtcgcgaatgtacccgcagaggaagcaccggcaaacttc

SEQ ID NO: 5224 - DNA, 490 bp, unidentified
  misc_feature 1..490: note = Ascusbbf_1801815, encodes 16S rRNA
  source 1..490: mol_type = genomic DNA
agagtttgatcctggctcagaacgaacgctggtagcgtggattaggcatgcaagtcgaacgggatcagccggttagcaataattggctgtgagagtggcggattggggaggaacacgtgagcaacctgtccttgggttggggaaaaccgcgggaaactgcggctaataccggatgcggcgcctggagacatctccggagcgctaaagggggccgcaaggctctcgcccatcgaggggctcgcgcaccatcagcttgttggcggggtaacggcccaccaaggcttacggttagctggtctgagaggatggccagccccactgggactgagatactgcccagactcctacgggaggctgcagtcgaggatcatttgcaatgggcgaaagcctgacaatgcgacgctgcgtggaggatgaaggccttcgggttgtaaactcctgtcatgggggaacaggcgaggggagctaatacctcccttagttgagtgta

SEQ ID NO: 5225 - DNA, 490 bp, unidentified
  misc_feature 1..490: note = Ascusbbf_407371, encodes 16S rRNA
  source 1..490: mol_type = genomic DNA
agagtttgatcatggctcaggatgaacgctagcggcaggcttaacacatgcaagtcgaggggcagcgcgtggtagcaataccatggcggcgaccggcgcacgggtgcgtaacgcgtatgcaacctgcctgtaacagggggataacccggagaaatttggactaataccccatattgccgcgtggcagcattgttgtgcggcgaaaggagcgatccggttacagatgggcatgcgtgacattaggtagttggcggggcaacggcccaccaagccgacgatgtctaggggaactgagaggttagtcccccacactggtactgagacacggaccagactcctacgggaggcagcagtgaggaatattggtcaatggtcggaagactgaaccagccatgccgcgtgagggaggaaggccctagttggttgtaaacctcttttacgggggagcaataaggcggacgcgtccgtcgatgagagtaccccgggaata

SEQ ID NO: 5226 - DNA, 490 bp, unidentified
  misc_feature 1..490: note = Ascusbbf_736020, encodes 16S rRNA
  source 1..490: mol_type = genomic DNA
agagtttgatcatggctcaggacgaacgctggcggcgtgcctaacacatgcaagtcgagcggggacataaggaactgcggctacggccaaagggagatatgttcgagcggcggacgggtgagtaacgcgtgaacgatctgtcttccacagggggataacacgtggaaacatgtgctaataccgcataagaccacagcgctgcatggcgcaggggtcaaaggagcgatccggtgggaggtgagttcgcgtctgattagatagttggtgaggtaacggcccaccaagtcaacgatcagtagccgacctgagagggtgatcggccacattggaactgagacacggtccaaactcctacgggaggcagcagtgggaatattgggcaatgggcgaaagcctgacccagcaacgccgcgtgagggaagaaggttttcggattgtaaacctctgtccttggtgacgaaggaagtgacggtagccaaggaggaagccc

SEQ ID NO: 5227 - DNA, 490 bp, unidentified
  misc_feature 1..490: note = Ascusbbf_724736, encodes 16S rRNA
  source 1..490: mol_type = genomic DNA
agagtttgatcatggctcaggatgaacgctggcggcgtgcctaacacatgcaagtcgaacgaagcatagagattagatttcttcggattgaagatttttatgacttagtggcgaacgggtgagtaacgcgtgggtaacctgcctcatgcagggggataacaattagaaatgattgctaataccgcataagaccgcagaaccgcatggttgagcggccaaagatttatcggcatgagatggacccgcgtctgattagttagttggtggggtaacggcctaccaagacgatgatcagtagccgacctgagagggtgaccggccacattgggactgagacacggcccaaactcctacgggaggcagcagtggggaatattgcacaatgggggaaaccctgatgcagcgacgccgcgtgagtgaagaagtatttcggtatgtaaagctctttaagcagggaagatgatgacggtacctgcagaataagcaccgg

SEQ ID NO: 5228 - DNA, 490 bp, unidentified
  misc_feature 1..490: note = Ascusbbf_1875300, encodes 16S rRNA
  source 1..490: mol_type = genomic DNA
agagtttgatcctggctcaggatgaacgctggcggcatgcctaagacatgcaagtcgtacgaggtgaccttttgaagcagagtgcttgcacaaagtagataaagattttcacctagtggcgcaagggtgagtaacacgtgggttatctgccttgaagactggaataacaattggaaacgattgctaatgccggatgatatgtaagaggatacgtcttcttatagtaaaaggagcctttaaagcttcacttcaagatgagcctgcggcgcattagctagttggtggggtaatggcctaccaaggcaacgatgcgtagccgaactgagaggttgatcggccacattgggactgagacacggcccaaactcctacgggagacagcagttaggaatattcgtcaatgggggaaaccctgaacgagcaatgccgcgtgaatgatgacggtcctctggattgtaaaattctgttgttgaggaagaacgtctagtgt

SEQ ID NO: 5229 - DNA, 490 bp, unidentified
  misc_feature 1..490: note = Ascusbbf_1217559, encodes 16S rRNA
  source 1..490: mol_type = genomic DNA
agagtttgatcctggctcaggatgaacgctggcggcgtgcctaatacatgcaagtcgaacgaggttggtagcaatatcaaccgagtggcgaacgggtgagtaacacgtagggaacctgccctttagtttgggatacccagaggaaactttggctaataccggataactaatctggaggcatctccggattctaaaaggggcctttaaagcctcgcttaaggatggacctgcggcgcattagctagttggtgagataacagcccaccaaggcgaggatgcgtagccgacctgagagggtgaacggccacactggaactgagacacggtccagactcctacgggaggcagcagtagggagttttcggcaatgggggaaaccctgaccgagcaacgccgcgtgagtgatgaaggtcttcggattgtaaagctctgttataggggaagaatgatagattgaggaaatgctatctatttgacggtaccttatgag

SEQ ID NO: 5230 - DNA, 490 bp, unidentified
  misc_feature 1..490: note = Ascusbbf_1810698, encodes 16S rRNA
  source 1..490: mol_type = genomic DNA
agagtttgatcctggctcaggatgaacgctggcggcgtgcttaacacatgcaagtcgaacggagtatatcaatcgaaaccttcgggtttcacctgttatacttagtggcggacgggtgagtaacgcgtgagcaaccaaccttgtgcagagggataacaattagaaatgattgctaatacctcataagaccacagcatcgcatggtgcagtgggaaaacttccgggggcacaagacgggctcgcgttcgattagctggatgatgaggtaacggcccaccatggcgacgatcgatagccggactgagaggtcgaccggccacattgggactgagacacggcccagactcctacgggaggcagcagtggggaatattgcacaatgggggaaaccctgatgcagcgacgccgcgtgagtgatgaagtatttcggtatgtaaagctcttttagcagggaagaagatgacggtacctgcagaaacagccccggcta

SEQ ID NO: 5231 - DNA, 490 bp, unidentified
  misc_feature 1..490: note = Ascusbbf_238248, encodes 16S rRNA
  source 1..490: mol_type = genomic DNA
agagtttgatcatggctcaggacgaacgctggcggcatgcctaacacatgcaagtcgaacgagggtagcaatactcgagtggcgaacgggtgagtaacgcgtgaggaatctgccttacacaacgggatacctactggaaacagtagttaatacggtataagaccacagtaccgcatggtacagtggtaaaagatttatcggtgtaagatgacctcgcgtcgcattagctagttggtggggtaacggctcaccaaggcgacgatgcgtagccgacctgagagggtgatcggccacattgggactgagatacggcccagactcctacgggaggcagcagtggggaatattgggcaatggaggaaactcttacccagcaatgccgcgtgaatgaagaaggtcgtaagattgtaaagttctttagtcagggattaataaatgaaagatctgaagaataagctccggctaactacgtgccagcagccgcggtaat

SEQ ID NO: 5232 - DNA, 472 bp, unidentified
  misc_feature 1..472: note = Ascusbbf_1584800, encodes 16S rRNA
  source 1..472: mol_type = genomic DNA
agagtttgatcatggctcagagcgaacgctggcggcaggcttaacacatgcaagtcgaacgctcgtagcaatacgagagtggcagacgggtgagtaacacgtgggaacgtacctttcggttcggaataacccggggaaactcgggctaataccggatacgtccgcaaggagaaagatttatcgccgaaagatcggcccgcgtcggattagctagttggtgaggtaatggctcaccaaggcaatgatccgtagctggtctgagaggacgatcagccacactgggactgagacacggcccagactcctacgggaggcagcagtggggaatattggacaatgggcgcaagcctgatccagccatgccgcgtgagtgatgaaggccttagggttgtaaagctcttttaccagggaagataatgacggtacctggagaataagccccggctaacttcgtgccagcagccgcggtaat

SEQ ID NO: 5233 - DNA, 490 bp, unidentified
  misc_feature 1..490: note = Ascusbbf_4532, encodes 16S rRNA
  source 1..490: mol_type = genomic DNA
agagtttgatcctggctcaggatgaacgctagcgataggcctaacacatgcaagtcgaggggcagcacatgacgtagcaatacagatggtggcgaccggcgcacgggtgagtaacacgtatgcaacctaccttcaacaggagaataacccgtcgaaagacggactaatactccataacacagggatcccacatgggaatatttgttaaagatttatcggttgaagatgggcatgcgctccattagctagttggtgaggtaacggctcaccaaggcaacgatggataggggaactgagaggtttatcccccacactggtactgagacacggaccagactcctacgggaggcagcagtgaggaatattggtcaatggaggcaactctgaaccagccacgtcgcgtgaaggatgacggccctacgggttgtaaacttcttttgtaagggaataaagttagttacgtgtaactatttgcatgtaccttacgaat

SEQ ID NO: 5234 - DNA, 490 bp, unidentified
  misc_feature 1..490: note = Ascusbbf_4162, encodes 16S rRNA
  source 1..490: mol_type = genomic DNA
agagtttgatcctggctcaggataaacgctggcggcgcacataagacatgcaagtcgaacgaacttaattcatttgtttacagatggaagcggttagtggcggactggtgagtaacatgtaagcaatctacctgtcagaggggaataacaatgagaaatcattgctaataccgcatacattatgaatatcgcatgataagcataagaaaggagcaatccgctgacagatgagcttgcacctgattagttagttggtggggtaacggcctaccaagacgacgatcagtagccgagctgagaggctctacggccacattgggactgagatacggcccagactcctacgggaggcagcagtcgggaattttgcgcaatggaggaaactctgacgcagtgacgccgcgtataggaagaaggttttcggattgtaaactattttagacagggaagaagaaagtgacagtacctgtagaataagctccggctaact

SEQ ID NO: 5235 - DNA, 490 bp, unidentified
  misc_feature 1..490: note = Ascusbbf_9929, encodes 16S rRNA
  source 1..490: mol_type = genomic DNA
agagtttgatcatggctcaggacgaacgctggcggcgtgcctaacacatgcaagtcgaacggagtttgaggaatgaaggtttcgattggattttcttaaacttagtggcggacgggtgagtaacgcgtgagtaacctgcccataagagggggataacgttttgaaaagaacgctaataccgcataacatatcgaagccgcatggcattgatatcaaaggagcaatccgcttatggatggactcgcgtccgattagcttgttggcggggtaacagcccaccaaggcaacgatcggtagccggactgagaggttgaacggccacattgggactgagacacggcccagactcctacgggaggcagcagtgggggatattgcgcaatgggggaaaccctgacgcagcaacgccgcgtggaggatcgaaggtcttcggattgtaaactccttttgttaaggacgaaaagaatgacggtacttaacgaataagctc

SEQ ID NO: 5236 - DNA, 484 bp, unidentified
  misc_feature 1..484: note = Ascusbbf_9977, encodes 16S rRNA
  source 1..484: mol_type = genomic DNA
agagtttgatcatggctcagaacgaacgctggcggcacgcttaacacatgcaagtcgaacggaattatggggcttgctccataatttagtggcgcacgggtgagtaacacgtgggtacctgcctattgatggtggacaactccgggaaactggggctaatacagcataagctcgaaagaggaaagaatttattcgtcgatagaggggcctgcgtctgattaggtagttggtggggtaatagcttaccaagccgatgatcagtagctggtctgagaggatgatcagccacactggaactgagacacggtccagactcctacgggaggcagcagtggggaatattggacaatgggggaaaccctgatccagcgatgccgcgtgagtgatgaaggccctagggttgtaaagctcttttgacagggacgatgatgacggtacctgtagaataagcaccggctaactctgtgccagcagccgcggtaat

SEQ ID NO: 5237 - DNA, 470 bp, unidentified
  misc_feature 1..470: note = Ascusbbf_298715, encodes 16S rRNA
  source 1..470: mol_type = genomic DNA
agagtttgatcatggctcagaacgaacgctggcggcaggcctaacacatgcaagtcgaacgccctagcagtagggagtggcagacgggtgagtaacgcgtgggaaccttccctatagtacggaatataccagggaaacttggagcaataccgtatacgcccgaaaggggaaagatttatcgctataggatgggcccgcgtaggattagctagttggtgaggtaatggctcaccaaggcgacgatccttagctggtctgagaggatgatcagccacactgggactgagacacggcccagactcctacgggaggcagcagtggggaatattgggcaatgggcgaaagcctgacccagccatgccgcgtgagtgacgaaggccttagggttgtaaagctcttttggcggggacgataatgacggtacccgcagaataagccccggctaacttcgtgccagcagccgcggtaat

SEQ ID NO: 5238 - DNA, 490 bp, unidentified
  misc_feature 1..490: note = Ascusbbf_229858, encodes 16S rRNA
  source 1..490: mol_type = genomic DNA
agagtttgatcatggctcaggatgaacgctggcggcgtgcctaacacatgcaagtcgagcggagtaagacaccggatgaagattcgtctgaatccaccgtcttacttagcggcggatgggtgagtaacgcgtggacaacctgcccttcactgggggataacaaccggaaacgggtgctaataccgcatgggcgcgaacgaccgcatgatcgatcgcgtaaagatttatcggtgaaggatgggtccgcgtcggattaactagttggcggggtaacggcccaccaaggtgatgatccgtagccggcctgagagggcgaccggccacattgggactgagacacggcccaaactcctacgggaggcagcagtgggggatattgcacaatgggcggaagcctgatgcagcgacgccgcgtgagcgaagaagtgcctcggcatgtaaagctctatcggtggggaagaagatgacggtacccacagaagaagccccg

SEQ ID NO: 5239 - DNA, 490 bp, unidentified
  misc_feature 1..490: note = Ascusbbf_69030, encodes 16S rRNA
  source 1..490: mol_type = genomic DNA
agagtttgatcatggctcaggacgaacgctggcggcatgcctaacacatgcaagtcgaacgaggatagcaatatccgagtggcgaacgggtgagtaacacgtgagtaacctgcctcatacaacgggatacctacaggaaactgtagttaatacggtataagaccacagaaacacatgtttcagtggtaaaagattttatcggtatgagatggactcgcggcgcattagctagttggtgaggtaacggctctaccaaggcgacgatgcgtagccgacctgagagggtgatcggccacattgggactgagatacggcccagactcctacgggaggcagcagtggggaatattgggcaatggaggaaactcttacccagcaatgccgcgtgaatgaagaaggtcgtaagattgtaaagttctttagtcagggacgaaaaaaatgacggtacctgaagaataagctccggctaactacgtgccagcagccgcgg

SEQ ID NO: 5240 - DNA, 490 bp, unidentified
  misc_feature 1..490: note = Ascusbbf_1867224, encodes 16S rRNA
  source 1..490: mol_type = genomic DNA
agagtttgatcatggctcaggatgaacgctggcggcatgcctaagacatgcaagtcgaacgaagtgaccttttgaaacgaagtgcttgcacggagcggataaagattttcacttagtggcgcaagggtgagtaacacgtgggttatctgccttttagactgggataacaattagaaatgattgctaataccggatgataaatagaaagatacgtttttctattttaaaagatccccttaaaggatcactaaaagatgagcctgcggcgcattagctagatggtggggtaaaggcctaccatggcgacgatgcgtagccggactgagaggtcgatcggccacattgggactgagacacggcccaaactcctacgggagacagcagttaggaatattcgtcaatggaggaaactctgaacgagcaatgccgcgtgaatgatgacagtctttggattgtaaagttctgttgttggggaagaatgtgttatata

SEQ ID NO: 5241 - DNA, 490 bp, unidentified
  misc_feature 1..490: note = Ascusbbf_1856867, encodes 16S rRNA
  source 1..490: mol_type = genomic DNA
agagtttgatcctggctcagaacgaacgctggcagcgtggattaggcatgcaagtcgaacgggatcggggaggcagcaatgtcgccccgtgagagtggcggaagggcgaggaacacgtgggcaacctgtctttgaggtggggaaaaccgttggaaacgacggctaataccgaatgtagcgcccgctcgcatgagcggagcgccaaagggggcgaaagctccccctcttcgaggggcccgcgcaccatcagctagtcggcggggtaacggcccaccgaggcttacggttagctggtctgagaggatggccagccgcactgggactgagatactgcccagactcctacgggaggctgcagtcgaggatcatttgcaatgggcgaaagcctgacaatgcgacgctgcgtggaggatgaaggccctcgggttgtaaactcctgtcatgggggaaaaggaaaagggacccaacacgtccccgatttgatggtacc

SEQ ID NO: 5242 - DNA, 490 bp, unidentified
  misc_feature 1..490: note = Ascusbbf_146606, encodes 16S rRNA
  source 1..490: mol_type = genomic DNA
agagtttgatcctggctcaggatgaacgctggcggcgtgcttaacacatgcaagtcgaacgattaaaccggcttcggccggacatagagtggcgaacgggtgagtaacacgtgaccaacctgccccgcgcaccgggacagcctcgcgaaagcgggattaataccggatactccgcgggccccgcatggggcccgcgggaaagctccggcggcgcgggatggggtcgcggcccatcaggtagtaggtcgggtaagggccgacctagccgacgacgggtagccgggttgagagaccgaccggccacattgggactgagatacggcccagactcctacgggaggcagcagtggggaatattgcgcaatgggggcaaccctgacgcagcaacgccgcgtgcgggatgaaggccttcgggttgtaaaccgctttcagcagggaggatagtgacagtacctgcacaagaagccccggctaactacgtgccagcagc

SEQ ID NO: 5243 - DNA, 490 bp, unidentified
  misc_feature 1..490: note = Ascusbbf_67981, encodes 16S rRNA
  source 1..490: mol_type = genomic DNA
agagtttgatcatggctcaggacgaacgctggcggcgtgcttaacacatgcaagtcgaacggagaaccccggatgaaattttcggatggattctgggaattctcagtggcggacgggtgagtaacgcgtgagcaatctgcctcagagagggggacaacagctggaaacggctgctaataccgcataagaccacactacagcattgtagaggggtaaaaggagtgatccgctttgagatgagctcgcgtcccattagttagttggcggggtaacggcccaccaagacgacgatgggtagccgacctgagagggtgatcggccacactggaactgagacacggtccagactcctacgggaggcagcagtggggaatattgggcaatgggcgaaagcctgacccagcaacgccgcgtgaaggaagaaggtcttcggattgtaaacatctgtcctatgggacgaaggaagtgacggtaccataggaggaagccc

SEQ ID NO: 5244 - DNA, 490 bp, unidentified
  misc_feature 1..490: note = Ascusbbf_31629, encodes 16S rRNA
  source 1..490: mol_type = genomic DNA
agagtttgatcctggctcaggacgaacgctggcggtatgcttaacacatgcaagtcgaacgagaaggttttgaatgatccttcgggtgaaattagaactggaaagtggcgaacgggtgagtaacgcgtgggtaacctgccctatggaaaggaatagcctcgggaaactgggagtaaagccttatattatggttttgtcgcatggcaagatcatgaaaactccggtgccataggatggacccgcgtcccattagctagttggtgagataacagcccaccaaggcgacgatgggtaaccggtctgagagggcgaacggtcacactggaactgagacacggtccagactcctacgggaggcagcagtggggaatattgcgcaatgggggcaaccctgacgcagcaataccgcgtgagtgaagaaggttttcggatcgtaaagctctgttattggggaagaaaacatgacggtacccaatgaggaagtcccggc

SEQ ID NO: 5245 - DNA, 490 bp, unidentified
  misc_feature 1..490: note = Ascusbbf_77882, encodes 16S rRNA
  source 1..490: mol_type = genomic DNA
agagtttgatcctggctcaggacgaacgctggcggcgtgcctaacacatgcaagtcgaacggagctttgcgttgaaattgagagcagcttgctgcaggatatttcttgtaaagcttagtggcggacgggtgagtaacgcgtgaggaacctgccttacagagggggacaacagttggaaacgactgctaataccgcataacatagcgaaaggacatccttttgttatcaaaggagtaatccgctgtaagatggcctcgcgtccgattagatagttggcggggtaacggcccaccaagtcgacgatcggtagccggactgagaggttgaacggccacattgggactgagacacggcccagactcctacgggaggcagcagtgggggatattgcacaatggaggaaactctgatgcagcaacgccgcgtgagggaagaaggttttcggattgtaaacctctgttttcggtgacgaaacaaatgacggtagccg

SEQ ID NO: 5246 - DNA, 490 bp, unidentified
  misc_feature 1..490: note = Ascusbbf_8164, encodes 16S rRNA
  source 1..490: mol_type = genomic DNA
agagtttgatcatggctcaggatgaacgctggcggcgtgcctaacacatgcaagtcgaacggggttactggcagcggagatttcggtcaaagcagcctttaacctagtggcggacgggtgagtaacgcgtggggaacctgccctgtactgggggataacagtgagaaatcactgctaataccgcataagcgcacagcatcgcatgatgcagtgtgaaaaactgaggtggtacaggatggctccgcgttggattagccagttggcggggtaacggcccaccaaagcgacgatccatagccggcctgagagggtgaacggccacattgggactgagacacggcccagactcctacgggaggcagcagtggggaatattgcacaatgggggaaaccctgatgcagcgacgccgcgtgaaggaagaagtatctcggtatgtaaacttctatcagcagggaagatgatgacggtacctgactaagaagccccggc

SEQ ID NO: 5247 - DNA, 490 bp, unidentified
  misc_feature 1..490: note = Ascusbbf_180746, encodes 16S rRNA
  source 1..490: mol_type = genomic DNA
agagtttgatcctggctcaggatgaacgctagcgataggcttaacacatgcaagtcgaggggcagcataaaggcagcaatgtcttaggtggcgaccggcgcacgggtgagtaacacgtatgcaacctgcccacaactgcgggataacccgtcgaaagacggactaataccgcatggtatggattgatcgcctgattgattcatcaaagaatttcggttgtggatgggcatgcgttccattaggcagttggtgaggtaacggctcaccaaacctacgatggataggggttctgagaggaaggtcccccacactggtactgagacacggaccagactcctacgggaggcagcagtgaggaatattggtcaatgggcgagagcctgaaccagccaaatcgcgtgaaggatgaaggtattatgtattgtaaacttcttttataggggaataaagtgcaccacgtgtggtgttttgtatgtaccctaggaataag

SEQ ID NO: 5248 - DNA, 470 bp, unidentified
  misc_feature 1..470: note = Ascusbbf_1594, encodes 16S rRNA
  source 1..470: mol_type = genomic DNA
agagtttgatcatggctcagagcgaacgctggcggcaggcctaacacatgcaagtcgaacggttccttcggggacagtggcagacgggtgagtaacgcgtgggaacgtgcccttcggttcggaataactcagggaaacttgagctaataccggatacgtccgagaggagaaagatttatcgccgaaggatcggcccgcgtctgattagctagttggtggggtaatggcctaccaaggcgacgatcagtagctggtctgagaggatgatcagccacactgggactgagacacggcccagactcctacgggaggcagcagtggggaatattggacaatgggcgcaagcctgatccagccatgccgcgtgagtgatgaaggccctagggttgtaaagctcttttgtccgggacgataatgacggtaccggaagaataagccccggctaacttcgtgccagcagccgcggtaat

SEQ ID NO: 5249 - DNA, 490 bp, unidentified
  misc_feature 1..490: note = Ascusbbf_50788, encodes 16S rRNA
  source 1..490: mol_type = genomic DNA
agagtttgatcctggctcagaacgaacgctggcggcgcgtcttaagcatgcaagtcgagcggcaagataccttcgggtatcctagagcggcggactggtgagtaacacgtagatgacgcaccctcgtgacggggatagcctgtggaaacacagggtaataccggataagcccgggagtactggaagctttcggggaaaggggctattgccccgcgggaggagcggtctgcggcccatcagctagttggcggggtaaaggcccaccaaggcgatgacgggtatccggcctgagagggtgatcgggcacattgggactgagatacggcccagactcctacgggaggcagcagctaagaatattccgcaatgcgcgaaagcgtgacggagcgacgccgcgtggacgatgaaggccggaaggttgcagagtcctttggcgcctgaggaaagggcaggggaatggaaagcccctgaattgactgtagggcgagaa

SEQ ID NO: 5250 - DNA, 490 bp, unidentified
  misc_feature 1..490: note = Ascusbbf_7913, encodes 16S rRNA
  source 1..490: mol_type = genomic DNA
agagtttgatcctggctcagaacgaacgctggcggcaggcttaacacatgcaagttggacgggaatcgattgatagcttgctattgattgaggagagtagcgcacgggtgagtaacacgtgggaacataccttatagtgggggataacaattggaaacgattgataataccgcataagtcctaagggagaaaggagtaattcgctataagattggcccgcggaagattaggcagttggtggggtaaaggcctaccaaacctacgatctatagctggtctgagaggacgatcagccacattgggactgagacacggcccaaactcctacgggaggcagcagtgaggaatattgggcaatgggggcaaccctgacccagccatgccgcgtgagtgaagaaggttttcgaattgtaaagctctttcggatgtgaagatgatgacggtagcatctaaagaagccccggcaaacttcgtgccagcagccgcggta

SEQ ID NO: 5251 - DNA, 490 bp, unidentified
  misc_feature 1..490: note = Ascusbbf_37080, encodes 16S rRNA
  source 1..490: mol_type = genomic DNA
agagtttgatcctggctcaggatgaacgctagctacaggcttaacacatgcaagtcgaggggcagcataagagaagcttgcttttcttgatggcgaccggcgcacgggtgagtaacgcgtatccaacctacccataagtagtgcatagcccggcgaaagtcggattaattcactatatgtttaattttggcatctttattaaacgaaagatttattgcttatggatggggatgcgtatgattagttagttggtgaggtaatggctcaccaaggctacgatcattaggggttctgagaggaaggtcccccacactggtactgagacacggaccagactcctacgggaggcagcagtgaggaatattggtcaatggacggaagtctgaaccagccaagtagcgtgtaggaagactgccctatgggttgtaaactacttttgttcgggagtaaagttagttacgtgtgactatttgcaagtaccgatcgaata

SEQ ID NO: 5252 - DNA, 488 bp, unidentified
  misc_feature 1..488: note = Ascusbbf_378166, encodes 16S rRNA
  source 1..488: mol_type = genomic DNA
agagtttgatcctggctcaggatgaacgctggcggcaggcttaacacatgcaagttgagcgggaatgattgatagcttgctattagtcatgagagcagcgcactggtgagtaacacgtgggaacatacctattggtgggggacaacagagggaaacttctgctaataccgcataagccctaagggggaaagatttattgccgatagattggcccgcggaagattaggtagtaggtggggtaacggcctacctagccgacgatctatagctggtctgagaggacgatcagccacattggaactgagacacggtccagactcctacgggaggcagcagtgaggaatattgggcaatggaggcaactctgacccagccatgccgcgtgagtgaagaaggttttcggattgtaaagctctttcagataagaagatgatgacggtattatcagaagaagcaccggctaacttcgtgccagcagccgcggtaat

SEQ ID NO: 5253 - DNA, 490 bp, unidentified
  misc_feature 1..490: note = Ascusbbf_60233, encodes 16S rRNA
  source 1..490: mol_type = genomic DNA
agagtttgatcatggctcagaacgaacgctggcggcgcgtcttaagcatgcaagtcgagcggcaagatatctccggatatcctagagcggcggactggtgagtaacgcgtggatgacgcacccttgtgacggggatagcctgtggaaacacagggtaataccggataagctcagtatcgttggagggtactgaggaaaggaactattgttccgcacgaggagcggtccgcgtcccatcagctagttggcggggtaaaggcccaccaaggcaatgacgggtacccggcctgagagggcgatcgggcacattgggactgagatacggcccagactcctacgggaggcagcagctaagaatattccgcaatgcgcgaaagcgtgacggagcgacgccgcgtggacgatgaaggccggaaggttgcagagtcctttggcgcccgaggaaagagcgggggaatggaaagcccctgaattgactgtagggcgagaa

SEQ ID NO: 5254 - DNA, 490 bp, unidentified
  misc_feature 1..490: note = Ascusbbf_23519, encodes 16S rRNA
  source 1..490: mol_type = genomic DNA
agagtttgatcatggctcagaacgaacgctggcggcgcgtcttaagcatgcaagtcgagcggtaagatatagcttgctatatcctagagcggcggactggtgagtaacacgtgggtgacatacccctcagaccgggatagctcctagaaataggagataataccagatacgacctatgttgtcagaggacatagaggaaagatgctacggcatcgctgaaggagtggcccgcggcccattagctagttggtagggtaacggcttaccaaggcgacgatgggtatccggcctaagagggtggacggacacattgggactgagatacggcccagactcctacgggaggcagcagctaagaatattccgcaatggacgaaagtctgacggagcgacgccgcgtggacgatgaaggccgaaaggttgtaaagtccttttgaatctgacgaataagcagtgcagggaatggcattgtggtgacggtaggatttga

SEQ ID NO: 5255 - DNA, 490 bp, unidentified
  misc_feature 1..490: note = Ascusbbf_1070, encodes 16S rRNA
  source 1..490: mol_type = genomic DNA
agagtttgatcatggctcagaacgaacgctggtggcgtgtcttatacatgcaagtcgagcggtccagcaatggatagcggcgaacgggtgagtaacgcgtaagcaatctgccccctgctcgggaatagccgtgccaacgcgcggataataccggatatcgtggggtcctgcatagggccttgacaaaagatttatcggcaggggatgagcttgcgtccgattagctagttggcggggcaacggcccaccaaggcgacgatcggtagccggcctgagagggtgatcggccacattgggactgagatacggcccagactcctacgggaggcagcagtagggaatattgcacaatgggggaaaccctgatgcagcaacgccacgtgtgggaagaagcatttcggtgtgtaaaccactgtcgtgagggaataaggctatttttcggagtagttgaatgtacctcgagaggaagcaccggcaaacttcgtgccag

SEQ ID NO: 5256 - DNA, 490 bp, unidentified
  misc_feature 1..490: note = Ascusbbf_101875, encodes 16S rRNA
  source 1..490: mol_type = genomic DNA
agagtttgatcatggctcaggatgaacgctggcggcgtgcctaacacatgcaagtcgagcgagaaacctgcgagttgatacttcggttgaaacatgcaggcggaaagcggcggacgggtgagtaacgcgtaggcaacctgccccatgcagagggatagcctcgggaaaccgggattaaaacctcataatgcgcagacgagacatctcgactgcgccaaagatttatcggcaagggatgggcctgcgtctgattagttagttggtgaggtaacggctcaccaaggcgacgatcagtagccgacctgagagggtgatcggccacattggaactgagacacggtccaaactcctacgggaggcagcagtggggaatattgcacaatgggggaaaccctgatgcagcaacgccgcgtgaaggatgaaggcccttgggtcgtaaacttctgttctaagggaagataatgacggtaccttaggagcaagtcccggc

SEQ ID NO: 5257 - DNA, 490 bp, unidentified
  misc_feature 1..490: note = Ascusbbf_34081, encodes 16S rRNA
  source 1..490: mol_type = genomic DNA
agagtttgatcatggctcaggatgaacgctagcggcaggcctaacacatgcaagtcgaggggcagcggggtagcaataccgccggcgaccggcgcacgggtgagtaacgcgtatgtaacctagttcacaaagagggatagccttccgaaagggagattaataccacatatgatgatagcttcgcatggagtagtcatgaaaaatttattgatgtgaaatggacatgcgtctgattagatagtaggcggggtaacggcccacctagtcgacgatcagtaggggttctgagagggagatcccccacattggtactgagacagggaccaaactcctacgggaggcagcagtgaggaatattggtcaatggacggaagtctgaaccagccaagtcgcgtgcaggaagacggccctatgggttgtaaactgcttttgtacgagggtaaaaggcgctatgtatagtgttttgaaagtaccgtacgaataaggatcg

SEQ ID NO: 5258 - DNA, 490 bp, unidentified
  misc_feature 1..490: note = Ascusbbf_1849914, encodes 16S rRNA
  source 1..490: mol_type = genomic DNA
agagtttgatcctggctcaggatgaacgctggcggcgtgcctaacacatgcaagtcgagcgagaaacctctttgaagatacttcggttgattctgtgaggcggaaagcggcggacgggtgagtaacgcgtaggcaacctgcccttagcagagggatagcctcgggaaaccgggattaaaacctcataatacgccatcaagacatcttggaggcgtcaaagatttatcggctaaggatgggcctgcgtctgattagttagttggtggggtaacggcctaccaaggcgacgatcagtagccgacctgagagggtgatcggccacattggaactgagacacggtccaaactcctacgggaggcagcagtggggaatattgcacaatgggcgaaagcctgatgcagcaacgccgcgtgaaggatgaaggcccttgggtcgtaaacttccgttctaagggaagatagtgacggtaccttaggagcaagtcccggc

SEQ ID NO: 5259 - DNA, 490 bp, unidentified
  misc_feature 1..490: note = Ascusbbf_67638, encodes 16S rRNA
  source 1..490: mol_type = genomic DNA
agagtttgatcctggctcaggatgaacgctagcggcaggcttaacacatgcaagtcgaggggcagcgcggtgtagcaatacattggcggcgaccggcgaaagggtgagtaacgcgtgagcaacatgcccgttgcagggggatagtcattggaaacgatgcgtaataccccgtaatatcatggatcgcatggtttatgattgaaagatttatcggcgacggattggctcgcgtaccattagctagatggcggggtaacggcccaccatggctacgatggttaggggttctgagaggaaggtcccccacattggaactgagacacggtccagactcctacgggaggcagcagtgaggaatattggtcaatggccgagaggctgaaccagccatgccgcgtgcgggaagacggccctatgggttgtaaaccgcttttttgtgggagcaataagttgcacgtgtgcaatgatgagagtaccatgagaataagca

SEQ ID NO: 5260 - DNA, 490 bp, unidentified
  misc_feature 1..490: note = Ascusbbf_4908, encodes 16S rRNA
  source 1..490: mol_type = genomic DNA
agagtttgatcctggctcaggacgaacgctggcggcgtgcctaacacatgcaagtcgaacgaagttattacgctgaaatgatattagcttgctaaaggaatttcttgtaatgcttagtggcggacgggtgagtaacgcgtgagcaacctgcctttcagagggggacaacagttggaaacgactgctaataccgcataacattgtttaaagacatctttagataatcaaaggagcaatccgctgaaagatgggctcgcgtccgattagatagttggcggggtaacggcccaccaagtcgacgatcggtagccggactgagaggttgatcggccacattgggactgagacacggcccagactcctacgggaggcagcagtgggggatattgcacaatgggcgaaagcctgatgcagcaacgccgcgtgagggaagaaggtcttcggattgtaaacctttgtcctaagtgaagaaacaaatgacggtaactta

SEQ ID NO: 5261 - DNA, 490 bp, unidentified
  misc_feature 1..490: note = Ascusbbf_1591684, encodes 16S rRNA
  source 1..490: mol_type = genomic DNA
agagtatgatcctggctcaggacgaacgctggcggcatgcctaacacatgcaagtcgaacggaataggtttagctgtagcgatacttttgaacctatttagtggcgaacgggtgagtaacacgtgagcaacctgccttttacacagggataacagttggaaacgactgctaataccggataagaccacaccgaggcatctcggaggggtcaaagcgttttagcggtaaaagatgggctcgcgtcccattagctagttggtgagataacagcccaccaaggcgacgatgggtagccgacttgagagagtgatcggccacattggaactgagacacggtccagactccttcgggaggcagcagtggggaatattgggcaatggaggaaactcttacccagcaatgccgcgtgaatgaagaaggccttcgggttgtaaagttcttttgttgatgataaagaaagtgatattagtcaatgaataagccccggct

SEQ ID NO: 5262 - DNA, 490 bp, unidentified
  misc_feature 1..490: note = Ascusbbf_41469, encodes 16S rRNA
  source 1..490: mol_type = genomic DNA
agagtttgatcatggctcaggacgaacgctggcggcgtgcctaatacatgcaagtcgagcggacagaagggagcttgctcccggatgttagcggcggacgggtgagtaacacgtgggtaacctgcctgtaagactgggataactccgggaaaccggagctaataccggatagttccttgaaccgcatggttcaaggatgaaagacggtttcggctgtcacttacagatggacccgcggcgcattagctagttggtggggtaatggctcaccaaggcgacgatgcgtagccgacctgagagggtgatcggccacactgggactgagacacggcccagactcctacgggaggcagcagtagggaatcttccgcaatggacgaaagtctgacggagcaacgccgcgtgagtgatgaaggttttcggatcgtaaagctctgttgttagggaagaacaagtgcgagagtaactgctcgcaccttgacggtaccta

SEQ ID NO: 5263 - DNA, 490 bp, unidentified
  misc_feature 1..490: note = Ascusbbf_48476, encodes 16S rRNA
  source 1..490: mol_type = genomic DNA
agagtttgatcatggctcaggatgaacgctggcggcgtgcctaacacatgcaagtcgagcgagaagctttccagaagatacttcggttgattcagggaagtggaaagcggcggacgggtgagtaacgcgtaggcaacctgccccttgcagagggatagcctcgggaaaccgggattaaaacctcataatgcggtgagaagacatcttcatatcgccaaagatttatcggcaagggatgggcctgcgtctgattagttagttggtggggtaacggcctaccaaggcgacgatcagtagccgacctgagagggtgatcggccacattggaactgagacacggtccaaactcctacgggaggcagcagtggggaatattgcacaatgggcgaaagcctgatgcagcaacgccgcgtgaaggatgaaggcccttgggtcgtaaacttctgttctaagggaagatagtgacggtaccttaggagcaagtcccggc

SEQ ID NO: 5264 - DNA, 490 bp, unidentified
  misc_feature 1..490: note = Ascusbbf_90324, encodes 16S rRNA
  source 1..490: mol_type = genomic DNA
agagtttgatcctggctcagattgaacgctggcggcaggcctaacacatgcaagtcgagcggcagcggaaagtagcttgctactttgccggcgagcggcggacgggtgagtaatgtctgggaaactgcctgatggagggggataactactggaaacggtagctaataccgcataacgtcgcaagaccaaagagggggaccttcgggcctcttgccatcagatgtgcccagatgggattagctagtaggtggggtaacggctcacctaggcgacgatccctagctggtctgagaggatgaccagccacactggaactgagacacggtccagactcctacgggaggcagcagtggggaatattgcacaatgggcgcaagcctgatgcagccatgccgcgtgtatgaagaaggccttcgggttgtaaagtactttcagcggggaggaaggtgttgaggttaataacctcagcaattgacgttacccgcagaag

SEQ ID NO: 5265 - DNA, 490 bp, unidentified
  misc_feature 1..490: note = Ascusbbf_67509, encodes 16S rRNA
  source 1..490: mol_type = genomic DNA
agagtttgatcctggctcaggacgaacgctggcggcgcgcctaacacatgcaagtcgaacgaggttggacttcggtttaaccgagtggcggacgggtgagtaacacgtgagcaatctgcctctgagagtggaataccagccggaaacagctgttaataccgcatgatgtattgggagggcatccttctgataccaaagatttatcgctcagagatgagctcgcgtccgattagatagttggcggggtaacggcccaccaagtcgacgatcggtagccggactgagaggttgaacggccacattgggactgagacacggcccagactcctacgggaggcagcagtgggggatattgcacaatgggggaaaccctgatgcagcgacgccgcgtgcaggaagacggtcctctggattgtaaactgctgtgttcagggacgataatgacggtacctgaatagaaagctccggctaactacgtgccagcagccgc

SEQ ID NO: 5266 - DNA, 490 bp, unidentified
  misc_feature 1..490: note = Ascusbbf_227627, encodes 16S rRNA
  source 1..490: mol_type = genomic DNA
agagtttgatcctggctcaggatgaacgctagcgacaggcttaacacatgcaagtcgaggggcagcatgggagcggcaacgctcccgatggcgaccggcgcactggtgagtaacacgtatgcaacctgccccgccgcggggaatagtccggggaaacccggcgtaatgccccatgtgccgcgacgccgcatggcgtttcggtgaaagctccggcgcgacgggatgggcatgcggcgcattagctggttggcggggcaacggcccaccaaggctacgatgcgtaggggttctgagaggaaggtcccccacactggtactgagacacggaccagactcctacgggaggcagcagtgaggaatattggtcaatggccggaaggctgaaccagccaagtcgcgtgcgggaagtaggccctacgggtcgtgaaccgctttagccggggagcaacgggccggacgcgtccggccgtgagagtacccggagaataag

SEQ ID NO: 5267 - DNA, 490 bp, unidentified
  misc_feature 1..490: note = Ascusbbf_5141, encodes 16S rRNA
  source 1..490: mol_type = genomic DNA
agagtttgatcatggctcaggatgaacgctggcggcgtgcctaacacatgcaagtcgaacgaagcactcttgtagatccttcgggtgaaactttagtgactgagtggcggacgggtgagtaacgcgtgggtaacctgccctgtacagggggataacagtcagaaatgactgctaataccgcataagcgcacgagaggacatcctcatgtgtgaaaaactccggtggtacaggatgggcccgcgtctgattagctggttggcggggtaaaggcccaccaaggcgacgatcagtagccggtctgagaggatgaacggccacattggaactgagacacggtccaaactcctacgggaggcagcagtggggaatattgcacaatggggggaaccctgatgcagcaacgccgcgtgagtgaagaagtatttcggtatgtaaagctctatcagcagggaagataatgacggtacctgactaagaagctccggctaa

SEQ ID NO: 5268 - DNA, 490 bp, unidentified
  misc_feature 1..490: note = Ascusbbf_15135, encodes 16S rRNA
  source 1..490: mol_type = genomic DNA
agagtttgatcatggctcagaacgaacgctggcggcgcgtcttaagcatgcaagtcggacggcagggtgccttcgggcatccgagagtggcgaacgggtgagtaacacgtaagtgatctgccctccagttggggatagcctgtggaaacacagggtaataccggatgagatgacaatgattgaactatgtcatgaaagtggctacggccacgctgggggatgagcttgcggctcattagctagttgggggtgtaacggaccaccaaggcgacgatgagtagccggcctgagagggtgaacggccacattgggactgagacacggcccagactcctacgggaggcagcagctaagaatattccgcaatggggggaaccctgacggagcgacgccgcgtgaacgatgaaggcagagatgttgtaaagttcttttatcactgaagaataaccggaccagggaatgggtgcgggatgacgttaggtgatgaata

SEQ ID NO: 5269 - DNA, 468 bp, unidentified
  misc_feature 1..468: note = Ascusbbf_11247, encodes 16S rRNA
  source 1..468: mol_type = genomic DNA
agagtttgatcatggctcagagcgaacgctggcggcaggcctaacacatgcaagtcgagcgcccagcaatgggagcggcagacgggagagtaacacgtgggaacgtacccttcagtacggaacaaccaagggaaactttggctaataccgtatacgtccgtaaggagaaagatttatcgctgaaggatcggcccgcgtctgattagcttgttggtgaggtaatggctcaccaaggcgacgatcagtagctggtctgagaggatgatcagcctcactgggactgagacacggcccagactcctacgggaggcagcagtggggaatattggacaatgggcgaaagcctgatccagccatgccgcgtggatgatgaaggccttagggttgtaaagtcctttcgacggggaagataatgacggtacccgtagaagaagccccggctaacttcgtgccagcagccgcggtaat

SEQ ID NO: 5270 - DNA, 490 bp, unidentified
  misc_feature 1..490: note = Ascusbbf_26898, encodes 16S rRNA
  source 1..490: mol_type = genomic DNA
agagtttgatcctggctcaggatgaacgctggcggcaggcttaatacatgcaagtcgaacggtaaggtctgaagtagcaatactaaagatacacgagtggcgcacgggtgcgtaacgcgtatgtaatctacccttaaccggaacaaaacagttggaaacgactgctaatattccatagtcattagttaaggcatcttaaagaatgtaaagatttattggttaaggatgagcatgcgtattattaggtagttggtagggtaacggcctaccaagccgacgatgattaggggtcctgagagggttaacccccacactggaactgagacacggtccagactcctacgggaggcagcagtagggaatattgggcaatggaggaaactctgacccagccatgccgcgtgaaggaagacggtcctatggattgtaaacttcttttattgcagagtaaaattagatacgtgtatttaattgagagtatgcgatgaat

SEQ ID NO: 5271 - DNA, 485 bp, unidentified
  misc_feature 1..485: note = Ascusbbf_5842, encodes 16S rRNA
  source 1..485: mol_type = genomic DNA
agagtttgatcatggctcagaacgaacgctggcggcaggcttaacacatgcaagtcgaacggaacatagagtgcttgcactttatgtcagtggcgcacgggtgagtaacgcgtaggtatctgtctgttggacggggatagcctctggaaacggagggtaaaacccggtaaggcctgagggcgagacgagaaatcggccgacagaggagcctgcgttagattaggcagttggtggggtaacggcctaccaaaccgacgatctatagctggtctgagaggatgatcagccacattgggactgagacacggcccaaactcctacgggaggcagcagtggggaatattggacaatgggggagaccctgatccagccatgccgcgtgagtgaagaaggccttcgggttgtaaagctcttttacacgggaagatgatgacggtaccgtgagaataagcaccggctaacttcgtgccagcagccgcggtaat

SEQ ID NO: 5272 - DNA, 490 bp, unidentified
  misc_feature 1..490: note = Ascusbbf_3110, encodes 16S rRNA
  source 1..490: mol_type = genomic DNA
agagtttgatcctggctcaggacgaacgctggcggtatgcttaacacatgcaagtcgaacgagaagctgtctaatgaaccttcgggtgatttagagagtggatagtggcgaacgggtgagtaacgcgtgggcaacctgcctttcggagcggaatagcctcgggaaaccgggagtaaagccgcataacattattttttcgcatgaagagataatcaaaactccggtgccgaaagatgggcccgcgtcctattagctagttggtgaggcaacggctcaccaaggcgacgataggtagccggtctgagagggcgaacggccacactggaactgagacacggtccagactcctacgggaggcagcagtggggaatattgcgcaatgggggcaaccctgacgcagcaataccgcgtgagtgaagaaggttttcggatcgtaaagctctgttattggggaagaagaagtgacggtacccaatgaggaagtcccggc

SEQ ID NO: 5273 - DNA, 490 bp, unidentified
  misc_feature 1..490: note = Ascusbbf_1507577, encodes 16S rRNA
  source 1..490: mol_type = genomic DNA
agagtttgatcctggctcaggatgaacgctagctacaggcttaacacatgcaagtcgaacgagaagctgacttcggtcagtggaaagtggcggacgggtgagtaatgtgtagagaatctgccctagagagagggacaacagttggaaacgactgctaatacctcatatgcgcgtagctgagatgctattcgtgaaaactccggtgctctgggatgagtctgcatctgattagctagttggcggtgtaatggaccaccaaggcgacgatcagtagctggtttgagaggatgatcagccacaatgggactgagacacggcccatactcctacgggaggcagcagtagggaattttgcgcaatgggggaaaccctgacgcagcaacgccgcgtgattgaataagcccttcggggtgtaaagatctgtcagtagggacgaaacttgacggtacctacagaggaagcatcggctaactccgtgccagcagccgcg

SEQ ID NO: 5274 - DNA, 490 bp, unidentified
  misc_feature 1..490: note = Ascusbbf_17170, encodes 16S rRNA
  source 1..490: mol_type = genomic DNA
agagtttgatcatggctcaggacgaacgctggcggcgtgcctaacacatgcaagtcgaacgaagctccggatcggattcttcggatgaagagaaggaagacttagtggcggacgggtgagtaacgcgtgagcaacctgcctttcagagggggataacagttggaaacgactgctaataccgcataacataagatcatcgcatggtggttttatcaaagctgaggcgctgaaagatgggctcgcgtccgattagatagttggtggggtaacggcctaccaagtcgacgatcggtagccggactgagaggttgaacggccacattgggactgagacacggcccagactcctacgggaggcagcagtgggggatattgcacaatgggcgaaagcctgatgcagcaacgccgcgtgagggaagacggttttcggattgtaaacctctgtctttggtgaagaagaaagtgacggtagccaaggaggaagccacgg

SEQ ID NO: 5275 - DNA, 490 bp, unidentified
  misc_feature 1..490: note = Ascusbbf_15733, encodes 16S rRNA
  source 1..490: mol_type = genomic DNA
agagtttgatcatggctcagattgaacgctggcggcaggcttaacacatgcaagtcgaacggtagcaggaagaaagcttgctttctttgctgacgagtggcggacgggtgagtaatgcttgggaatctggcttatggagggggataactgtgggaaactgcagctaataccgcgtattctctgaggaggaaagggtgggaccttagggccacctgccataagatgagcccaagtgggattaggtagttggtggggtaaaggcctaccaagcctgcgatctctagctggtctgagaggatgaccagccacactggaactgagacacggtccagactcctacgggaggcagcagtggggaatattgcgcaatggggggaaccctgacgcagccatgccgcgtgaatgaagaaggccttcgggttgtaaagttctttcggtaatgaggaagggatgttattaaatagatagcatcattgacgttaattacaga

SEQ ID NO: 5276 - DNA, 488 bp, unidentified
  misc_feature 1..488: note = Ascusbbf_1445914, encodes 16S rRNA
  source 1..488: mol_type = genomic DNA
agagtttgatcctggctcagaacgaacgctggcggcaggcttaacacatgcaagttgagcgggattgattagtagcttgcttttgatcatgcgagcagcgcactggtgagtaacacgtgggaacataccttttggtgggggacaacagttggaaacgactgctaataccgcataagccctgagggggaaagattaattgccgagagattggcccgcggaagattaggtagtaggtggcgtaacggcctacctagccgacgatctatacctggtctgagaggacgatcagccacattggaacggagacacggtccagactcctacgggagacagcagagaggaatattgggcaagggagggaactctgacccagccaggccgcgtgagggaagaaggttttcggattgtaaagcactttcagacgggaagatgatgacggtaccgtcggaagaagcaccggctaactccgtgccagcagccgcggtaat

SEQ ID NO: 5277 - DNA, 490 bp, unidentified
  misc_feature 1..490: note = Ascusbbf_25683, encodes 16S rRNA
  source 1..490: mol_type = genomic DNA
agagtttgatcatggctcaggatgaacgctggcggcgtgcttaacacatgcaagtcgaacgagaacgtttccttcggggaactagtaaagtggcgaacgggtgagtaacacgtgggcaacctgccccttacattgggataacgcagagaaatttgcgctaataccggatacttcgttttgagggcatcctctttacgagaaagcttttgcggtaagggatgggcccgcggtccattagcttgttggtggggtaacggcctaccaaggcgacgatggatagccggcttgagagagtgatcggccacattgggactgagacacggcccagactcctacgggaggcagcagtggggaattttgcgcaatgggggcaaccctgacgcagcaacgccgcgtgcgggatgacggccttcgggttgtaaaccgctttcagaagggaagaatttagacggtaccttcagaagaagctccggctaactacgtgccagca

SEQ ID NO: 5278 - DNA, 490 bp, unidentified
  misc_feature 1..490: note = Ascusbbf_44146, encodes 16S rRNA
  source 1..490: mol_type = genomic DNA
agagtttgatcatggctcaggatgaacgctggcggcgtgcctaacacatgcaagtcgaacggatttcctaatgacagaggcttcggccgacgaagtttggaagttagtggcggacgggtgagtaacgcgtggagaacctgccctgtactgggggataacatcaggaaactggtgctaaaaccgcataagcgcacaggaccgcatggtctggtgtgaaaaactccggtggtacaggatggctccgcgttggattagccagttggcggggtaacggcccaccaaagcgacgatccatagccggcctgagagggtgaacggccacattgggactgagacacggcccagactcctacgggaggcagcagtggggaatattgcacaatggggggaaccctgatgcagcgacgccgcgtgaaggaagaagtatctcggtatgtaaacttctatcagcagggaagaaaatgacggtacctgactaagaagccccggc

SEQ ID NO: 5279 - DNA, 490 bp, unidentified
  misc_feature 1..490: note = Ascusbbf_90222, encodes 16S rRNA
  source 1..490: mol_type = genomic DNA
agagtttgatcatggctcagaatgaacgctggcggcatggattaggcatgcaagtcggacggggtgcagaaatgcacccagtggcgaaagggtgcgcaacgcgtggggaacctgcccccggatccgggacaagcgctggaaacggcgtctgatacgggatgaggacggccgccgcatgggggccgctccaaagattcatcgtccggggagggccccgcgtcccattagctggttggcggggtatcggcccaccaaggctacgacgggtaggtggtctgagaggatggtcacccacactgggactgagacactgcccagactcctacgggaggctgcagtcgagaatcttccgcaatgggcgcaagcctgacggagcgatgccgcgtgggggacggaggccttcgggtcgtgaacccctgtcacccgggacgaagaaagcgacggtaccgggagaggaagccacggctaactacgtgccagcagccgcggt

SEQ ID NO: 5280 - DNA, 490 bp, unidentified
  misc_feature 1..490: note = Ascusbbf_397404, encodes 16S rRNA
  source 1..490: mol_type = genomic DNA
agagtttgatcatggctcaggacgaacgctggcggcgtgcttaacacatgcaagtcgaacgaagcggcagtgaaggaggcttcggccaatggatctgtcgacttagtggcggacgggtgagtaacgcgtgagcaacctgcctttcagagggggataacgtttggaaacgaacgctaataccgcataaagtattttcgctgcatgacggagataccaaaggagcaatccgctgaaagatgggctcgcgtccgattagatagttggtggggtaacggcctaccaagtcgacgatcggtagccggactgagaggttgaacggccacattgggactgagacacggcccagactcctacgggaggcagcagtggggaatattgcacaatgggcgcaagcctgatgcagcaacgccgcgtgagggaagacggttttcggattgtaaacctttgtccttggtgaagatcatgacggtagccgaggaggaagccacgg

SEQ ID NO: 5281 - DNA, 490 bp, unidentified
  misc_feature 1..490: note = Ascusbbf_388454, encodes 16S rRNA
  source 1..490: mol_type = genomic DNA
agagtttgatcctggctcaggatgaacgctggcggcgtgcttaacacatgcaagtcgaacgaagcacttgaccttcgggtcttgtgactgagtggcggacgggtgagtaacgcgtgggtaacctgccctgtacagggggataacagttagaaatgactgctaataccgcataagcatacggagaggcatctctctgtgtgaaaaactccggtggtacaggatgggcccgcgtctaattagctggttggcagggtaacggcctaccaaggcgacgatcagtagccggtctgagaggatgaacggccacattggaactgagacacggtccaaactcctacgggagacagcagtggggaatattgcacaatgggggaaaccctgatgcagcaacgccgcgtgagtgatgaagtatttcggtatgtaaagctctatcagcagggaagatgatgacggtacctgactaagaagctccggctaaatacgtgccagc

SEQ ID NO: 5282 - DNA, 490 bp, unidentified
  misc_feature 1..490: note = Ascusbbf_299823, encodes 16S rRNA
  source 1..490: mol_type = genomic DNA
agagtttgatcatggctcagaacgaacgctggcggcgtgcttaacacatgcaagtcgaacgcgaaagcggcttcggtcgcaagtagagtggcgcacgggtgagtaacgcgtagataacctgccttcatgtccgggataacacgccgaaaggggtactaataccggatacccttgcatttcacaagtaaggcaaggaaaggtggcctctgattcaagctactgcatgaagaggggtctgcgtaccattagctagtaggtggggtaatggcctacctaggcaacgatggttagcgggtctgagaggatgatccgccacactggcactggaatacgggccagactcctacgggaggcagcagtgaggaatattgcgcaatgggggcaaccctgacgcagcgacgccgcgtgagtgaagaaggtcttcggatcgtaaagctctgtcaagagggaagaagtgcgaggcggctaatatctgtctcgtttgacggta

SEQ ID NO: 5283 - DNA, 490 bp, unidentified
  misc_feature 1..490: note = Ascusbbf_706339, encodes 16S rRNA
  source 1..490: mol_type = genomic DNA
agagtttgatcctggctcaggatgaacgctagcgacaggcttaacacatgcaagtcgaggggcatcgcgggggtggcaacactcctggcggcgaccggcgcactggtgagtaacacgtatgcaacctgcccccggcagagggataaacccgggaaactgggcctaatacctcatgcgccgcgagcccgcatgggtttgcggtgaaaggattccggccggggatgggcatgcggcgcattagctggttggcggggcaacggcccaccaaggcgacgatgcgtaggggttctgagaggaaggtcccccacactggtactgagacacggaccagactcctacgggaggcagcagtgaggaatattggtcaatgggcgggagcctgaaccagccaagtcacgtgggggatgacggtcctacggattgtaaacccctttagccggggagcaacgggcgccacgcgtggcgcattgagcgtacccggagaataagc

SEQ ID NO: 5284 - DNA, 490 bp, unidentified
  misc_feature 1..490: note = Ascusbbf_138539, encodes 16S rRNA
  source 1..490: mol_type = genomic DNA
agagtttgatcatggctcaggacgaacgctggcggcgtgcctaacacatgcaagtcgaacggagtttatttttcggagtccctcgggacaaagagctataaacttagtggcggacgggtgagtaacgcgtgagtaacctgccttacagagggggacaacagttggaaacgactgctaataccgcataaagtacaaagaaggcatcttcattgtaccaaaggagcaatccgctgtaagatggactcgcgtccgattagatagttggtgaggtaacggctcaccaagtcgacgatcggtagccggactgagaggttgaacggccacattgggactgagacacggcccagactcctacgggaggcagcagtgggggatattgcacaatggaggaaactctgatgcagcaacgccgcgtgagggaagaaggttttcggattgtaaacctctgttttcagtgaagaaacaaatgacggtagctgaagaggaagcc

SEQ ID NO: 5285 - DNA, 490 bp, unidentified
  misc_feature 1..490: note = Ascusbbf_335247, encodes 16S rRNA
  source 1..490: mol_type = genomic DNA
agagtttgatcatggctcaggacgaacgctggcggcgtgcctaacacatgcaagtcgaacgaagctcccggatatgagattcgtcaaattgaagggatgacttagtggcggacgggtgagtaatgcgtgagcaacctgcccttcggagggggacaacagctggaaacggctgctaataccgcataatgtatcgtgaaggcatcttcgtgataccaaagatttatcgccgagggatgggctcacgtctgattagcttgttggtggggcaacggcccaccaaggctgcgatcagtagccggactgagaggttgaacggccacattgggactgagatacggcccagactcctacgggaggcagcagtggggaatattgggcaatgggggaaaccctgacccagcaacgccgcgtgaaggaagaaggctttcgggttgtaaacttcttttaacagggaagataatgacggtacctgttgaataagccacggcta

SEQ ID NO: 5286 - DNA, 490 bp, unidentified
  misc_feature 1..490: note = Ascusbbf_297163, encodes 16S rRNA
  source 1..490: mol_type = genomic DNA
agagtttgatcatggctcaggataaacgctggcggcgcacataagacatgcaagtcgaacggacgagattagattctttacgattctaatcaagttagtggcggactggtgagtaacgcgtgagcaacctacctattagaggggaacaacagagagaaatttctgctaataccgcataagctgatagaatcgcatgatttagtcagaaaaggagcaatccgctaatagatgggctcgcgtccgattagctagttggtaaggtaacggcttaccaaggcgacgatcggtagccggactgagaggttgaacggccacattgggactgagatacggcccagactcctacgggaggcagcagtcgggaatattgcgcaatggaggaaactctgacgcagtgacgccgcgtataggaagaaggttttcggattgtaaactattgtcgttagggaagagaaaggacggtacctaaggaggaagccccggctaacta

SEQ ID NO: 5287 - DNA, 490 bp, unidentified
  misc_feature 1..490: note = Ascusbbf_387558, encodes 16S rRNA
  source 1..490: mol_type = genomic DNA
agagtttgatcctggctcaggatgaacgctggcggcgtgcttaacacatgcaagttgaacgaaggtactggaggaggcttcggcggaatccggtatacttagtagcggacgggtgagtaacgcgtgggcaacctgccctgtacagggggacaacagctggaaacggctgctaataccgcataagcgcacagcaccgcatggtgccgtgtgaaaagcgcaacggtacaggatgggcccgcgtctgattaggcagttggcggggtaacggcccaccaaaccgacgatcagtagccgacctgagagggtgaccggccacattgggactgagacacggcccaaactcctgcgggaggcagcagtggggaatattgcacaatggaggaaactctgatgcagcgacgccgcgtgagtgaagaagtatttcggtatgtaaagctctatcagcagggaagaaaatgacggtacctgcacaagaagccccggctaacta

SEQ ID NO: 5288 - DNA, 490 bp, unidentified
  misc_feature 1..490: note = Ascusbbf_1873556, encodes 16S rRNA
  source 1..490: mol_type = genomic DNA
agagtttgatcctggctcaggacgaacgctggcggcacgcttaacacatgcaagtcgaacgagcgaaaagtgcttgcacttctagctagtggcggacgggtgagtaacacgtgagcaatctgcctttcggtgggggataccaattggaaacgattgttaataccccataacatagtggtaccgcatgatactgctatcaaagatttattgccgaaagatgagctcgcgtctgattaggtagttggtgaggtaacggcccaccaagccgacgatcagtagccggactgagaggttgaacggccacattgggactgagacacggcccagactcctacgggaggcagcagtggggaatattgcacaatgggcgaaagcctgatgcagcgatgccgcgtgagggaagaaggttttaggattgtaaacctctgtctttggggacgataatgacggtacccaaggaggaagctccggctaactacgtgccagcagc

SEQ ID NO: 5289 - DNA, 490 bp, unidentified
  misc_feature 1..490: note = Ascusbbf_138829, encodes 16S rRNA
  source 1..490: mol_type = genomic DNA
agagtttgatcatggctcaggatgaacgctagcggcaggcttaacacatgcaagtcgaggggcagcgcggggtagcaatactctggcggcgaccggcgaaagggtgagtaacgcgtgagcaacatgcccttgggtgggggatagtcattggaaacgatgcgtaataccccgtacgacgagagaccgcatgatttttcgttaatagatttattgcccaaggattggctcgcgtgccattagctagttggcggggtaacggcccaccaaggcgacgatggctaggggttctgagaggaaggtcccccacattggaactgagacacggtccagactcctacgggaggcagcagtgaggaatattggtcaatggccgagaggctgaaccagccatgccgcgtgcgggaggacggccctatgggttgtaaaccgcttttgttggggagcaataaggagcacgtgtgctttgatgagagtacccagcgaataagca

SEQ ID NO: 5290 - DNA, 490 bp, unidentified
  misc_feature 1..490: note = Ascusbbf_285223, encodes 16S rRNA
  source 1..490: mol_type = genomic DNA
agagtttgatcatggctcaggacgaacgctggcggcgtgcttaacacatgcaagtcgaacgaggcaagttccttcggggacttaccgagtggcggacgggtgagtaacgcgtgagcaatctgtcccggacagggggataacaactggaaacagttgctaataccgcataagaccacggagtcgcatggcactgaggtaaaaggatttatccggttcggggtgagttcgcgtctgattagatagttggcgaggtaacggctcaccaagtcgacgatcagtagccgacctgagagggtgaccggccacattgggactgagacacggcccagactcctacgggaggcagcagtggggaatattgggcaatgggggaaaccctgacccagcaacgccgcgtgagggaagaaggttttcggattgtaaacctctgtccttggggacgaagtaagtgacggtacccgaggaggaagccccggctaactacgtgcca

SEQ ID NO: 5291 - DNA, 490 bp, unidentified
  misc_feature 1..490: note = Ascusbbf_237948, encodes 16S rRNA
  source 1..490: mol_type = genomic DNA
agagtttgatcatggctcaggatgaacgctggcggcgtgcctaacacatgcaagtcgaacgaagcgcccggaacagaggattcgtccgaagggaagggatgactgagtggcggacgggtgagtaacgcgtggaaaacctgccccatgcagggggacaacagggagaaatccctgctaataccgcataagcgcacggcacggcatcgtgcagtgtgaaaagatttatcggcatgggatggttccgcgtccgattagccagctggcggggtaacggcccaccagggcagcgatcggtagccggcctgagagggcggacggccacattgggactgagacacggcccagactcctacgggaggcagcagtgggggatattgcacaatggggggaaccctgatgcagcgacgccgcgtgggtgaagaagtatttcggtatgtaaagccctatcggcagggaagatgatgacggtacctgactaagaagccccggc

SEQ ID NO: 5292 - DNA, 490 bp, unidentified
  misc_feature 1..490: note = Ascusbbf_1608739, encodes 16S rRNA
  source 1..490: mol_type = genomic DNA
agagtttgatcatggctcaggatgaacgctagctacaggcttaacacatgcaagtcgaggggcagcgctggggttgcttgcaacccctggcggcgaccggcggatgggtgagtaacgcgtatccaacctgccccgtgcccggggacagcccttagaaatgaggattaacccccgatggcgtgctcgcgccgcatggcgcttgcactaaaccggcacgggatggggatgcgttccattaggtcgcaggcggggtaacggcccacctggccgacgatggataggggttctgagaggaaggtcccccacactggtactgagacacggaccagactcctacgggaggcagcagtgaggaatattggtcaatgggcggaagcctgaaccagccaagtagcgtgcgggatgaaggccctacgggttgtaaaccgcttttgcgcggggataaaacgcgggacttgtcccgccttgcaggtaccgcgcgaataaggac

SEQ ID NO: 5293 - DNA, 490 bp, unidentified
  misc_feature 1..490: note = Ascusbbf_186025, encodes 16S rRNA
  source 1..490: mol_type = genomic DNA
agagtttgatcatggctcaggataaacgctggcggcgtgcataacacattcaagtcgaacgaagctccggaacttgcttgcaagggaaggaagacttagtggcggacgggtgagtaacgcgtgagcaacctgcctgcaggtgcgggataacgtttggaaacgaacgctaataccgcatgacgcatggagatcgcatggtcatcatgccaaagatatattgcctgcagatgggctcgcgtccgattagacagttggcggggtaacggcccaccaaatcagcgatcggtagccggactgagaggttgaacggccacattggaactgagatacggtccagactcctacgggaggcagcagtggggaatattgggcaatgggcgaaagcctgacccagcgacgccgcgtgagggaagaaggtcttcggattgtaaacctctttcagcagggaagaaggaagtgacggtacctgcagaagaagccacggctaact

SEQ ID NO: 5294 - DNA, 490 bp, unidentified
  misc_feature 1..490: note = Ascusbbf_425511, encodes 16S rRNA
  source 1..490: mol_type = genomic DNA
agagtttgatcctggctcaggatgaacgctagcggcaggcttaacacatgcaagtcgaggggcagcgaggatagcaatatctgtcggcgaccggcggaagggtgagtaacgcgtgagcaacattcccgcatcagggggatagtcactggaaacggtgcgtaataccccgtaagatgttgagaggcatctcttggcattgaaagatttatcggatgcggattggctcgcgtgccattaggtagacggcggggtaacggcccaccgtgccgacgatggctaggggttctgagaggaaggtcccccacattggaactgagacacggtccagactcctacgggaggcagcagtgaggaatattggacaatggccggaaggctgatccagccatgccgcgtgatggagtgaggccctatgggtcgtaaacatcttttctcggggggcaataagggccacgagctggtccgatgagagtacccggggaataagcat

SEQ ID NO: 5295 - DNA, 490 bp, unidentified
  misc_feature 1..490: note = Ascusbbf_399590, encodes 16S rRNA
  source 1..490: mol_type = genomic DNA
agagtttgatcatggctcaggataaacgctggcggcgtgcctaatacatgcaagttgaacggagagcttcggctcttagtagcgaacgggtgagtaacacgtaggcaacctgccctgttgactgggataacaagacgaaagacttgctaataccggatgataacgtatatcgcatgatatatggatgaaagttgggacacaacacaacaggatgggcctgcggcgcattagctagatggtgagatagcagcccaccatggtaatgatgcgtagccgatctgagaggatgtacggccacattggaactgagacacggtccagactcctacgggaggcagcagtagggaattttcggcaatggagggaactctgaccgagcaacgccgcgtgaacgaagaaggccttcgggtcgtaaagttttgttgtttaggatgaaagatgcctgtagggaatgacaggcaagtgacagtactagacgaggaagtcacgg

SEQ ID NO: 5296 - DNA, 490 bp, unidentified
  misc_feature 1..490: note = Ascusbbf_427611, encodes 16S rRNA
  source 1..490: mol_type = genomic DNA
agagtttgatcctggctcaggacgaacgctggcggcgcgcttaacacatgcaagtcgaacggacgaccccggaacagagattcgttgacgggaaggggaagttagtggcgaacgggtgagtaacacgtgaagaacctgcctcagagagggggataacacttagaaataggtgctaataccgcatatgaccacactaccgcatggtagagaggtgaaaggagcaatccgctctgagatggcttcgcgtccgattagctagatggcggggtaacggcccaccatggcgacgatcggtagccggactgagaggtcgatcggccacattgggactgagacacggcccagactcctacgggaggcagcagtggggaatattgcacaatggaggaaactctgatgcagcgacgccgcgtgagggaagaaggttttcggattgtaaacctctgtcctcggggacgaaaaaatgacggtactcggggaggaagccacg

SEQ ID NO: 5297 - DNA, 490 bp, unidentified
  misc_feature 1..490: note = Ascusbbf_438855, encodes 16S rRNA
  source 1..490: mol_type = genomic DNA
agagtttgatcctggctcaggataaacgctggcggcgcacataagacatgcaagtcgaacggacttaactcgaagtttactttgagagcggttagtggcggactggtgagtaacgcgtgagcaacctgcctatcagaggggaataacagtgagaaatcattgctaataccgcatatgctcacagtaacacatgttacagtgaggaaaggagcaatccgctgatagatgggctcgcgtctgattagctagttggtggggtaaaggcctaccaaggcgacgatcagtagccggactgagaggttgaacggccacattgggactgagatacggcccagactcctacgggaggcagcagtcgggaatattgcgcaatggaggaaactctgacgcagtgacgccgcgtatgggaagaaggttttcggattgtaaaccattgtcgttagggaagaaaaaaatgacagtacctaaggaggaagctccggctaactat

SEQ ID NO: 5298 - DNA, 490 bp, unidentified
  misc_feature 1..490: note = Ascusbbf_715972, encodes 16S rRNA
  source 1..490: mol_type = genomic DNA
agagtttgatcatggctcaggatgaacgctggcggtgtgcctaatacatgcaagtcgaacggagttgatgggagcttgctccttgatacttagtggcgaacgggtgagtaacacgtaggtaacctgccctttagcttgggatacccagaggaaactttggctaataccggataacaacaaccgaggcatctcggatgcttgaaaggcccttttgggtcactaaaggatggacctgcggcgcattagctagttggtgagataatagcccaccaaggcgaggatgcgtagccgaactgagaggttgatcggccacatggaaactgagacacggttccaactcctacgggaggcagcagtaaggagttttcggcaatgggggaaaccctgaccgagcaacaccgcgtgagtgatgacggccctatgggttgtaaagctctgttgtaggggaagaaatgtgagggtagtggaatgaccttcacttgacggtacc

SEQ ID NO: 5299 - DNA, 490 bp, unidentified
  misc_feature 1..490: note = Ascusbbf_1778922, encodes 16S rRNA
  source 1..490: mol_type = genomic DNA
agagtttgatcatggctcaggatgaacgctggcggcgtgcctaacacatgcaagtcgaacgaggctcttccctttgatgtttcgactgattagggaagatcaccgagtggcggatgggtgagtaacgcgtggagaacctgcccccatcagggggataacaactggaaacggttgataataccgcatatatgataggaccgcatgatcctatcaggaaagatttatcggatggggatggctccgcgttggattagttagttggtggggtaacggcctaccaagaccgcgatccatagccggcctgagagggcgaccggccacattgggactgagacacggcccagactcctacgggaggcagcagtggggaatattgcacaatgggcgcaagcctgatgcagcgacgccgcgtggagggggaagtatttcggtatgtaaactcctatcagcagggaagaaaatgacggtacctgactaagaagccccggct

SEQ ID NO: 5300 - DNA, 490 bp, unidentified
  misc_feature 1..490: note = Ascusbbf_1068486, encodes 16S rRNA
  source 1..490: mol_type = genomic DNA
agagtttgatcctggctcaggatgaacgctggcggcgtgcttaacacatgcaagtcgaacggagtattgacgctgcagagatttcggtcgaagcttgttaatacttagtggcggacgggtgagtaacgcgtgggtaacctgccgtatgcagggggacaacagttggaaacgactgctaataccgcataagcgcacggttttgcatgaaacagtgtgaaaagatttatcggcatacgatggacccgcgtttgattagctagttggtgaggtaacggcccaccaaggctacgatcaatagccggcctgagagggcaatcggccacattgggactgagacacggcccaaactcctacgggaggcagcagtggggaatattgcacaatgggggaaaccctgatgcagcgacgccgcgtgagtgaagaagtatttcggtatgtaaagctctatcagcagggaagatgatgacggtacctgactaagaagccccgg

SEQ ID NO: 5301 - DNA, 490 bp, unidentified
  misc_feature 1..490: note = Ascusbbf_734500, encodes 16S rRNA
  source 1..490: mol_type = genomic DNA
agagtttgatcctggctcaggatgaacgctggcggcgtgcttaacacatgcaagtcgaacgaagcgcttgaacagatctcttcggagtgacgttcttgtgacttagtggcggacgggtgagtaacgcgtgggtaacctgcccttatctgggggataacagttagaaatgactgctaataccgcataagcgcacactgaggcatctcagagtgtgaaaagatttatcggataaggatggacccgcgttagattagccggttggcggggtaacggcccaccaaagctacgatctatagccggcctgagagggcgaccggccacattgggactgagacacggcccaaactcctacgggaggcagcagtgaggaatattgcacaatgggggaaaccctgatgcagcgacgccgcgtgagtgatgaagtatttcggtatgtaaaactctatcagcagggaagaagaaggacggtacctgactaagaagccccggc

SEQ ID NO: 5302 - DNA, 490 bp, unidentified
  misc_feature 1..490: note = Ascusbbf_866920, encodes 16S rRNA
  source 1..490: mol_type = genomic DNA
agagtttgatcctggctcaggatgaacgctggcggcgtgcttaatacatgcaagtcgaacgagagagtttagatagcttgctatttgaatgatctagtggcgaacgggtgagtaatacataggcaatctaccctaaggactgggataacgattagaaatgatcgctaataccggataggtaataagaaggcatcttcatattattaaagttgggtttccaacaccataggatgagcttatgctgtattagcttgttggcgggataacagcccaccaaggcgatgatacatagctggtctgagaggatgaacagccacattgggactgagacacggcccagactcctacgggaggcagcagtaaggaattttcggcaatgggcgaaagcctgaccgagcaacgccgcgtgagtgatgaaggttttcggatcgtaaagctctgttgtaaaggaagaatattatatataggaaatgatatataagtgacggta

SEQ ID NO: 5303 - DNA, 490 bp, unidentified
  misc_feature 1..490: note = Ascusbbf_4999, encodes 16S rRNA
  source 1..490: mol_type = genomic DNA
agagtttgatcatggctcagattgaacgctggcggcaggcttaatacatgcaagtcgaacggtagcagcaggaaagcttgcttttctggctgacgagtggcggacgggtgagtaatacctgggaaactgcctataagagggggataacacctggaaacgggtgctaataccgcataaaccctgaggggaaaaggatgggaaaccatgcgcttatagatgtgcccaggagggattagctagttggggaggtaaaggctcaccaaggcgacgatctctagctggtctgagaggatgatcagccacattgggactgggacacggcccaaactcctacgggaggcagcagtagggaatattgcacaatgggggaaaccctgatgcagccatgccgcgtgtgtgaagaaggccttcgggttgtaaagcactttcagcggggaggaagctgaagttcgaacagggcagaaagcagacgttacccgcagaagaagcg

SEQ ID NO: 5304 - DNA, 490 bp, unidentified
  misc_feature 1..490: note = Ascusbbf_34298, encodes 16S rRNA
  source 1..490: mol_type = genomic DNA
agagtttgatcatggctcaggatgaacgctggcggcgtgcctaatacatgcaagtcgaacgggtgcagcaatgcattagtggcgaacgggtgagtaacacgttggtgacctgccccaaagatgggaatatcacctggaaacgggtggcaaaaccgaataagcttgaccgagttagagaaagtcaagtaaaagagagatctactttgggaggggcctgcggcccatcagttagttggtgagggtaacggcccaccaagacgaagacgggtaggggacctgagagggtggtcccccacaatggaactgaaacacggtccatacacctgcgggtggcagcagtagggaatattgcttaatgggcgaaagcctgaagcagcaacgccgcgtggatgaagaaggccttcgggtcgtaaaatccttttacaggggacgaggaaggacggtaccctgtgaataagtctcggctaactacgtgccagcagccgcggta

SEQ ID NO: 5305 - DNA, 490 bp, unidentified
  misc_feature 1..490: note = Ascusbbf_30981, encodes 16S rRNA
  source 1..490: mol_type = genomic DNA
agagtttgatcctggctcaggatgaacgctagcggcaggcctaacacatgcaagtcgaggggtagaggggagcttgctctccttgagaccggcggacgggtgagtagcgcgtatggaatctgccttgtacaggggaatagcccagggaaacttggattaatgccccatagtgttgaggggcggcattgttcttcaactaaagatttatcggtacaagatgaccatgcgtcccattagcttgttggtgtggtaacggcacaccaaggctacgatgggtaggggccctgagagggggatcccccacactggtactgagacacggaccagactcctacgggaggcagcagtgaggaatattggacaatgggcgagagcctgatccagccatgccgcgtgcaggaagactgccctatgggttgtaaactgcttttatacgggaagaaacactccgacgtgtcggggcttgacggtaccgtatgaataaggatcg

SEQ ID NO: 5306 - DNA, 490 bp, unidentified
  misc_feature 1..490: note = Ascusbbf_24303, encodes 16S rRNA
  source 1..490: mol_type = genomic DNA
agagtttgatcatggctcaggacgaacgctggcggcgtgcctaatacatgcaagtcgagcggaccttagcgatcttcggatcgctcttggttagcggcggacgggtgagtaacacgtaggcaacctgcccgtaagaccgggataactaccggaaacggtagctaataccggataatttatcgcttcgcatggagtgataatgaaagacggagcaatctgtcacttacggatgggcctgcggcgcattagctagttggtgaggtaacggctcaccaaggcgacgatgcgtagccgacctgagagggtgaacggccacactgggactgagacacggcccagactcctacgggaggcagcagtagggaatcttccgcaatgggcgaaagcctgacggagcaacgccgcgtgagtgatgaaggttttcggatcgtaaagctctgttgccagggaagaacgtcgggtagagtaactgctacccgagtgacggtac

SEQ ID NO: 5307 - DNA, 490 bp, unidentified
  misc_feature 1..490: note = Ascusbbf_7496, encodes 16S rRNA
  source 1..490: mol_type = genomic DNA
agagtttgatcatggctcagattgaacgctagcgggatgccttacacatgcaagtcgaacggcagcgcgggcttcggcctggcggcgagtggcgaacgggtgagtaatgcatcggaacgtgcccagtagtgggggataaccacgcgaaagcgtggctaataccgcatacgcccttagggggaaagggggggatccttcgggacctctcgctattggagcggccgatgtcggattagctagttggtggggtaaaggcctaccaaggcgacgatccgtagctggtttgagaggacgaccagccacactgggactgagacacggcccagactcctacgggaggcagcagtggggaattttggacaatgggggaaaccctgatccagccatcccgcgtgtgcgatgaaggccttcgggttgtaaagcacttttggcaggaaagaaataggcctggctaatacctgggctgaatgacggtacctgcagaataagc

SEQ ID NO: 5308 - DNA, 488 bp, unidentified
  misc_feature 1..488: note = Ascusbbf_740, encodes 16S rRNA
  source 1..488: mol_type = genomic DNA
agagtttgatcctggctcagaacgaacgctggcggcaggcttaacacatgcaagttgagcgggattgattggtagcttgctactgatcatgagagcagcgcactggtgagtaacacgtgggaacataccttttggtgggggacaacagagggaaacttctgctaataccgcataagccctgagggggaaagatttattgccgaaagattggcccgcggaagattaggtagttggtggggtaacggcctaccaagcccgcgatctatagctggtctgagaggacgatcagccacattgggactgagacacggcccagactcctacgggaggcagcagtgaggaatattgggcaatggaggaaactctgacccagccatgccgcgtgagtgaagaaggttttcggattgtaaagctctttcggacgtgaagatgatgacggtagcgtctaaagaagccccggctaacttcgtgccagcagccgcggtaat

SEQ ID NO: 5309 - DNA, 490 bp, unidentified
  misc_feature 1..490: note = Ascusbbf_66340, encodes 16S rRNA
  source 1..490: mol_type = genomic DNA
agagtttgatcctggctcaggatgaacgctagcgggaggcttaacacatgcaagccgagggagaagttgttttcggacaacggacaccggcggacgggtgagtaacatgtatgcaacttgcctctatcagtgggataacccggggaaacccggactaataccgcataacaaatggatcagcattgatttattttaaaagatttatcggatagagataggcatgcgtaggattagttagttggtgaggtaacggctcaccaagacgatgatccttagggggcctgagagggtgatcccccacactggtactgagacacggaccagactcctacgggaggcagcagtgaggaatattggacaatgggtgagagcctgatccagccatcccgcgtgcaggaagacggccctatgggttgtaaactgcttttatacaggaataaacctactcacgtgtgagtagttgaaggtactgtaagaataagcatcggct

SEQ ID NO: 5310 - DNA, 490 bp, unidentified
  misc_feature 1..490: note = Ascusbbf_12995, encodes 16S rRNA
  source 1..490: mol_type = genomic DNA
agagtttgatcctggctcaggatgaacgctagcggcaggcttaacacatgcaagtcgaggggcatcgcggagtagcaatactctggcggcgaccggcgaaagggtgagtaacgcgtgagcaacatgcccgcatctgggggatagtcgatggaaacgtcgcgtaataccccgtaacaacagaggccgcatgacctttgtttaagagattcattgaatgcggattggctcgcgtgccattagatagttggtgaggtaacggcccaccaagtcgacgatggctaggggttctgagaggaaggtcccccacattggaactgagacacggtccagactcctacgggaggcagcagtgaggaatattggacaatggccgagaggctgatccagccatgccgcgtgcgggatgaaggccctatgggtcgtaaaccgcttttgtcggggagcaataagtgttacgtgtaacacgatgagagtacctggcgaataagca

SEQ ID NO: 5311 - DNA, 489 bp, unidentified
  misc_feature 1..489: note = Ascusbbf_488214, encodes 16S rRNA
  source 1..489: mol_type = genomic DNA
agagtttgatcctggctcaggatgaacgctggcggcgtgcctaacacatgcaagtcgagcgatttacttttgtaaagagcggcggacgggtgagtaacgcgtgggtaacctgccctgtacacacggataacataccgaaaggtatgctaatacgagatgatatacttttatcacatggtggaagtatcaaagcttttgcggtacaggatggacccgcgtctgattagctagttggtaaggtaacggcttaccaaggcgacgatcagtagccgacctgagagggtgatcggccacattggaactgagacacggtccaaactcctacgggaggcagcagtggggaatattgcacaatgggcgaaagcctgatgcagcaacgccgcgtgagcgatgaaggccttcgggtcgtaaagctctgtcctcaaggaagataatgacggtacttgaggaggaagccccggctaactacgtgccagcagccgcggtaat

SEQ ID NO: 5312 - DNA, 490 bp, unidentified
  misc_feature 1..490: note = Ascusbbf_31955, encodes 16S rRNA
  source 1..490: mol_type = genomic DNA
agagtttgatcatggctcaggataaacgctggcaccatgcctaatacatgcatgtcgtacgagagtccttcgggactcgagtggcaaatgggtgagtaacacgtaaggaacttcccctagcgacgaggataacggttggaaacgactgctaatactggatagtacatcggaccgcatgatctgatgtttaaaggcccgtttgggtcacgctaggatggccttgcggcgcattagatagttggtgaggtaacggcccaccaagtctatgatgcgtagctgcactgagaggtgaaacagccacattgggactgagacacggcccaaactcctacgggaggcagcagtagggaattttcggcaatgagcgaaagcttgaccgagcaatggtgcgtgagcgatgaaggtctttggattgtaaagctcttttattggggaagaaaaactcgattaggaaatgaatcgaaattgacggtacccattgaataagccc

SEQ ID NO: 5313 - DNA, 490 bp, unidentified
  misc_feature 1..490: note = Ascusbbf_13629, encodes 16S rRNA
  source 1..490: mol_type = genomic DNA
agagtttgatcatggctcaggacgaacgctggcggcgtgcctaacacatgcaagtcgaacggagttgaaaggagcttgcttttttcaactcagtggcggacgggtgagtaacgcgtgagtaacctgcctttcagagggggataacgttctgaaaagaacgctaataccgcataagattgtagtttcgcatgggacagcaatcaaaggagcaatccgctgaaagatggactcgcgtccgattagatagttggcggggtaacggcccaccaagtcgacgatcggtagccggactgagaggttgatcggccacattgggactgagacacggcccagactcctacgggaggcagcagtgagggatattgggcaatgggggaaaccctgacccagcaacgccgcgtgagggatgacggttttcggattgtaaacctctgtcctctgtgaagatagtgacggtagcagaggaggaagctccggctaactacgtgcc

SEQ ID NO: 5314 - DNA, 490 bp, unidentified
  misc_feature 1..490: note = Ascusbbf_5034, encodes 16S rRNA
  source 1..490: mol_type = genomic DNA
agagtttgatcatggctcaggacgaacgctggcggcgtgcctaacacatgcaagtcgaacggactgattcccttcggggatgaaagttagtggcggacgggtgagtaacgcgtgagtaacctgcctttcagagggggataacgtttggaaacgaacgctaataccgcataacatatcggtaccgcatgatactgatatcaaaggagcaatccgctgaaagatggactcgcgtctgattagatagttggcggggtaacggcccaccaagtcgacgatcagtagccggactgagaggttgaacggccacattgggactgagacacggcccagactcctacgggaggcagcagtgagggatattgcacaatgggcgcaagcctgatgcagcaacgccgcgtgaaggatgacggttttcggattgtaaacttctgttctcagtgatgataatgacattagctgaggagaaagccacggctaactacgtgccagc

SEQ ID NO: 5315 - DNA, 490 bp, unidentified
  misc_feature 1..490: note = Ascusbbf_16329, encodes 16S rRNA
  source 1..490: mol_type = genomic DNA
agagtttgatcatggctcaggatgaacgctggcggcgtgcctaatacatgcaagtcgaacgagagcgaccagcttgctggtcaatcgagtggcgaacgggtgagtaacacataaacaatctgccctgaagactgggataacgtagggaaacccacgctaataccggataggcagtgagggggcatcctcttactgttaaagctgggctacagcactgcaggatgagtttatgtcgcattagttagttggtgaggtaacggcccaccaagacgatgatgcgtagccggtctgagaggatgaacggccacattgggactgagacacggcccagactcctacgggaggcagcagtagggaattttcggcaatgggggaaaccctgaccgagcaacgccgcgtgaacgatgaaggtttttggatcgcagagttctgttgtaagggaagaaagctacggatagggaatgatctgtagttgacggtaccttaccag

SEQ ID NO: 5316 - DNA, 490 bp, unidentified
  misc_feature 1..490: note = Ascusbbf_496686, encodes 16S rRNA
  source 1..490: mol_type = genomic DNA
agagtttgatcctggctcaggacgaacgctggcggcatgcctaacacatgcaagtcgaacggaataagaatggctgtagcgatactttcgttcttatttagtggcgaacgggtgagtaacacgtgagcaacctgccttctactcagggataacagccggaaacggctgctaataccagataagaccacgccgaggcatctcggaggggtcaaagcgttttagcggtagaagatgggctcgcgtcccattagctagttggtgagataacagcccaccaaggcgacgatgggtagccgacttgagagagtgatcggccacattggaactgagacacggtccagactccttcgggaggcagcagtggggaatattgggcaatggaggaaactcttacccagcaatgccgcgtgaatgaagaaggccttcgggctgtaaagttcttttattgatgataaagaaagtgatattagtcaatgaataagccccggct

SEQ ID NO: 5317 - DNA, 490 bp, unidentified
  misc_feature 1..490: note = Ascusbbf_53115, encodes 16S rRNA
  source 1..490: mol_type = genomic DNA
agagtttgatcatggctcaggacgaacgctggcggcgtgcctaacacatgcaagtcgaacgaggtccgatcggtggcaacaccgtgaaatacctagtggcgaacgggtgagtaacacgtgaggaacctgccccgaagaccgggataactctccgaaaggagtgctaataccggatacccccacctaatcgcatgatctggtgaggaaatggattccgcttcgggagggcctcgcggcctatcagcttgttggtgaggtaacggctcaccaaggcatcgacgggtagctggtctgagaggacgatcagccacactgggactgagacacggcccagactcctacgggaggcagcagtggggaatcttgcgcaatgggcgaaagcctgacgcagcaacgccgcgtgggggatgaaggctctcgggttgtaaacccctttcagcaggaacgaatcaagacggtacctgcagaagaagccccggctaactacgtg

SEQ ID NO: 5318 - DNA, 490 bp, unidentified
  misc_feature 1..490: note = Ascusbbf_84611, encodes 16S rRNA
  source 1..490: mol_type = genomic DNA
agagtttgatcatggctcaggatgaacgctagcggcaggcctaatacatgcaagtcgaacgagattatccagcttgctggatatgaaagtggcgcacgggtgcgtaacgcgtgagcaacctacccttgtcagggggatagcccggcgaaagtcggattaataccgcataacatcacgagatggcatcattttgtgatcaaatatttataggacaaggatgggctcgcgtgacattagttagttggtaaggtaacggcttaccaaggctacgatgtctaggggctctgagaggagaatcccccacactggtactgagacacggaccagactcctacgggaggcagcagtaaggaatattggtcaatggacgcaagtctgaaccagccatgccgcgtgcaggaagacggccctctgggttgtaaactgcttttgtacgggaacaaacccctttacgtgtaaagggctgagtgtaccgtaagaataaggatcg

SEQ ID NO: 5319 - DNA, 490 bp, unidentified
  misc_feature 1..490: note = Ascusbbf_1800207, encodes 16S rRNA
  source 1..490: mol_type = genomic DNA
agagtttgatcctggctcaggacgaacgctggcggcgtgcttaacacatgcaagtggagcgacgaaccagggcttgccctggggcaaagccgcgaacgggtgagtaacacgtgagtaatctgccccgataaccgggacaacccgaggaaactcgggctaataccggatgtggcgtacaggcataagcctgtccgttaaaggtagcttcggcttctgtatcgggaggggctcgcggcccattagcttgttggtggggtaaaggcctaccaaggcaacgatgggtagctggtctgagaggacgatcagccacactgggactgagacacggcccagactcctacgggaggcagcagtggggaatcttgcgcaatgcgcgaaagcgtgacgcagcaacgccgcgtgagggaagacggccttcgggttgtaaacctctttcaggagggacgaaggttcaccggtgaatagccgtgtggattgacggtacctccag

SEQ ID NO: 5320 - DNA, 490 bp, unidentified
  misc_feature 1..490: note = Ascusbbf_644267, encodes 16S rRNA
  source 1..490: mol_type = genomic DNA
agagtttgatcatggctcagattgaacgctggcggcgtgcctaacacatgcaagtcgaacgttagagcatagcaatatgctcaaaagtggcgaacgggtgagtaacacgtgggtaacctgccgcgcagagggggataacgactggaaacggtcgctaataccgcatagtaccaagaggaatggtctccttttggttaaaactttggtgctgcgcgaggggcctgcgcccgattagctagttggtgaggtaaaggctcaccaaggcgatgatcggtagctagtctgagaggatgattagccacacgggaactgagacacggtcccgactcctacggggggcagcagtgaggaatattgcacaatggacgaaagtctgatgcagcaacgccgcgtggaggatgacggcccttgggttgtaaactccttttttcagggaagagaatggacggtacctgaagaataagtcacggctaactacgtgccagcagcc

SEQ ID NO: 5321 - DNA, 261 bp, unidentified
  misc_feature 1..261: note = Ascusbbf_1042016, encodes 16S rRNA
  source 1..261: mol_type = genomic DNA
agagtttgatcctggctcaggatgaacgctagctacaggcttaacacatgcaagtcgaggggcatcaggtactgtgcttgcacggtatgctggcgaccggcgcacgggtgagtaacgcgtatccaaccttcccatgactccggttcagcccgccgaaaggcggattactcccggatggtttccgaagagggcctctgatttggaataaagatttatcggtcatggatggggatgcgtctgattagccagcagccgcggaat

SEQ ID NO: 5322 - DNA, 490 bp, unidentified
  misc_feature 1..490: note = Ascusbbf_7357, encodes 16S rRNA
  source 1..490: mol_type = genomic DNA
agagtttgatcatggctcaggacgaacgctggcggcgtgcctaacacatgcaagtcgaacggagttattttgaatgaaaatttcggttggattttaaagtgacttagtggcggacgggtgagtaacgcgtgagtaacctgcctagaagagggggataacgttctgaaaagaacgctaataccgcataatatatcgaagccgcatgactttgatatcaaaggagcaatccgcttttagatggactcgcgtccgattagcttgttggcggggtaacagcccaccaaggcgacgatcggtagccggactgagaggttgaacggccacattgggactgagacacggcccagactcctacgggaggcagcagtgggggatattgcgcaatgggggaaaccctgacgcagcaacgccgcgtgaaggacgaaggtcttcggattgtaaacttcttttgttaaggacgaagaaagtgacggtacttaacgaataagct

SEQ ID NO: 5323 - DNA, 490 bp, unidentified
  misc_feature 1..490: note = Ascusbbf_1774766, encodes 16S rRNA
  source 1..490: mol_type = genomic DNA
agagtttgatcctggctcaggatgaatgctggcggcgtgcctaatacatgcaagtcgagcggtaacagggagtctcaccgtttccttgacacacctagcgctttattcgtaggttgttgatctcgagggaacagtgagaccctgctgacgagcggcggacggctgagtaacgcgtgggaacggaccccaaactgagggataactagtcgaaagattaactaataccgcatatgctcttcggagtaaagctttcgggcggtttgggactggcctgcgtacgattagatagttggcggggtaatggcccaccaagtcgacgatcgttagatggtttgagaagatgaccatccagactgggactgagacacggcccagactcctacgggaggcagcagtagggaatctttcacaatgggcgaaagcctgatggagcaacgccgcgtgcaggatgacggccttcgggttgtaaactgcttttataagcgagaaa

SEQ ID NO: 5324 - DNA, 490 bp, unidentified
  misc_feature 1..490: note = Ascusbbf_1365, encodes 16S rRNA
  source 1..490: mol_type = genomic DNA
agagtttgatcctggctcaggatgaacgctggcggcatgcctaatacatgcaagtcgaacggagaaggaaggtgcttgcatcttccggatcagtggcgaacgggtgagtaacacgtaggtaacctgcccatgtacccgggacaacggttggaaacgactgctaaaaccggataggcatatggaaggcatcttcgatatgttaaaggggccacggccctggacatggatggacctgcggtgcattagccagttggtgaggtaacggcccaccaaggcgacgatgcatagccgacctgagagggcgaacggccacattgggactgagacacggcccaaactcctacgggaggcagcagtagggaattttcgtcaatggggggaaccctgaacgagcaatgccgcgtgagtgaagacggtcttcggattgtaaagctctgttgcgagagaaaaaggacaggaagagggaatgcttccggtttgatggtatctc

SEQ ID NO: 5325 - DNA, 490 bp, unidentified
  misc_feature 1..490: note = Ascusbbf_11678, encodes 16S rRNA
  source 1..490: mol_type = genomic DNA
agagtttgatcctggctcagaatgaacgttggtggcgtggattaggcatgcaagtcgtgcgcgaaagtcccttcggggactggagagcggcgaacggggtagtaatgcgtcggaacgtacccttgggtctgggataaccgcgggaaactgcgggtaataccggatgacctctttggagcaaaggtgagactccgcccgaggagcggccgacgtgataccagctagttggtgaggtaatggctcaccaaggctcagacgtctagggggtgtgagagcatggcccccaccactgggactgagacactgcccagacacctacgggtggctgcagtcgagaatcttcggcaatgggcgaaagcctgaccgagcgacgccacgtgcgggatgacggccctcgggttgtaaaccgctgtcgagggggatgaagtcattgggagctatctcccgatgttgacagagccctggaggaagcgcgggctaagtacgtgcc

SEQ ID NO: 5326 - DNA, 490 bp, unidentified
  misc_feature 1..490: note = Ascusbbf_49371, encodes 16S rRNA
  source 1..490: mol_type = genomic DNA
agagtttgatcctggctcaggacgaacgctggcggcgtgcctaacacatgcaagtcgaacggactgattcgcttcggtgatgaaagttagtggcggacgggtgagtaacgcgtgagtaacctgccttacagagggggataacgtttggaaacgaacgctaataccgcatgacacatcgttgtcgcatggcagtgatgtcaaaggagtaacatccgctgtaagatggactcgcgtccgattagatagttggcggggtaacggcccaccaagtcgacgatcggtagccggactgagaggttgaacggccacattgggactgagacacggcccagactcctacgggaggcagcagtgagggatattgcacaatgggcgaaagcctgatgcagcaacgccgcgtgagggatgacggttttcggattgtaaacctctgttctcagtgaagataatgacattagctgaggagaaagccacggctaactacgtgcca

SEQ ID NO: 5327 - DNA, 490 bp, unidentified
  misc_feature 1..490: note = Ascusbbf_22247, encodes 16S rRNA
  source 1..490: mol_type = genomic DNA
agagtttgatcctggctcaggacgaacgctggcggcgtgcttaacacatgcaagtcgaacgaagcttgattaacgatttcttcggaatgaattatgatatgactgagtggcggacgggtgagtaacgcgtgagtaacctgcccttcggagggggatagtgtttggaaacgaacagtaataccgcataatgtgcattaggggcatccctgatgtaccaaagatttatcgccgaaggatggactcgcgtctgattagatagttggtgaggtaacggctcaccaagtcgacgatcagtagccggactgagaggttgaacggccacattgggactgagacacggcccagactcctacgggaggcagcagtggggaatattgcacaatgggggaaaccctgatgcagcaacgccgcgtggaggaagacggttttcggattgtaaactcctgttcttagggaagaagaaagtgacggtacctaaggagcaagccac

SEQ ID NO: 5328 - DNA, 490 bp, unidentified
  misc_feature 1..490: note = Ascusbbf_157437, encodes 16S rRNA
  source 1..490: mol_type = genomic DNA
agagtttgatcatggctcaggataaacgctagcggcaggcctaacacatgcaagtcgagcggcagcgggagtggcaacacttgccggcgagcggcggacgggtgagtaacgcgtatgcaacctgcccaccacacggagatagccgaccgaaaggacgattaaactccgatggcattgggactcggcatcgggatccaattaaatattcataggtggtggatgggcatgcgtggcattagttagttggcggggcaacggcccaccaagacggtgatgcctatgggttctaaaaggaagatcccacacatcggtactgagacacggaccgaactcctacgggaggcagcagtgaggaatattggacaatgggggcaaccctgatccagccaaaccgcgtgggggaaggaggtcgttaagatcgtaaaccccttttatatgggagcaatccgccctatgcatagggcgttgagagtaccatttgaataagcat

SEQ ID NO: 5329 - DNA, 490 bp, unidentified
  misc_feature 1..490: note = Ascusbbf_719881, encodes 16S rRNA
  source 1..490: mol_type = genomic DNA
agagtttgatcatggctcaggatgaacgctggcggcgtgcataacacattcaagtcgaacggtgaagtaccttcgggtacggagcagtggcggacgggtgagtaacgcgtgagcaacctgccatacagtgggggataacacagggaaacttgtgctaataccgcatgacacattgggaccgcatgattctgatgtcaaagatttattgctgtatgatgggctcgcgtatgattagacagttggcagggtaacggcctaccaaatcaacgatcattagccgaactgagaagttgaacggccacattggaactgagaaacggtccagactcctacgggaggcagcagtggggaatattgggcaatgggcgaaagcctgacccagcgacgccgcgtgagggaagaaggtcttcggattgtaaacctttttcagcagggaagaagtcagtgacggtacctgcagaagaagccacggctaactacgtgccagcag

SEQ ID NO: 5330 - DNA, 490 bp, unidentified
  misc_feature 1..490: note = Ascusbbf_149127, encodes 16S rRNA
  source 1..490: mol_type = genomic DNA
agagtttgatcctggctcaggataaacgctggcggcgcacataagacatgcaagtcgaacggaagtcgttataatgattttgatttagatttgaagattcgtctgatatgaagaagatgatgacttataacaatggctttagtggcggactggtgagtaacgcgtaagcaatctgcctattagaggggaataacagtgagaaatcattgctaataccgcatatgccatagttatcgcatgataatagtgggaaaggagtaatccgctaatagatgagcttgcgtctgattagctagttggtggggtaacggcctaccaaggcgacgatcagtagccggactgagaggttgaacggccacattgggactgagatacggcccagactcctacgggaggcagcagtcgggaatattgcgcaatggaggaaactctgacgcagtgacgccgcgtataggatgaaggttttcggattgtaaactattgtcgttag

SEQ ID NO: 5331 - DNA, 490 bp, unidentified
  misc_feature 1..490: note = Ascusbbf_335572, encodes 16S rRNA
  source 1..490: mol_type = genomic DNA
agagtttgatcctggctcaggatgaacgctggcggcgtgcctaacacatgcaagtcgaacggagaggtgatgtgtgcggttgaattgcttgcaaggagaccaaacttttcactttcttagtggcggacgggtgagtaacgcgtggacaacctgccttaatccgggggatagcagctggaaacggctgataataccgcataagcgcacagcacggcatcgtggagtgtgaaaagatttatcgggttaagatggatccgcgtctgattagccagttggcggggtaacggcccaccaaagcgacgatcagtagccggcctgagagggcggacggccacattgggactgagacacggcccagactcctacgggaggcagcagtgggggatattgcacaatgggcgcaagcctgatgcagcgacgccgcgtgagtgaagaagtatttcggtatgtaaagctctatcagcagggaagaaaggcccgcaagggagat

SEQ ID NO: 5332 - DNA, 490 bp, unidentified
  misc_feature 1..490: note = Ascusbbf_33157, encodes 16S rRNA
  source 1..490: mol_type = genomic DNA
agagtttgatcatggctcaggatgaacgctagctacaggcttaacacatgcaagtcgagcgggactctttcgggagtctagcggcagacgggtgagtaacacgtatccaacctttcccttactcgggtatagcctcgggaaactgagagtaatccccgatgtggtgcacgaacagcattatttgcgcacgaaagatttatcggtaaggggtggggatgcgttccattaggtagtaggcggggcaacggcccacctagccgatgatggataggggttctgagaggaaggtcccccacattggaactgcgacacggtccaaactcctacgggaggcagcagtgaggaatattggtcaatggccggaaggctgaaccagccaagtagcgtgcaggatgacggccctatgggttgtaaactgcttttatgcgggaataacgttcgccacgtgtggtgaagtgcatgtaccgcatgaataaggatcggctaactc

SEQ ID NO: 5333 - DNA, 490 bp, unidentified
  misc_feature 1..490: note = Ascusbbf_1467466, encodes 16S rRNA
  source 1..490: mol_type = genomic DNA
agagtttgatcctggctcaggatgaacgctggcggcgtgcctaatacatgcaagtcgaacgagggtgcttgcaccctagtggcgaacgggtgagtaacacgtaggtaacctgcccttaagcttgggatacccagaggaaactttggctaataccggataacaacagatgaggcatctcaactgtttgaaaggccctttcgggtcacttaaggatggacctgcggcgcattagctagttggtgagataacagcccaccaaggcaaggatgcgtagccgaactgagaggttgatcggccacattggaactgagacacggtccaaactcctacgggaggcagcagtaaggagttttcggcaatgggggaaaccctgaccgagcaacgccgcgtgagtgatgacggccctatgggttgtaaagctcttttattagagacgaatggtaggtataggaaatgatatctacttgactgtatcttttgaataagccac

SEQ ID NO: 5334 - DNA, 490 bp, unidentified
  misc_feature 1..490: note = Ascusbbf_184755, encodes 16S rRNA
  source 1..490: mol_type = genomic DNA
agagtttgatcatggctcaggacgaacgctggcggcgtgcttaacacatgcaagtcgagcggggacattgttggaagggtttcggcctggaagggaatgtttcagcggcggacgggtgagtaacgcgtgaacaatctgtcccggacagggggataacagatggaaacatctgctaataccgcataagaccacgacccggcatcgggttgaggtaaaaggaggaatccggttcggggtgagttcgcgtccgattagctagttggcgaggtaacggcccaccaaggcgacgatcggtagccgacctgagagggtgatcggccacattggaactgagagacggtccaaactcctacgggaggcagcagtgggaatattgggcaatgggcgaaagcctgacccagcaacgccgcgtgagggaagaaggttttcggattgtaaacctctatcgtggacgacgaaggaagtgacggtagtccacaaggaagccccg

SEQ ID NO: 5335 - DNA, 490 bp, unidentified
  misc_feature 1..490: note = Ascusbbf_477518, encodes 16S rRNA
  source 1..490: mol_type = genomic DNA
agagtttgatcctggctcaggacgaacgctggcggcgtgcttaacacatgcaagtcgaacggggcgattgaaagcttgcttttatgagcctagtggcaaacgggtgagtaacgcgtgggcaacctaccggaaagatggggacaacatcccgaaaggggtgctaataccgaatgttgtacgagaggcgcatgcttctcgtattaaaggattttatccgctttccgatgggcccgcgtccgattagctagttgggggggcaacggcccaccaaggcgacgatcggtagccggcctgagagggtgaacggccacattgggactgagacacggcccagactcctacgggaggcagcagtggggaatcttccgcaatgggcgaaagcctgacggagcaacgccgcgtgagtgaagaaggccttcgggccgtaaagctctgttgccggggaagagtgatgcgaggggactcgcatagggacggtacccggcgagga

SEQ ID NO: 5336 - DNA, 490 bp, unidentified
  misc_feature 1..490: note = Ascusbbf_42043, encodes 16S rRNA
  source 1..490: mol_type = genomic DNA
agagtttgatcatggctcaggacgaacgctggcggcgtgcctaacacatgcaagtcgagcggagacagacggaaagcttgctttttgtctgtttcagcggcggacgggtgagtaacgcgtgagcaacctgcctttaacaggggaataacgcatcgaaagatgtgctaataccgcataagaccacagcatcacatggtgcaggggtcaaaggagcaatccggttaaagatgggctcgcgtccgattagctggttggtgagacaacagcccaccaaggcgacgatcggtagccgacctgagagggtgatcggccacattggaactgagatacggtccagactcctacgggaggcagcagtgggaatattgggcaatgggcgaaagcctgacccagcaacgccgcgtgagggaagaagggtttcggctcgtaaacctctgtcctatgggacgaaggaagtgacggtaccataggaggaagccccggctaacta

SEQ ID NO: 5337 - DNA, 490 bp, unidentified
  misc_feature 1..490: note = Ascusbbf_3711, encodes 16S rRNA
  source 1..490: mol_type = genomic DNA
agagtttgatcatggctcaggatgaacgctggcggtgtgcctaatacatgcaagtcgatcgggcgtagcaatacgtcagaggcgtacgggtgagtaacacgtaggtaacctacctttaagactgggatacccagacgaaagtttggctaataccggataacaacatttgagacatctcttttgtttgaaaggcgctgcaaggcgccacttttagatggacctgcgtcgcattagctagttggtgagataaaagcccaccaaggctgggatgcgtagccgatctgagaggatgaccggccacaatgggactgagacacggcccatactcctacgggaggcagcagtagggagttttcggcaatgggggaaaccctgaccgagcaacaccgcgtgagtgatgaaggtcttcggatcgtaaagctctgttacgagggacgaatgatcgctttaggaaatgagagcggtttgacggtacctcgccagaaagcga

SEQ ID NO: 5338 - DNA, 490 bp, unidentified
  misc_feature 1..490: note = Ascusbbf_94610, encodes 16S rRNA
  source 1..490: mol_type = genomic DNA
agagtttgatcctggctcaggatgaacgctagcggcaggcctaatacatgcaagtcggacgggatttaagctaaagcttgctttagcttaatgagagtggcgcacgggtgcgtaacgcgtgagcaacctacctccatcagggggatagcctctcgaaagagagattaacaccgcataatatcaacagttcgcatgttcagttgattaaatatttataggatggagatgggctcgcgtgacattagctagttggtagggtaacggcttaccaaggcgacgatgtctaggggctctgagaggagaatcccccacactggtactgagacacggaccagactcctacgggaggcagcagtaaggaatattggtcaatgggcggaagcctgaaccagccatgccgcgtgcaggatgactgccctatgggttgtaaactgcttttgtccgggaataaacctccttacgtgtagggagctgaatgtaccggaagaat

SEQ ID NO: 5339 - DNA, 490 bp, unidentified
  misc_feature 1..490: note = Ascusbbf_251885, encodes 16S rRNA
  source 1..490: mol_type = genomic DNA
agagtttgatcatggctcagattgaacgctggcggcatgctttacacatgcaagtcgaacggcagcacgggagcttgctcctggtggcgagtggcgaacgggtgagtacaacatcggaacgtgaccgtttgtgggggacaaccacccgaaagggtggctaataccgcatgagacctgagggtgaaagccggggaccgcaaggcctggcgcgaacggagcggccgatgactgattagctggttggcggggtaagagcccaccaaggcgacgatcagtagctggtctgagaggacgaccagccacactggaactgagacacggtccagactcctacgggaggcagcagtggggaattttggacaatgggggaaaccctgatccagccatgccgcgtgcgggatgaaggccttcgggttgtaaaccgcttttgtcggggacgaaaagggagagtttaagagacacttctgctgacggtacccgaagaataagc

SEQ ID NO: 5340 - DNA, 490 bp, unidentified
  misc_feature 1..490: note = Ascusbbf_1492526, encodes 16S rRNA
  source 1..490: mol_type = genomic DNA
agatttgatcctggctcaggacgaacgctggcggcatgcttcatacatgcaagtcgaacgataaggtctcttcggagatacataagtggcggacgggtgagtaatatgtagaaaatctgccttagagagggggacaacagagggaaacttttgctaataccccatatgagcgtacctgaaatggtattcttgaaaactccggtgctctaagatgagcctgcatctgattagctagttggtggtgtaatggactaccaaggcgacgatcagtagctggtttgagaggatgatcagccacaatgggactgagacacggcccatactcctacgggaggcagcagtagggaattttgcgcaatgggcgaaagcctgacgcagcaatgccgcgtgaatgttaaacccttcggggtgtaaagttctgtcagtgggtacgaattttgacggtacccacagaggaagcaccggctaactccgtgccagcagccgcggt

SEQ ID NO: 5341 - DNA, 490 bp, unidentified
  misc_feature 1..490: note = Ascusbbf_86092, encodes 16S rRNA
  source 1..490: mol_type = genomic DNA
agagtttgatcctggctcaggacgaacgctggcggcgtgcttcatacatgcaagtcgaacgagaatctggcttcggtcagaggaaagtggcggacgggtgagtaaaatgtagagaatctgccctttagtgggggacaacagttggaaacgactgctaataccccatatgcgcgtagctgagatgctattcgtgaaaactccggtgctaaaggatgagtctgcatctgattagctagtaggtggtgtaatggaccccctaggcgacgatcagtagctggtttgagaggatgatcagccacaatgggactgagacacggcccatactcctacgggaggcagcagtagggaattttgcgcaatgggggaaaccctgacgcagcaacgccgcgtgattgaagaagcccttcggggtgtaaagatctgtcagtggggacgaaacttgacggtacccacagaggaagcatcggctaactccgtgccagcagccgcg

SEQ ID NO: 5342 - DNA, 490 bp, unidentified
  misc_feature 1..490: note = Ascusbbf_38920, encodes 16S rRNA
  source 1..490: mol_type = genomic DNA
agagtttgatcatggctcagaatgaacgttggcggcgtggattaggcatgcaagtcgcgcgagaaatctccttcgggagatggacagcggcgaaagggagaggaataagtagaaatctgccctcgggacggggatagcggtgggaaactgccagtaatacccgataacatctaaggatcaaatggtgtgattccgcctgaggatgagtctacttcctattagcttgttggtgtggtaatggctcaccaaggcaacgatgggtagcgggtgtgagagcacgatccgcctcactgggactgagacactgcccagacacctacgggtggctgcagtcgagaatcttcggcaatgggggaaaccctgaccgagcgacgccgcgtgcgggatgaaggccttcgggttgtaaaccgctgtcgtaagggaacaaatccactggggtactcccctttggttgagtgatcttaggaggaaggacgggctaagttcgtgc

SEQ ID NO: 5343 - DNA, 490 bp, unidentified
  misc_feature 1..490: note = Ascusbbf_116197, encodes 16S rRNA
  source 1..490: mol_type = genomic DNA
agagtttgatcctggctcaggacgaacgctggcggcgtgcctaatacatgcaagtcgaacgcactgacgtcgaccgaagctgcttgcagtggacgttgattgacgtgagtggcggacgggtgagtaacacgtgggtaacctacccttaagtgggggataacatttggaaacagatgctaataccgcataaccattcagaccacatggtctgaatgtaaaagacggcctttggctgtcacttttggacggacccgcggcgtattagttagttggtaaggtaacggcttaccaagacaatgatacgtagccgacctgagagggtaatcggccacattgggactgagacacggcccaaactcctacgggaggcagcagtagggaatcttccacaatggacgaaagtctgatggagcaacgccgcgtgagtgaagaaggttttaggatcgtaaaactctgttgttggagaagaacagggactagagtaactgtt

SEQ ID NO: 5344 - DNA, 490 bp, unidentified
  misc_feature 1..490: note = Ascusbbf_393478, encodes 16S rRNA
  source 1..490: mol_type = genomic DNA
agagtttgatcctggctcagattgaacgctagcggaatgccttacacatgcaagtcgaacggcagcacggacttcggtctggtggcgagtggcgaacgggtgagtaatgtatcggaacgtgcccagtagcgggggataactacgcgaaagcgtggctaataccgcatacgccctacgggggaaagggggggatcgcaagacctctcactattggagcggccgatatcggattagctagttggtggggtaaaggcctaccaaggcgacgatccgtagctggtttgagaggacgaccagccacactgggactgagacacggcccagactcctacgggaggcagcagtggggaattttggacaatgggggaaaccctgatccagccattccgcgtgtgcgatgaaggccttcgggttgtaaagcacttttggcaggaaagaaatcgcatggactaatactctgtgcggatgacggtacctgcagaataagcac

SEQ ID NO: 5345 - DNA, 490 bp, unidentified
  misc_feature 1..490: note = Ascusbbf_100925, encodes 16S rRNA
  source 1..490: mol_type = genomic DNA
agagtttgatcctggctcaggacgaacgctggcggcgtgcttaacacatgcaagtcgagcggaaaggcctcttcgggggtactcgagcggcgaacgggtgagtaacacgtgagtaatctgcccctggctttgggatagccaccggaaacggtgattaataccggatacgacaacttctcgcatgggatggttgtggaaagtttttcggccagggatgtgctcgcggcctatcagcttgatggtgaggtaatggctcaccatggcttcgacgggtagccggcctgagagggtgaccggtcacactgggactgagacacggcccagactcctacgggaggcagcagtggggaatattggacaatgggcggaagcctgatccagcaacgccgcgtgagggatgacggccttcgggttgtaaacctctttcagtaccgacgaagcgcaagtgacggtaggtacagaagaagcaccggccaactacgtgccagca

SEQ ID NO: 5346 - DNA, 490 bp, unidentified
  misc_feature 1..490: note = Ascusbbf_1863182, encodes 16S rRNA
  source 1..490: mol_type = genomic DNA
agagtttgatcatggctcaggatgaacgctagctacaggcttaacacatgcaagtcgaggggcatcatgaagtcagcttgctgactttgatggcgaccggcgcacgggtgagtaacgcgtatccgacctgccctgtactcggggatagccttttgaaaggaagattaatacccgatgttttcatactgccgcatgacggtatgaacaaagatttatcggtacaggatggggatgcgttccattagatagtaggcggggtaacggcccacctagtcagcgatggataggggttctgagaggaaggtcccccacattggaactgagacacggtccaaactcctacgggaggcagcagtgaggaatattggtcaatgggcgagagcctgaaccagccaagtagcgtgcaggaagaatgccctatgggttgtaaactgcttttgtccgggggtaaagatgtccacgtgtgggcagttgcaagtatcggacgaat

SEQ ID NO: 5347 - DNA, 490 bp, unidentified
  misc_feature 1..490: note = Ascusbbf_255632, encodes 16S rRNA
  source 1..490: mol_type = genomic DNA
agagtttgatcctggctcagaatgaacgttggcggcatggattaggcatgcaagtcgagcgagaaggagtccaaagtttactttgggctctggaaagcggcgcaagggagagtaatgcgtagttatctaccctaaggaccggaatagccacgggaaactgtgggtaatgccggataatatccccggatcaaaggtgtgattccgccttgggaggagactgcgttgtactagcttgttggtagggtaatggcctaccaaggctacgatgcatagcgggcgtgagagcgtggcccgtctcactgggactgaaacactgcccagacacctacgggtggctgcagtcgagaatcttcggcaatgggcgaaagcctgaccgagcaatgccgcgtgcgggatgaaggccttcgggttgtaaaccgctgtcgtaggggagaaaggtctcgcgaagagcgagatttgatctatcctaggaggaagtccgggctaagtt

SEQ ID NO: 5348 - DNA, 490 bp, unidentified
  misc_feature 1..490: note = Ascusbbf_1002000, encodes 16S rRNA
  source 1..490: mol_type = genomic DNA
agagtttgatcctggctcaggatgaacgctggcggcgtgcctaacacatgcaagtcgagcgagaagcttcggagtagattcttcggatgacacactgaagtggacagcggcggacgggtgagtaacgcgtgggcaacctgcccctttccggaggatagccaagggaaactttgaataatactccataaagcagtgacatcacatggtgatactgccaaagatttatcggagagggatgggcccgcgtctgattagccagttggtgaggtagcggctcaccaaagcgacgatcggtagccggcctgagagggtgaacggccacattggaactgagacacggtccagactcctacgggaggcagcagtggggagtattgcacaatgggcggaagcctgatgcagcaacgccgcgtgaaggatgaaggttttcggatcgtaaacttctgtccctggggaagaagaaagtgacggtacccaaggaggaagcccc

SEQ ID NO: 5349 - DNA, 490 bp, unidentified
  misc_feature 1..490: note = Ascusbbf_1883769, encodes 16S rRNA
  source 1..490: mol_type = genomic DNA
agagtttgatcctggctcaggatgaacgctggcggcgtgcctaacacatgcaagtcgaacgattaacccgccttcgggcggtcatagagtggcgaacgggtgagtaacacgtgaccaacctgccctccccaccgggataacgcggcgaaagccgcgctaataccggatatgccggcgcccccgcatgggggcgccgggaaagctccggcgggggaggatggggtcgcgtcccattaggtagttggcggggcgacggcccaccaagccgacgatgggtagccgggttgagagaccgatcggccacattgggactgggatacggcccagactcctacgggaggcagcagtggggaatcttgcgcaatgggggaaaccctgacgcagcaacgccgcgtgcgggatgacggccttcgggttgtaaaccgctttcagcagggaagaacctatgacggtacctgcagaagaagccccggctaactacgtgccagca

SEQ ID NO: 5350 - DNA, 470 bp, unidentified
  misc_feature 1..470: note = Ascusbbf_7763, encodes 16S rRNA
  source 1..470: mol_type = genomic DNA
agagtttgatcctggctcagaacgaacgctggcggcaggcctaacacatgcaagtcgaacggacccttcggggtcagtggcagacgggtgagtaacgcgtgggaatctacccagttcttcggaataacccagggaaacttgggctaataccggatacgcccttagggggaaagatttatcggaattggatgagcccgcgtcggattagctagttggtggggtaatggcctaccaaggcgacgatccgtagctggtctgagaggatgatcagccacactgggactgagacacggcccagactcctacgggaggcagcagtggggaatattggacaatgggcgcaagcctgatccagccatgccgcgtgagtgatgaaggccttagggttgtaaagctctttcagcggggaagataatgacggtacccgcagaagaagccccggctaacttcgtgccagcagccgcggtaat

SEQ ID NO: 5351 - DNA, 490 bp, unidentified
  misc_feature 1..490: note = Ascusbbf_1093, encodes 16S rRNA
  source 1..490: mol_type = genomic DNA
agagtttgatcctggctcaggatgaacgctagcggcaggcctaatacatgcaagtcgaacggtaaatgtcccttcggggatatgagagtggcgcacgggtgcgtaacgcgtatgcaacccacccgctgtcgggggatagcccgtagaaatgcgaattaataccccatgaggagaaagggcggcatcgtccttttttcaaaactttggtgacggcggacgggcatgcgtgccattagatagttggcggggtaacggcccaccaagtcgacgatggctaggggatctgagaggacggtcccccacactggtactgagacacggaccagactcctacgggaggcagcagtaagggatattggtcaatggggggaaccctgaaccagccatgccgcgtgagggaataaggccctacgggtcgtaaacctcttttgccgggggataaggacgcccacgtgtgggtgtttgaaggtacccggagaataagcatcgg

SEQ ID NO: 5352 - DNA, 490 bp, unidentified
  misc_feature 1..490: note = Ascusbbf_73845, encodes 16S rRNA
  source 1..490: mol_type = genomic DNA
agagtttgatcctggctcaggatgaacgctagcggcaggcttaacacatgcaagtcgaggggcagcgagaggtagcaatactttgtcggcgaccggcgcaagggtgcgtaacacgtgagtaacatgcccgatacaggaggataatccatggaaacgtggtctaatactccatattataatatgtacgcatgtacctattatgaaattttcgaaggtatcggattggctcgcgcaacattagccagttggtagggtaacggcctaccaaagcgacgatgtttaggggtcctgagagggaggtcccccacactggaactgagacacggtccagactcctacgggaggcagcagtgaggaatattggacaatggatggaaatctgatccagccatgccgcgtgcgggatgacggtcctatggattgtaaaccgcttttaaatgggagcaataaggtgtacgtgtacaccgatgagagtaccattggaataagc

SEQ ID NO: 5353 - DNA, 490 bp, unidentified
  misc_feature 1..490: note = Ascusbbf_206449, encodes 16S rRNA
  source 1..490: mol_type = genomic DNA
agagtttgatcctggctcagattgaacgctggcggcatgctttacacatgcaagtcgaacggcagcgcgggcttcggcctggcggcgagtggcgaacgggtgagtaatacatcggaacgtacccagtagtgggggatagctcggcgaaagccggattaataccgcatacgacccatgggtgaaagcgggggaccttcgggcctcgcgctattggagcggccgatggcagattagctagttggtggggtaaaggcctaccaaggcgacgatctgtagctggtctgagaggacgaccagccacactgggactgagacacggcccagactcctacgggaggcagcagtggggaattttggacaatgggcgcaagcctgatccagcaatgccgcgtgtgtgatgaaggccttcgggttgtaaagcacttttggcaggaacgaaaaggaccgtgttaataccgtggtctgatgacggtacctgcagaataagcac

SEQ ID NO: 5354 - DNA, 490 bp, unidentified
  misc_feature 1..490: note = Ascusbbf_54050, encodes 16S rRNA
  source 1..490: mol_type = genomic DNA
agagtttgatcctggctcaggatgaacgctagcgacaggcctaacacatgcaagtcgaggggcatcgagccgtagcaatacggtgtcggcgaccggcgaatgggtgagtaacgcgtatgcaacctttccgcaaaacggggatagccttccgaaaggaagattaatacccgatggccttggccgtccgcatgagtggccaagtaaaaatttattgattgcgggtgggcatgcgtcccattaggcagttggcggggtaacggcccaccaaaccgacgatgggtaggggttctgagaggaaaatcccccacattggaactgagacacggtccaaactcctacgggaggcagcagtgaggaatattggtcaatgggcggaagcctgaaccagccaagtcgcgtgcgggacgaaggccctacgggtcgtaaaccgcttttgtacgggaataaagtcatccacgtgtgggtgtttgtaggtaccgtaagaataagg

SEQ ID NO: 5355 - DNA, 490 bp, unidentified
  misc_feature 1..490: note = Ascusbbf_24458, encodes 16S rRNA
  source 1..490: mol_type = genomic DNA
agagtttgatcatggctcagaacgaacgctggtggcgtgtcttatacatgcaagtcgagcggtgtagcaatacatagcggcgaacgggtgagtaacgcgtaagcaatctgccccacactcgggaatagccgtgccaacgcgcgggtaataccggatatcgtggccctggacatccggggttgacgaaagatttatcggtgtgggatgagcttgcgtccgattagctagtaggcggggtaacggcccacctaggcgacgatcggtagccggcctgagagggtgatcggccacattgggactgagatacggcccagactcctacgggaggcagcagtagggaatattgcacaatggggggaaccctgatgcagcaacgccacgtgtgggaagaagcatttcggtgtgtaaaccactgtcgtgagggaataaggctatttttcggagtagttgaatgtacctcgaaaggaagcaccggcaaacttcgtgccag

SEQ ID NO: 5356 - DNA, 490 bp, unidentified
  misc_feature 1..490: note = Ascusbbf_9530, encodes 16S rRNA
  source 1..490: mol_type = genomic DNA
agagtttgatcctggctcaggacaaacgctggcggcgtgcttaacacatgcaagtcgaacggagtacctgagaatgaagcttcggcagaatttttggaatacttagtggcggacgggtgagtaacacgtgagtaacctgcccccaagcgtgggataacactccgaaaggagtgctaataccgcataaaatatatatgccgcatggtatatatatcaaagaattatcgcttagggatgggctcgcgcccgattaggtagttggtgaggtaaaggctcaccaagccgacgatcggtagccggactgagaggttggacggccacattgggactgagacacggcccagactcctacgggaggcagcagtggggaatattgcacaatgggggaaaccctgatgcagcgacgccgcgtgaaggaagaaggtcttcggattgtaaacttatgtcttcagggaagaaaagatgacggtacctgaggaggaagccacgg

SEQ ID NO: 5357 - DNA, 490 bp, unidentified
  misc_feature 1..490: note = Ascusbbf_5740, encodes 16S rRNA
  source 1..490: mol_type = genomic DNA
agagtttgatcatggctcaggatgaacgctggcggcgtgcttaacacatgcaagtcgaacggagtttaagaaggaagcttgctttcattttaaacttagtggcggacgggtgagtaacgcgtgaggaacctgcccttcagtggggaacaacaactagaaatggttgctaataccgcataatgtcggattgccgcatgacagaccgaccaaaggatttattcgctgaaggatggcctcgcgtccgattagatagttggtgaggtaacggcccaccaagtctacgatcggtagccgaactgagaggttgatcggccacattgggactgagacacggcccagactcctacgggaggcagcagtggggaatattgggcaatgggcgaaagcctgacccagcaacgccgcgtgaaggatgacggtcttcggattgtaaacttctttaattggggaagaataaatgacctacccaaagaataagtcacggctaact

SEQ ID NO: 5358 - DNA, 490 bp, unidentified
  misc_feature 1..490: note = Ascusbbf_18863, encodes 16S rRNA
  source 1..490: mol_type = genomic DNA
agagtttgatcatggctcaggatgaacgctggcggcgtgcctaatacatgcaagtcgaacgagggtgcttgcaccctagtggcgaacgggtgagtaacacgtaggtaacctgccctttagtttgggatacccagaggaaactttggctaataccggatatgaattcgagaggcatctcttgaatttgaaaggagcgtttgctccgctttaggatggacctgcggcgcattagctagttggtgagataacagcccaccaaggcgaggatgcgtatccgatctgagaggatgaccggacacattggaactgagacacggtccaaactcctacgggaggcagcagtaaggagttttcggcaatgggggaaaccctgaccgagcaacgccgcgtgagtgatgacggccctatgggttgtaaagctctgttgtaagggacgaatgacgaggttaggaaatgagcttcgtttgacggtaccttaccagaaagccac

SEQ ID NO: 5359 - DNA, 485 bp, unidentified
  misc_feature 1..485: note = Ascusbbf_6332, encodes 16S rRNA
  source 1..485: mol_type = genomic DNA
agagtttgatcctggctcagaacgaacgctggcggcaggcctaacacatgcaagtcgagcgaggacttcggtcctagcggcggacgggtgagtaacgcgtgggaacgtgccccttgctgcggaatagccccgggaaactgggattaataccgcatgatccccctgatcatggagatctgggggcaaagatttatcggcaagggatcggcccgcgttggattaggtagttggtggggtaatggcctaccaagccgacgatccatagctggtttgagaggatgatcagccacactgggactgagacacggcccagactcctacgggaggcagcagtggggaatcttagacaatgggggcaaccctgatctagccatgccgcgtgagtgatgaaggccctagggttgtaaagctctttcagctgggaagataatgactgtaccagcagaagaagccccggctaactccgtgccagcagccgcggtaat

SEQ ID NO: 5360 - DNA, 490 bp, unidentified
  misc_feature 1..490: note = Ascusbbf_20539, encodes 16S rRNA
  source 1..490: mol_type = genomic DNA
agagtttgatcatggctcagaacgaacgctggcggcatggattaggcatgcaagtcgaacgaggtagcaataccgagtggcggaagggtgaggaacgcgtgagcaatctgccctccagttgggaataacagttggaaacgactgctaataccgaatgtggctcgttggtcgcatgactgacgggctaaagatttatcgctggaggatgagctcgcgtcccattagctagttggtgaggtaacggcccaccaaggcgacgatgggtagctggtctgagaggatggtcagccacactgggactgagacactgcccagactcctacgggaggctgcagtcgagaatcttgggcaatgcgcgaaagcgtgacccagcaatgccgcgtgcgggatgaaggtcttcggattgtaaaccgctgtcaaccgggacgaacacaatgactgtaccggtgaaggaagccacggctaactacgtgccagcagccgcggtaat

SEQ ID NO: 5361 - DNA, 490 bp, unidentified
  misc_feature 1..490: note = Ascusbbf_12810, encodes 16S rRNA
  source 1..490: mol_type = genomic DNA
agagtttgatcatggctcaggatgaacgctagcggcaggcttaacacatgcaagtcgaggggtaacagggagtagcaatactctgctgacgaccggcgcacgggtgcgtaacgcgtatgcaacctacctgtaacaggggaataacggagggaaacttccactaatgccccatattgttattctttcgcatgttaggataacgaaagcttcggtggttacggatgggcatgcgtgacattagctagttggtaaggtaacggcttaccaaggcgacgatgtctaggggagctgagaggcttatcccccacactggtactgagacacggaccagactcctacgggaggcagcagtgaggaatattggtcaatggagggaactctgaaccagccatgccgcgtggaggaagaaggtcctatgggttgtaaactccttttgtccgagagtaataagtgccttgcgaggcacgatgagagtatcgggcgaataagc

SEQ ID NO: 5362 - DNA, 486 bp, unidentified
  misc_feature 1..486: note = Ascusbbf_9338, encodes 16S rRNA
  source 1..486: mol_type = genomic DNA
agagtttgatcctggctcagaacgaacgctggcggcatgcttaacacatgcaagtcgaacggtgttgttcagtacttgtattgagcaacatagtggcaaacgggtgagtaacgcgtgggaacgtacccaacagtattggataacgtttggaaacgaacgctaatacaatatacgcttgagagaggaaagagagatcgctgatggagcggcccgcgttagattaggtagttggtggggtaaaggcctaccaagccgatgatctatagctggtctgagaggatgaacagccacattgggactgagacacggcccagactcctacgggaggcagcagtggggaatattggacaatgggggaaaccctgatccagcaatgccgcgtgagtgaagaaggccttcgggttgtaaaactcttttataagtgaagatgatgacggtaacttatgaataagctccggctaacttcgtgccagcagccgcggtaat

SEQ ID NO: 5363 - DNA, 490 bp, unidentified
  misc_feature 1..490: note = Ascusbbf_95594, encodes 16S rRNA
  source 1..490: mol_type = genomic DNA
agagtttgatcctggctcaggatgaacgctagctacaggcttaacacatgcaagtcgaggggtaacgtgagggaagcttgcttcccttgacgacgaccggcgcacgggtgagtaacgcgtatccaacctgcccatgactcagggataaccttccgaaagggagcctaatacctgatgttgtgtgacgatggcatcagaatcacaccaaggatttcatcggtcatggatggggatgcgtaggattaggtagacggcggggtaacggcccaccgtgcctacgatccttaggggttctgagaggaaggtcccccacactggtactgagacacggaccagactcctacgggaggcagcagtgaggaatattggtcaatgggcgggagcctgaaccagccaagtagcgtgcaggaagacggccctatgggttgtaaactgcttttatgaggggataaagtgcgggacttgtcccgttttgcaggtacctcatgaa

SEQ ID NO: 5364 - DNA, 490 bp, unidentified
  misc_feature 1..490: note = Ascusbbf_717106, encodes 16S rRNA
  source 1..490: mol_type = genomic DNA
agagtttgatcatggctcaggacgaacgctggcggcgtgcctaatacatgcaagtcgaatggtagcaataccatggcgaacgggtgggtaacgcgtaggtaacctgtctttaagacgaggataaccgttggaaacgacggataatactcgataggtgatttgagggcatccttagatcattaaagatttatcacttagagaggggcctgcggcgcattagctagatggcggtgtaatggaccaccatggcgatgatgcgtagccggactgagaggttgaacggccacaatggaactgagaacggtccatactcctacgggaggcagcagtagggaattttcggcaatgggcgaaagcctgaccgagcaacgccgcgtgaacgaagaagtatttcggtatgtaaagttcttttatcggggaggaaaaatattcaaattgacggtacccgatgaataagctccggctaactacgtgccagcagccgcggtaa

SEQ ID NO: 5365 - DNA, 490 bp, unidentified
  misc_feature 1..490: note = Ascusbbf_148160, encodes 16S rRNA
  source 1..490: mol_type = genomic DNA
agagtttgatcatggctcaggacgaacgctggcggcatgcctaacacatgcaagtcgaacggagccatcttgatgatcccttcggggtgattcaggggaagcttagtggcggacgggtgagtaacgcgtgagtaacctgcctttgagaggggaataacgttccgaaaggaacgctaataccgcataacgtgattttaccgcatgatagaatcaccaaagatttatcgctcagagatggactcgcgtctgattagctagttggtgaggtaacggctcaccaaggcgacgatcagtagccgagctgagaggctgatcggccacattgggactgagacacggcccagactcctacgggaggcagcagtgggggatattgcgcaatggggggaaccctgacgcagcaatgccgcgtgaaggaagaaggtcttcggatcgtaaacttttgtcttcagggacgataatgacggtacctgaggaggaagccacggct

SEQ ID NO: 5366 - DNA, 490 bp, unidentified
  misc_feature 1..490: note = Ascusbbf_1520121, encodes 16S rRNA
  source 1..490: mol_type = genomic DNA
agagtttgatcctggctcaggatgagcgctggcggcgtgcctaatacatgcaagtcggacggtatcagcgatgatatagtggcgaacgggtgagtaacacgttggtgacctgccccaaagatggggatatcacctggaaacgggtggcaaaaccgaataagcttaccccctttagaaaagggtaagtaaaagtgaaaactactttgggaggggcctgcggcccatcagttagttggtgagggtaacggcccaccaagacagcgacgggtaggggacctgagagggtggtcccccacaatggaactgaaacacggtccatacacctgcgggtggcagcagtagggaatattgctaaatgggcgaaagcctgaagcagcaacgccgcgtggacgaaggaggccttcgggtcgtaaagtccttttatgagggaaaaggaaggatggtacctcatgaataagtctcggctaactacgtgccagcagccgcggta

SEQ ID NO: 5367 - DNA, 490 bp, unidentified
  misc_feature 1..490: note = Ascusbbf_88772, encodes 16S rRNA
  source 1..490: mol_type = genomic DNA
agagtttgatcatggctcaggatgaacgctagcggcaggcttaacacatgcaagtcgaggggcagcgggtgtagcaatacatgccggcgaccggcgaaagggtgagtaacgcgtgagcaacgtgcccggtattgggggatagtcattggaaacgatgcgtaataccccgtaacaacaaggatcgcatggttcatgtttaaaagatttattgataccggatcggctcgcgtaccattaggtagacggcggggtaacggcccaccgtgccgacgatggttaggggttctgagaggaaggtcccccacattggaactgagacacggtccagactcctacgggaggcagcagtgaggaatattggtcaatggccgagaggctgaaccagccatgccgcgtgcgggaagacggccctatgggttgtaaaccgcttttgtcggggagcaataagtgctacgtgtagcacgatgagagtacctggcgaataagcatc

SEQ ID NO: 5368 - DNA, 490 bp, unidentified
  misc_feature 1..490: note = Ascusbbf_67296, encodes 16S rRNA
  source 1..490: mol_type = genomic DNA
agagtttgatcatggctcagaacgaacgctggcggcgcgtcttaagcatgcaagtcgagcggtaagatatagcttgctatatcctagagcggcggactggtgagtaacacgtgggtgacataccctccggaccgggatagctcctagaaataggagataatacctgatacgatttctgttgtcagaggacaggaaggaaaggtgcttcggcaccgccggaggagtggcccgcggcccattagctggttggtgaggtaacggcccaccaaggcgacgatgggtatccggcctaagagggtggacggacacattgggactgagatacggcccagactcctacgggaggcagcagctaagaatattccgcaatgggcgaaagcctgacggagcgacgccgcgtggacgatgaaggccgaaaggttgtaaagtccttttgaatctgacgaataagcagtgcaggaaatggcattgtggtgacggtaggatttga

SEQ ID NO: 5369 - DNA, 490 bp, unidentified
  misc_feature 1..490: note = Ascusbbf_111334, encodes 16S rRNA
  source 1..490: mol_type = genomic DNA
agagtttgatcatggctcaggatgaacgctagcggcaggcttaacacatgcaagtcgaggggcagcgctgggtagcaataccctggcggcgaccggcgcacgggtgcgtaacgcgtatgcaacctgcccgcgacagggggataacctggagaaattcggactaataccccgtaacacaatccgaggcatctcgggctgttgaaaggagcgatccggtcgcggatgggcatgcgtgacattaggtagttggcggggcgacggcccaccaagccgacgatgtctaggggaactgagaggttagtcccccacactggtactgagacacggaccagactcctacgggaggcagcagtgaggaatattggtcaatggtcggaagactgaaccagccatgccgcgtgagggaagaaggccctacgggttgtaaacctcttttacgggggagcaataagcgccgtgcgcggcgcgatgagagtaccccgggaataag

SEQ ID NO: 5370 - DNA, 490 bp, unidentified
  misc_feature 1..490: note = Ascusbbf_73932, encodes 16S rRNA
  source 1..490: mol_type = genomic DNA
agagtttgatcatggctcaggatgaacgctagcggcaggcttaacacatgcaagtcgaggggcagcgggtctagcaatagatgccggcgaccggcgaaagggtgagtaacgcgtgagcaacgtgcccgtatgtgggggatagtcgatggaaacgtcgcgtaataccccgtaacatatggagctgcatggttccatattgaaagattaattgcatacggatcggctcgcgtgccattaggtagacggcggggtaacggcccaccgtgccgacgatggctaggggttctgagaggaaggtcccccacattggaactgagacacggtccagactcctacgggaggcagcagtgaggaatattggacaatggccggaaggctgatccagccatgccgcgtgcgggaggacggccctatgggttgtaaaccgcttttgcgggggagcaataagtgttacgtgtaacacgatgagagtaccctgcgaataagcatc

SEQ ID NO: 5371 - DNA, 490 bp, unidentified
  misc_feature 1..490: note = Ascusbbf_123297, encodes 16S rRNA
  source 1..490: mol_type = genomic DNA
agagtttgatcctggctcaggatgaacgctagctacaggcttaacacatgcaagtcgaggggcagcatgggggtgcttcggcacctctgatggcgaccggcggatgggtgagtaacgcgtatccaacctgccccgcgcccggggacagcccttagaaatgaggattaacccccgatagatgtgttatgcgcatgcatgacacatgaaacagacgcgggatggggatgcgttccattaggcagcaggcggggtaacggcccacctggccgacgatggataggggttctgagaggaaggtcccccacactggaactgagacacggtccagactcctacgggaggcagcagtgaggaatattggtcaatgggcgggagcctgaaccagccaagtagcgtgcgggatgaaggccctacgggttgtaaaccgcttttgcgcggggataaagagggggacttgtcccccgttgcaggtaccgcgcgaataaggacc

SEQ ID NO: 5372 - DNA, 490 bp, unidentified
  misc_feature 1..490: note = Ascusbbf_629267, encodes 16S rRNA
  source 1..490: mol_type = genomic DNA
agagtttgatcatggctcaggatgaacgctggcggcgtgcctaacacatgcaagtcgaacggggtctatccgctgatgaagcttcggcagaatcttggaaagacttagtggcggacgggtgagtaacgcgtgggcaacctgccctgtactgggggatagcagctggaaacggctggtaataccgcataagcgcacagtatcgcatgatacagtgtgaaaagctccgacggtacaggatgggcccgcgtccgattagccagttggcggggtaacggcccaccaaagcaacgatcggtagccggcctgagagggcggacggccacattgggactgagacacggcccagactcctacgggaggcagcagtgggggatattgcacaatgggggaaaccctgatgcagcgacgccgcgtgggtgatagaagtatttcggtatgtaaagccctatcagcagggacgataatgacggtacctgagtaagaagccccg

SEQ ID NO: 5373 - DNA, 490 bp, unidentified
  misc_feature 1..490: note = Ascusbbf_246820, encodes 16S rRNA
  source 1..490: mol_type = genomic DNA
agagtttgatcatggctcaggacgaacgctggcggcgtgcttaacacatgcaagtcgaacgggggatattttagcttgctatgatattcctagtggcgaacgggtgagtaacgcgtaggcaacctgcccttgggatggggacaacaggccgaaaggcctgctaataccgaatgaagtaagtctgccgcatgacggacttatgaaagatggcctctacttgtaagctatcacccaaggatgggcctgcgtctgattagctagttggtggggtaaaggcccaccaaggcgacgatcagtagccggtctgagaggatgaacggccacattgggactgagacacggcccagactcctacgggaggcagcagtggggaatcttccgcaatgggcgaaagcctgacggagcaacgccgcgtgagtgaagaagggtttaggctcgtaaagctctgttgcaggggacgaaggccttggaggtgaataatctctgagga

SEQ ID NO: 5374 - DNA, 490 bp, unidentified
  misc_feature 1..490: note = Ascusbbf_114004, encodes 16S rRNA
  source 1..490: mol_type = genomic DNA
agagtttgatcatggctcaggatgaacgctggcggcgtgcctaatacatgcaagtcgaacgaggcggatgggagcttgctccttgaaacctagtggcgaacgggtgagtaacacgtaggtaacctgcctttaagcttgggatacccagaggaaactttggctaataccggataacaacagaagcggcatcgcttttgcttgaaaggccccttcaagggtcacttaaagatggacctgcggcgcattagctagttggtgagataacagcccaccaaggcaaggatgcgtagccgacctgagagggtgatcggccacattggaactgagacacggtccaaactcctacgggaggcagcagtaaggagttttcggcaatgggggaaaccctgaccgagcaacgccgcgtgaatgatgacggccctatgggttgtaaagttcttttataagggacgaatggttggtttaggaaatgaaaccaatttgacagtac

SEQ ID NO: 5375 - DNA, 490 bp, unidentified
  misc_feature 1..490: note = Ascusbbf_111234, encodes 16S rRNA
  source 1..490: mol_type = genomic DNA
agagtttgatcctggctcaggatgaacgctggcggcgtgcttaacacatgcaagtcgaacgaatttcttttggacggaggcttcggctgacagaagattgaagtgagtggcggacgggtgagtaacgcgtgggtaacctgccttacaccgggggataacagagggaaacttctgctaataccgcataagaccacggtaccgcatggtattgaggtaaaagctccggcgatgtaagatggacccgcgtctgattagccagttggcggggtaacggcccaccaaagcgacgatcagtagccgacctgagagggtgatcggccacattgggactgagacacggcccaaactcctacgggaggcagcagtggggaatattgggcaatgggcgcaagcctgacccagcgacgccgcgtgagtgaagaagtatttcggtatgtaaagctctttaagcagggaagataatgacggtacctgcagaataagcaccggc

SEQ ID NO: 5376 - DNA, 490 bp, unidentified
  misc_feature 1..490: note = Ascusbbf_777870, encodes 16S rRNA
  source 1..490: mol_type = genomic DNA
agagtttgatcatggctcaggacgaacgctggcggcgtgcttaacacatgcaagtcgagcggaaaggcccttcggggtactcgagcggcgaacgggtgagtaacacgtgagcaacctgcccctgactctgggataagcccgggaaactgggtctaataccggatatgacctccgcccgcatgggctggtggtggaaagtttttcggttggggatgggctcgcggcctatcagcttgttggtggggtagtggcctaccaaggcgacgacgggtagccggcctgagagggcgaccggccacactgggactgagacacggcccagactcctacgggaggcagcagtgggaatattgcgcaatgggcgaaagcctgacgcagcgacgccgcgtgggggatgacggccttcgggttgtaaacctctttcagcagggacgaagttgacgtgtacctgcagaagaagcgccggctaactacgtgccagcagccgcgg

SEQ ID NO: 5377 - DNA, 490 bp, unidentified
  misc_feature 1..490: note = Ascusbbf_92558, encodes 16S rRNA
  source 1..490: mol_type = genomic DNA
agagtttgatcatggctcaggatgaacgctagctacaggcttaacacatgcaagtcgcggggcagcatggagtcagcttgctgactttgatggcgaccggcgcacgggtgcgtaacgcgtaccgaacctgccccagtcagggggacagccctctgaaaggaggattaataccccatggtccctgtttgctgcatggcattcggggtaaaggtattccggactgggatggcggtgcgtaggattagctagtcggcggggtaacggcccaccgaggctacgatccttaggggttctgagaggaaggtcccccacactggtactgagacacggaccagactcctacgggaggcagcagtgaggaatattggtcaatggccgagaggctgaaccagccaagtagcgtgcaggatgacggccctctgggttgtaaactgcttttatacgggaacaaatttcgccacgtgtggtgttttgcgtgtaccgtaagaaa

SEQ ID NO: 5378 - DNA, 490 bp, unidentified
  misc_feature 1..490: note = Ascusbbf_737388, encodes 16S rRNA
  source 1..490: mol_type = genomic DNA
agagtttgatcatggctcaggatgaacgctggcggcgtgcttaacacatgcaagtcgaacggagatgcattttagaagttttcggatggaagagatacatcttagtggcggacgggtgagtaacacgtaaacaatctgcctttgagagcgggacaacagatagaaatatttgctaataccgcataagaccacaacatcgcatggtgaaggggtaaaaggggagcaatctcgctcaaagatgagtttgcggactattagctagttggtgaggtaacggcccaccaaggcagagatggttagccgacctgagagggtgatcggccacactggaactgagatacggtccagactcctacgggaggcagcagtgaggaatattgggcaatggaggaaactctgacccagcaacgccgcgtgaaggaagaaggttttcggattgtaaacttctgttataggggaaaaaggaagtgatggtaccctatgagcaagc

SEQ ID NO: 5379 - DNA, 490 bp, unidentified
  misc_feature 1..490: note = Ascusbbf_674964, encodes 16S rRNA
  source 1..490: mol_type = genomic DNA
agagtttgatcatggctcaggatgaacgctagcgacaggcttaacacatgcaagtcgagaggcagcgcggaggtagcaatacttctggcggcgaccggcgcactggtgagtaacacgtatgcaacctgccccgcgcagggggataatccggagaaatctggtctaataccccgtacgccgcgcctccgcatgggcacgcggtgaaaggagcgatccggcacgggatgggcatgcggcgcattagctagtcggcggggcgacggcccaccgaggcgacgatgcgtaggggttctgagaggaaggtcccccacactggtactgagacacggaccagactcctacgggaggcagcagtgaggaatattggtcaatggacggaggtctgaaccagccaagtcgcgtgagggaggacggccctacgggttgtaaacctcttttgcgggggagcaaagtgagccacgcgtggctcattgcgagtaccccgagaaaa

SEQ ID NO: 5380 - DNA, 490 bp, unidentified
  misc_feature 1..490: note = Ascusbbf_734398, encodes 16S rRNA
  source 1..490: mol_type = genomic DNA
agagtttgatcctggctcaggatgaacgctggcggcaggcctaatacatgcaagtcgcgcgggaattgccctttcgggggtgatgagagcggcggacgggtgcgtaacgcgtatgcaaccaacccccgacaggcggatagccggtggaaacgccggataatacgccatgaaccctttttggggcatcccagggaggggaaagcggagacgcggtcggggacgggcatgcgtcccattagatggttggcggggtgacggcccaccaagtctttgatgggtaggggatctgagaggacggtcccccacactggcactgagacacgggccagactcctgcgggaggcagcagtaggggatattgggcaatgggggcaaccctgacccagccatgccgcgtgagggaatgaggccctacgggtcgtgaacctcttttgcacggggacaaagtcctgcacgggatgcgggattgagggtaccgtgagaataagca

SEQ ID NO: 5381 - DNA, 490 bp, unidentified
  misc_feature 1..490: note = Ascusbbf_353344, encodes 16S rRNA
  source 1..490: mol_type = genomic DNA
agagtttgatcctggctcaggattaacgctggcggcatgcctaagacatgcaagtcgaacgaagtgccccattgaagtctgaatgaagttgaaaagcttgcttggatatggaatgacgatggatgtggattctgcactgagtggcgaacgggtgagtaacacgtgggttacctgcctctaagttggggacaacagttggaaacgactgctaataccgaatgtgatagtaatattaaaggtgccttaaagcatcgcttagagatgggcctgcggcgtattagctagttggtggggtaatggcctaccaaggcgacgatgcgtagccggactgagaggttgaacggccacactgggactgagacacggcccagactcctacgggagacagcagttaggaatattcggcaatgggggaaaccctgaccgagcaatgccgcgtgtgagatgaaggtcctctggattgtaaatcacttttattaagaaagaattg

SEQ ID NO: 5382 - DNA, 490 bp, unidentified
  misc_feature 1..490: note = Ascusbbf_1794961, encodes 16S rRNA
  source 1..490: mol_type = genomic DNA
agagtttgatcctggctcagattgaacgctggcggcaggcctaacacatgcaagtcgagcggaaacgatggaagcttgcttccaggcgtcgagcggcggacgggtgagtaatgcataggaatctgcccggtagtgggggataacctggggaaactcaggctaataccgcatacgtcctacgggagaaagcaggggctcttcggaccttgcgctatcggatgagcctatgccggattagctagttggtgaggtaatggctcaccaaggccgcgatccgtagctggtctgagaggatgatcagccacatcgggactgagacacggcccgaactcctacgggaggcagcagtggggaatattggacaatgggcgcaagcctgatccagccatgccgcgtgtgtgaagaaggccctcgggttgtaaagcactttcagtgaggaagaacgcctggcggctaatacctgccagggaagacatcactcacagaagaa

SEQ ID NO: 5383 - DNA, 490 bp, unidentified
  misc_feature 1..490: note = Ascusbbf_1766462, encodes 16S rRNA
  source 1..490: mol_type = genomic DNA
agagtttgatcctggctcaggatgaacgctggcggcacgcctaacacatgcaagtcgaacggagtttaagagagcttgctcttttaaacttagtggcggacgggtgggtaacacgtgatcaacctgcctttcagagagggatagcttctggaaacggatggtaatacctcataacatatgaatttggcatcttattcatatcaaagatttatcgctgaaagatgggctcgcgtctgattagcttgttggtgaggtaacggcccaccaaggcaacgatcagtagccggactgagaggttgaacggccacaatgggactgagacacggcccagactcctacgggaggcagcagtggggaatattgcacaatgggcgcaagcctgatgcagcgatgccgcgtgagggaagaaggttttcggattgtaaacctctgtcatcggggacgaaaatgacggtacccgaggaggaagctccggctaactacgtgccag

SEQ ID NO: 5384 - DNA, 490 bp, unidentified
  misc_feature 1..490: note = Ascusbbf_712240, encodes 16S rRNA
  source 1..490: mol_type = genomic DNA
agagtttgatcctggctcaggataaacgctggcggcgcacataagacatgcaagtcgaacggaagtcgttatactgattttgaaatgaacggagaacttgttcaaagggactggaagaagatttataacaatggctttagtggcggactggtgagtaatacgtaagcaacctgcctattagaggggaacaacagttagaaatgactgctaataccgcatatgccttaattaccacatggtagtagagggaaaggagtaatccgctgatagatgggcttacggctgattagctagttggaagggtaacggcctaccaaggcgacgatcagtagccggactgagaggtcaggcggccacattgggactgagatacggcccagactcctacgggaggcagcagtcgggaattttgcgcaatggaggaaactctgacgcagtgacgccgcgtgcaggaagaaggttttcggattgtaaactgctttagacaggg

SEQ ID NO: 5385 - DNA, 490 bp, unidentified
  misc_feature 1..490: note = Ascusbbf_1837274, encodes 16S rRNA
  source 1..490: mol_type = genomic DNA
agagtttgatcatggctcaggatgaacgctagcggcaggcttaacacatgcaagtcgaggggcagcgtgttggtagcaataccgacgacggcgaccggcgcacgggtgagtaacgcgtatgcaacctttcccagacagggggatagcccagggaaacttggattaataccccgtaggccgggggacggcatcgtccttcggttaaagttccggcggtctggggtgggcatgcgtgccattaggtggttggcggggtaacggcccaccaagccgacgatggctacggggtctaaaaggatggtcccgcacattggaactgagacacggtccaaactcctacgggaggcagcagtgaggaatattggtcaatggggggaaccctgaaccagccatgccgcgtggaggaagacggccctacgggttgtaaactcctttagcacgggaataaactcggccacgcgtggccgactgaaggtaccgtgagaataag

SEQ ID NO: 5386 - DNA, 490 bp, unidentified
  misc_feature 1..490: note = Ascusbbf_1625041, encodes 16S rRNA
  source 1..490: mol_type = genomic DNA
agagtttgatcatggctcaggacgaacgctggcggcgtgcctaatacatgcaagtcgagcgaatctgagggagcttgctcccgaagattagcggcggacgggtgagtaacacgtgggtaacctgcctgtaagattgggataactccgggaaaccggagctaataccggataacatattgaaccgcatggttcaatattgaaagatggtttcggctatcacttacagatggacccgcggcgcattagctagttggtgaggtaacggctcaccaaggcgacgatgcgtagccgacctgagagggtgatcggccacactgggactgagacacggcccagactcctacgggaggcagcagtagggaatcttccgcaatggacgaaagtctgacggagcaacgccgcgtgagcgaagaaggccttcgggtcgtaaagctctgttgttagggaagaacaagtacgagagtaactgctcgtaccttgacggtaccta

SEQ ID NO: 5387 - DNA, 489 bp, unidentified
  misc_feature 1..489: note = Ascusbbf_207014, encodes 16S rRNA
  source 1..489: mol_type = genomic DNA
agagtttgatcctggctcaggacgaacgctggcggcgtgcctaagacatgcaagtcgaacgagggagcaatccctagtggcgaacggcggagtaagacataagcaacgtgccctgaagactgggatatacggtcgaaagaccgggtaataccggatgtggccgagactcggcatcgagtcttgactaaatggtttttcgcttcaggagcggcttatgacacatcaggtagttggtggggtaacggcctaccaagccgacgacgtgtagggggtctgagaggatgatccccccgagtgggactgagacacggcccacacacctacgggtggcagcagttaggaatcttgcccaatgggggaaaccctgaggcagcgacgccgcgtggaggatgaaggatttaggtctgtaaactccttttaccaggaaagacttaggacggtacctggtgaataagccccggctaactccgtgccagcagccgcggtaat

SEQ ID NO: 5388 - DNA, 472 bp, unidentified
  misc_feature 1..472: note = Ascusbbf_82126, encodes 16S rRNA
  source 1..472: mol_type = genomic DNA
agagtttgatcctggctcagaacgaacgctggcggcatgcctaacacatgcaagtcgaacgcctgtagcaatacaggagtggcggacgggtgagtaacgcgtgggaacctgcccaacagtacgggataaccaagggaaactttggctaataccgcatacgcccttcgggggaaagatttatcgctgatggatgggcccgcgtcggattagctagttggtgaggtaatggctcaccaaggctacgatccgtagctggtctgagaggacgaccagccacactgggactgagacacggcccagactcctacgggaggcagcagtggggaatattggacaatgggggaaaccctgatccagcaatgccgcgtgagtgatgaaggccttagggttgtaaagctctttcgacggggacgatgatgacggtacccgtagaagaagccccggctaacttcgtgccagcagccgcggtaat

SEQ ID NO: 5389 - DNA, 490 bp, unidentified
  misc_feature 1..490: note = Ascusbbf_393618, encodes 16S rRNA
  source 1..490: mol_type = genomic DNA
agagtttgatcatggctcaggatgaacgctagcgggaggcctaacacatgcaagccgaggggtatgattctttcggggatcggagaccggcgcacgggtgcgtaacgcgtatgtaacttaccccattcactgggatagcccttcgaaaggaggattaataccggataacactaaagtgggcatccactttggttgaaagattaatcggaatgggatagacatgcgtcagattagctagttggtgaggtaacggctcaccaaggcgatgatctgtagggggcctgagagggtgaccccccacactggtactgagacacggaccagactcctacgggaggcagcagtgaggaatattggacaatgggtgagagcctgatccagccatcccgcgtgcaggaagacggccctatgggttgtaaactgcttttgtatgggaataaaccaccttacgtgtagggtgttgaaggtaccatacgaataagcaccggct

SEQ ID NO: 5390 - DNA, 490 bp, unidentified
  misc_feature 1..490: note = Ascusbbf_1806235, encodes 16S rRNA
  source 1..490: mol_type = genomic DNA
agagtttgatcctggctcaggatgaacgctagctacaggcttaacacatgcaagtcgaggggcatcatgaacttagcttgctaagtttgatggcgaccggcgcacgggtgagtaacgcgtatccaacctgcccatgactcagggacagccctctgaaaggaggattaatacctgatgccgtcacgtcgcgacatcgcgtcgtgccgaaagattcatcggtcatggatggggatgcgtctgattaggcagtaggcggggtaacggcccacctagccgacgatcagtaggggttctgagaggaaggtcccccacattggaactgagacacggtccaaactcctacgggaggcagcagtgaggaatattggtcaatgggcgcgagcctgaaccagccaagtagcgtgaaggatgactgccctacgggttgtaaacttcttttattggggaataaccggcggcacgcgtgccgccctgcatgtaccctatgaat

SEQ ID NO: 5391 - DNA, 490 bp, unidentified
  misc_feature 1..490: note = Ascusbbf_433411, encodes 16S rRNA
  source 1..490: mol_type = genomic DNA
agagtttgatcatggctcaggatgaacgctagcggcaggcttaacacatgcaagtcgaggggcagcgtggtgtagcaatacaccgacggcgaccggcggaagggtgagtaacgcgtgagcaacatgccaccttcagggggatagtcattggaaacgatgcgtaataccccgtatacatttgttccgcatggggcggatgtgaaagatttatcgggaggtgattggctcgcgtgccattaggtagacggcggggtaacggcccaccgtgccgacgatggctaggggttctgagaggaagatcccccacattgggactgagacacggcccagactcctacgggaggcagcagtgaggaatattggacaatggaaggaattctgatccagccatgccgcgtgcgggaggacggccctatgggttgtaaaccgcttttgtgtgggagcaataaggtgtacgtgtacaccgacgagagtaccatacgaataagca

SEQ ID NO: 5392 - DNA, 490 bp, unidentified
  misc_feature 1..490: note = Ascusbbf_754484, encodes 16S rRNA
  source 1..490: mol_type = genomic DNA
agagtttgatcatggctcagaacgaacgctggcggcgcgtcttaagcatgcaagtcgagcgggattacctagcttgctaggtatgagagcggcggactggtgagtaacgcgtgggtgacgcacccttgggccggggatagccttaagaaattaagggtaatacaggatacggtcccttacgttggaggtaagggaggaaaggagccacggctccacccgaggaacggcccgcgacccatcagctggttggcggggaaaaggcccaccaaggcaatgacgggtatccggcctcagagggcgaccggacacattgggactgagatacggcccagactcctacgggaggcagcagctaagaatattccgcaatggggggaaccctgacggagcgacgccgcgtggacgatgaaggccggaaggttgtaaagtccttttctgacggaggaagaagtgccggagggaatgccggcatggtgactgtaggtcagga

SEQ ID NO: 5393 - DNA, 490 bp, unidentified
  misc_feature 1..490: note = Ascusbbf_263802, encodes 16S rRNA
  source 1..490: mol_type = genomic DNA
agagtttgatcctggctcaggatgaacgctggcggcacgcttaacacatgcaagtcgaacgaagtgcaaagagtttactttttacacttagtggcggacgggtgcgtaacgcgtgggtaacctacccttgacagggggataacgtatagaaatgtacgctaataccgcataagcccacggagtcgcatggctctgggggaaaagcgaatacggtcaaggatgggcccgcgtctgattaggtagttggcagggtaaaggcctaccaagcccacgatcagtagccggtctgagaggatggacggccacattgggactgagacacggcccaaactcctacgggaggcagcagtggggaatattgcacaatgggggaaaccctgatgcagcgatgccgcgtgaaggaagaagtgtttcggcacgtaaacttctatcagcaaggaagaaatcggacagtacttgagtaagcagccccggctaactacgtgccagc

SEQ ID NO: 5394 - DNA, 490 bp, unidentified
  misc_feature 1..490: note = Ascusbbf_1804036, encodes 16S rRNA
  source 1..490: mol_type = genomic DNA
agagtttgatcctggctcaggacgaacgctggcggcgtgcctaacacatgcaagtcgagcggggatgaattggatgagagcttcggcaggattctggtttattccagcggcggacgggtgagtaacgcgtgaacgatctgtcccatacagggggataacacttggaaacaggtgctaataccgcataagaccacggagccgcatggttctgaggtaaaaggagcgatccggtatggggtgagttcgcgtctgattagctggttggtgaggtaacggcccaccaaggcgacgatcagtagccgacctgagagggtgatcagccacattggaactgagacacggtccaaactcctacgggaggcagcagtgggaatattgggcaatgggcgaaagcctgacccagcaacgccgcgtgagggaagaaggttttcggattgtaacctctgtccttagtgacgaaggaagtgacggtagccaaggaggaagcccc

SEQ ID NO: 5395 - DNA, 490 bp, unidentified
  misc_feature 1..490: note = Ascusbbf_255558, encodes 16S rRNA
  source 1..490: mol_type = genomic DNA
agagtttgatcatggctcagattgaacgctggcggcatgccttacacatgcaagtcgaacggcagcacggggcaacctggtggcgagtggcgaacgggtgagtaaagcatcggaacgtaccctagagtgggggataactatccgaaaggatagctaataccgcatattctatgagtaggaaagcgggggatcttcggacctcgcgctctaggagcggccgatgtcagattagctagttggtggggtaaaggcctaccaaggcgacgatctgtagcgggtctgagaggatgatccgccacactgggactgagacacggcccagactcctacgggaggcagcagtggggaattttggacaatgggggcaaccctgatccagccatgccgcgtgagtgaagaaggccttcgggttgtaaagctctttcggccgggaagaaatcgtgtgggctaataccctgcatggatgacggtaccggaataagaagcaccg

SEQ ID NO: 5396 - DNA, 490 bp, unidentified
  misc_feature 1..490: note = Ascusbbf_1044938, encodes 16S rRNA
  source 1..490: mol_type = genomic DNA
agagtttgatcctggctcaggacgaacgctggcggcacgcttaacacatgcaagtcgaacggagaaactggatttattcattttcttagtggcggacgggtgagtaacacgtgagcaacctgcctttgagaggggaatagcttcgggaaactgatggtaataccctataatatatttgtaaggcatcttatggatatcaaagatttatcactcaaagatgggctcgcgtctgattagctagttggtgaggtaacggctcaccaaggcgacgatcagtagccggactgagaggttgaacggccacattgggactgagacacggcccagactcctacgggaggcagcagtggggaatattgcacaatggggggaaccctgatgcagcgatgccgcgtggaggaagaaggttttcggattgtaaactccttttgtctgggaagataatgactgtaccagatgaataagctccggctaactacgtgccagcagc

SEQ ID NO: 5397 - DNA, 490 bp, unidentified
  misc_feature 1..490: note = Ascusbbf_1051995, encodes 16S rRNA
  source 1..490: mol_type = genomic DNA
agagtttgatcctggctcaggacgaacgctggcggcgtgcttaacacatgcaagtcgaacggggcgataagaagcttgcttttttgagcctagtggcaaacgggtgagtaacgcgtggacaacctgccggagagatggggacaacatcccgaaagggttgctaataccgaatgacgtacgatgggcgcatgcccgatgtaccaaaggattctatccgctcttcgatgggtccgcgtccgattagctagttgggggggtaacggcccaccaaggcgacgatcggtagccggcctgagagggtgaacggccacattgggactgagacacggcccagactcctacgggaggcagcagtggggaatcttccgcaatgggcgcaagcctgacggagcaacgccgcgtgagtgaagaaggccttcgggccgtaaagctctgttgccggggaagagtggcaggaggggactcctgcagggacggtacccggcgagga

SEQ ID NO: 5398 - DNA, 490 bp, unidentified
  misc_feature 1..490: note = Ascusbbf_1872870, encodes 16S rRNA
  source 1..490: mol_type = genomic DNA
agagtttgatcctggctcaggataaacgctggcggcgtgcataacacattcaagtcgaacgaagcactttcgaacgagacttcggtcaagtttggatttgacttagtggcggacgggtgagtaacgcgtgagcaatctgccttggggtgcgggataacgtcgggaaactgacgctaataccgcatgacgcatactgatcgcatggtcggtatgccaaagatatattgccctgagatgagctcgcgtccgattagacagttggcggggtaacggcccaccaaatcaacgatcggtagccggactgagaggttgaacggccacattggaactgagatacggtccagactcctacgggaggcagcagtggggaatattgggcaatgggcgaaagcctgacccagcgacgccgcgtgagggaagaaggtcttcggattgtaaacctctttcagcagggaagaaggaagtgacggtacctgcagaagaagccacg

SEQ ID NO: 5399 - DNA, 490 bp, unidentified
  misc_feature 1..490: note = Ascusbbf_48553, encodes 16S rRNA
  source 1..490: mol_type = genomic DNA
agagtttgatcatggctcaggatgaacgctggcggcgtgcttaacacatgcaagtcgaacgaagcacttgagattgattcttcggaagatttctcttgtgacttagtggcggacgggtgagtaacgcgtgggtaacctgcctcacacagggggataacagttggaaacgaccgctaataccgcataacccgctagggccgcatggcccggacggaaaagatttatcggtgtgagatggacccgcgttggattagctagttggcagggtaacggcctaccaaggcgacgatccatagccggcctgagagggtgaacggccacattgggactgagacacggcccaaactcctacgggaggcagcagtggggaatattgcacaatgggggaaaccctgatgcagcgacgccgcgtgagtgaagaagtatttcggtatgtaaagctctatcagcagggaagaaaatgacggtacctgactaagaagccccggct

SEQ ID NO: 5400 - DNA, 490 bp, unidentified
  misc_feature 1..490: note = Ascusbbf_210128, encodes 16S rRNA
  source 1..490: mol_type = genomic DNA
agagtttgatcatggctcaggacgaacgctggcggcgtgcctaatacatgcaagtcgagcggaccgaacgggagcttgcttctgttcggttagcggcggacgggtgagtaacacgtgggtaacctgcccgtaagaccgggataactccgggaaaccggggctaataccggataacaccgaagaccgcatggtcttcggttgaaaggtggcttttgctaccacttacggatgggcccgcggcgcattagctagttggtgaggtaacggctcaccaaggcgacgatgcgtagccggcctgagagggtgaccggccacactgggactgagacacggcccagactcctacgggaggcagcagtagggaatcttccgcaatggacgaaagtctgacggagcgacgccgcgtgagcgaagaaggtcttcggatcgtaaagctctgttgttagggaagaagaagtaccgttcgaatagggcggtacggtgacggtac

SEQ ID NO: 5401 - DNA, 480 bp, unidentified
  misc_feature 1..480: note = Ascusbbf_21071, encodes 16S rRNA
  source 1..480: mol_type = genomic DNA
agagtttgatcctggctcaggatgaacgctggcggcgtgcctaacacatgcaagtcgtacggaaaggcccttcggggtactcgagtggcggacggctgagtaacgcgtgggaacgtgccccaaagtgagggataacttcgagaaatcggagctaataccgcatatgatcttcggattaaagaatttattcgctttgggagcggcctgcgtcggattagatagttggtgaggtaatggctcaccaagtcgacgatccgtagctggtctgagaggatgaccagccagactggaactgagacacggtccagactcctacgggaggcagcagtgaggaatcttccacaatgggcgaaagcctgatggagcaacgccgcgtgcaggatgaaggccttcgggttgtaaactgcttttattagtgaggaatatgacggtaactaatgaataaggatcggctaactacgtgccagcagccgcggtaat

SEQ ID NO: 5402 - DNA, 490 bp, unidentified
  misc_feature 1..490: note = Ascusbbf_112555, encodes 16S rRNA
  source 1..490: mol_type = genomic DNA
agagtttgatcatggctcaggatgaacgctggcggcgtgccttagacatgcaagtcgaacgaagcacctttttttgatcccttcggggtgatgagtttggtgacttagtggcgaacgggtgagtaacacgtgagtgacctgccccgaagtgcggcataacagggggaaacccttgctaattccgcatagtctcccacctcttgtggtgtgagtaaagatttatcgcttcgggatgggctcgcggtccatcagctagttggtagggtaatggcctaccaaggcgacgacggatagccggcctgagagggtgtacggccacagggacactgagatacgggtcccactcctacgggaggcagcagttaggaatcttccacaatgggcgaaagcctgatggagcgacgccgcgtgaaggatgaaggtcctcggatcgtaaacttctaaaagagggacgataatgacggtacctcttgaaaagcaccggctaact

SEQ ID NO: 5403 - DNA, 490 bp, unidentified
  misc_feature 1..490: note = Ascusbbf_155351, encodes 16S rRNA
  source 1..490: mol_type = genomic DNA
agagtttgatcctggctcaggacgaacgctggcggcgtgcttaacacatgcaagtcgaacgctgaagctcccagcttgctgggggtggatgagtggcgaacgggtgagtaacacgtgagtaacctgcccctgactctgggataagcgctggaaacggtgtctaatactggatatgagcaacggtcgcatggcctgttgttggaaagatttattggttggggatggactcgcggcctatcagcttgttggtgaggtaatggctcaccaaggcgacgacgggtagccggcctgagagggtgaccggccacactgggactgagacacggcccagactcctacgggaggcagcagtggggaatattgcacaatgggggaaaccctgatgcagcaacgccgcgtgagggatgaatgccttcgggttgtaaacctcttttagtagggaagaagcctttgggtgacggtacctgcagaaaaagcaccggctaactac

SEQ ID NO: 5404 - DNA, 490 bp, unidentified
  misc_feature 1..490: note = Ascusbbf_29395, encodes 16S rRNA
  source 1..490: mol_type = genomic DNA
agagtttgatcatggctcaggatgaacgctggcggcgtgccttagacatgcaagtcgaacgaagcacccactaccgatcgcttcggtgtgaggaaatgggtgacttagtggcgaacgggtgagtaacacgtgagtgacctgccccgaagttcggcataacagggggaaacccttgctaattccgaatgtgctcccacctcttgtggtgtgagtaaagatttatcgcttcgggatgggctcgcggtccatcagctagttggtagggtaatggcctaccaaggcgacgacggatagccggcctgagagggtgtacggccacaggggcactgagatacgggtcccactcctacgggaggcagcagttaggaatcttccacaatgggcgaaagcctgatggagcgacgccgcgtgagggatgaaggtctttggatcgtaaacctctaaaagtgggacgataatgacggtaccacttgaaaagcaccggctaact

SEQ ID NO: 5405 - DNA, 490 bp, unidentified
  misc_feature 1..490: note = Ascusbbf_10068, encodes 16S rRNA
  source 1..490: mol_type = genomic DNA
agagtttgatcatggctcaggacgaacgctggcggcatgcctaacacatgcaagtcgaacgaggatagcaatatccgagtggcgaacgggtgagtaacacgtgagcaacctgccttacacaacgggatacctactggaaacagtagttaatacggtataagaccacagtaccgcatgatacagtggtaaaagatttatcggtgtaagatgggctcgcggcgcattagctagttggagaggtaacggctcaccaaggcgacgatgcgtagccgacctgagagggtgatcggccacattgggactgagatacggcccagactcctacgggaggcagcagtggggaatattgggcaatggaggaaactcttacccagcaatgccgcgtgaacgaagaaggtcgtaagattgtaaagttctttagtcagggactaataaatgaaggatctgaagaataagctccggctaactacgtgccagcagccgcggtaat

SEQ ID NO: 5406 - DNA, 490 bp, unidentified
  misc_feature 1..490: note = Ascusbbf_2859, encodes 16S rRNA
  source 1..490: mol_type = genomic DNA
agagtttgatcctggctcaggatgaacgctagctacaggcttaacacatgcaagtcgcggggcatcatggtgtgtagcaatacacactgatggcgaccggcggatgggtgagtaacgcgtatccaacctggccctatctcgggcacagcccctcgaaagagggattaattcccgatgttcccacgagttcgcatgttcttgtgggcaaaggcctttgccggatagggatggggatgcgttccattaggcagtcggcggggtaacggcccaccgagccttcgatggataggggttctgagaggaaggccccccacactgggactgagacacggcccagactcctacgggaggcagcagtgaggaatattggtcaatggcggcaacgctgaaccagccaagtagcgtgagggattacggccctatgggttttaaacctcttttgttggggagcaacctgtgccactagtggcacactgcgagtacccttcga

SEQ ID NO: 5407 - DNA, 490 bp, unidentified
  misc_feature 1..490: note = Ascusbbf_7777, encodes 16S rRNA
  source 1..490: mol_type = genomic DNA
agagtttgatcatggctcagaatgaacgctggcggcatggattaggcatgcaagtcgaacgagaaagcggcttcggccgcgagtaaagtggcgaaagggtgagtaacacgtgaggaacctgccccctggcccggaacaagcctgtgaaaacgggtctgaaaccggatgaggccccctcccgcatgggggggcggccaaatattcatagccaagggatggcctcgcggcccattagctagttggcggggtgacggcccaccaaggctacgacgggtaggtggtctgagaggatggtcacccacactgggactgagacactgcccagactcctacgggaggctgcagtcgagaatcttccgcaatgggcgcaagcctgacggagcgatgccgcgtgagggacgaaggccttcgggtcgtaaacctctgtcgaggggaacgaacgcaatgacggtacccctcaagaaagccacggctaaccacgtgccagcag

SEQ ID NO: 5408 - DNA, 490 bp, unidentified
  misc_feature 1..490: note = Ascusbbf_30355, encodes 16S rRNA
  source 1..490: mol_type = genomic DNA
agagtttgatcctggctcaggacgaacgctggcggcgcgcttaacacatgcaagtcgaacggtgaaggtgcttcggcaccggatcagtggcggacgggtgagtaacacgtgagcaacctgcccttcagagggggataacattgagaaatcagtgctaataccgcataagaccacagtaaggcatcttacaggggtcaaaggagagatccgctgaaggatgggctcgcgtcccattaggcagttggcggggtaacggcccaccaaacctgtgatgggtagccgtgctgagaggcaggccggccacactggaactgagacacggtccagactcctacgggaggcagcagtggggaatattgggcaatggacgaaagtctgacccagcgacgccgcgtggaggaagaaggccctcgggttgtaaactcctgtgacaggggacgaaggaagtgacggtaccctgagaggaagccccggctaactacgtgccagc

SEQ ID NO: 5409 - DNA, 490 bp, unidentified
  misc_feature 1..490: note = Ascusbbf_40659, encodes 16S rRNA
  source 1..490: mol_type = genomic DNA
agagtttgatcctggctcaggatgaacgctagcgggaggcttaacacatgcaagccgagggagataatatgacttgtcatatttgacaccggcggacgggtgagtaacatgtatgcaacttgcctctatcagtgggataacccggggaaactcggactaataccgcataataacctaatcaaccttgattaagtttaaaagatttatcggatagagataggcatgcgtaggattagttagttggtgaggtaacggctcaccaagacgatgatccttagggggcctgagagggtgatcccccacactggtactgagacacggaccagactcctacgggaggcagcagtgaggaatattggacaatgggtgagagcctgatccagccatcccgcgtgcaggaagacggccctatgggttgtaaactgcttttatacaggaataaaccaccttacgagtagggtgttgaaggtactgtaggaataagcatcgg

SEQ ID NO: 5410 - DNA, 467 bp, unidentified
  misc_feature 1..467: note = Ascusbbf_1469229, encodes 16S rRNA
  source 1..467: mol_type = genomic DNA
agagtttgatcctggctcagaacgaacgctggcggcaggcttaacacatgcaagtcgagcgccccgcaaggggagcggcagacgggtgagtaacacgtgggaatctacccatctctacgggataaccagggaaacttggactaataccgtatacgtccttcgggagaaagatttatcggagatggatgagcccgcgtaagattagctagttggtggggtaatggcctaccaaggcgacgatctttagctggtctgagaggatgatcagccacactgggactgagacacggcccagactcctacgggaggcagcagtggggaatattggacaatgggcgcaagcctgatccagccatgccgcgtgagtgatgaaggccctagggttgtaaagctctttcaccggagaagataatgacggtacccggagaagaagccccggctaacttcgtgccagcagccgcggtaat

SEQ ID NO: 5411 - DNA, 490 bp, unidentified
  misc_feature 1..490: note = Ascusbbf_627804, encodes 16S rRNA
  source 1..490: mol_type = genomic DNA
agagtttgatcatggctcaggatgaacgctagcggcaggcctaatacatgcaagtcgaacgggatccagattgtagcttgctacagtttggtgagagtggcgtacgggtgcgtaacgcgtgagcaacctacccatatcaggggtatagcccggcgaaagtcggattaacaccgcataacaatgcagtaccgcatggtaccgtatttaaatatttataggatatggatgggctcgcgtgacattagctagttggtaaggtaacggcttaccaaggctatgatgtcaaggggctctgagaggagaatcccccacactggtactgagacacggaccagactcctacgggaggcagcagtaaggaatattggtcaatggagggaactctgaaccagccatgccgcgtgcaggatgactgccctacgggttgtaaactgcttttatacgggaacaaaccctactacgtgtagtaggctgagtgtactgtaggaat

SEQ ID NO: 5412 - DNA, 490 bp, unidentified
  misc_feature 1..490: note = Ascusbbf_672977, encodes 16S rRNA
  source 1..490: mol_type = genomic DNA
agagtttgatcatggctcaggatgaacgctagcggcaggcctaatacatgcaagtcggacgggattgcagtatagcttgctatactgcatgagagtggcgcacgggtgcgtaacgcgtgagcaacctgcccatgtcagggggatagcccgttgaaagacggattaataccgcataacacatagagaccacctggtttctatgtcaaatatttataggacatggatgggctcgcgtggcattagttagttggtaaggtaacggcttaccaagacgatgatgcctaggggctctgagaggagtgacccccacactggtactgagacacggaccagactcctacgggaggcagcagtagggaatattggtcaatgggcgggagcctgaaccagccatgccgcgtgcgggacgaaggccctatgggtcgtaaaccgcttttatacgggaacaaccgcagttacgagtaactgtctgagtgtaccgtaggaataa

SEQ ID NO: 5413 - DNA, 490 bp, unidentified
  misc_feature 1..490: note = Ascusbbf_171726, encodes 16S rRNA
  source 1..490: mol_type = genomic DNA
agagtttgatcctggctcaggacgaacgctggcggcgtgcctaacacatgcaagtcgagcggggatgtatggaggaagttttcggatggaatcgatacattctagcggcggacgggtgagtaacgcgtgagcaacctgcctttcacagggggataacggatcgaaagattcactaataccgcatgagaccacgataccgagtggtataggggtcaaaggagcaatccggtgaaagatgggctcgcgtccgattaggtagttggtggggtaatggctcaccaagccaatgatcggtagccgacctgagagggtgatcggccacactggaactgagagacggtccagactcctacgggaggcagcagtggggaatattgggcaatgggggaaaccctgacccagcaacgccgcgtgagggaagaaggttttcggattgtaaacctctgtccttggtgaagagcagaagacggtagccaaggaggaagccccg

SEQ ID NO: 5414 - DNA, 490 bp, unidentified
  misc_feature 1..490: note = Ascusbbf_366845, encodes 16S rRNA
  source 1..490: mol_type = genomic DNA
agagtttgatcctggctcaggacgaacgctggcggcgtgcttaacacatgcaagtcgagcggtaaggctccttcgggagtacacgagcggcgaacgggtgagtaacacgtgagcaatctgcccttcacttcgggataaccaccggaaacggtggctaataccgaatgcgaccacttcaggcatctgatggtggtggaaagttccggcggtgaaggatgagctcgcggcctatcagcttgttggtgaggtaatggctcaccaaggcttcgacgggtagccggcctgagagggtgaccggccacactgggactgagacacggcccagactcctacgggaggcagcagtggggaatattggacaatgggcgaaagcctgatccagcaacgccgcgtgagggatgaatgccttcgggttgtaaacctctttcagcggggacgaagcgaaagtgacggtacccgcagaagaaggaccggccaactacgtgccagc

SEQ ID NO: 5415 - DNA, 490 bp, unidentified
  misc_feature 1..490: note = Ascusbbf_1491448, encodes 16S rRNA
  source 1..490: mol_type = genomic DNA
agagtttgatcctggctcagattgaacgctagcgggatgctttacacatgcaagtcgaacggcagcacgaaataaacttgcttatcttggtggcgagtggcgaacgggtgagtaatgtatcggaacgtgcccagtagcgggggataactactcgaaagagtggctaataccgcatacgccctacgggggaaagggggggatcgcaagacctctcactattggagcggccgatatcggattagctagttggtggggtaaaggcctaccaaggctgcgatccgtagctggtttgagaggacgaccagccacactgggactgagacacggcccagactcctacgggaggcagcagtggggaattttggacaatgggggcaaccctgatccagccatcccgcgtgtgcgatgaaggccttcgggttgtaaagcacttttggcagggaagaaaaggcgcaggataataccttgcgccgctgacggtacctgcaga

SEQ ID NO: 5416 - DNA, 490 bp, unidentified
  misc_feature 1..490: note = Ascusbbf_451791, encodes 16S rRNA
  source 1..490: mol_type = genomic DNA
agagtttgatcctggctcagaatgaacgttggtggcgtggattaggcatgcaagtcgtgcgcgatggtccctttcgggggatcggagagcggcgaacggggtagtaaggcgtcggaacgtgcccacgggtccgggatagcggcgggaaactgccggtaataccggataattctccttggagcaaaggtgagattccgcctgtggagcggccgacgtgataccagcttgttggtgaggtaatggctcaccaaggctcagacgtctagggggtgtgagagcatggcccccaccactgggactgagacactgcccagacacctacgggtggctgcagtcgagaatcttcggcaatgggcgaaagcctgaccgagcgacgccacgtgcgggatgacggccctcgggttgtaaaccgctgtcgagggggatgaaatcacggttggcaatccaatcgtgttgacaaagccctggaggaagcgcgggctaagtacgt

SEQ ID NO: 5417 - DNA, 490 bp, unidentified
  misc_feature 1..490: note = Ascusbbf_5094, encodes 16S rRNA
  source 1..490: mol_type = genomic DNA
agagtttgatcctggctcaggatcaacgctggcggcgtgcctaatgcatgcaagtcgaacggggtggccttcgggtcacttacgtggcggacgggtgaggaacacgtgggcaacctgcctgatggagggggataaccgctggaaacagtgggtaataccgcataatcctggatctcgagtgggagatatagggaaagtcgcaagacgccgacagaggggcctgcgtccgattagctagacggtggggtaacggcctaccgtggcagtgatcggtagctggtttgagaggatgatcagccacacggggactgagacacggccccgactcctacgggaggcagcagcaaggaattttccgcaatgggcgaaagcctgacggagcaacgccgcgtgtgggatgacgcttttcggagtgtaaaccactgttcgtggggacgaagcactgacggtacccacggaggaaggcccggctaactacgtgccagcagcc

SEQ ID NO: 5418 - DNA, 490 bp, unidentified
  misc_feature 1..490: note = Ascusbbf_15609, encodes 16S rRNA
  source 1..490: mol_type = genomic DNA
agagtttgatcatggctcaggacgaacgctggcggcatgcctaacacatgcaagtcgaacggagttaagagaagcttgcttttcttaacttagtggcggacgggtgagtaacgcgtgagcaatctgcctttcagtggggaataatgttctgaaaagggcactaataccgcataatgtacagtgaccgcatgatcgttgtaccaaagatttatcgctgagagatgagctcgcgtccgattagccggttggtggggtaacggcctaccaaagctacgatcggtagccggactgagaggttgaacggccacattgggactgagacacggcccagactcctacgggaggcagcagtgggggatattgcgcaatgggggaaaccctgacgcagcaatgccgcgtgaaggatgaaggtcttcggattgtaaacttcttttgtcagggacgaacaatgacggtacctgacgaataagctccggctaactacgtgcca

SEQ ID NO: 5419 - DNA, 490 bp, unidentified
  misc_feature 1..490: note = Ascusbbf_2826, encodes 16S rRNA
  source 1..490: mol_type = genomic DNA
agagtttgatcatggctcaggacgaacgctggcggcgtgcttaatacatgcaagtcgagcgagctacttcggtagcgagcggcgcacgggtgagtaacgcgtagatgatctaccctcgagactgagatacctccgggaaactggagttaataccagataacgcacattggttggttctgatgtgttaaagcggtgcaagtcgcacttgaggatgagtctgcggcctatcagctagttggtggggtaacggcctaccaaggcgaagacgggtagctgatctgagaggatgatcagccacattgggactgagacacggcccaaactcctacgggaggcagcagtagggaatattgcgcaatggggggaaccctgacgcagcgacgccgcgtgagtgatgacggcctttttggttgtaaagctctgtaaagagggaaaaatgttatagtgaagagctataattgatggtacctctaaagtaaggaccggctaa

SEQ ID NO: 5420 - DNA, 490 bp, unidentified
  misc_feature 1..490: note = Ascusbbf_87020, encodes 16S rRNA
  source 1..490: mol_type = genomic DNA
agagtttgatcctggctcaggacgaacgctggcggcgtgcttaacacatgcaagtcgagcggaaaggctccttcgggggtactcgagcggcgaacgggtgagtaacacgtgagtaatctgcctctggcttcgggatagccctccgaaagggggattaataccggatatgaccagctactgcatggtggttggtggaaagttttttcggccagggatgtgctcgcggcctatcagcttgatggtggggtaatggcctaccatggcttcgacgggtagccggcctgagagggtgaccggtcacactgggactgagacacggcccagactcctacgggaggcagcagtggggaatattggacaatgggcggaagcctgatccagcaacgccgcgtgagggatgactgccttcgggttgtaaacctctttcagtaccgacgaagcgaaagtgacggtaggtacagaagaagcaccggccaactacgtgccagca

SEQ ID NO: 5421 - DNA, 490 bp, unidentified
  misc_feature 1..490: note = Ascusbbf_1593, encodes 16S rRNA
  source 1..490: mol_type = genomic DNA
agagtttgatcatggctcaggatgaacgctggcggcgtgcataacacattcaagtcgaacggacgaggccccttcggggactgagttagtggcggacgggtgagtaacgcgtgagcaacctacctatgcgagggggataacagttggaaacgactgctaataccgcataacatatgaatgaggcatctcagacatatcaaagattcattgcgcatagatgggctcgcgtccgattagatagttggtgaggtaacggcccaccaagtcgacgatcggtagccggactgagaggttgaacggccacattggaactgagagacggtccagactcctacgggaggcagcagtggggaatattgggcaatgggcgaaagcctgacccagcgacgccgcgtgagtgaagaaggtcttcggattgtaaagcttagttatcggggaagaaggaagtgacggtacccgaagagaaagccacggctaactacgtgccagc

SEQ ID NO: 5422 - DNA, 490 bp, unidentified
  misc_feature 1..490: note = Ascusbbf_92019, encodes 16S rRNA
  source 1..490: mol_type = genomic DNA
agagtttgatcatggctcaggacgaacgctggcggcgtgcctaatacatgcaagtcgagcggacctgaatggagcttgctccagacaggttagcggcggacgggtgagtaacacgtaggcaacctgcccgcaagaccgggataacgtagggaaacttacgctaataccggatagggcactctctcgcatgagagagtgcggaaaggtggcgcaagctaccacttgcggatgggcctgcggcgcattagctagttggtggggtaacggcctaccaaggcgacgatgcgtagccgacctgagagggtgaccggccacactgggactgagacacggcccagactcctacgggaggcagcagtagggaattttccacaatgggcgaaagcctgatggagcaacgccgcgtgaacgatgaaggtcttcggattgtaaagttctgttgtcagggacgaataagtaccgttcgaacagggcggtaccttgacggtac

SEQ ID NO: 5423 - DNA, 490 bp, unidentified
  misc_feature 1..490: note = Ascusbbf_97646, encodes 16S rRNA
  source 1..490: mol_type = genomic DNA
agagtttgatcctggctcaggatgaacgctagcgggaggcctaacacatgcaagccgagcggtagaaagtagcttgctacttttgagagcggcgtacgggtgcgtaacacgtgtgcaacctgcctttatctggggaatagcctttcgaaaggaagattaatgctccataacatattgaatggcatcatttaatattgaaagctccggcggatagagatgggcacgcgcaagattagttagttggtgaggtaacggctcaccaaggcgatgatctttagggggcctgagagggtgatcccccacactggtactgagacacggaccagactcctacgggaggcagcagtgaggaatattggacaatgggtgaaagcctgatccagccatcccgcgtgaaggatgacggccctatgggttgtaaacttcttttgtatagggataaacctaccctcgtgagggtagctgaaggtactgtacgaataagcaccgg

SEQ ID NO: 5424 - DNA, 490 bp, unidentified
  misc_feature 1..490: note = Ascusbbf_41062, encodes 16S rRNA
  source 1..490: mol_type = genomic DNA
agagtttgatcatggctcagaacgaacgctggcggcgcgtcttaagcatgcaagtcggacggcagggcaccttcgggtgtccgagagtggcgaacgggtgagtaacacgtaagtgatctgccccatggacggggatagcctgtggaaacacagggtaataccggatgagatgtcaatgattgaactatgacatgaaagtggctacggccacgccgtgggatgagcttgcggctcattagctagttgggggtgtaacggaccaccaaggcgacgatgagtagccggcctgagagggtgaacggccacattgggactgagacacggcccagactcctacgggaggcagcagctaagaatattccgcaatggggggaaccctgacggagcgacgccgcgtgaacgatgaaggcagagatgttgtaaagttcttttatcgctgaagaataaccggtgcagggaatggcaccgggatgacgttaggcgatgaata

SEQ ID NO: 5425 - DNA, 490 bp, unidentified
  misc_feature 1..490: note = Ascusbbf_171455, encodes 16S rRNA
  source 1..490: mol_type = genomic DNA
agagtttgatcctggctcagaacgaacgctggcggcgcgtcttaagcatgcaagtcgggcggcaaggaggtgcttgcacctccctagagcggcggactggtgagtaacgcgtaggtgacgcaccccccggacggggatagcctgcagaaatgcagggtaataccggatacggtcccgggccctggaagcccgggaggaaaggagcctcggctccgccgggggagcggcctgcgtcccatcagctagatggcggtgtaacggaccaccatggcgatgacgggtacccggcctgagagggtgagcgggcacattgggactgagatacggcccagactcctacgggaggcagcagctaagaatattccgcaatgcgcgaaagcgtgacggagcgacgccgcgtggacgatgaaggccggaaggttgcagagtcctttggcgcccgaggaaaggccgggggaggcaatgcccccggggtgactgtagggcgaga

SEQ ID NO: 5426 - DNA, 490 bp, unidentified
  misc_feature 1..490: note = Ascusbbf_117259, encodes 16S rRNA
  source 1..490: mol_type = genomic DNA
agagtttgatcctggctcaggatgaacgctggcggcgtgcttaatacatgcaagtcgaacgctgaagctgactagcttgctagttagtggatgagtggcgaacgggtgagtaatacgtaggtaacctgccctaaagtgggggatagcagttggaaacgactattaataccccataggtaattgaatggcatctttcaattattaaagacgcgtttgcgtcgctgtaggatggacttacggtgcattagcttgttggtgaggtaacggctcaccaaggcgatgatgcatagccggcctgagagggtgaacggccacattgggactgagacacggcccagactcctacgggaggcagcagtaaggaattttcggcaatgggcgaaagcctgaccgagcaacgccgcgtgagtgatgaaggtcttcggatcgtaaagctctgttgtaaaggaagaactgatacttgaggaaatgctagtatcttgacggtact

SEQ ID NO: 5427 - DNA, 490 bp, unidentified
  misc_feature 1..490: note = Ascusbbf_1750, encodes 16S rRNA
  source 1..490: mol_type = genomic DNA
agagtttgatcatggctcaggatgaacgctggcggcgtgcctaatacatgcaagtcgaacggataccttcgggtattagtggcgaacgggtgagtaacacgtaggtaatctaccttaaagacggggataacagatggaaacgactgttaataccggatagtatatggaatcgcatggtttcatatttaaagttcctccgggaacactttaagatgagcctgcggcgcattagttagttggcggggtaaaggcccaccaagacgatgatgcgtagccggactgagaggttgaacggccacattgggactgagaacggcccagactcctacgggaggcagcagtagggaattttcggcaatgggggaaaccctgaccgagcaacgccgcgtgattgaagaagtatttcggtatgtaaaaatcttttttagaggacgaacgaccatatcagggaatgggtatggagtgacggtactttaagaataagccccgg

SEQ ID NO: 5428 - DNA, 490 bp, unidentified
  misc_feature 1..490: note = Ascusbbf_654949, encodes 16S rRNA
  source 1..490: mol_type = genomic DNA
agagtttgatcatggctcagattgaacgctggcggcaggcctaatacatgcaagtcggacggtatcagcgatgatatagtggcgaacgggtgagtaacacgttggtgacctgccccaaagatgggaatatcacctggaaacgggtggcaaaaccgaataagcttggcgtagttagagaaagtcaagtaaaagagtgatctactttgggaggggcctgcggcccatcagttagttagtgagggtaacggcccaccaagacggcgacgggtaggggacctgagagggtggtcccccacaatggaactgaaacacggtccatacacctgcgggtggcagcagtagggaatattgcttaatgggcgaaagcctgaagcagcaacgccgcgtggacgaaggaggccttcgggtcgtaaagtccttttataggggaaaaggaaggatggtaccctatgaataagtctcggctaactacgtgccagcagccgcggta

SEQ ID NO: 5429 - DNA, 490 bp, unidentified
  misc_feature 1..490: note = Ascusbbf_1465, encodes 16S rRNA
  source 1..490: mol_type = genomic DNA
agagtttgatcatggctcagaacgaacgctggcggcaggcttaacacatgcaagttggacgggaatcggaaggtagcttgctacctgaagaggagagtagcgcacgggtgagtaacacgtgggaacatacctattagtgggggataacaattggaaacgattgataataccgcataagccctgagggggaaaggaggaattcgctgatagaatggcccgcggaagattaggcagttggtggggtaaaggcctaccaaacctacgatctatagctggtctgagaggacgatcagccacattgggactgagacacggcccaaactcctacgggaggcagcagtgaggaatattgggcaatgggggcaaccctgacccagccatgccgcgtgagtgaagaaggttttcgaattgtaaagctctttcagatgtgaagatgatgacggtagcatcagaagaagccccggcaaacttcgtgccagcagccgcggta

SEQ ID NO: 5430 - DNA, 490 bp, unidentified
  misc_feature 1..490: note = Ascusbbf_20688, encodes 16S rRNA
  source 1..490: mol_type = genomic DNA
agagtttgatcatggctcaggacgaacgctggcggcatgcctaatacatgcaagtcgaacgagcttccgttgaatgacgtgcttgcactgatttcaacaatgaagcgagtggcgaactggtgagtaacacgtgggaaatctgcccagaagcaggggataacacttggaaacaggtgctaataccgtataacaacaaaatccgcatggattttgtttgaaaggtggcttcggctatcacttctggatgatcccgcggcgtattagttagttggtgaggtaaaggcccaccaagacgatgatacgtagccgacctgagagggtaatcggccacattgggactgagacacggcccaaactcctacgggaggcagcagtagggaatcttccacaatggacgaaagtctgatggagcaatgccgcgtgagtgaagaagggtttcggctcgtaaaactctgttgttaaagaagaacacctttgagagtaactgttc

SEQ ID NO: 5431 - DNA, 490 bp, unidentified
  misc_feature 1..490: note = Ascusbbf_2983, encodes 16S rRNA
  source 1..490: mol_type = genomic DNA
agagtttgatcatggctcaggacgaacgctggcggcatgcctaacacatgcaagtcgaacggagcttaagaagcttgctttttaagcttagtggcggacgggtgagtaacgcgtgagtaacctgcctcttagtggggaataatgtactgaaaaggacactaataccgcataatgtattgagatcgcatggttttgataccaaagatttatcgctgagagatggactcgcgtccgattagccagttggtggggtaacggcctaccaaagcgacgatcggtagccggactgagaggttgaacggccacattgggactgagacacggcccagactcctacgggaggcagcagtgggggatattgcgcaatgggggaaaccctgacgcagcaatgccgcgtggaggatgaaggtcttcggattgtaaactccttttgtcagggacgaaaatgacggtacctgacgaataagctccggctaactacgtgccagca

SEQ ID NO: 5432 - DNA, 490 bp, unidentified
  misc_feature 1..490: note = Ascusbbf_28640, encodes 16S rRNA
  source 1..490: mol_type = genomic DNA
agagtttgatcctggctcaggatgaacgctagctacaggcttaacacatgcaagtcgaggggtaacatggcgggagcttgctcctgccgatgacgaccggcgcacgggtgagtaacgcgtatccaacctgcccctgagtcggggataaccttccgaaagggagcctaatacccgatgttgtgcgaggagggcatctgatttgcaccaaagatttatcgctcagggatggggatgcgtaggattaggcagcaggcggggtaacggcccacctggccggcgatccttaggggttctgagaggaaggtcccccacactggtactgagacacggaccagactcctacgggaggcagcagtgaggaatattggtcaatgggcgagagcctgaaccagccaagtagcgtgcaggatgacggccctacgggttgtaaactgcttttatgcggggataaagtgtgccatgtgtggcatattgcaggtaccgcatgaat

SEQ ID NO: 5433 - DNA, 490 bp, unidentified
  misc_feature 1..490: note = Ascusbbf_6998, encodes 16S rRNA
  source 1..490: mol_type = genomic DNA
agagtttgatcatggctcaggacgaacgctggcggcatgcctaacacatgcaagtcgaacggagttttgaggagcttgctccttaaaacttagtggcggacgggtgagtaacgcgtgagcaacctgcctttcagtggggaataatgttttgaaaagaacactaataccgcataatgtatagagatcgcatgatttttgtaccaaaggatttattcgctgagagatgggctcgcgtccgattagccagttggtggggtaacggcctaccaaagcaacgatcggtagccggactgagaggttgaacggccacattgggactgagacacggcccagactcctacgggaggcagcagtgggggatattgcgcaatgggggaaaccctgacgcagcaatgccgcgtgaaggatgaaggttttcggattgtaaacttcttttgtcagggacgaacgatgacggtacctgacgaataagctccggctaactacgtgc

SEQ ID NO: 5434 - DNA, 490 bp, unidentified
  misc_feature 1..490: note = Ascusbbf_30922, encodes 16S rRNA
  source 1..490: mol_type = genomic DNA
agagtttgatcatggctcaggatgaacgctggcggcgtgcctaacacatgcaagtcgaacgggactgattctacggagattcgtcgaagcagatgaaagtttagtggcggacgggtgagtaacgcgtgggtaacctgcctcatagagggggacaacagctggaaacggctgctaataccgcataagcccacactgccgcatggcagagggggaaaagatttatcgctatgagatggacccgcgtttgattagctagttggcggtgtaacggaccaccaaggcgacgatcaatagccggactgagaggttgaacggccacattgggactgagacacggcccaaactcctacgggaggcagcagtggggaatattgcacaatgggggaaaccctgatgcagcgacgccgcgtgggtgaagaagtttttcggaatgtaaagccctatcagcagggaagataatgacggtacctgactaagaagccccggctaa

SEQ ID NO: 5435 - DNA, 490 bp, unidentified
  misc_feature 1..490: note = Ascusbbf_10079, encodes 16S rRNA
  source 1..490: mol_type = genomic DNA
agagtttgatcatggctcaggattaacgctggcggcgtgcctaatacatgcaagtcgaatggtagcaataccatggcgaacgggtgagtaacacgtaggcaacctgtctttaagacgaggataaccactggaaacggtggataatactggataggatggtaaaaatcgcatgattaaccatttaaagtagcgatacacttagagaggggcctgcggcgcattagctagttggtaaggtaaaggcctaccaaggcgatgatgcgtagccggactgagaggttgaacggccacaatgggactgagaacggcccatactcctacgggaggcagcagtagggaattttcggcaatgggcgaaagcctgaccgagcaacgccgcgtgaacgaagaagtatttcggtatgtaaagttcttttattggggaagaaaaaattaaaattgacggtacccaatgaataagcaccggctaactacgtgccagcagccgcgg

SEQ ID NO: 5436 - DNA, 490 bp, unidentified
  misc_feature 1..490: note = Ascusbbf_20163, encodes 16S rRNA
  source 1..490: mol_type = genomic DNA
agagtttgatcatggctcaggatgaacgctggcggcgtgcctaacacatgcaagtcgaacgaagcatcttccttcggggagatgactgagtggcggacgggtgagtaacgcgtgggtaacctgccctttacagggggacaacagtcagaaatgactgctaataccgcatgagcgcacgagggggcatcctctcgtgtgaaaaactgaggtggtaaaggatgggcccgcgtctgattagctggttggcggggtaacggcccaccaaggcgacgatcagtagccggtctgagaggatgaacggccacattggaactgagacacggtccaaactcctacgggaggcagcagtgagggatattgcacaatggggggaaccctgatgcagcaacgccgcgtgggtgaagaagtatttcgatatgtaaagccctatcagcagggaagatgatgacggtacctgacgaagaagctccggctaaatacgtgccagcag

SEQ ID NO: 5437 - DNA, 490 bp, unidentified
  misc_feature 1..490: note = Ascusbbf_47840, encodes 16S rRNA
  source 1..490: mol_type = genomic DNA
agagtttgatcatggctcagaacgaacgctggcggcgcgtcttaagcatgcaagtcggacgggatatggtagcttgctaccattgagagtggcggactggtgagtaacgcgtgggtgacgtaccctggtgaccgggacagctcctagaaataggaggtaataccggatacgctggatgctgtcagagggcattcaggaaagcagcttttgctgcgcacgaggagcggcccgcgtgccattagctggttggtggggtaacggcctaccaaggcgatgatggctacccggcctaagagggtgaacgggcacattgggactgagatacggcccagactcctacgggaggcagcagctaagaatattccgcaatgggggaaaccctgacggagcgacgccgcgtggacgatgaaggccggaaggttgtaaagtccttttatgactgatgaataaggaaggtgagagaaacgccttctggtgacggtaggtcatg

SEQ ID NO: 5438 - DNA, 490 bp, unidentified
  misc_feature 1..490: note = Ascusbbf_31385, encodes 16S rRNA
  source 1..490: mol_type = genomic DNA
agagtttgatcatggctcaggatgaacgctggcggcaggcttaatacatgcaagtcgaacggtaaggccgagtgcagcaatgcatgaggcacacgagtggcgcacgggtgcgtaacgcgtatgcaacctgcccctaaccgggacaaaacgtcgagaaattggcgctaatatcccatgtggacactggacggcatcttccggtgtctaaagattcattggttagggatgggcatgcgtaacattagcttgttggcggggtaacggcccaccaaggcgacgatgtttaggggttctgagaggatggtcccccacactggaactgagacacggtccagactcctacgggaggcagcagtagggaatattgggcaatggaagcaattctgacccagccatgccgcgtgcaggaagacggccctatgggttgtaaactgctttttccgcggagtaaccgccgggacgcgtcccggcctgagagtacgcggggaat

SEQ ID NO: 5439 - DNA, 490 bp, unidentified
  misc_feature 1..490: note = Ascusbbf_170085, encodes 16S rRNA
  source 1..490: mol_type = genomic DNA
agagtttgatcatggctcaggatgaacgctggcggcgtgcctaacacatgcaagtcgaacggagatcatacagatggaggcttcggtcaaaagaagtttgatcttagtggcggacgggtgagtaacgcgtggagaacctgccctgtacagggggataacaggcagaaatgcctgctaataccgcataagcgcacgggagcgcatgcttctgtgtgaaaaactccggtggtacaggatggctccgcgttggattagctggttggcggggcaacggcccaccaaggcgacgatccatagccggcctgagagggtggacggccacattgggactgagacacggcccagactcctacgggaggcagcagtggggaatattgcacaatggggggaaccctgatgcagcgacgccgcgtgaaggaagaagtatctcggtatgtaaacttctatcagcagggaagagactgacggtacctgcacaagaagccccggc

SEQ ID NO: 5440 - DNA, 490 bp, unidentified
  misc_feature 1..490: note = Ascusbbf_231015, encodes 16S rRNA
  source 1..490: mol_type = genomic DNA
agagtttgatcatggctcaggacgaacgctggcggcgtgcttaacacatgcaagtcgaacgagattaagttggaagcttgcttttaacttagtcgagtggcggacgggtgagtaacgcgtgaataatctgtcctatacagggggataacgcatcgaaagatgtgctaataccgcgtaggaccacagcatcgcatggtgcaggggtgaaaggagcaatccagtatagggtgagttcgcgtctgattagatagttggtgaggtaacggcccaccaagtcaacgatcagtagccgacctgagagggtgatcggccacattgggactgagacacggcccagactcctacgggaggcagcagtggggaatattgggcaatgggcgaaagcctgacccagcaacgccgcgtgaaggaagaaggttttcggattgtaaacttctgtcctatgtgaagaggaagagacggtagcataggaggaagccccggctaacta

SEQ ID NO: 5441 - DNA, 490 bp, unidentified
  misc_feature 1..490: note = Ascusbbf_37974, encodes 16S rRNA
  source 1..490: mol_type = genomic DNA
agagtttgatcatggctcaggacgaacgctggcggcgtgcttaacacatgcaagtcgaacgaggataatgacttcggttgttattcgagtggcggacgggtgagtaacgcgtgagcaatctgtccttaagagggggataccaactggaaacagttgctaataccgcataagaccacggcctcacatggggctgaggtaaaagaaggaattcgcttaagggtgagctcgcgtctgattaggcagttggcggggtaacggcccaccaaaccgacgatcagtagccgacctgagagggtgaccggccacattgggactgagacacggcccagactcctacgggaggcagcagtggggaatattgggcaatgggcgcaagcctgacccagcaacgccgcgtgagggaagaaggttttcggattgtaaacctctgtcctgaaggacgaaggaagtgacggtacttcaggaggaagccccggctaactacgtgcca

SEQ ID NO: 5442 - DNA, 490 bp, unidentified
  misc_feature 1..490: note = Ascusbbf_1012382, encodes 16S rRNA
  source 1..490: mol_type = genomic DNA
agagtttgatcctggctcaggatgaacgctagcgggatgctttacacatgcaagtcgaacggcagcgcggacttcggtctggcggcgagtggcgaacgggtgagtaatgtatcggaacgtgcccagtagcgggggataactacgcgaaagcgtggctaataccgcatacgcccttatggggaaagcgggggaccttcgggcctcgcactattggagcggccgatatcggattagctagttggtggggtaaaggctcaccaaggcgacggtccgtagctggtttgagaggacgaccagccacactgggactgagacacggcccagactcctacgggaggcagcagtggggaattttggacaatgggggcaaccctgatccagccatcccgcgtgtgcgatgaaggccttcgggttgtaaagcacttttggcaggaaagaaacggctctggataatacctggagttactgacggtacctgcagaataagcac

SEQ ID NO: 5443 - DNA, 490 bp, unidentified
  misc_feature 1..490: note = Ascusbbf_224120, encodes 16S rRNA
  source 1..490: mol_type = genomic DNA
agagtttgatcatggctcaggataaacgctggcggcgcacataagacatgcaagtcgaacgaacttaatcgattcttttagtttcgaagcggttagtggcggactggtgagtaacacgtaagtaacctgcctattagaggggaataacagtgagaaatcattgctaataccgcataagctaacaatatcgcatgatatagttagaaaaggagcaatccgctaatagatgggctcgcgtctgattagctagttggtgaggtaacggcttaccaaggcgacgatcagtagccgaactgagaggttgaacggccacattgggactgagatacggcccagactcctacgggaggcagcagtcgggaatattgcgcaatggaggaaactctgacgcagtgacgccgcgtataggaagaaggttttcggattgtaaactattgtcgttagggaagatacaagacagtacctaaggaggaagctccggctaactatg

SEQ ID NO: 5444 - DNA, 490 bp, unidentified
  misc_feature 1..490: note = Ascusbbf_245933, encodes 16S rRNA
  source 1..490: mol_type = genomic DNA
agagtttgatcctggctcagaacgaacgctggtagcgtggattaggcatgcaagtcgaacgggatcagctggttagcaataattggctgtgagagtggcggattggggaggaacacgtgagcaacctgcctttgagttggggaaaaccattggaaacgatggctaataccggatgtggcgcctggcgacatcgctggagcgctaaagggggccgcaaggctctcgctcggagaggggctcgcgcaccatcagcttgttggcggggtaacggcccaccaaggcatacggttagctggtctgagaggatgaccagccccactgggactgagatactgcccagactcctacgggaggctgcagtcgaggatcatttgcaatgggcgaaagcctgacaatgcgacgctgcgtggaggatgaaggccttcgggttgtaaactcctgtcatgagggaacaggcgatgtgacctaatacgtcacaaagttgagtgta

SEQ ID NO: 5445 - DNA, 490 bp, unidentified
  misc_feature 1..490: note = Ascusbbf_144267, encodes 16S rRNA
  source 1..490: mol_type = genomic DNA
agagtttgatcctggctcaggatgaacgctagcggcaggcttaacacatgcaagtcgaggggcagcgcggggtagcaatactctggcggcgaccggcggaagggtgcgtaacgcgtgagcaacatgcccgtatgagggggataagcactggaaacggtgtctaataccccgtaacactttgaaccgcatgattcgaagttaaaagatttatcgcatacggattggctcgcgtgacattagctagttggcggggtaacggcccaccaaggcgacgatgtctaggggttctgagaggaaggtcccccacactggaactgagacacggtccagactcctacgggaggcagcagtgaggaatattggtcaatgggcggaagcctgaaccagccatgccgcgtgaaggaataaggccctatgggtcgtaaacttcttttgacggggagcaataagggcgtcgcgcacgtccgatgagagtactcgtcgaataagc

SEQ ID NO: 5446 - DNA, 490 bp, unidentified
  misc_feature 1..490: note = Ascusbbf_285995, encodes 16S rRNA
  source 1..490: mol_type = genomic DNA
agagtttgatcctggctcagaacgaacgccggcggcgcgtcttaagcatgcaagtcgggcgggattccagtgcttgcactggatgagagcggcggactggcgaggaacgcgtgggcgacgtgccccccgcaccgggacagccggcagaaatgccgggtgatacgggatgcggtcgcaacctgtggtgggttgcgaggaaagctgccacggcagcggcgggggagcggcccgcgtcccatcagctagtaggcggggcaaaggcccacctaggcgacgacgggtacccggactgagaggtcggacgggcgcattgggactgagatacggcccagactcctacgggaggcagcagctaagaatattccgcaatgggcgaaagcctgacggagcgacgccgcgtggacgatggaggccggaaggttgtaaagtcctctggcgggggaagaaaaactgtcgcagggaatggcggcagcgtgaccgtaccccgaga

SEQ ID NO: 5447 - DNA, 490 bp, unidentified
  misc_feature 1..490: note = Ascusbbf_732331, encodes 16S rRNA
  source 1..490: mol_type = genomic DNA
agagtttgatcatggctcaggacgaacgctggcggcgtgcttaacacatgcaagtcgaacgagcctactggagcagcaatggtccggtaagcgagtggcggacgggtgagtaacgcgtgagcaatctgtccatgcgagggggataacatttggaaacagatgctaataccgcataagaccacgaggccgcatggcgatggggtcaaaggagaaatccgcgcatgggtgagctcgcgtcccattagatagttggtgaggtaacggccaccaagtcgacgatgggtagccgatctgagaggatgaccggccacattggaactgagaaacggtccaaactcctacgggaggcagcagtgggaatattgggcaatgggcgcaagcctgacccagcaacgccgcgtgagggaagaaggttttcggattgtaaacctctatcgtcggggacgagtgagagacggtacccggcaaggaagctccggctaactacgtg

SEQ ID NO: 5448 - DNA, 490 bp, unidentified
  misc_feature 1..490: note = Ascusbbf_196124, encodes 16S rRNA
  source 1..490: mol_type = genomic DNA
agagtttgatcatggctcaggatgaacgctggcggcgtgcctaacacatgcaagtcgaacggagttatcaaaggaagctcttcggagcggaagctgataacttagtggcggactggtgagtaacgcgtgagcaacctgcctttcagaggggaataacacatggaaacgtgtgctaataccgcataacgtatatttaaggcatcttagatataccaaaggagcaatccgctgagagatgggctcgcgtctgattagttagttggcggggtaacggcccaccaagacaacgatcagtagccgaactgagaggttgatcggccacattgggactgagatacggcccagactcctacgggaggcagcagtggggaatattgggcaatggacgaaagtctgacccagcaacgccgcgtgaaggaagaaggtcttcggattgtaaacttttgtctttggagacgaacagatgacggtatccaaaaaggaagctccg

SEQ ID NO: 5449 - DNA, 490 bp, unidentified
  misc_feature 1..490: note = Ascusbbf_89432, encodes 16S rRNA
  source 1..490: mol_type = genomic DNA
agagtttgatcctggctcaggataaacgctggcggcgtgcctaatacatgcaagtcgatcgctggaattcaagcttgcttgaatgaaggagaggcgaacgggtgagtaatacataagcaacctgcccacgaagactgggataatccctggaaacggggactaataccggataggtaacatattcgcatgaagatgttattaaagattagaagcactggtggatgggcttatggcgcattagttagttggtgaggtaacggcccaccaagacgatgatgcgtagccggcctgagagggtgaacggccacattgggactgagacacggcccagactcctacgggaggcagcagtagggaattttcggcaatgggcgcaagcctgaccgagcaacgccgcgtgagtgatgacggccttcgggttgtaaagctctgttgtaagggaagaaaaccccggataggatccgggactgacggtaccttaccagaaagc

SEQ ID NO: 5450 - DNA, 490 bp, unidentified
  misc_feature 1..490: note = Ascusbbf_166154, encodes 16S rRNA
  source 1..490: mol_type = genomic DNA
agagtttgatcatggctcaggatgaacgctggcggcgtgcctaacacatgcaagtcgagcgagacgcgacggaacataacttcggttttgggaagtcgccgatagcggcggacgggtgagtaacgcgtgggcaacctgccccttactgggagatagccgagggaaacttcgagtaataccccataacgcatagacgagacatctcgattatgccaaagatttatcggtaagggatgggcccgcgtccgattagctggttggtgaggcagcggctcaccaaggcgacgatcggtagccggcctgagagggcggacggccacattggaactgagacacggtccagactcctacgggaggcagcagtggggaatattgcacaatggagggaactctgatgcagcaacgccgcgtgaaggaagaagggtttcgacccgtaaacttctgtccttggggaagaaaaagatgacggtacccatggaggaagccccgg

SEQ ID NO: 5451 - DNA, 490 bp, unidentified
  misc_feature 1..490: note = Ascusbbf_1830708, encodes 16S rRNA
  source 1..490: mol_type = genomic DNA
agagtttgatcctggctcagaacgaacgctggcggcgcgtcttaagcatgcaagtcgagcggcagcagcaatgcgagagcggcggacgggtgagtaacacgtgggtaatctgccctccagtcggggatagcctgtggaaacacaggataataccggatgcgatggtcagtcataagactgattaggaaaggggctatggccccgctggaggatgagcccgcgtcccattagctagatggcagggtaaaggcctaccatggcgatgatgggtagccggcctgagagggtgaacggccacattggaactgagacacggtccagactcctacgggaggcagcagctaagaatcttccacaatggacggaagtctgatggagcgacgccgcgtgcgcgatgaaggccgtgaggttgtaaagcgcttttcttgagggggaacaacgcctgcagggaatggcaggcggatgacgtgaatcgaggaataagccccgg

SEQ ID NO: 5452 - DNA, 490 bp, unidentified
  misc_feature 1..490: note = Ascusbbf_744892, encodes 16S rRNA
  source 1..490: mol_type = genomic DNA
agagtttgatcctggctcaggatgaacgctagctacaggcttaacacatgcaagtcgaggggcatcatgagagttgcttgcaacttttgatggcgaccggcgcacgggtgcgtaacgcgtatcgaacctaccctatacacggggatagccttgcgaaagcaagattaatacccgatgttttgccattactgcatggtattggtaataaagatttatcggtataggatggcgatgcgtcccattagttagttggcggggtaacggcccaccaagacatcgatgggtaggggttctgagaggaaggtcccccacactggaactgagacacggtccagactcctacgggaggcagcagtgaggaatattggtcaatggtcgtaagactgaaccagccaagtagcgtgcaggaatacagccttataggttttaaactgcttttatgcgagagtaaagttaggcacgtgtgcttatttgcaagtatcgcaagaaa

SEQ ID NO: 5453 - DNA, 490 bp, unidentified
  misc_feature 1..490: note = Ascusbbf_1869528, encodes 16S rRNA
  source 1..490: mol_type = genomic DNA
agagtttgatcctggctcaggatgaacgctggcggcatgcctaagacatgcaagtcgaacgaggtgtcccattgaagatgaagtgcttgcacggatttggatttggatttgcacctagtggcgaacgggtgagtaacacatgggtgacctacctttaagactgggatacctattggaaacgatagttaataccggataacacgtatattcgtttatacgttgaaaggagcctttaaagctctacttttagatgggcctgtggggtattagatagttggtggggtaatggcctaccaagtcaacgatgcctagccgaactgagaggttgatcggccacattgggactgagacacggcccaaactcctacgggagacagcagttaggaatattcgtcaatgggggaaaccctgaacgagcaatgccgcgtgaacgatgacggccctatgggttgtaaagttctgttgcgtgggacgaacgattaggatagga

SEQ ID NO: 5454 - DNA, 490 bp, unidentified
  misc_feature 1..490: note = Ascusbbf_1293741, encodes 16S rRNA
  source 1..490: mol_type = genomic DNA
agagtttgatcctggctcaggacgaacgctggcggcgtgcttaacacatgcaagtcgaacgagggtgcaggagagcttgcccgaatgcagccgaatggcggacgggtgagtaacgcgtgaacaatctgtctcatacagggggataacgcgtcgaaagacgtgctaataccgcgtaggaccacagcaccgcatggtgcgggggtgaaaggcttcggccggtatggggtgagttcgcgtctgattagatagttggtgaggtaacggctcaccaagtcaacgatcagtagccgacctgagagggtgatcggccacattgggactgagacacggcccagactcctacgggaggcagcagtggggaatattgggcaatgggcggaagcctgacccagcaacgccgcgtgagggaagaaggttttcggattgtaaacctctgtcctgtatgaagagaaggagacggtagtacaggaggaagccccggctaactacg

SEQ ID NO: 5455 - DNA, 490 bp, unidentified
  misc_feature 1..490: note = Ascusbbf_292302, encodes 16S rRNA
  source 1..490: mol_type = genomic DNA
agagtttgatcatggctcaggataaacgctggcggcgtgcataacacattcaagtcgaacgaagctccggaacttgcttgcaagggaaggaagacttagtggcggacgggtgagtaacgcgtgagcaacctgcctcggggtgcgggataacgtttggaaacgaacgctaataccgcatgacgcacggagatcgcatggtcactgtgccaaagatttattgccctgagatgggctcgcgtccgattagacagttggtgaggtaacggctcaccaaatcaacgatcggtagccggactgagaggttgaacggccacattggaactgagatacggtccagactcctacgggaggcagcagtggggaatattgggcaatgggcgaaagcctgacccagcgacgccgcgtgagggaagaaggtcttcggattgtaaacctctttcagcagggaagaaggaagtgacggtacctgcagaagaagccacggctaact

SEQ ID NO: 5456 - DNA, 490 bp, unidentified
  misc_feature 1..490: note = Ascusbbf_208454, encodes 16S rRNA
  source 1..490: mol_type = genomic DNA
agagtttgatcctggctcaggacgaacgctggcggcgtgcttaacacatgcaagtcgaacggggctgattagcttgctaagaaagcccagtggcaaacgggtgagtaacgcgtaggcaacctgccgcggagatggggacaacaccccgaaaggggtgctaataccgaatgaagtacgagggacgcatgtcccatgtaccaaagggcgaaagcccgctccgcgatgggcctgcgtccgattagctggttggcggggcagcggcccaccaaggcgacgatcggtagccggtctgagaggatgaacggccacattgggactgagacacggcccagactcctacgggaggcagcagtggggaatcttccgcaatgggcgaaagcctgacggagcaacgccgcgtgagtgaagaaggccttcgggccgtaaagctctgttgtcggggacgagtgcccgggttggaagcccgggagggacggtacctgacgaggaa

SEQ ID NO: 5457 - DNA, 490 bp, unidentified
  misc_feature 1..490: note = Ascusbbf_143555, encodes 16S rRNA
  source 1..490: mol_type = genomic DNA
agagtttgatcctggctcaggacgaacgctggcggcgtgcttcatacatgcaagtcgaacgagaagctaaagcttgctttagtggaaagtggcggacgggtgagtaatgtgtagagaatctgccctacagtgggggatagcagttggaaacgactattaataccccatatgagcgtaattgagatattattcttgaaagatttatcgctgtaggatgagtctgcatctgattagcttgttgggggtgtaatggaccaccaaggcgacgatcagtagctggtttgagaggatgatcagccacaatgggactgagacacggcccatactcctacgggaggcagcagtagggaattttgcgcaatgggcgaaagcctgacgcagcaacgccgcgtgatcgtagaagcccttcggggtgtaaagatctgtcagtagggacgaaaaatgactgtacctacagaggaagcaccggctaactccgtgccagcagccg

SEQ ID NO: 5458 - DNA, 490 bp, unidentified
  misc_feature 1..490: note = Ascusbbf_454, encodes 16S rRNA
  source 1..490: mol_type = genomic DNA
agagtttgatcatggctcaggatgaacgctagcggcaggcttaacacatgcaagtcgaggggcagcgcgaggtagcaatactttggcggcgaccggcgaaagggtgcgtaacgcgtgagcaacttgcccgtatctgggacataagcggtggaaacgccgtctaatttcccataacaacagaggccgcatgacttctgtttgaaagatccgtcggatacggatgggctcgcgagacattagctagtcggcgtggtaacggcacaccgaggcgacgatgtctaggggttctgagaggaaggtcccccacactggaactgagacacggtccagactcctacgggaggcagcagtgaggaatattggtcaatgggcgcaagcctgaaccagccatgccgcgtgaaggaataaggccctatgggtcgtaaacttcttttgtggtggagcaataaggtgtacgtgtacaccgatgagagtacatcacgaataagca

SEQ ID NO: 5459 - DNA, 480 bp, unidentified
  misc_feature 1..480: note = Ascusbbf_23084, encodes 16S rRNA
  source 1..480: mol_type = genomic DNA
agagtttgatcatggctcagaacgaacgctggcggcaggcttaacacatgcaagtcgaacgagaagtcaccttcgggtgatggaaagtggcagacgggtgagtaacgcgtgggaacctacctagtggtacggaataactcagggaaacttgggctaataccgtatgtgcccgaaaggggaaagatttatcgccattagatgggcccgcgtcggattagctagttggtggggtaacggcccaccaaggcgacgatccgtagctggtctgagaggatgatcagccacactgggactgagacacggcccagactcctacgggaggcagcagtggggaatattggacaatgggcgcaagcctgatccagccatgccgcgtgagtgatgaaggccctagggttgtaaagctctttcgacggggacgataatgacggtacccgtagaagaagccccggctaacttcgtgccagcagccgcggtaat

SEQ ID NO: 5460 - DNA, 487 bp, unidentified
  misc_feature 1..487: note = Ascusbbf_68, encodes 16S rRNA
  source 1..487: mol_type = genomic DNA
agagtttgatcatggctcagaacgaacgctggcggcaggcttaacacatgcaagttgaacgggaatgtttgatagcttgctattaagcatgagagtagcgcactggtgagtaacacgtgggaacgtgccttttagtgggggacaacagttggaaacgactgctaataccgcatacgccctgagggggaaagatttatcgctaaaagatcggcccgcggaagattaggtagtaggtggggtaaaggcctacctagccgacgatctatagctggtctgagaggacgatcagccacattggaactgagacacggtccagactcctacgggaggcagcagtgaggaatattgggcaatggagggaactctgacccagccatgccgcgtgagtgagaaggtcttcggattgtaaagctctttcggatgggacgatgatgacggtaccatctaaagaagccccggcaaacttcgtgccagcagccgcggtaat

SEQ ID NO: 5461 - DNA, 490 bp, unidentified
  misc_feature 1..490: note = Ascusbbf_671845, encodes 16S rRNA
  source 1..490: mol_type = genomic DNA
agagtttgatcatggctcaggacgaacgctggcggcgtgcttcatacatgcaagttgaacgagaaacttacttcggtaagtggaaagtggcggacgggtgagtaatgtgtagagaatctgccccggagagggggacaacagagggaaacttctgctaataccccatatgagcgtagttgtgatactattcttgaaagatttatcgctccgggatgagtctgcatctgattagctagttgggggtgtaatggaccaccaaggcgacgatcagtagctggtttgagaggatgatcagccacaatgggactgggacacggcccatactcctacgggaggcagcagtagggaattttgcgcaatgggcgaaagcctgacgcagcaacgccgcgtgatcgcagacggccttcgggttgtaaagatctgtcagtagggacgaacaatgactgtacctacagaggaagcaccggctaactccgtgccagcagccgcg

SEQ ID NO: 5462 - DNA, 490 bp, unidentified
  misc_feature 1..490: note = Ascusbbf_5975, encodes 16S rRNA
  source 1..490: mol_type = genomic DNA
agagtttgatcctggctcaggacgaacgctggcggcgtgcttcatacatgcaagtcgaacgagaacttagagcttgctctaagggaaagtggcggacgggtgagtaatatgtagagaatctgcccttgagcgggggacaacagagggaaacttctgctaataccccatatgagcttggttgaaataccaatcttgaaaactccggtgctcaaggatgagtctgcatctgattagcttgttggcggtgtaatggaccaccaaggcgacgatcagtagctggtttgagaggatgatcagccacaatgggactgagacacggcccatactcctacgggaggcagcagtagggaattttgcgcaatgggcgaaagcctgacgcagcaacgccgcgtgaacgattaagcccttcggggtgtaaagttctgtcagtagggacgaatcttgacggtacctacagaggaagcaccggctaactccgtgccagcagccg

SEQ ID NO: 5463 - DNA, 490 bp, unidentified
  misc_feature 1..490: note = Ascusbbf_11230, encodes 16S rRNA
  source 1..490: mol_type = genomic DNA
agagtttgatcctggctcaggatgaatgctggcggcatgcctaatacatgcaagtcgagcggcagcgaggatctcatcctattctggattcattcaagaatagaatgagatctgtcggcgagcggcggacggctgagtaacgcatgggaacgcaccccaaactgagggataactagtcgaaagattagctaataccgcatgtgatcttcggattaaagctttcgggcggtttgggagcggcctgtgtacgattagatagttggtgaggtaatggctcaccaagtcgacgatcgttagatggtttgagaggatgatcatccagactgggactgagacacggcccagactcctacgggaggcagcagtagggaatctttcacaatgggcgaaagcctgatggagcaatgccgcgtgcaggacgaaggccttcgggttgtaaactgcttttataagcgaggaatatgacggtaacttatgaataaggatcggc

SEQ ID NO: 5464 - DNA, 490 bp, unidentified
  misc_feature 1..490: note = Ascusbbf_30955, encodes 16S rRNA
  source 1..490: mol_type = genomic DNA
agagtttgatcatggctcaggatgaacgctggcggcgtgcataacacattcaagtcgaacggacgagggggcttcggtccccgagttagtggcggacgggtgagtaacgcgtgagcaacctgcccttttgtgggggataacgacgggaaactgtcgctaataccgcataaccagatagtaccgcatggtacagtctgcaaagatttattgcgaaaggatgggctcgcgtccgattaggcagttggtgaggtaacggctcaccaaaccgacgatcggtagccggactgagaggttgaacggccacattggaactgagatacggtccagactcctacgggaggcagcagtggggaatattgggcaatgggcgaaagcctgacccagcgacgccgcgtgagggaagaaggtcttcggattgtaaaccttaaacaacagggacgaagaagtgacggtacctgttaggaagccacggctaactacgtgccagcag

SEQ ID NO: 5465 - DNA, 490 bp, unidentified
  misc_feature 1..490: note = Ascusbbf_120181, encodes 16S rRNA
  source 1..490: mol_type = genomic DNA
agagtttgatcctggctcaggacgaacgctggcggcgtgcttaaaacatgcaagtcgaacgggattgattggagtacttgtacaaagattaatctagtggcggacgggtgagtaacgcgtgagcaatctgcctatcacaggggaataacgactggaaacgggcgctaataccgcatatgaccacgacctggcatcaggaaggggtgaaaggagagatccggtgatagatgagcttgcgtctcattagctagttggtgaggtaacggcccaccaaggcaacgatgagtagccgatctgagaggatgaacggccacattggaactgagagacggtccaaactcctacgggaggcagcagttaggaatattgggcaatggaggaaactctgacccagcaacgccgcgtgaaggaagaaggtcttcggattgtaaacttctgatctgtggaaaaaataaagtgatggtaccacaggagcaagccacggctaact

SEQ ID NO: 5466 - DNA, 490 bp, unidentified
  misc_feature 1..490: note = Ascusbbf_708709, encodes 16S rRNA
  source 1..490: mol_type = genomic DNA
agagtttgatcatggctcaggacgaacgctggcggcgtgcctaatacatgcaagtcgagcggagctaatcttttcttcggaaaagatgatgcttagcggcggacgggtgagtaacacgtaggtaacctgcccataagactgggataacattcggaaacggatgctaataccagataatcaagtttctcgcatgagagacttgggaaaggcggagcaatctgtcacttatggatggacctgcggtgcattagctagttggtgaggtaacggctcaccaaggcgacgatgcatagccgacctgagagggtgatcggccacactgggactgagacacggcccagactcctacgggaggcagcagtagggaatcttccacaatggacgaaagtctgatggagcaacgccgcgtgagtgatgaaggccttcgggtcgtaaagctctgttgccagggaagaacgctcaggagagtaactgctcctgaggtgacggt

SEQ ID NO: 5467 - DNA, 490 bp, unidentified
  misc_feature 1..490: note = Ascusbbf_350639, encodes 16S rRNA
  source 1..490: mol_type = genomic DNA
agagtttgatcatggctcaggatgaacgctagctacaggcttaacacatgcaagtcgaggggcagcacgggcattgcttgcaatgcctggtggcgaccggcgaatgggtgagtaacgcgtatccaacctgccccgtgcccgggaatagcccttggaaacgaggattaacgcccgatggcgtgccgcttccgcatggcggcggcactaaatgcgaaggctcgggatggggatgcgttccattaggttgttggcggggtaacggcccaccaagcccgcgatggataggggttctgagaggaaggtcccccacattggaactgagacacggtccaaactcctacgggaggcagcagtgaggaatattggtcaatgggcggaagcctgaaccagccaagtagcgtgagggatgacggccctacgggttgtaaacctcttttatgcggggataaagtgctccacgcgtggagttttgcaggtaccgcatgaataa

SEQ ID NO: 5468 - DNA, 490 bp, unidentified
  misc_feature 1..490: note = Ascusbbf_80729, encodes 16S rRNA
  source 1..490: mol_type = genomic DNA
agagtttgatcatggctcaggatgaacgctagcggcaggcctaacacatgcaagtcgaggggtaggagcagcttgctgctttgagaccggcgcacgggtgcgtaacgcgtatgcaatctaccttatactaagggatagcccagagaaatttggattaataccttatagtatatttgaatggcatcatttagatattaaagatttatcggtataagatgagcatgcgtcccattagttagttggtgtggtaacggcataccaagacgatgatgggtaggggtcctgagagggagatcccccacactggtactgagacacggaccagactcctacgggaggcagcagtgaggaatattggtcaatggaggcaactctgaaccagccatgccgcgtgcaggaagacggtcctatggattgtaaactgcttttgtacgggaagaaaccatactacgtgtagtaaactgacggtaccgtaagaataaggatcggc

SEQ ID NO: 5469 - DNA, 490 bp, unidentified
  misc_feature 1..490: note = Ascusbbf_1714194, encodes 16S rRNA
  source 1..490: mol_type = genomic DNA
agagtttgatcatggctcaggacgaacgctggcggcgtgcctaacacatgcaagtcgagcggggatatccaggaggagagctacggcaggaatcgggatatccaagcggcggacgggtgagtaacgcgtgagcaacctgtcccagacagggggataccagatggaaacatctgctaataccgcataagaccacgctctcgcatgggagcgaggtaaaaggaggaatccggtttggggtgggctcgcgtccgattagctagttggtgaggtaacggctcaccaaggcgacgatcggtagccgacctgagagggtgatcggccacattggaactgagacacggtccaaactcctacgggaggcagcagtggggaatattgggcaatgggcgaaagcctgacccagcaacgccgcgtgagggaagaaggttttcggattgtaaacctctgtcctaagtgacgaaggaagtgacggtagcttaggaggaagccc

SEQ ID NO: 5470 - DNA, 490 bp, unidentified
  misc_feature 1..490: note = Ascusbbf_247812, encodes 16S rRNA
  source 1..490: mol_type = genomic DNA
agagtttgatcatggctcaggatgaacgctggcggcatgcctaatacatgcaagtcaaacggagttagcaataactcagtggcgaacgggtgagtaacacataggtaacctatcattaagacgaggataacagttggaaacgactgataatactggattgtatattttttcacatggaagaatatttaaagacgcaaccaagcgtcacttaacgaggggcctatggcgcattagctagttggtgaggtaatggcccaccaaggcgacgatgcgtagctgcgctgagaggcgaaacagccacactgggactgagacacggcccagactcctacgggaggcagcagtagggaattttcggcaatgggcgaaagcctgaccgagcaatgccgcgtgaacgaagaagatcttcggattgtaaagttctgttgttaggaaagaatactatatataggaaatgatatatagatgacggtacctaactagaaagccc

SEQ ID NO: 5471 - DNA, 490 bp, unidentified
  misc_feature 1..490: note = Ascusbbf_721870, encodes 16S rRNA
  source 1..490: mol_type = genomic DNA
agagtttgatcctggctcaggatgaacgctggcggcgtgcctaacacatgcaagtcgagcggagatatacgccgaaagaagcttcggcctatttcattgtatatcttagcggcggatgggtgaggaacgcgtggagaacctgcccttcacagggggataacagcgggaaactgctgttaataccgcatatgctcacggtaccgcatggtacagggaggaaagcgctcagcggtgaaggatggctccgcgtcggattagccagttggcggggtaacggcccaccaaagcaatgatccgtagccggcctgagagggcgaccggccacattgggactgagacacggcccaaactcctacgggaggcagcagtgggggatattgcacaatgggggaaaccctgatgcagcgacgccgcgtgaaggaagaagtgcttcggcatgtaaacttctatcagcagggaagaagatgacggtacctgcacaagaagcccc

SEQ ID NO: 5472 - DNA, 490 bp, unidentified
  misc_feature 1..490: note = Ascusbbf_1300708, encodes 16S rRNA
  source 1..490: mol_type = genomic DNA
agagtttgatcctggctcaggacgaacgctggcggcgcgcttaacacatgcaagtcgaacggagacattctgttcactgggtagtggaggcgagcgagtgtttgaaagaacaagcgtcgagcttctactgctgagtgaatagaatgtcttagtggcggacgggtgagtaacacgtgaggaacctgccttgcagtggggaataacagtccgaaaggactgctaataccgcataacgtattctgaccgcatgatcgggataccaaagatttatcgctgtgagatggcctcgcgtccgattagacagttggcggggtaacggcccaccaaatctacgatcggtagccggactgagaggttgatcggccacattgggactgagacacggcccagactcctacgggaggcagcagtgggggatattgcacaatgggcgcaagcctgatgcagcgacgccgcgtgtgggaagacggtcttcggattgtaaaccact

SEQ ID NO: 5473 - DNA, 490 bp, unidentified
  misc_feature 1..490: note = Ascusbbf_971252, encodes 16S rRNA
  source 1..490: mol_type = genomic DNA
agagtttgatcatggctcaggataaacgctggcggcgcacataagacatgcaagtcgaacggacttaactcattcttttagattgagagcggttagtggcggactggtgagtaacacgtaagcaacctgcctattagaggggaataacaatgagaaatcattgctaataccgcataagctgataatatcgcatgatatagtcagaaaaggagcaatccgctaatagatgggcttgcggctgattagctagttggtggggtaacggcctaccaaggcgacgatcagtagccgagctgagaggctctacggccacattgggactgagatacggcccagactcctacgggaggcagcagtcgggaatattgcgcaatggaggaaactctgacgcagtgacgccgcgtataggatgaaggttttcggattgtaaactattgtcgttagggaagaaatttgacagtacctaaggaggaagctccggctaactatg

SEQ ID NO: 5474 - DNA, 490 bp, unidentified
  misc_feature 1..490: note = Ascusbbf_1855704, encodes 16S rRNA
  source 1..490: mol_type = genomic DNA
agagtttgatcctggctcaggatgaacgctggcggcgtgcctaacacatgcaagtcgaacggagatgaagagaagttttcggacagacctttatcttagtggcggacgggtgagtaacgcgtggataacctgcctctttctgggggatagcagttggaaacgactgataataccgcataagctccatggaccgcatgatccatggaggagagatttatcgggaagagatggatccgtgtctgattagccagttggcggggtaacggcccaccaaagcgacgatcagtagccggcctgagagggtgaacggccacattgggactgagacacggcccaaactcctacgggaggcagcagtggggaatattgcacaatgggcgcaagcctgatgcagcgacgccgcgtgagtgaagaagtatttcggtatgtaaagctctatcagcagggaagaaaggcccttcggggagatgacggtacctgactaagaagc

SEQ ID NO: 5475 - DNA, 486 bp, unidentified
  misc_feature 1..486: note = Ascusbbf_641648, encodes 16S rRNA
  source 1..486: mol_type = genomic DNA
agagtttgatcatggctcagaatgaacgttggcggcgtggattaggcatgcaagtcgcgcgacaaggtccttcgggactggaggagcggcaaacggggtagtaaggcatcggtacgtgccctcgagacggggatagcggcgggaaactgccggtaatacccgataatctctatggagcaaaggtccgccgcttgaggagcggccgatgtggtatcaggtagttggcggggtaacggcccaccaagccatcgacgcctagggggtgtgagagcacgacccccaccactgggactgagatactgcccagacacctacgggtggctgcagtcgagaatcttcggcaatgggcgcaagcctgaccgagcgacgccgcgtgcgggatgaaggcccttgggttgtaaaccgctgtcaggggggagcaaggcgtaagcttgagcgagccccagaggaagcacgggctaagttcgtgccagcagccgcggtaat

SEQ ID NO: 5476 - DNA, 490 bp, unidentified
  misc_feature 1..490: note = Ascusbbf_721212, encodes 16S rRNA
  source 1..490: mol_type = genomic DNA
agagtttgatcctggctcaggatgaacgctggcggcgtgcctaacacatgcaagtcgagcgagatgctcatgattgaagcttcggttgattttatgagcggaaagcggcggacgggtgagtaacgcgtaggcaacctgccccttgcagagggatagcctcgggaaaccgggattaaaacctcataatgcgccaagaagacatcttcatgacgccaaagatttatcggcaagggatgggcctgcgtctgattagttagttggtggggtaacggcctaccaaggcagcgatcagtagccgacctgagagggtgatcggccacattggaactgagacacggtccaaactcctacgggaggcagcagtggggaatattgcacaatgggggaaaccctgatgcagcaacgccgcgtgaaggatgaaggcctttgggtcgtaaacttctgttctaagggaagataatgacggtaccttaggagcaagtcccggcta

SEQ ID NO: 5477 - DNA, 478 bp, unidentified
  misc_feature 1..478: note = Ascusbbf_1153876, encodes 16S rRNA
  source 1..478: mol_type = genomic DNA
agagtttgatcctggctcagaacgaacgttggcggcgtggattaggcatgcaagttgagcgtactccgcaaggagaagcagcgtaaggggcagtaaggcatgggtacctacctcgggttcgggtatagcctgtagagatacagggtaatccccgatgatgtcgtaagaccaaagctccggcgaccggagaggggcccatgtgatattagctagttggtggggtaacggcccaccaaggcgaagatgtctagcgggtgtgagagcacgacccgcgccactggcactgagacactggccagacacctacgggtggctgcagtcgaggatcttcggcaatgggcgcaagcctgaccgagcgacgccgcgtgtgcgacgaaggccttcgggttgtaaagcactgtcgagggggagaaaaccgcaaggttgatctatccctggaggaagcacgggctaagttcgtgccagcagccgcggtaat

SEQ ID NO: 5478 - DNA, 490 bp, unidentified
  misc_feature 1..490: note = Ascusbbf_748203, encodes 16S rRNA
  source 1..490: mol_type = genomic DNA
agagtttgatcctggctcaggatgaacgctggcggcatgcctaagacatgcaagtcgaacgaggcggcccgaagaattagaaggaaattggagtgcttgcacaaagatggaattttgaggacacggattctccgcctagtggcgcaagggtgagtaacacgtgggtaatctaccttagagactgggataactactggaaacggtagctaataccggatgatatgcaagacgtaaagttttgtattaaaaggtgcctttaaagcatcactttaagatgagcctgcggcgtattagctagttggtaaggtaagagcttaccaaggcgacgatgcgtagccgacctgagagggtgatcggccacactgggactgagacacggcccagactcctacgggagacagcagttaggaatattcgtcaatgggggaaaccctgaacgagcaatgccgcgtgaaggaagacggtcctatggattgtaaacttctgttgt

SEQ ID NO: 5479 - DNA, 490 bp, unidentified
  misc_feature 1..490: note = Ascusbbf_1887636, encodes 16S rRNA
  source 1..490: mol_type = genomic DNA
agagtttgatcatggctcaggatgaacgctggcggcgtgcataacacattcaagtcgaacggacgacggggagcttgctccccgaagttagtggcggacgggtgagtaacgcgtgagcaacctgccttgcaaagcgggataacacggggaaaccggtgctaatacggcataatgtacgagattcgcatggatcttgtaccaaagatttatcgatgcaagatgggctcgcgtctgattagatagttggtgaggtaacggctcaccaagtcgacgatcagtagccggactgagaggttgaacggccacattggaactgagaaacggtccagactcctacgggaggcagcagtggggaatattgggcaatgggcgaaagcctgacccagcgacgccgcgtgaaggaagaaggtcttcggattgtaaacttttgtcgacagggaagataatgacggtacctgtcaaggaagccacggctaactacgtgccagca

SEQ ID NO: 5480 - DNA, 490 bp, unidentified
  misc_feature 1..490: note = Ascusbbf_26869, encodes 16S rRNA
  source 1..490: mol_type = genomic DNA
agagtttgatcatggctcaggatgaacgctagcggcaggcttaacacatgcaagtcgaggggtaacagggagtagcaatactccgctgacgaccggcgcacgggtgcgtaacgcgtatgcaacctgccctgtacaggggtataacggagggaaacttccactaatcccccatgatgtcgcgccggcgcatgccggagcgactaaagcttcggtggtacaggatgggcatgcgtgacattaggtagttggtggggcaacggcccaccaagccgacgatgtctaggggagctgagaggcttatcccccacactggtactgagacacggaccagactcctacgggaggcagcagtgaggaatattggtcaatggagggaactctgaaccagccatgccgcgtggaggaagaatgccctatgggttgtaaactccttttgtgccggagtaataagcggcttgcgagccgcgatgagagtacggtacgaataagc

SEQ ID NO: 5481 - DNA, 490 bp, unidentified
  misc_feature 1..490: note = Ascusbbf_54688, encodes 16S rRNA
  source 1..490: mol_type = genomic DNA
agagtttgatcatggctcaggatgaacgctagcgggaggcctaacacatgcaagccgagcgggatttaaggactagcttgctagtctttgatgagagcggcgtacgggtgcggaacacgtgtgcaacctgcctttatctgggagatagcctttcgaaaggaagattaatatcccataatatattgattggcatcgattaatattgaaagctccggcggataaagatgggcacgcgcaagattagatagttggtgaggtaacggctcaccaagtcaatgatctttagggggcctgagagggtgatcccccacactggtactgagacacggaccagactcctacgggaggcagcagtgaggaatattggacaatgggtgcaagcctgatccagccatcccgcgtgaaggaataaggacctatggtttgtaaacttcttttgtacagggataaacctagatacgagtatctagctgaaggtactgtacgaata

SEQ ID NO: 5482 - DNA, 490 bp, unidentified
  misc_feature 1..490: note = Ascusbbf_1878, encodes 16S rRNA
  source 1..490: mol_type = genomic DNA
agagtttgatcatggctcaggatgaacgctggcggcgtgcctaacacatgcaagtcgaacggggttaagagaaattttcggatggaccttaacttagtggcggacgggtgagtaacgcgtggataacctgcctcacacagggggatagcagctggaaacggctggtaataccgcataagaccacggccccgcatggagctgtagtaaaagatttatcggtgtgagatggatccgcgtctgattagccagttggcggggtaacggcccaccaaagcgacgatcagtagccggcctgagagggtgaacggccacattgggactgagacacggcccaaactcctacgggaggcagcagtggggaatattgcacaatgggcgcaagcctgatgcagcaacgccgcgtgagtgaagaagtatttcggtatgtaaagctctatcagcagggaagaaaggctcttcggagagatgacggtacctgactaagaagccc

SEQ ID NO: 5483 - DNA, 490 bp, unidentified
  misc_feature 1..490: note = Ascusbbf_6250, encodes 16S rRNA
  source 1..490: mol_type = genomic DNA
agagtttgatcatggctcaggatgaacgctggcggcgtgcctaatacatgcaagtcgaacgcaaatcttcgggtttgagtggcgaacgggtgagtaacacgtaggtaatctaccgtagagacggggataacgattggaaacgatcgctaataccggatagtatatggagtcgcatgagtccatatttaaagatacaaatgtatcactctatgatgagcctgcgtcgcattagctagttggtgagataatagcccaccaaggcgatgatgcgtagccggactgagaggttgaacggccacattgggactgagacacggcccagactcctacgggaggcagcagtagggaattttcggcaatgggggaaaccctgaccgagcaacgccgcgtgaatgaagaagtatttcggtatgtaaaattcttttgtataggaagaacgatcagtagagtggaaagctacggaagtgacggtactatacgaataagcccc

SEQ ID NO: 5484 - DNA, 490 bp, unidentified
  misc_feature 1..490: note = Ascusbbf_44265, encodes 16S rRNA
  source 1..490: mol_type = genomic DNA
agagtttgatcctggctcaggatgaacgctagctacaggcttaacacatgcaagtcgcggggcatcgcatggggcggcaacgtccctggcggcgaccggcggatgggtgagtaacgcgtatccaacctggccccctctccgggacagcccctcgaaagagggattaataccggatgttcccgagtttgcgcatgcatacttgggcaaaggcttcggtcggaaggggatggggatgcgttccattaggcagccggcggggtaacggcccaccgggccttcgatggataggggttctgagaggaaggtcccccacactggtactgagacacggaccagactcctacgggaggcagcagtgaggaatattggtcaatggccgggaggctgaaccagccaagtagcgtgagggatgacggccctatgggtcttaaacctcttttgttggggagcaaagtgcgccacttgtggcgtattgcgagtacccttcgaa

SEQ ID NO: 5485 - DNA, 490 bp, unidentified
  misc_feature 1..490: note = Ascusbbf_53844, encodes 16S rRNA
  source 1..490: mol_type = genomic DNA
agagtttgatcatggctcaggacgaacgctggcggcgtgcctaacacatgcaagtcgagcggggattacggaagagtttacttggaagtaattctagcggcggacgggtgagtaacgcgtgagcaacctgccttcaacagggggataacgcttcgaaagaagtgctaataccgcgtaagaccacgaggtcacatggccatggggtcaaaggagcaatccggttgaagatgggctcgcgtccgattagctagttggtgagacaacagcccaccaaggcgacgatcggtagccgacctgagagggtgatcggccacattggaactgagaaacggtccagactcctacgggaggcagcagtgggaatattgggcaatgggcgaaagcctgacccagcaacgccgcgtgagggaagaagggtttcggctcgtaaacctctgtcctgaagggcgaagacaatgacggtacttcaggaggaagccccggctaacta

SEQ ID NO: 5486 - DNA, 490 bp, unidentified
  misc_feature 1..490: note = Ascusbbf_36429, encodes 16S rRNA
  source 1..490: mol_type = genomic DNA
agagtttgatcatggctcaggacgaacgctggcggcatgcctaatacatgcaagtcgaacgaaccatcctgaagattgaagcttgcttcatgattcagattttggtgagtggcggacgggtgagtaacacgtgggtaacctgcccaaaagtgggggataacatttggaaacaagtgctaataccgcataacaactactttcacatgatcgtagcttgaaagatggctctgctatcgcttttggatggacccgcggcgtattagctagttggtgaggtaatggctcaccaaggcaatgatacgtagccgacctgagagggtaatcggccacattgggactgagacacggcccaaactcctacgggaggcagcagtagggaatcttccacaatgggcgaaagcctgatggagcaatgccgcgtgagtgaagaaggttttcggatcgtaaaactctgttgttgaagaagaacatgcgtgagagtaactgttca

SEQ ID NO: 5487 - DNA, 490 bp, unidentified
  misc_feature 1..490: note = Ascusbbf_147773, encodes 16S rRNA
  source 1..490: mol_type = genomic DNA
agagtttgatcctggctcaggatgaacgctggcggcgtgcataacacattcaagtcgaacggaagtagcaatactttagtggcggacgggtgagtaacgcgtaagcaatctgcctctgtgagtggaataacagctggaaacggctgctaataccgcatgacgcaacggaaccgcatgattctgttgccaaagatttatcgcacggagatgagcttgcgtccgattagatagttggcggggtaacggcccaccaagtcgacgatcggtagccggactgagaggttgaacggccacattggaactgagaacggtccagactcctacgggaggcagcagtggggaatattgggcaatggacgaaagtctgacccagcgacgccgcgtgagggatgaagatcttcggattgtaaacctttgtcaacagggacgaagcaagtgacggtacctgtggaggaagccacggctaactacgtgccagcagccgcggtaa

SEQ ID NO: 5488 - DNA, 490 bp, unidentified
  misc_feature 1..490: note = Ascusbbf_1486074, encodes 16S rRNA
  source 1..490: mol_type = genomic DNA
agagtttgatcctggctcagaacgaacgctggcggcgcgtcttaagcatgcaagtcggacggcagggtgccttcgggcttccgagagtggcgaacgggtgagtaacacgtaagtgatctgccctgcagttggggatagcctgtggaaacacagggtaataccggatgagatgtcaatgattgaactatgacatgaaagtggctatggccacgctgcaggatgagcttgcggctcattagctagttgggggtgtaacggaccaccaaggcgacgatgagtagccggcctgagagggtgaacggctacattgggactgagacacggcccagactcctacgggaggcagcagctaagaatattccgcaatggggggaaccctgacggagcgacgccgcgtgaacgatgaaggcagagatgttgtaaagttcttttatcgctgaagaataaccccggtagggaatgaccgggggatgacgttaggcgatgaata

SEQ ID NO: 5489 - DNA, 490 bp, unidentified
  misc_feature 1..490: note = Ascusbbf_401353, encodes 16S rRNA
  source 1..490: mol_type = genomic DNA
agagtttgatcctggctcaggatgaacgctagcgataggcctaacacatgcaagtcgaggggcagcacatgacgtagcaatacagatggtggcgaccggcgcacgggtgagtaacacgtatgcaacctaccttccacaggagaataacccgttgaaaaacggactaatactccataacacagggatcccgcatgggaatatttgttaaagattttttcggtagaagatgggcatgcgttccattagctagttggttgaggtaacggctcaccaaggcaacgatggataggggaactgagaggtttatcccccacactggtactgagacacggaccagactcctacgggaggcagcagtgaggaatattggtcaatggaggcaactctgaaccagccacgtcgcgtgaaggatgacggccctacgggttgtaaacttcttttatacaggaataaagtgagtcacgtgtgactttttgcatgtactgtatga

SEQ ID NO: 5490 - DNA, 490 bp, unidentified
  misc_feature 1..490: note = Ascusbbf_80740, encodes 16S rRNA
  source 1..490: mol_type = genomic DNA
agagtttgatcctggctcagagtgaacgctggcggcgtggctaagacatgcaagttgagcgagaatataccttcgggtatagggaagcggcaaacgggtgagtaacacgtaagtaacctacccttgagactgggatagctcagcgaaagttgaggtaataccggatgacaacccatgatgcatgttatgggattcaaaggggtgagacgatgctcaaggaggggcttgcggcctatcagctagttgggggtgtaacggaccaccaaggcaaagacgggtagccggtctgagaggacggacggccacattggaactgagacacggtccaaacatctacggatggcagcagtttcgaattattcacaatgggcgaaagcctgatggtgcgacgtcgcgtggaggaagaaggtcttcggattgtaaactcctgtcattagggagcaaagagcgagtttgaagctcgtattgagttaacctaaagaggaagcag

SEQ ID NO: 5491 - DNA, 490 bp, unidentified
  misc_feature 1..490: note = Ascusbbf_18533, encodes 16S rRNA
  source 1..490: mol_type = genomic DNA
agagtttgatcctggctcaggacgaacgctggcggcgcgcctaacacatgcaagtcgaacggacgaggatccttcgggatccgagttagtggcgaacgggtgagtaacacgtgaggaacctacctttcagagggggataacacttagaaataggtgctaataccgcataagaccacgaccgggcatccggatgaggtcaaaggagcaatccgctgagagacggcctcgcgtccgattaggtagttggcggggcaacggcccaccaagcctacgatcggtagccggactgagaggttgaacggccacattgggactgagacacggcccagactcctacgggaggcagcagtggggaatattgggcaatgggggaaaccctgacccagcgacgccgcgtgagggaagaaggttttcggattgtaaacctctgtcttcggggacgatagtgactgtacccgaggaggaagccacggctaactacgtgccagca

SEQ ID NO: 5492 - DNA, 490 bp, unidentified
  misc_feature 1..490: note = Ascusbbf_149747, encodes 16S rRNA
  source 1..490: mol_type = genomic DNA
agagtttgatcctggctcaggatgaacgctggcggcgtgcctaatacatgcaagtcggacggtatcagcgatgatatagtggcgaacgggtgagtaacacgttggtgacctgccccaaagatgggaatatcacctggaaacgggtggcaaaaccgaataagctcggcacagttagagaaggccgagtaaaagagtgatctactttgggaggggcctgcggcccatcagttagttggtgagggtaacggcccaccaagacggcgacgggtaggggacctgagagggtggtcccccacaatggaactgaaacacggtccatacacctgcgggtggcagcagtagggaatattgctaaatgggcgaaagcctgaagcagcaacgccgcgtggacgaaggaggccttcgggtcgtaaagtccttttatgggggaaaaggaaggatggtaccccatgaataagtctcggctaactacgtgccagcagccgcggta

SEQ ID NO: 5493 - DNA, 490 bp, unidentified
  misc_feature 1..490: note = Ascusbbf_52236, encodes 16S rRNA
  source 1..490: mol_type = genomic DNA
agagtttgatcctggctcaggatgaacgctggcggcgtgcttaacacatgcaagtcgaacggaacttttctcccgaagaagcggagtgcttgcacaaagtagattcatttgaaaagtttagtggcggacgggtgagtaacgcgtgggtaacctgccttacacagggggacaacagttggaaacgactgctaataccgcataagcgcacagtaccgcatggtacagtgtgaaaaactccggtggtgtaagatggacccgcgtctgattagctagttggtgaggtaacggcccaccaaggcgacgatcagtagccggcctgagagggtgaacggccacattgggactgagacacggcccaaactcctacgggaggcagcagtggggaatattggacaatgggggaaaccctgatccagcgacgccgcgtgagtgaagaagtatttcggtatgtaaagctctatcagcaaggaagaaaatgacggtacttgac

SEQ ID NO: 5494 - DNA, 481 bp, unidentified
  misc_feature 1..481: note = Ascusbbf_30819, encodes 16S rRNA
  source 1..481: mol_type = genomic DNA
agagtttgatcatggctcagaacgaacgctggcggcaggcctgaggcatgcaagtcgaacgagaaagtgtagcaatacacgagtagagtggcgcacgggtgagtaatatatgggaatctgcccagaagtggggaataacagttggaaacgactgctaataccgcatacgccggaaacgggaaagatttatcgcttttggatgagcccatattggattagcttgttggtggggtaaaggcctaccaaggcgatgatccatagctggtttgagagaatgatcagccacactggaactgagacacggtccagactcctacgggaggcagcagctaggaatattggacaatgggggaaaccctgatccagccatgccgcgtgagtgaagaaggccttcgggttgtaaaactcttttaatggggaagatgatgacggtacccatagaataagcaccggctaacttcgtgccagcagccgcggtaat

SEQ ID NO: 5495 - DNA, 490 bp, unidentified
  misc_feature 1..490: note = Ascusbbf_236153, encodes 16S rRNA
  source 1..490: mol_type = genomic DNA
agagtttgatcctggctcagattgaacgctggcggcatgcttaacacatgcaagtcgaacggcagcatagtctagcttgctagatgggtggcgagtggcgaacgggtgagtaacgcgtaggaatatgccttaaagagggggataacttggggaaactcaagctaataccgcataagctctgaggagtaaagctggggaccttatggcctggcgctttaagattagcctgcgtccgattagctagttggtggggtaagggcctaccaaggcgacgatcggtagctggtctgagaggatgaccagccacactggaactgagacacggtccagactcctacgggaggcagcagtggggaatattggacaatggggggaaccctgatccagcaatgccgcgtgtgtgaagaaggcctgagggttgtaaagcactttcagtggggaggagggttgactggttaagagctggttaattggacgttacccacagaag

SEQ ID NO: 5496 - DNA, 490 bp, unidentified
  misc_feature 1..490: note = Ascusbbf_227226, encodes 16S rRNA
  source 1..490: mol_type = genomic DNA
agagtttgatcctggctcaggacgaacgctggcggcgcgcctaacacatgcaagtcgaacgggactagtgaccggaggatagatggaatctatcttgcgatcactagttcagtggcggacgggtgagtaaagcatgagcaacttgcctgatagagggggatagcttttggaaacagaagataataccgcatacttcaaaagtttcgcatggagtttttggaaaaggagcaatccgctatcagatgggctcatgtccgattagctagttggtgtggtaatggcataccaaggcgacgatcggtagccgtactgagaggttcaacggccacattgggactgagacacggcccagactcctacgggaggcagcagtgaggaatattgcgcaatggaggcaactctgacgcagcgacgccgcgtgaaggaagacggtcttcggattgtaaacttctgtcttcagggaagaaacaaatgacggtacctggggagg

SEQ ID NO: 5497 - DNA, 470 bp, unidentified
  misc_feature 1..470: note = Ascusbbf_85793, encodes 16S rRNA
  source 1..470: mol_type = genomic DNA
agagtttgatcctggctcagaacgaacgctggcggcaggcttaacacatgcaagtcgagcggacacttcggtgtcagcggcagacgggtgagtaacacgtggggatctgcctagtggtacggaacaacacagggaaacttgtgctaataccgtataagtccttcgggagaaagatttatcgccattagatgaacccgcgtctgattagctagttggtgaggtaatggctcaccaaggcgacgatcagtagctggtctgagaggatgatcagccacactgggactgagacacggcccagactcctacgggaggcagcagtggggaatattggacaatgggcgaaagcctgatccagccatgccgcgtgagtgatgaaggccttagggttgtaaagctctttcgttggggaagataatgactgtacccaaagaagaagccccggctaacttcgtgccagcagccgcggtaat

SEQ ID NO: 5498 - DNA, 490 bp, unidentified
  misc_feature 1..490: note = Ascusbbf_506517, encodes 16S rRNA
  source 1..490: mol_type = genomic DNA
agagtttgatcctggctcaggatcaacgctggcggcgtgcctaatgcatgcaagtcgaacggggtcgccttcgggtggcttacgtggcggacgggtgaggaacacgtgggtaacctgcccattggtgggggctagccctcggaaacgaggggtaattccgcataagctcatgactcgagtgggagtgatgaggaaaggccttcgggtcgccgatggaggggcctgcgaccgattagctagacggtggggtaacggcctaccgtggcaatgatcggtagctggtttgagaggatgatcagccacacggggactgagacacggccccgactcctacgggaggcagcagcaaggaattttccgcaatgggcgaaagcctgacggagcaacgccgcgtgtgggatgacgcttttcggagtgtaaaccactgttcatggggacgaagcactgacggtacccatggaggaaggcccggctaactacgtgccagcag

SEQ ID NO: 5499 - DNA, 490 bp, unidentified
  misc_feature 1..490: note = Ascusbbf_1188540, encodes 16S rRNA
  source 1..490: mol_type = genomic DNA
agagtttgatcctggctcaggatgaacgctggcggcgtgcttaacacatgcaagtcgaacgggatcccaggagcttgctcctgggtgagagtggcgaacgggtgagtaatgcgtgaccgacctgccccatacaccggaatagctcctggaaacgggtggtaatgccggatgctccgacatgacgcatgtcgtgtcgggaaagattcatcggtatgggatggggtcgcgtcctatcagcttgatggcggggtaacggcccaccatggcttcgacgggtagccggcctgagagggcgaccggccacattgggactgagatacggcccagactcctacgggaggcagcagtggggaatattgcacaatgggcgcaagcctgatgcagcgacgccgcgtgcgggatgacggccttcgggttgtaaaccgcttttgactgggagcaagcccttcggggtgagtgtacctttcgaataagcaccggctaactacgt

SEQ ID NO: 5500 - DNA, 490 bp, unidentified
  misc_feature 1..490: note = Ascusbbf_1243, encodes 16S rRNA
  source 1..490: mol_type = genomic DNA
agagtttgatcatggctcagaacgaacgctggcggtatgctttaaccatgcaagtcgaacgagaaagagtagcaatacttgagtaaagtggcaaacgggtgagtaacacacaggaatctacccagtagaggggaataagcactggaaacggtgtctaataccgcatactacgactgtagaaatactttcggaaagggttagtagcaatactaattcgctattggatgagcctatgtcggattagctagttggtggggtaatggcctaccaaggcgatgatccgtagctgatctgagagggtgatcagccacactggaactgcgacacggtccagactcctacgggaggcagcaggtgggaatattggacaatgggcgaaagcctgatccagcaataccgcgtgaatgatgaaggccttcgggttgtaaagttcttttaatagggaagataatgacggtacctatagaataagcaccggcaaacttcgtgc

SEQ ID NO: 5501 - DNA, 490 bp, unidentified
  misc_feature 1..490: note = Ascusbbf_10036, encodes 16S rRNA
  source 1..490: mol_type = genomic DNA
agagtttgatcatggctcaggacgaacgctggcggcatgcctaacacatgcaagtcgaacgagagtagcaatactcgagtggcgaacgggtgagtaacacgtgagcaacctgccttacacaacgggatacctactggaaacagtagttaatacggtataagaccacagtaccgcatgatacagtggtaaaagatttatcggtgtaagatgggctcgcggcgcattagctagttggagaggtaacggctcaccaaggcgacgatgcgtagccgacctgagagggtgatcggccacattgggactgagatacggcccagactcctacgggaggcagcagtggggaatattgggcaatggaggaaactcttacccagcaatgccgcgtgaatgatgaaggtcgtaagattgtaaagttctttagtcagggacaaagaaagtgatggtacctgaagaataagctccggctaactacgtgccagcagccgcggta

SEQ ID NO: 5502 - DNA, 490 bp, unidentified
  misc_feature 1..490: note = Ascusbbf_54933, encodes 16S rRNA
  source 1..490: mol_type = genomic DNA
agagtttgatcatggctcaggatgaacgctggcggcgtgtttaacacatgcaagtcgagcgagaagctttccagttgattcttcggatgaaacaggattgcggaaagcggcggacgggtgagtaacgcgtaggcaacctgccccctgcagagggatagcctcgggaaaccgggattaaaacctcataatgcgcgagtgagacatctcacatgcgccaaagatttatcggcaggggatgggcctgcgtctgattagttagttggtggggtaacggcctaccaaggcgacgatcagtagccgacctgagagggtgatcggccacattggaactgagacacggtccaaactcctacgggaggcagcagtggagaatcttgcacaatgggcgaaagcctgatgcagcaacgccgcgtgaaggatgaaggcccttgggtcgtaaacttctgttctaagggaagataatgacggtaccttaggagcaagtcccggc

SEQ ID NO: 5503 - DNA, 488 bp, unidentified
  misc_feature 1..488: note = Ascusbbf_14793, encodes 16S rRNA
  source 1..488: mol_type = genomic DNA
agagtttgatcatggctcagggctaacgctggcggcgcgcctaacacatgcaagtcgaacgaacccttcggggttagtggcagacgggtgagtaacgcgtggataatgtgcctctttgctggggataccgttccgaaagggacgttaataccgaatgtgctgaaagtatcgcatggtaaattcagtaaactgttagggtgaagagagcagtccgcgttctatcagcttgttggtggggtaatggcctaccaaggctacgacggataactggtctgagaggatgatcagtcacactggaactgagacacggtccagactcctacgggaggcagcagtgaggaatcttgcacaatgggcgaaagcctgatgcagcgacgccgcgtgagggatgaaggccttcgggttgtaaacctctgtcagtggggaagaagtatgacggtacccactgaggaagcttcggctaactacgtgccagcagccgcggtaat

SEQ ID NO: 5504 - DNA, 490 bp, unidentified
  misc_feature 1..490: note = Ascusbbf_73647, encodes 16S rRNA
  source 1..490: mol_type = genomic DNA
agagtttgatcatggctcaggacaaacgctggcggcgtgcttaacacatgcaagtcgtacggagctgcaggacggaatccttcgggaggaagatcggcagcttagtggcggacgggtgagtaacgcgtgagcaacctgcccataagagggggataacagttggaaacgactgctaataccgcataagaccacaacaccgcatggtggaggggtcaaagagcaatcgcttatggatgggctcgcgtcccattaggtagttggcaggataacagcctaccaagccgacgatgggtagccgacctgagagggtgatcggccacactggaactgagacacggtccagactcctacgggaggcagcagtggggaatattgggcaatgggcgcaagcctgacccagcaacgccgcgtgagtgaagaaggcctttgggttgtaaaactctgttctatgggaagaaggaagtgacggtaccataggagaaagctccgg

SEQ ID NO: 5505 - DNA, 490 bp, unidentified
  misc_feature 1..490: note = Ascusbbf_1506594, encodes 16S rRNA
  source 1..490: mol_type = genomic DNA
agagtttgatcatggctcaggacgaacgctagctacaggcttaacacatgcaagtcgaggggcagcatgacgatagtttgctattgttgatggcgaccggcgcacgggtgcgtaacacgtatccaatctacccgtcactcggggatagcctttcgaaagaaagatcaatacccgatactgttttattgccgcatggcagtgcaaccaaagattcatcggtgtcggatgaggatgcgtctgattaggtagatggcggggtaacggcccaccatgccgacgatcagtaggggttctgagaggaaggtcccccacattggaactgagacacggtccaaactcccacgggaggcagcagtgaggaatattggtcaatggacgcaagtctgaaccagccaagtagcgtgaaggacgacggccctatgggttgtaaacttcttttgtacgggaataaagtgaggcacgcgttgcctttttgcatgtaccgtacgaa

SEQ ID NO: 5506 - DNA, 490 bp, unidentified
  misc_feature 1..490: note = Ascusbbf_271153, encodes 16S rRNA
  source 1..490: mol_type = genomic DNA
agagtttgatcctggctcaggatgaacgctggcggcgtgcttaacacatgcaagtcgaacgaagcacctctcccgtggaagatgactagcttgctaagattcggacacatttgaggtgactgagtggcggacgggtgagtaacgcgtgggtaacctgccgtatacagggggacaacagttagaaatgactgctaataccgcataagcgcacagtatcgcatgatacagtgtgaaaaactccggtggtatacgatggacccgcgtctgattagctagttggtgaggtaacggcccaccaaggcgacgatcagtagccgacttgagagagtgatcggccacattgggactgagacacggcccaaactcctacgggaggcagcagtggggaatattgcacaatgggggaaaccctgatgcagcgacgccgcgtgagtgatgaagtatttcggtacgtaaagctctatcagcagggaagataatgacggtacct

SEQ ID NO: 5507 - DNA, 472 bp, unidentified
  misc_feature 1..472: note = Ascusbbf_1528381, encodes 16S rRNA
  source 1..472: mol_type = genomic DNA
agagtttgatcatggctcagagcgaacgctggcggcatgcttaacacatgcaagtcgcacgaaggtttcggccttagtggcggacgggtgagtaacgcgtaggaatctatccgtgggtggggggtaactctgggaaactggagctaataccgcatgacacctgagggtcaaaggcgcaagtcgcctgcggaagagcctgcgtttgattagcttgttggtggggtaatggcctaccaaggcgatgatcaatagctggtctgagaggatgatcaaccacactgggactgagacacggcccagactcctacgggaggcagcagtggggaatattggacaatgggggcaaccctgatccagcaatgccgcgtgtgtgaagaaggttttcggattgtaaagcactttcggcggggacgatgatgacagtaccctcagaagaagcaccggctaactccgtgccagcagccgcggtaat

SEQ ID NO: 5508 - DNA, 490 bp, unidentified
  misc_feature 1..490: note = Ascusbbf_98714, encodes 16S rRNA
  source 1..490: mol_type = genomic DNA
agagtttgatcctggctcagattgaacgctagcgggatgctttacacatgcaagtcgaacggcagcgcaaagggagcttgctctcttggcggcgagtggcgaacgggtgagtaatgtatcggaacgtgcccagtagcgggggataactactcgaaagagtggctaataccgcatacgccctacgggggaaagggggggatcgcaagacctctcactattggagcggccgatatcggattagctagttggtggggtaaaggctcaccaaggcttcgatccgtagctggtttgagaggacgaccagccacactgggactgagacacggcccagactcctacgggaggcagcagtggggaattttggacaatgggggaaaccctgatccagccatcccgcgtgtgcgatgaaggccttcgggttgtaaagcacttttggcagggaagaaaaggttctggctaataatcagaactgctgacggtacctgcagaa

SEQ ID NO: 5509 - DNA, 490 bp, unidentified
  misc_feature 1..490: note = Ascusbbf_161300, encodes 16S rRNA
  source 1..490: mol_type = genomic DNA
agagtttgatcctggctcaggacgaacgctggcggcgtgcttcatacatgcaagtcgaacgataaggtctcttcggagacacataagtggcggacgggtgagtaaaatgtagagaatctgccctagagatggggacaacagttggaaacgactgctaatacccaatatgagcgtacctgcaatggtattcttgaaaactccggtgctctaggatgagtctgcatctgattagctagtaggcggtgtaatggaccacctaggcgacgatcagtagctggtttgagaggatgatcagccacaatgggactgagacacggcccatactcctacgggaggcagcagtagggaattttgcgcaatgggggaaaccctgacgcagcaacgccgcgtgaccgatgaagcccttcggggtgtaaaggtctgtcagtggggacgaaacttgacggtacccacagaggaagcatcggctaactccgtgccagcagccgcg

SEQ ID NO: 5510 - DNA, 490 bp, unidentified
  misc_feature 1..490: note = Ascusbbf_91976, encodes 16S rRNA
  source 1..490: mol_type = genomic DNA
agagtttgatcctggctcaggacgaacgctggcggcgtgcttaacacatgcaagtcgaacgctgaagccctttcgggggtggatgagtggcgaacgggtgagtaacacgtgggtaatctgccctgcactctgggataagccttggaaacgaggtctaataccggataggacacagcaccgcatggtggtgtgtggaaagttccggcggtgtgggatgagcccgcggcctatcagcttgttggtggggtgatggcctaccaaggcgatgacgggtagccggcctgagagggtgaccggccacactgggactgagacacggcccagactcctacgggaggcagcagtggggaatcttgcgcaatgggcgaaagcctgacgcagcaacgccgcgtgggggatgacggccttcgggttgtaaacctctttcgacactgatgaagcctcactttgtgggtggggtgacggtaggtgtagaagaagcaccggctaa

SEQ ID NO: 5511 - DNA, 490 bp, unidentified
  misc_feature 1..490: note = Ascusbbf_9082, encodes 16S rRNA
  source 1..490: mol_type = genomic DNA
agagtttgatcatggctcaggatgaacgctggcggcgtgcttaacacatgcaagtcgaacggaactgcttttgaagatttccttcgggaatgaatcagttgtagtttagtggcggacgggtgagtaacgcgtgagtaacctgcccttgagagggggataacgttctgaaaaggacgctaataccgcataacattattgagtcgcatggcttgataatcaaaactccggtgctcaaggatggactcgcgtccgattagatagttggtgaggtaacggctcaccaagtcgacgatcggtagccggactgagaggttgaacggccacattgggactgagacacggcccagactcctacgggaggcagcagtgggggatattgcgcaatgggggaaaccctgacgcagcaacgccgcgtggatgaagacggttttcggattgtaaagtccttttcttagggacgaaaattgacggtacctaaggaataagctcc

SEQ ID NO: 5512 - DNA, 490 bp, unidentified
  misc_feature 1..490: note = Ascusbbf_10126, encodes 16S rRNA
  source 1..490: mol_type = genomic DNA
agagtttgatcctggctcaggatgaacgctggcggcgtgcctaacacatgcaagtcgaacggaactattttggaaactccttcgggagcggaatctttagtttagtggcggacgggtgagtaacgcgtgagcaatctgcctttaagagggggataacagtcggaaacggctgctaataccgcataaagcatcaaattcgcatgtttttgatgccaaaggagcaatccgcttttagatgagctcgcgtctgattagctggttggcggggtaacggcccaccaaggcgacgatcagtagccggactgagaggttgaacggccacattgggactgagacacggcccagactcctacgggaggcagcagtggggaatattgcgcaatgggggaaaccctgacgcagcaacgccgcgtgattgaagaaggccttcgggttgtaaagatctttaatcagggacgaaaaaaatgacggtacctgaagaataagctcc

SEQ ID NO: 5513 - DNA, 472 bp, unidentified
  misc_feature 1..472: note = Ascusbbf_42216, encodes 16S rRNA
  source 1..472: mol_type = genomic DNA
agagtttgatcctggctcagaacgaacgctggcggcaggcttaacacatgcaagtcgaacgcgtgtagcaatacacgagtggcgcacgggtgagtaacgcgtggatatctgccttttggttcggaataaccccgggaaactggggctaataccggatggttcctacgggataaagatttatcgccaaaagatgagtccgcgtacgattagctagttggtgaggtaatggctcaccaaggcgacgatcgttagctggtctgagaggacgatcagccacactgggactgagacacggcccagactcctacgggaggcagcagtggggaatattggacaatgggggcaaccctgatccagccatgccgcgtgagtgatgaaggccttcgggttgtaaagctcttttggcggggacgatgatgacggtacccgcagaataagccccggctaacttcgtgccagcagccgcggtaat

SEQ ID NO: 5514 - DNA, 490 bp, unidentified
  misc_feature 1..490: note = Ascusbbf_1736538, encodes 16S rRNA
  source 1..490: mol_type = genomic DNA
agagtttgatcatggctcaggatgaacgctggcggcgtgcctaacacatgcaagtcgagcgagaagctcatgaccaatacttcggttgcgtgattgagtggaaagcggcggacgggtgagtaacgcgtaggcaacctgccccttgcagagggatagcctcgggaaaccgggattaaaacctcataacgtgtctttgagacatctcatggacgccaaagatttatcggcaagggatgggcctgcgtctgattagttagttggtggggtaacggcctaccaaggcgacgatcagtagccgacctgagagggtgatcggccacattggaactgagacacggtccaaactcctacgggaggcatcagtggggaatattgcacaataggcgaaagcctgatgcagcaacgccgcgtgaatgatgaaggcccttgggtcgtaaactactgttctaagggaagataatgacggtaccttaggagcaagtcccggcta

SEQ ID NO: 5515 - DNA, 490 bp, unidentified
  misc_feature 1..490: note = Ascusbbf_13648, encodes 16S rRNA
  source 1..490: mol_type = genomic DNA
agagtttgatcatggctcagaacgaacgctggcggcgcgtcttaagcatgcaagtcggacggcaaggggagcttgctccccctagagtggcggactggtgagtaacacgtgggtgacgtaccctttagctggggatagccggtagaaataccgggtaataccgaataagcttgcccttttgatgtagggtaaggaaaggagcttcggcttcactgaaggaacggcccgcgcactattagctagttggtggggtaacggcttaccaaggcgacgatagttatccggcctaagagggtgaacggacacattgggactgagatacggcccagactcctacgggaggcagcagctaagaatattccgcaatggaggaaactctgacggagcgacgccgcgtggatgatgaaggtcggaagattgtaaaatccttttatctgtgtggaataagttttgtaggaaatgacagaatgatgactgtagcagatgaata

SEQ ID NO: 5516 - DNA, 490 bp, unidentified
  misc_feature 1..490: note = Ascusbbf_1428, encodes 16S rRNA
  source 1..490: mol_type = genomic DNA
agagtttgatcctggctcaggacgaacgctggcggcgtgcttcatacatgcaagtcgaacgagaatccggtgcttgcaccggaggaaagtggcggacgggtgagtaatgtgtagagaatctgccctgaagcgggggacaacagagggaaacttctgctaataccccatatgcgcgtagttgagatactattcgtgaaagatttatcgcttcaggatgagtctgcatctgattagctagttgggggtgtaatggaccaccaaggcgacgatcagtagctggtttgagaggatgatcagccacaatgggactgagacacggcccatactcctacgggaggcagcagtagggaattttgcgcaatgggcgaaagcctgacgcagcaacgccgcgtgatcgtagaagcccttcggggtgtaaagatctgtcagtagggacgaacaatgactgtacctacagaggaagcaccggctaactccgtgccagcagccg

SEQ ID NO: 5517 - DNA, 490 bp, unidentified
  misc_feature 1..490: note = Ascusbbf_1424732, encodes 16S rRNA
  source 1..490: mol_type = genomic DNA
agagtttgatcctggctcgggacgaacgctggcggcgtgcttaatacatgcaagtcgaacggtagcaggagaaagcttgctttcttgctgacgagtggcggacgggtgagtaatgcttgggaatctggcttatggagggggataactactggaaacggtagctaataccgcgtaatctcggaagagtaaagagtgggaccgcaaggccacttgccataagatgagcccaagtgggattaggtagttggtggggtaaaggcctaccaagccgacgatctctagctggtctgagaggatggccagccacactggaactgagacacggtccagactcctacgggaggcagcagtggggaatattgcacaatgggggaaaccctgatgcagccatgccgcgtgaatgaagaaggccttcgggttgtaaagttctttcggtgatgaggaaggtatcaaatttaatagatttggtaattgacgttagtcacagaag

SEQ ID NO: 5518 - DNA, 490 bp, unidentified
  misc_feature 1..490: note = Ascusbbf_162652, encodes 16S rRNA
  source 1..490: mol_type = genomic DNA
agagtttgatcatggctcaggacgaacgctggcggcgtgcttaacacatgcaagtcgaacggggaatattttagcttgctatgatattcctagtggcgaacgggtgagtaacgcgtaggcaacctgcccttgggatggggacaacaggccgaaaggcctgctaataccgaatgaagtgagtttatcgcatgatgagcttatgaaagatggcctctacttgtaagctatcacccaaggatgggcctgcgtctgattagctagttggtggggtaaaggcctaccaaggcgacgatcagtagccggtctgagaggatgaacggccacattgggactgagacacggcccagactcctacgggaggcagcagtggggaatcttccgcaatgggcgaaagcctgacggagcaacgccgcgtgagtgaagaagggtttaggctcgtaaagctctgttgttggggacgaagtcccggaaggtgaataatctttcgggg

SEQ ID NO: 5519 - DNA, 490 bp, unidentified
  misc_feature 1..490: note = Ascusbbf_284751, encodes 16S rRNA
  source 1..490: mol_type = genomic DNA
agagtttgatcatggctcaggataaacgctggcggcgtgcttaacacatgcaagtcgaacggagtatttcttcggacgatcgaagagcttgctcggagtgagtctttgaaatacttagtggcggacgggtgagtaacgcgtgggtaacctgcctcacacagggggataacagttggaaacgactgttaataccgcataagcgcacagggccgcatggtctggtgtgaaaaactccggtggtgtgagatggacccgcgtctgattagctagttggtgaggtaacggcccaccaaggcgacgatcagtagccggcctgagagggtgtacggccacattgggactgagacacggcccaaactcctacgggaggcagcagtggggaatattgcacaatgggggaaaccctgatgcagcgacgccgcgtgagtgatgaagtatctcggtatgtaaagctctatcagcagggaagataatgacggtacctgactaa

SEQ ID NO: 5520 - DNA, 480 bp, unidentified
  misc_feature 1..480: note = Ascusbbf_106489, encodes 16S rRNA
  source 1..480: mol_type = genomic DNA
agagtttgatcctggctcagaacgaacgctggcggcaggcctaacacatgcaagtcgaacgagaagctggcttcggtcagtggagagtggcgcacgggtgagtaacgcgtgggaatttgcctttcggtacgggataacgtctggaaacgggcgctaataccgtatgatgtctacggaccaaagatttatcgccgagagaggagcccgcgtaggattaggtagttggtggggtaatggctcaccaagccgacgatccttagctgttctgagaggaagatcagccacactgggactgagacacggcccagactcctacgggaggcagcagtggggaatattggacaatgggcgcaagcctgatccagccatgccgcgtgagtgaagaaggccctagggttgtaaagctctttcgccagggaagataatgacggtacctggtaaagaagtcccggctaactccgtgccagcagccgcggtaat

SEQ ID NO: 5521 - DNA, 490 bp, unidentified
  misc_feature 1..490: note = Ascusbbf_716740, encodes 16S rRNA
  source 1..490: mol_type = genomic DNA
agagtttgatcatggctcaggatgaacgctagcggcaggcctaacacatgcaagtcgaggggcagcggggtgtagcaatacactgccggcgaccggcgcacgggtgcgtaacgcgtatgcaacctgcctccaacagggggataaccggcggaaacgccgactaataccccgtaacgcacggtctcgcatggggctgtgctgaaagccttggcggttggagatgggcatgcgtggcattaggtagttggcggggcaacggcccaccaagccatcgatgcctaggggagctgagaggctaatcccccacactggtactgagacacggaccagactcctacgggaggcagcagtgaggaatattggtcaatggccggaaggctgaaccagccatgccgcgtgagggaagaaggccctatgggttgtaaacctctttcaccggggagtaataaggttcgtgcgcggaccgatgagagtacccggggaataagca

SEQ ID NO: 5522 - DNA, 490 bp, unidentified
  misc_feature 1..490: note = Ascusbbf_1886844, encodes 16S rRNA
  source 1..490: mol_type = genomic DNA
agagtttatcatggctcaggatgaacgctggcggcgtgcataacacattcaagtcgaacggagatagaagcttcggtttttatcttagtggcggacgggtgagtaacgcgtgagcaacctgcccctgtgtgcgggataacgtttggaaacggacgctaataccgcatgatccaacgggaccgcatgatcttgttggcaaagatatattgcacagggatgggctcgcgtccgattagatagttggcggggcaacggcccaccaagtcgacgatcggtagccggactgagaggttgaacggccacattggaactgagaaacggtccagactcctacgggaggcagcagtggggaatattgggcaatgggcgaaagcctgacccagcgacgccgcgtgaaggaagacggtcctcggattgtaaacttcttttatgtaggacgaagaaagtgacggtactacatgaataagccacggctaactacgtgccagca

SEQ ID NO: 5523 - DNA, 490 bp, unidentified
  misc_feature 1..490: note = Ascusbbf_336279, encodes 16S rRNA
  source 1..490: mol_type = genomic DNA
agagtttgatcatggctcaggatgaacgctagcggcaggcttaacacatgcaagtcgaggggcagcgcgtggtagcaatatcatggcggcgaccggcgtaagggtgagtaacgcgtgagcgacgtgcccgtcacagggggacaagcgctggaaacggcgtctgataccccataggaatgtatgcttcatggtgtatgtttgaaagatttatcggtgacggatcggctcgcgtccgattaggtagacggcggggtaacggcccaccgtgccgacgatcggtaggggttctgagaggaaggtcccccacattggaactgagacacggtccagactcctacgggaggcagcagtgaggaatattggacaatggccggaaggctgatccagccatgccgcgtgcgggatgacggccctatgggttgtaaaccgcttttgtgtgggagcaataagagccacgtgtggcttgatgagagtaccatacgaataagca

SEQ ID NO: 5524 - DNA, 490 bp, unidentified
  misc_feature 1..490: note = Ascusbbf_1569003, encodes 16S rRNA
  source 1..490: mol_type = genomic DNA
agagtttgatcctggctcaggacgaacgctggcggcgtgcctaatacatgcaagtcgagcggacttgatggagtgcttgcactcctgatggttagcggcggacgggtgagtaacacgtaggcaacctgcctgtaagactgggataactaccggaaacggtagctaataccggataatttaccttgccgcatggggaggtaatgaaagacggagcaatctgtcacttacggatgggcctgcggcgcattagctagttggtgaggtaacggctcaccaaggcgacgatgcgtagccgacctgggagggtgaacggccacactgggactgagacacggcccagactcctacgggaggcagcagtagggaatcttccgcaatggacgcaagtctgacggagcaacgccgcgtgagtgaagaaggttttcggatcgtaaagctctgttgccagggaagaacgtctttgggagtaactgcccaaggagtaacggta

SEQ ID NO: 5525 - DNA, 490 bp, unidentified
  misc_feature 1..490: note = Ascusbbf_1871402, encodes 16S rRNA
  source 1..490: mol_type = genomic DNA
agagtttgatcatggctcaggatgaacgctagctacaggcttaacacatgcaagtcgaggggcagcggggatctagcttgctggatctgccggcgaccggcgcacgggtgcgtaacgcgtatccaacctgccgtgtactcggggatagccctctgaaaggaggattaatacccgatgtggttgcttggggacatcccttagcaattaaagatttatcggtacaccgatggggatgcgtatgattaggtagtaggcggggtaacggcccacctagccgacgatcattaggggttctgagaggaaggtcccccacataggaactgagacacggtcctaactcctacgggaggcagcagtgaggagtattggtcaatgggcgagagcctgaaccagccaagtagcgtgaaggaagactgccctatgggttgtaaacttcttttatgagggaataaagttcgtcacgtgtggcgttttgtatgtacctcatgaa

SEQ ID NO: 5526 - DNA, 490 bp, unidentified
  misc_feature 1..490: note = Ascusbbf_1642353, encodes 16S rRNA
  source 1..490: mol_type = genomic DNA
agagtttgatcatggctcaggatgaacgctagcagcaggcttaatacatgcaagtcgaggggtaacatgggtagcaatacctgatgacgaccggcaaacgggtgaggaacacgtacgcaactttccctaaactggtgaatagccctccgaaaggaggattaatacaccgtaacttaatgaagtggcatcactttattaatatagctccggcggtttaggatgggcgtgcgcatgattagatagttggcggggtaacggcccaccaagtctacgatcattaactggtgtgagagcacgaccagtcacacgggcactgagacacgggcccgactcctacgggaggcagcagtaaggaatattggtcaatggacgaaagtctgaaccagccatgccgcgtgaaggatgaatgccctctgggttgtaaacttcttttatctgggacgaaaaaaggtcattcttgaccacttgacggtaccagaggaataagcac

SEQ ID NO: 5527 - DNA, 490 bp, unidentified
  misc_feature 1..490: note = Ascusbbf_43, encodes 16S rRNA
  source 1..490: mol_type = genomic DNA
agagtttgatcatggctcagattgaacgctggcggcaggcctaatacatgcaagtcgaacggtaacatggaagtagcaatacttttgatgacgagtggcggacgggtgagtaatgtttgggaatctacctatcagagggggatagcaactggaaacggttgataaaaccgcgtaagctctgaggaggaaagtaatgggatcgcaagaccattagctgatagatgagcccaaatgggattagctagtaggcggggtaagagcccacctaggcgacgatctctagctggttttagcggatgatcagccacattggaactgagacacggtccaaactcctacgggaggcagcagtagggaatattgcacaatggagggaactctgatgcagccatgccgcgtgtgtgaagaaggccttcgggttgtaaagcactttagttttcgagaaaggtgtgttatccaataggtagcatatcagatgttagaaaaagaa

SEQ ID NO: 5528 - DNA, 490 bp, unidentified
  misc_feature 1..490: note = Ascusbbf_21817, encodes 16S rRNA
  source 1..490: mol_type = genomic DNA
agagtttgatcctggctcaggacgaacgctggcggcgtgcctaacacatgcaagtcgagcgagaatctttcatttgatcccttcggggtgacgacggaagaggaaagcggcggacgggtgagtaacgcgtgagtaatctgccccatggtggggaataacacagtgaaaactgtgctaatgccccataatgtatacttgttgcatagcagggataccaaagatttattgccatgggatgagctcgcgtctgattagctagttggtggggtaatggcctaccaaggcgacgatcagtagccgaactgagaggttgatcggccacattgggactgagacacggcccagactcctacgggaggcagcagtgggggatattgcacaatgggggaaaccctgatgcagcaacgccgcgtgaaggaagaaggtcttcggattgtaaacttttgtctttggggaagaattctgacggtacccaaggaggaagccacgg

SEQ ID NO: 5529 - DNA, 490 bp, unidentified
  misc_feature 1..490: note = Ascusbbf_26696, encodes 16S rRNA
  source 1..490: mol_type = genomic DNA
agagtttgatcctggctcaggatgaacgctagcgggaggcctaacacatgcaagccgaggggtatttgtagcttgctacagagagaccggcgcacgggtgcgtaacgcgtatgcaacttgccctactgaaagggatagccttttgaaaagaagattaataccttataatagtgagactggcatcagtaacacttgaaagatttatcgcagtaggataggcatgcgtcagattagctagttggtgaggtaacggctcaccaaggcgatgatctgtagggggcctgagagggtgaacccccacactggtactgagacacggaccagactcctacgggaggcagcagtgaggaatattggacaatgggtgtaagcctgatccagccatcccgcgtgaaggatgacggccttatgggttgtaaacttcttttatatggggataaaccttatcacgtgtgataagctgaaggtaccatatgaataagcaccggct

SEQ ID NO: 5530 - DNA, 490 bp, unidentified
  misc_feature 1..490: note = Ascusbbf_320522, encodes 16S rRNA
  source 1..490: mol_type = genomic DNA
agagtttgatcctggctcaggatgaacgctagcgacaggcttaacacatgcaagtcgaggggcagcatgggggtagcaatacccctgatggcgaccggcgcactggtgagtaacacgtatgcaacctgccccgggcagggggataatccggagaaatctggtctaataccccgtacgcctccttcccgcatggtagggaggtgaaaggagcgatccggcacgggatgggcatgcggcgcattagctagtcggcggggtgacggcccaccgaggcgacgatgcgtaggggttctgagaggaaggtcccccacactggtactgagacacggaccagactcctacgggaggcagcagtgaggaatattggtcaatggacggaggtctgaaccagccaagtcgcgtgagggatgacggccctacgggttgtaaacctcttttgcgggggagtaaagtgagccacgtgtggctcattgcgagtaccccgagaaaa

SEQ ID NO: 5531 - DNA, 490 bp, unidentified
  misc_feature 1..490: note = Ascusbbf_98308, encodes 16S rRNA
  source 1..490: mol_type = genomic DNA
agagtttgatcatggctcagattgaacgctggcggcatgccttacacatgcaagtcgaacggcagcataggagcttgctcctgatggcgagtggcgaacgggtgagtaatatatcggaacgtgccctagagtgggggataactagtcgaaagattagctaataccgcatacgatctacggatgaaagtgggggatcgcaagacctcatgctcatggagcggccgatatctgattagctagttggtggggtaaaagctcaccaaggcaacgatcagtagctggtctgagaggacgatcagccacattgggactgagacacggcccaaactcctacgggaggcagcagtggggaattttggacaatgggggaaaccctgatccagcaatgccgcgtgagtgaagaaggccttcgggttgtaaagctcttttgtcagggaagaaacggtatcgaataatacacgatactaatgacggtacctgaagaataagc

SEQ ID NO: 5532 - DNA, 490 bp, unidentified
  misc_feature 1..490: note = Ascusbbf_151693, encodes 16S rRNA
  source 1..490: mol_type = genomic DNA
agagtttgatcatggctcaggacgaacgctggcggcgcgcctaacacatgcaagtcgaacggagctgttttctctgaagttttcggatggaagagagttcagcttagtggcgaacgggtgagtaacacgtgagcaacctgcctttcagtgggggacaacatttggaaacgaatgctaataccgcataagaccacagtgtcgcatggcacaggggtcaaaggatttatccgctgaaagatgggctcgcgtccgattagctagatggtgaggtaacggcccaccatggcgacgatcggtagccggactgagaggttgaacggccacattgggactgagacacggcccagactcctacgggaggcagcagtggggaatattgcacaatgggggaaaccctgatgcagcgacgccgcgtggaggaagaaggtcttcggattgtaaactcctgtcccaggggacgataatgacggtaccctgggaggaagcaccg

SEQ ID NO: 5533 - DNA, 490 bp, unidentified
  misc_feature 1..490: note = Ascusbbf_53646, encodes 16S rRNA
  source 1..490: mol_type = genomic DNA
agagtttgatcatggctcaggacgaacgctggcggcgtgcttaacacatgcaagtcgaacggtaaggcccttcggggtacacgagtggcgaacgggtgagtaacacgtgagtaacctgccctggactctgggataagcattcgaaagggtgtctaatactggatatgacctgtgaccgcatggttgtgggtgtaaaggtttttctggtctgggatgggctcgcggcctatcagcttgttggtggggtgatggcctaccaaggcgtcgacgggtagccggcctgagagggcgaccggccacactgggactgagatacggcccagactcctacgggaggcagcagtggggaatattgcgcaatgggcggaagcctgacgcagcaacgccgcgtgcgggatgacggccttcgggttgtaaaccgctttcatccatgacgaagcttttgtgacggtagtgggagaagaagcaccggccaactacgtgccagcag

SEQ ID NO: 5534 - DNA, 490 bp, unidentified
  misc_feature 1..490: note = Ascusbbf_193081, encodes 16S rRNA
  source 1..490: mol_type = genomic DNA
agagtttgatcatggctcaggatgaacgctagcgggaggcctaacacatgcaagccgagcggtatagtttcttcggaaactagagagcggcgtacgggtgcgtaacacgtgtgcaacctgcctttatctgggagatagccctccgaaagggggattaatattccataatatattgattggcatcgattgatattgaaagctccggcggatagagatgggcacgcgcaagattagatagttggtgaggtaacggctcaccaagtctacgatctttagggggcctgagagggtgatcccccacactggtactgagacacggaccagactcctacgggaggcagcagtgaggaatattggacaatgggtgcaagcctgatccagccatcccgcgtgaaggattaaggtcctatggattgtaaacttcttttatacagggataaacctctcctcgtgaggagagctgaaggtactgtatgaataagcaccggct

SEQ ID NO: 5535 - DNA, 490 bp, unidentified
  misc_feature 1..490: note = Ascusbbf_64561, encodes 16S rRNA
  source 1..490: mol_type = genomic DNA
agagtttgatcctggctcagattgaacgctggcggcaggcttaacacatgcaagtcgaacggtaacggggagggagtttactttctctgctgacgagtggcggacgggtgagtaaagcttgggaatctggcgaatggagggggatagccacgggaaactgtgggtaataccgcgtaatgtctaaggactaaaggggtgggactgagaggccacctgccatttgatgagcccaagtgggattaggtagttggtgaggtaagggctcaccaagctgacgatctctagctggtctgagaggatgaccagccacactggaactgagacacggtccagactcctacgggaggcagcagtggggaatattgcgcaatggggggaaccctgacgcagccatgccgcgtgaatgaagaaggccttcgggttgtaaagttctttcggtgatgaggaaggcgattagtttaagagattaattgattgacgataatcacag

SEQ ID NO: 5536 - DNA, 490 bp, unidentified
  misc_feature 1..490: note = Ascusbbf_121941, encodes 16S rRNA
  source 1..490: mol_type = genomic DNA
agagtttgatcctggctcaggatgaacgctagctacaggcttaacacatgcaagtcgcggggcagcatgccttgtcctcggacgaggtgatggcgaccggcgcacgggtgagtaacgcgtatccaaccttcccgcgagcggggtatagcccggcgaaagtcggattaatcccccatacctcccatgacgtcctcggagtgggagcaaaggccttggccgcttgcggatggggatgcgtccgattaggaagtaggcggggtaacggcccacctatccttcgatcggtaggggttctgagaggaaggtcccccacactggtactgagacacggaccagactcctacgggaggcagcagtgaggaatattggtcaatgggcgcaggcctgaaccagccaagtagcgtgcaggacgacggccctacgggttgtaaactgcttttatacgggaataaagtccgccactcgtggcggtttgcatgtaccgttatga

SEQ ID NO: 5537 - DNA, 490 bp, unidentified
  misc_feature 1..490: note = Ascusbbf_356351, encodes 16S rRNA
  source 1..490: mol_type = genomic DNA
agagtttgatcctggctcaggatgaacgctggcggcgcgcttaacacatgcaagtcggacgcgaaacgccccctcgggggcggagtagagtggcgaacgggtgagtaacacgtgggcgacctgcccccctccccgggatagccgggcgaaggcccgggtaataccggatgcccccgcggggccgcatggcccggcggggaaagcctcgtgcggagggggatgggcccgcgtcctattagctagttggcggggcaacggcccaccaaggcgacgataggtagccgggctgagaggccgatcggccacattgggactgagacacggcccagactcctacgggaggcagcagtggggaatattgcgcaatgggcgaaagcctgacgcagcgacgccgcgtgcgggatggaggccctcgggtcgtaaaccgctttcggcagggacgattgtgacggtacctgcataagaagccccggctaaatacgtgccagca

SEQ ID NO: 5538 - DNA, 490 bp, unidentified
  misc_feature 1..490: note = Ascusbbf_2266, encodes 16S rRNA
  source 1..490: mol_type = genomic DNA
agagtttgatcctggctcagattgaacgctggcggcaggcctaacacatgcaagtcgaacggtaacaggaagaagcttgcttctttgctgacgagtggcggacgggtgagtaatgtctgggaaactgcctgatggagggggataactactggaaacggtagctaataccgcataacgtcgcaagaccaaagagggggaccttcgggcctcttgccatcggatgtgcccagatgggattagctagtaggtggggtaacggctcacctaggcgacgatccctagctggtctgagaggatgaccagccacactggaactgagacacggtccagactcctacgggaggcagcagtggggaatattgcacaatgggcgcaagcctgatgcagccatgccgcgtgtatgaagaaggccttcgggttgtaaagtactttcagcggggaggaagggagtaaagttaatacctttgctcattgacgttacccgcagaag

SEQ ID NO: 5539 - DNA, 490 bp, unidentified
  misc_feature 1..490: note = Ascusbbf_6163, encodes 16S rRNA
  source 1..490: mol_type = genomic DNA
agagtttgatcctggctcagaacgaacgctggcggcaggcttaacacatgcaagttgagcgggattttcaggtagcttgctatttgaaatgagagcagcgcactggtgagtaacacgtgggaacataccttttggtgggggacaacagttggaaacgactgctaataccgcatacgccctgagggggaaaggagagatttgccgaaagattggcccgcggaagattaggtagtaggtggggtaatggcctacctagccgacgatctatagctggtctgagaggacgatcagccacattggaactgagacacggtccagactcctacgggaggcagcagtgaggaatattgggcaatggagggaactctgacccagccatgccgcgtgagtgaagaaggttttcggattgtaaagctctttcagatgggaagatgatgacggtaccatcagaagaagcaccggctaacttcgtgccagcagccgcggtaat

SEQ ID NO: 5540 - DNA, 490 bp, unidentified
  misc_feature 1..490: note = Ascusbbf_12373, encodes 16S rRNA
  source 1..490: mol_type = genomic DNA
agagtttgatcctggctcaggatgaacgctagctacaggcttaacacatgcaagtcgaggggcagcatgaagtcagcttgctgactttgatggcgaccggcgcacgggtgcgtaacgcgtatccaaccttcccgcgagtcaggcacagcccggcgaaagtcggattaatacctgatggactcctttgacggcatcagagaaggagtaaagaattttttcgcttgcggatggggatgcgtaggattagcttgcaggcggggtaacggcccacctgggcgacgatccttaggggttctgagaggaaggtcccccacactggtactgagacacggaccagactcctacgggaggcagcagtgaggaatattggtcaatgggcgagagcctgaaccagccaagtagcgtgcaggacgacggccctacgggttgtaaactgcttttatgcggggataaacgaggggacgcgttccccttttgcaggtaccgcatg

SEQ ID NO: 5541 - DNA, 487 bp, unidentified
  misc_feature 1..487: note = Ascusbbf_218893, encodes 16S rRNA
  source 1..487: mol_type = genomic DNA
agagtttgatcatggctcaggatgaacgctggcggcgtgcctaacacatgcaagtcgagcgaacccttcggggtgagcggcggacgggtgagtaacgcgtgggtaacctgccctatacacacggataacgtaccgaaaggtacgctaatacgagataaaatatttttatcgcatggtaaaaatatcaaagcttttgcggtataggatggacccgcgtctgattagctagttggtaaggtaatggcttaccaaggcgacgatcagtagccgacctgagagggtgatcggccacattggaactgagacacggtccaaactcctacgggaggcagcagtggggaatattgcacaatgggcgaaagcctgatgcagcaacgccgcgtgagcgatgaaggccttcgggtcgtaaagctctgtcctcaaggaagataatgacggtacttgaggaggaagccccggctaactacgtgccagcagccgcggtaat

SEQ ID NO: 5542 - DNA, 490 bp, unidentified
  misc_feature 1..490: note = Ascusbbf_12424, encodes 16S rRNA
  source 1..490: mol_type = genomic DNA
agagtttgatcctggctcaggatgaacgctagctacaggcttaacacatgcaagtcgaggggcatcatgaagtttgcttgcaagctttgatggcgaccggcgcacgggtgcgtaacgcgtatccaatctaccagttactcgggtatagccttgcgaaagtaagattaatccccgatgagtatagttactgcatggtgattatataaaagatttatcggtagctgatgaggatgcgtaggattagttagtcggcggggtaacggcccaccgaggctacgatccttaggggttctgagaggaaggtcccccacactggtactgagacacggaccagactcctacgggaggcagcagtgaggaatattggtcaatggccgagaggctgaaccagccaagtagcgtgcaggacgactgccttacaggttgtaaactgcttttatgcaagagtaaagtgagctacgtgtagtttattgcaagtattgcatgaata

SEQ ID NO: 5543 - DNA, 490 bp, unidentified
  misc_feature 1..490: note = Ascusbbf_29656, encodes 16S rRNA
  source 1..490: mol_type = genomic DNA
agagtttgatcctggctcagaatgaacgctggcggcatggattaggcatgcaagtcggacggggtgcagcgatgcacccagtggcgaaagggtgcgcaacgcgtggggaacctgcccccggatccgggacaagcgctggaaacggcgtctgatacgggatgcggaggggggccgcatggccccccctccaaagattcatcgtccggggagggccccgcgtcccattagctagttggcggggtgacggcccaccaaggctgcgacgggtaggtggtctgagaggatggtcacccacactgggactgagacactgcccagactcctacgggaggctgcagtcgagaatcttccgcaatgggcgaaagcctgacggagcgatgccgcgtgggggacggaggccttcgggtcgtgaacccctgtcacccgggacgaatcaactgacggtaccgggagaggaagccacggctaactacgtgccagcagccgcggt

SEQ ID NO: 5544 - DNA, 470 bp, unidentified
  misc_feature 1..470: note = Ascusbbf_9712, encodes 16S rRNA
  source 1..470: mol_type = genomic DNA
agagtttgatcatggctcagaacgaacgctggcggcatgcttaacacatgcaagtcgaacgatctcttcggagatagtggcggacgggtgagtaacgcgtgggaacctgccccgaggtacggaataactcatggaaacgtgagctaataccgtatgtgacctgagggtgaaagatttatcgccttgggaggggcccgcgtcggattaggtagttggtggggtaatggcctaccaagcctgcgatccgtagctggtctgagaggatgatcagccacactggaacttagacacggtccagactcctacgggaggcagcagtggggaatattggacaatgggggcaaccctgatccagcaatgccgcgtgcgtgatgaaggccttagggttgtaaagcgctttcggcggggaagatgatgacggtacccgcagaagaagccccggctaactccgtgccagcagccgcggtaat

SEQ ID NO: 5545 - DNA, 490 bp, unidentified
  misc_feature 1..490: note = Ascusbbf_1580627, encodes 16S rRNA
  source 1..490: mol_type = genomic DNA
agagtttgatcatggctcaggacgaacgctggcggcgtgcttaacacatgcaagtcgaacggagttaagcgctggtttgatgctagcttgctagtggatttccttgcttaacttagtggcggacgggtgagtaacgcgtgagtaacctgcctctcagtgggaaataacgccctgaaaagagcgctaataccgcataacacatattgaccgcatgatcagtatgtcaaagatttatcgctgagagatggactcgcgtccgattagctagttggtgaggtaacggcccaccaaggcgacgatcggtagccggactgagaggttgaacggccacattgggactgagacacggcccagactcctacgggaggcagcagtgggggatattgcgcaatgggggaaaccctgacgcagcaacgccgcgtggaggatgacggttttcggattgtaaactccttgtataagggacgaactaagacggtaccttatgaat

SEQ ID NO: 5546 - DNA, 490 bp, unidentified
  misc_feature 1..490: note = Ascusbbf_26134, encodes 16S rRNA
  source 1..490: mol_type = genomic DNA
agagtttgatcatggctcaggatgaacgctagcgagaggcctaacacatgcaagtcgaggggtaacaggggagcttgctcccgctgacgaccggcgcacgggtgagtaacgcgtatgcaacctgcccgccacagggggatagccttccgaaagggagattaataccgcataagaccacgcctgggcatccaggaggggtaaaatattcataggtggcggctgggcatgcgtgacattagctagttggcggggcaacggcccaccaaggcgacgatgtctaggggaactgagaggtcgatcccccacactggtactgagacacggaccagactcctacgggaggcagcagtgaggaatattggtcaatggagggaactctgaaccagccatctcgcgtgaaggactacggccctacgggtcttaaacttcttttatagggggataaagtcgcatacgagtatgtgattgcaggtaccctatgaataagcat

SEQ ID NO: 5547 - DNA, 490 bp, unidentified
  misc_feature 1..490: note = Ascusbbf_29926, encodes 16S rRNA
  source 1..490: mol_type = genomic DNA
agagtttgatcatggctcagaacgaacgctggcggcgcgtcttaagcatgcaagtcgaacggcaagattggtgcttgcaccgatcctagagtggcggactggtgagtaacacgtgggtgacgtacccttttgttggggatagccggtagaaataccggataataccgaataatcttggcattttagaggatgttaaggaaaggagcttcggcttcgcagatggaacggcccgcgcactattagctagttggtgaggtaacggcccaccaaggcaacgatagttatccggcctaagagggtgaacggacacattgggactgagatacggcccagactcctacgggaggcagcagctaagaatattccgcaatggaggaaactctgacggagcgacgccgcgtggatgatgaaggtcggaagattgtaaaatccttttatttgtgtggaataattcagataggaaatgatctggagatgactgtagcaaatg

SEQ ID NO: 5548 - DNA, 490 bp, unidentified
  misc_feature 1..490: note = Ascusbbf_1783152, encodes 16S rRNA
  source 1..490: mol_type = genomic DNA
agagtttgatcatggctcagaatgaacgctggcggcatggattaggcatgcaagtcgaacgaacttaattacttgcttgcaagtaaagaggttagtggcggactggtgagtaacacgtaagaaatctgcctattagtggggaataacagtgagaaatcattgctaataccgcatatgccataagaatcgcatgattctagtgggaaaggagcaattcgctaatagatgagcttgcgtctgattagctagttggtggggtaaaggcctaccaaggcgacgatcagtagccggactgagaggttgaacggccacattgggactgagatacggcccagactcctacgggaggcagcagtcgggaatattgcgcaatggaggaaactctgacgcagtgacgccgcgtataggaagaaggttttcggattgtaaactattgtctactgggaagatacaagactgtaccagtaaagaaagctccggctaactacgt

SEQ ID NO: 5549 - DNA, 490 bp, unidentified
  misc_feature 1..490: note = Ascusbbf_47579, encodes 16S rRNA
  source 1..490: mol_type = genomic DNA
agagtttgatcatggctcaggatgaacgctggcggcgtgcataacacattcaagtcgaacggacgtattgacttcggttgatacgttagtggcggacgggtgagtaacgcgtgagcaacctgcccctgtgtgcgggataacgtccggaaacggacgctaataccgcatgatccaacggaaccgcatggttctgttggcaaagatttattgcacggggatgggctcgcgtccgattagatagttggcggtgcaacggaccaccaagtcgacgatcggtagccggactgagaggttgaacggccacattggaactgagaaacggtccagactcctacgggaggcagcagtggggaatattgggcaatgggcgaaagcctgacccagcgacgccgcgtgaaggaagacggtcctcggattgtaaacttcttttatgtaggacgaagaaagtgacggtactacatgaataagccacggctaactacgtgccagc

SEQ ID NO: 5550 - DNA, 490 bp, unidentified
  misc_feature 1..490: note = Ascusbbf_42956, encodes 16S rRNA
  source 1..490: mol_type = genomic DNA
agagtttgatcatggctcaggacgaacgctggcggcgtgcttcacacatgcaagtcgaacggaaaggcaccttcgggtgtactcgagtggcgaacgggtgagtaacacgtgagtaatctgcctttagctttgggataagcctcggaaacggggtctaatactggatatgactcttcctcgcatggggttgggtggaaagtttttcggctaaagatgggctcgcggtctatcagcttgttggtgaggtaatggctcaccaaggctttgacggatagccggcctgagagggcgaccggccacactgggactgagacacggcccagactcctacgggaggcagcagtggggaatattgcgcaatgggcgaaagcctgacgcagcgacgccgcgtgagggatgacggccttcgggttgtaaacctctttcagcagggacgaagtgcgaatgacggtacctgcagaagaagcgccggctaactacgtgccagcag

SEQ ID NO: 5551 - DNA, 490 bp, unidentified
  misc_feature 1..490: note = Ascusbbf_17023, encodes 16S rRNA
  source 1..490: mol_type = genomic DNA
agagtttgatcatggctcaggatgaacgctggcggcgtgcctaatacatgcaagtcgaacgggagtgcttgcactccagtggcgaacgggtgagtaacacgtaggtaatctggccttaagacgaggatagcttctagaaatggaagataaaactggataggacattataaagcacatgcttaaatgtttaaaagagcaatctacttaagggggagcctgcggtgcattagctagatggcggggtaacggcccaccatggcgatgatgcatagccggtctgagaggacgaacggccacattgggactgagaacggcccaaactcctacgggaggcagcagtagggaattttcggcaatgggcggaagcctgaccgagcaacgccgcgtgattgaagaagtatttcggtatgtaaaaatcttttatttgggacgaaaaaacaaattgacggtaccaaatgaataagccccggctaactacgtgccagcagcc

SEQ ID NO: 5552 - DNA, 490 bp, unidentified
  misc_feature 1..490: note = Ascusbbf_24804, encodes 16S rRNA
  source 1..490: mol_type = genomic DNA
agagtttgatcatggctcagaataaacgctggcggcgtgcctaacacatgcaagtcgaacggatgaagggagcaatccccgattcagtggcggacgggttagtaacgcgtgaggaacctgcctttcagagggggatagcagttggaaacgactgataataccgcataagaccacagcgccgcatgacgcaggggtcaaaggagcaatccgctgaaagatggactcgcgtccgattagatagttggtgaggtaacggcccaccaagtcgacgatcggtagccgggctgagaggctggacggcaacattgggactgagacacggcccagactcctacgggaggcagcagtgagggatattgcacaatggacgaaagtctgatgcagcaacgccgcgtgagggacgacggttttcggattgtaaacctctgtccttggtgaagataatgacggtagccaaggaggaagcaacggctaattacgtgccagcagc

SEQ ID NO: 5553 - DNA, 490 bp, unidentified
  misc_feature 1..490: note = Ascusbbf_47093, encodes 16S rRNA
  source 1..490: mol_type = genomic DNA
agagtttgatcctggctcagaatgaacgctggcggcgtgcctaacacatgcaagtcgagcgagaaagctccttcgggagttagtaaagcggcggacgggtgagtaacgcgtgagaatctgccctttagtggagaataccttcgagaaatcgaagttaatactgcatacgttccttcgggaagaaagatggcctctttgctgtcgctaaaggatgagcttgcgtactattagcttgttggtggggtaatggcctaccaaggcgatgatggttagccggcctgagagggtgtacggccacactggaacttagacacggtccagactcctacgggaggcagcagtgaggaatattgcgcaatgggcgaaagcctgacgcagcgacgccgcgtggaggatgaaggttttcggatcgtaaactcctgttaagtgggaagaaagtcctagagttaatacctctaggctatgacagtaccgctagagaaagcaccgg

SEQ ID NO: 5554 - DNA, 490 bp, unidentified
  misc_feature 1..490: note = Ascusbbf_374719, encodes 16S rRNA
  source 1..490: mol_type = genomic DNA
agagtttgatcatggctcaggatgaacgctagcggcaggcttaacacatgcaagtcgaggggcagcgcggtgtagcaatacactggcggcgaccggcggaagggtgcgtaacgcgtgagcgacatgcccgtgacagggggataacagatggaaacgtctcctaataccccataggatcgcgtgctacatggcacaggattgaaaggtgagaaccggtcacggattggctcgcgtcccatcaggtagacggcggggcagcggcccgccgtgccgacgacgggtaggggctctgagaggagtgacccccacaatggaactgagacacggtccatactcctacgggaggcagcagtgaggaatattggtcaatgggcggaagcctgaaccagccatgccgcgtgcgggaggacggccctacgggttgtaaaccgcttttgagtgcgagcaataaggttcacgcgtggaccgatgagagtagcattcgaataag

SEQ ID NO: 5555 - DNA, 490 bp, unidentified
  misc_feature 1..490: note = Ascusbbf_116634, encodes 16S rRNA
  source 1..490: mol_type = genomic DNA
agagtttgatcctggctcaggacgaacgctggcggcgtgcctaacacatgcaagtcgaacggacttagctgagtgcttgcactcggcgacagttagtggcggacgggtgagtaacgcgtgaataacctgcccaacagagggggataacgtttggaaacgaacgctaataccgcataacattgtggcatcgcatggtgcaacaatcaaaggagcaatccgctgatggatggattcgcgtccgattagctagttggtgagataacagctcaccaaggcgacgatcggtagccggactgagaggttgaacggccacattgggactgagacacggcccagactcctacgggaggcagcagtgggggatattgcacaatgggggaaaccctgatgcagcaacgccgcgtgagggaagaaggttttcggattgtaaacctctgtcctaggtgaagataatgacggtagcctaggaggaagctccggctaactacgt

SEQ ID NO: 5556 - DNA, 490 bp, unidentified
  misc_feature 1..490: note = Ascusbbf_109100, encodes 16S rRNA
  source 1..490: mol_type = genomic DNA
agagtttgatcatggctcaggatgaacgctggcggcgtgcctaacacatgcaagtcgaacggaccttatctgaacagagacttcggttgaagagatcataaggttagtggcggacgggtgagtaacgcgtggagaacctgccctgtactgggggataacagtgagaaatcactgctaataccgcataagcgcacggtaccgcatggtacagtgtgaaaaactccggtggtacaggatggctccgcgttggattagccagttggcggggtaacggcccaccaaagcgacgatccatagccggcctgagagggtgaacggccacattgggactgagacacggcccagactcctacgggaggcagcagtggggaatattgcacaatggggggaaccctgatgcagcgacgccgcgtgaaggaagaagtatctcggtatgtaaacttctatcagcagggaagagattgacggtacctgaccaagaagccccggc

SEQ ID NO: 5557 - DNA, 490 bp, unidentified
  misc_feature 1..490: note = Ascusbbf_118865, encodes 16S rRNA
  source 1..490: mol_type = genomic DNA
agagtttgatcatggctcagaatgaacgttggcggcatggattaggcatgcaagtcgcacgaaaagtggagtagcttgctacgaaactgaaagtggcgaaagggagagtaacgcgtggttacataccttcaggaccaggatagcgtcgggaaactggcggtaatactggatgatatctacggatcaaatggtgtgattccgcctggagattggactgcgtactattagcttgttggcggggtaatggcccaccaaggctgcgatggttaccgggtgtgagagcatggcccggctcactgggactgagacactgcccagacatctacggatggctgcagtcgagaatcttcggcaatgggcgaaagcctgaccgagcgatgccgcgtgcgggatgaaggccctcgggttgtaaaccgctgtcagttggaaggaaatattatagggttatctctatagtttgaccgatcttcagaggaaggacgggctaagt

SEQ ID NO: 5558 - DNA, 490 bp, unidentified
  misc_feature 1..490: note = Ascusbbf_105010, encodes 16S rRNA
  source 1..490: mol_type = genomic DNA
agagtttgatcctggctcaggacgaacgctggcggcgtgcctaacacatgcaagtcgaacgaagctcttttcaatgcgattcgtcaagttgaaaggatgacttagtggcgaacgggtgagtaacgcgtgagcaacctgccccggagtgggggacaacagttggaaacgactgctaataccgcatgacatgttcggatggcatcatctgaacatcaaagatttattgctctgggatgggctcgcgtctgattagatagttggcggggtaacggcccaccaagtcgacgatcagtagccggactgagaggttgaacggccacattgggactgagatacggcccagactcctacgggaggcagcagtggggaatattgggcaatgggggaaaccctgacccagcaacgccgcgtgaaggaagaaggccttcgggttgtaaacttcttttgttgaggacgaagaaagtgacggtactcgacgaataagctacgg

SEQ ID NO: 5559 - DNA, 490 bp, unidentified
  misc_feature 1..490: note = Ascusbbf_86337, encodes 16S rRNA
  source 1..490: mol_type = genomic DNA
agagtttgatcatggctcaggatgaacgctggcggcgtgcctaatacatgcaagtcgaacgaggtagcaatacctagtggcgaacgggtgagtaacacgtaggtaacctgcccttaagcttgggatacccagaggaaactttggctaataccggataacaactgagatcgcatgatcttagcttgaaaggccctttcgggtcacttaaggatggacctgcggcgcattagctagttggtgagataacagcccaccaaggcgaggatgcgtagccgaactgagaggttgatcggccacattggaactgagacacggtccaaactcctacgggaggcagcagtaaggagttttcggcaatgggggaaaccctgaccgagcaacgccgcgtgagcgatgacggccctatgggttgtaaagctctgttgtaagccaagaatggtagtgctaggaaatgagcattacttgacggtagcttaccagaaagccacgg

SEQ ID NO: 5560 - DNA, 490 bp, unidentified
  misc_feature 1..490: note = Ascusbbf_131018, encodes 16S rRNA
  source 1..490: mol_type = genomic DNA
agagtttgatcatggctcaggatgaacgctggcggcgtgcttaacacatgcaagtcgaacggagttgttacgctgatgaagcttcggcagaatcttgtagcaacttagtggcggacgggtgagtaacgcgtgggtaacctgccttataccgggggatagcatcgggaaactgatgataataccgcataagcgcacgagagggcatccttttgtgtgaaaaactccggtggtataagatggacccgcgtctgattagttagttggcggggtaacggcccaccaagacgacgatcagtagccggcctgagagggtgaacggccacattgggactgagacacggcccaaactcctacgggaggcagcagtggggaatattgcacaatgggcgaaagcctgatgcagcgacgccgcgtgagtgaagaagtatttcggtatgtaaagctctatcagtagggaagaagacaatgacggtacctaactaagaagccc

SEQ ID NO: 5561 - DNA, 490 bp, unidentified
  misc_feature 1..490: note = Ascusbbf_197966, encodes 16S rRNA
  source 1..490: mol_type = genomic DNA
agagtttgatcatggctcaggatgaacgctggcggcacgcttaacacatgcaagtcgagcggaggcggagacttcggtttccaactcagcggcggacgggtgaggaacgcgtgggtaatctgccccataccgggggataactcagagaaatctgagctaaaaccgcataagcccacggagtcgcatggctctgagggaaaaactccggtggtatgggatgagcccgcgtccgattagccagttggcgaggtaaaagctcaccaaagcgacgatcggtagccggtctgagaggatggacggccacattgggactgagacacggcccagactcctacgggaggcagcagtggggaatattgcacaatgggggaaaccctgatgcagcgatgccgcgtgaaggaagacggttttcggattgtaaacttctatcagcgaggaagagaacggacagtactcgaacaagcagccccggctaactacgtgccagcag

SEQ ID NO: 5562 - DNA, 490 bp, unidentified
  misc_feature 1..490: note = Ascusbbf_1861042, encodes 16S rRNA
  source 1..490: mol_type = genomic DNA
agagtttgatcctggctcaggatgaacgctggcggcgtgcctaacacatgcaagtcgagcgagaagcctctttgaagatacttcggttgattctgtgaggcggaaagcggcggacgggtgagtaacgcgtaggcaacctgccccatgcagagggatagcctcgggaaaccgggattaaaacctcataatacccgacctggacatccaggatgggtcaaagatttatcggcaagggatgggcctgcgtctgattagttagttggtgaggtaacggctcaccaaggcgacgatcagtagccgacctgagagggtgatcggccacattggaactgagacacggtccaaactcctacgggaggcagcagtggggaatattgcacaatgggggaaaccctgatgcagcaacgccgcgtgaaggatgaaggcccttgggtcgtaaacttctgttctaagggaaggtagtgacggtaccttaggagcaagtcccggc

SEQ ID NO: 5563 - DNA, 490 bp, unidentified
  misc_feature 1..490: note = Ascusbbf_730611, encodes 16S rRNA
  source 1..490: mol_type = genomic DNA
agagtttgatcctggctcaggacgaacgcttgcggcgtgcctaagaaatgcaagtcgagcgaagtccagggtgcttgcacccgaagacttagcggcgaacggtcgcgtaacacgtaagcaacctgccctaaagacggggatagcccaccgaaaggtggattaataccggatgtgaacacttattcgcatgtataagtgtttaaagcagcaatgcgctttaggatgggcttgcggcctatcagttagttggtgtggtaacggctcaccaagacgacgacgggtagccggtctgagaggatgaccggccggatcgggactgagatacggcccggactcctacggggggcagcaattaggaatcttgcgcaatgggcgaaagcctgacgcagcgacgccgcgtgactgatgaagtccttcgggatgtaaaagtcttttctcggtgaagaaggatgtgactgtagccgaggaataagctccggctaactacgtg

SEQ ID NO: 5564 - DNA, 490 bp, unidentified
  misc_feature 1..490: note = Ascusbbf_363552, encodes 16S rRNA
  source 1..490: mol_type = genomic DNA
agagtttgatcctggctcaggacgaacgctggcggcgtgcctaacacatgcaagtcgaacgggacttaatggaatgagacttcggtcaaaggaagttaagtttagtggcggacgggtgagtaacgcgtgagcaacctgcctttcagagggggacaacagttggaaacgactgctaataccgcataacgtatacttagggcatccttggtataccaaagatttatcgctgaaagatgggctcgcgtctgattagatagttggcggggtaacggcccaccaagtcgacgatcagtagccggactgagaggttgaacggccacattgggactgagatacggcccagactcctacgggaggcagcagtggggaatattggtcaatgggggcaaccctgaaccagcaacgccgcgtgaaggaagaaggctttcgggttgtaaacttcttttgccggggacgaaacaaatgacggtacccggcgaataagccacgg

SEQ ID NO: 5565 - DNA, 490 bp, unidentified
  misc_feature 1..490: note = Ascusbbf_712024, encodes 16S rRNA
  source 1..490: mol_type = genomic DNA
agagtttgatcatggctcaggacgaacgctggcggcgtgcttaacacatgcaagtcgagcggagacacaggacggaaagcttcggccggaagacctgtgttttagcggcggacgggtgagtaacgcgtgagcaacctgtccttcacagggggataagataccgaaaggtgttctaataccgcataagaccacagcatcacatgaagcaggggtcaaaggaggaatccggtgaagggtgggctcgcgtccgattagatagttggtgaggtaacggcccaccaagtcaacgatcggtagccgacctgagagggtgatcggccacattgggactgagacacggcccagactcctacgggaggcagcagtgggaatattgggcaatgggggaaaccctgacccagcaacgccgcgtggaggaagaaggtcttcggatcgtaaactcctgtccttcaagacgaggaagagacggtaatggaggaggaagccccgg

SEQ ID NO: 5566 - DNA, 490 bp, unidentified
  misc_feature 1..490: note = Ascusbbf_302475, encodes 16S rRNA
  source 1..490: mol_type = genomic DNA
agagtttgatcatggctcaggatgaacgctggcggcgtgcttaacacatgcaagtcgaacgaagcatcctcatccgtggaagggagtagcttgctacgaacggacacacccgaggatgacttagtggcggacgggtgagtaacgcgtgggtaacctgccccatagagggggacaacagttggaaacgactgctaataccgcatagtaatgtagatccgcatgcttctacattgaaagcttttgcgctatgggatggacccgcgtctgattagctagttggtgaggtaacggcccaccaaggcaacgatcagtagccggcttgagagagtgaacggccacattgggactgagacacggcccaaactcctacgggaggcagcagtggggaatattgcacaatgggggaaaccctgatgcagcgacgccgcgtgagtgaagaagtatttcggtatgtaaagctctatcagcaggaaagataatgacggtacct

SEQ ID NO: 5567 - DNA, 490 bp, unidentified
  misc_feature 1..490: note = Ascusbbf_1839671, encodes 16S rRNA
  source 1..490: mol_type = genomic DNA
agagtttgatcatggctcaggatgaacgctggcggcgtgcctaacacattcaagtcgaacggagaagaaggcttcggccttcggatcagtggcggacgggtgagtaacgcgtgagtaatctgcctttgattggggaataacacagggaaacttgtgctaataccgcataacacagcgacaccgcatgatgatgctgtcaaagatttatcgatcaaagatgagctcgcgtccgattagatagttggtgaggtaaaggcttaccaagtctgcgatcggtagccggactgagaggttgaacggccacattggaactgagatacggtccagactcctacgggaggcagcagtggggaatattgggcaatgggcgaaagcctgacccagcgacgccgcgtgagggaagaaggtcttcggattgtaaacctcttttatagggaacgaaggaagtgacggtaccctaagaaaaagccacggctaactacgtgccagc

SEQ ID NO: 5568 - DNA, 490 bp, unidentified
  misc_feature 1..490: note = Ascusbbf_18211, encodes 16S rRNA
  source 1..490: mol_type = genomic DNA
agagtttgatcatggctcaggacgaacgctggcggcgtgcttaacacatgcaagtcgagcggaaaggccccttcgggggtactcgagcggcgaacgggtgagtaacacgtgagcaacctgcccctgactctgggataagcccgggaaactgggtctaataccggatatgaccactccaggcatctggtggtggtggaaagtttttcggttggggatgggctcgcggcctatcagcttgttggtggggtgatggcctaccaaggcgacgacgggtaaccggcctgagagggcgaccggtcacactgggactgagacacggcccagactcctacgggaggcagcagtgggaatattgcgcaatgggcggaagcctgacgcagcgacgccgcgtgggggatgacggccttcgggttgtaaacccctttcagcagggacgaagctaacgtgacggtacctgcagaagaagcgccggctaactacgtgccagcag

SEQ ID NO: 5569 - DNA, 490 bp, unidentified
  misc_feature 1..490: note = Ascusbbf_187008, encodes 16S rRNA
  source 1..490: mol_type = genomic DNA
agagtttgatcctggctcaggacgaacgctggcggcgtgcctaatacatgcaagtcgaacgcactgacagagaaacttgtttctctcgacgtgagtggcgcacgggtgagtaacacgtgggaaacctacccttcagcgggggataaccgtcggaaacgatggctaataccgcataggtcttttaaccgcctggttgaaagaggaaagacggcttcggctgtcactgaaggatggtcccgcggtgcattagctagttggtaaggtaacggcttaccaaggcgatgatgcatagccgacctgagagggtgatcggccacattgggactgagacacggcccaaactcctacgggaggcagcagtagggaatcttccgcaatggacgcaagtctgacggagcaacgccgcgtgtgtgaagaaggtcttcggatcgtaaagcactgttattagagaagaacaaccggtagagtaactgttaccggcttgacggta

SEQ ID NO: 5570 - DNA, 490 bp, unidentified
  misc_feature 1..490: note = Ascusbbf_76022, encodes 16S rRNA
  source 1..490: mol_type = genomic DNA
agagtttgatcatggctcaggatgaacgctggcggcgtgcctaacacatgcaagtcgagcgagaaacctctttgaagatacttcggttgattctgtgaggcggaaagcggcggacgggtgagtaacgcgtaggcaacctgcccctggcagagggatagcctcgggaaaccgggattaaaacctcataatgcgagagaaagacatctttcattcgccaaagatttatcggctggggatgggcctgcgtctgattagttagttggtggggtaacggcctaccaaggcgacgatcagtagccgacctgagagggtgatcggccacattggaactgagacacggtccaaactcctacgggaggcagcagtggggagtattgcacaatgggggaaaccctgatgcagcaacgccgcgtgaaggatgaaggcctttgggtcgtaaacttctgttctaagggaagatcgtgacggtaccttaggagcaagtcccggc

SEQ ID NO: 5571 - DNA, 490 bp, unidentified
  misc_feature 1..490: note = Ascusbbf_130093, encodes 16S rRNA
  source 1..490: mol_type = genomic DNA
agagtttgatcctggctcaggacgaacgctggcggcatgcctaacacatgcaagtcgaacggtaaggccctcttcggagggtacacgagtggcgaacgggtgagtaacacgtgggtaacctgcccttcactgggggataaccgagggaaacctcggctaataccgcatgatgtgcgcattcataagtttgcgtaccaaaactccggtggtgaaggatgggcccgcgtcggattagcttgttggtggggtaaaggcctaccaaggcgacgatccgtagctggtctgagaggacgatcagccacactgggactgagacacggcccagactcctacgggaggcagcagtggggaatcttgcgcaatgggcgaaagcctgacgcagcaatgccgcgtgagggaagacggtcttaggattgtaaacctctttcagcagggacgaaaacagacggtacctgcagaagaagccccggctaactacgtgccagcagcc

SEQ ID NO: 5572 - DNA, 490 bp, unidentified
  misc_feature 1..490: note = Ascusbbf_29439, encodes 16S rRNA
  source 1..490: mol_type = genomic DNA
agagtttgatcatggctcaggatgaacgctggcggcgtgcctaacacatgcaagtcgagcggagataagcgccgaaggaggtttcggccgaattcatgcttatcttagcggcggatgggtgaggaacgcgtggagaacctgcccttcacagggggataacagctggaaacgactgttaataccgcatatgctcacagcaccgcatggtgcagggaggaaagccgagacggtgaaggatggctccgcgtcggattagccagttggcggggtaacggcccaccaaagcgatgatccgtagccggcctgagagggcgaccggccacattgggactgagacacggcccaaactcctacgggaggcagcagtgggggatattgcacaatgggggaaaccctgatgcagcgacgccgcgtgaaggaggaagtgcttcggcatgtaaacttctatcagcagggaagaagatgacggtacctgcacaagaagccccgg

SEQ ID NO: 5573 - DNA, 490 bp, unidentified
  misc_feature 1..490: note = Ascusbbf_71721, encodes 16S rRNA
  source 1..490: mol_type = genomic DNA
agagtttgatcctggctcaggatgaacgctagcgggaggcttaacacatgcaagccgaggggtatagttctttcgggaactagagaccggcgcacgggtgcgtaacgcgtatgcaacttgccctactgaaaaggatagcccttcgaaaggaggattaatactttataacagatttaatggcatcattagattttgaaagatttatcgcagtaggataggcatgcgtaagattagttagttggtgaggtaacggctcaccaagacgatgatctttagggggcctgagagggtgaacccccacactggtactgagacacggaccagactcctacgggaggcagcagtgaggaatattggacaatgggtggaagcctgatccagccatcccgcgtgtaggatgacggccttatgggttgtaaactacttttatctggggataaacctacttacgtgtaagtagctgaaggtaccagaagaataagcaccggct

SEQ ID NO: 5574 - DNA, 490 bp, unidentified
  misc_feature 1..490: note = Ascusbbf_8735, encodes 16S rRNA
  source 1..490: mol_type = genomic DNA
agagtttgatcatggctcaggacgaacgctggcggcgtgcttaacacatgcaagtcgaacgaagcttgattaatgatctcttcggagtgaattatgatatgactgagtggcggacgggtgagtaacgcgtgagtaacctgcccttcggagggggatagtgtttggaaacgaacagtaataccgcataatgtgcgaagaaggcatcttttttgtaccaaagatttatcgccgaaggatggactcgcgtctgattagatagttggtgaggtaacggctcaccaagtcgacgatcagtagccggactgagaggttgaacggccacattgggactgagacacggcccagactcctacgggaggcagcagtggggaatattgcacaatgggggaaaccctgatgcagcaacgccgcgtggaggaagacggttttcggattgtaaactcctgttcttagggaagaagacagtgacggtacctaaggagcaagccac

SEQ ID NO: 5575 - DNA, 490 bp, unidentified
  misc_feature 1..490: note = Ascusbbf_6705, encodes 16S rRNA
  source 1..490: mol_type = genomic DNA
agagtttgatcatggctcaggacgaacgctggcggcgtgcctaacacatgcaagtcgaacggagttacgggagcttgctcctgtaacttagtggcggacgggtgagtaacgcgtgagcaacctgccttacagagggggatagccattggaaacgatggataataccgcataacgtacagtcatggcatcttgattgtaccaaaggagcaatccgctgtaagatgggctcgcgtccgattagatagatggtgaggtaacggcccaccatgtcgacgatcggtagccggactgagaggttgaacggccacattgggactgagacacggcccagactcctacgggaggcagcagtgagggatattgcacaatgggcgaaagcctgatgcagcaacgccgcgtgagggatgacggttttcggattgtaaacctctgtcttcggtgatgataatgacattagccgaggaggaagccacggctaactacgtgccag

SEQ ID NO: 5576 - DNA, 490 bp, unidentified
  misc_feature 1..490: note = Ascusbbf_19307, encodes 16S rRNA
  source 1..490: mol_type = genomic DNA
agagtttgatcatggctcaggatgaacgctggcggcgcgcctaacacatgcaagtcgaacgaagctctttagcggatcccttcggggtgaagcttttgagacttagtggcggacgggtgagtaacgcgtggggaacctgccccgtacagggggataacagttagaaatgactgctaataccgcataagcgcacactgtcgcatggcagagtgtgaaaagccgagacggtacgggagggccccgcgtctgattagctagttggtggggtaacggcctaccaaggcgacgatcagtagccgaactgagaggttgatcggccacattgggactgagacacggcccagactcctacgggaggcagcagtgggggattttgcacaatggggggaaccctgatgcagcgacgccgcgtgagtgaagaagtatttcgatacgtaaagctctatcagcagggaagaaaatgacggtacctgactaagaagccccggct

SEQ ID NO: 5577 - DNA, 490 bp, unidentified
  misc_feature 1..490: note = Ascusbbf_737775, encodes 16S rRNA
  source 1..490: mol_type = genomic DNA
agagtttgatcctggctcaggatgaacgctggcggcgtgcataacacattcaagtcgaacggtgaagcgccttcgggtgcggatcagtggcggacgggtgagtaacgcgtgagcaacctgccgtatagtgggggataacacagggaaacttgtgctaataccgcataacacatgggaatcgcatgttttctatgtcaaagatttattgctgtacgatgggctcgcgtatgattagacagttggcagggcaacggcctaccaaatctacgatcattagccgaactgagaggttgaacggccacattggaactgagaaacggtccagactcctacgggaggcagcagtggggaatattgggcaatgggcgaaagcctgacccagcgacgccgcgtgagggaagaaggtcttcggattgtaaacctctttcagcagggaagaatcgatgacggtacctgcagaagaagtcacggctaactacgtgccagcagc

SEQ ID NO: 5578 - DNA, 490 bp, unidentified
  misc_feature 1..490: note = Ascusbbf_560, encodes 16S rRNA
  source 1..490: mol_type = genomic DNA
agagtttgatcctggctcaggacgaacgctggcggcgtgcttcatacatgcaagtcgaacgagaatctctagcttgctagagaggaaagtggcggacgggtgagtaaaatgtagagaatctgcccttgagagggggacaacagttggaaacggctgctaataccccatatgagcgtacctgagatggtattcttgaaaactccggtgctcaaggatgagtctgcatctgattagctagttggcggggtaatggcccaccaaggcgacgatcagtagctggtttgagaggatgatcagccacaatgggactgagacacggcccatactcctacgggaggcagcagtagggaattttgcgcaatgggggaaaccctgacgcagcaacgccgcgtgaacgagacgcccttcggggtgtaaagttttgtcagtggggacgaacaaatgacggtacccacagaggaagcaccggctaactccgtgccagcagccg

SEQ ID NO: 5579 - DNA, 490 bp, unidentified
  misc_feature 1..490: note = Ascusbbf_6707, encodes 16S rRNA
  source 1..490: mol_type = genomic DNA
agagtttgatcatggctcaggatgaacgctagctacaggcttaacacatgcaagtcgaggggcagcatgaaggtagcttgctacctttgatggcgaccggcgcacgggtgagtaacgcgtatccaacctgcccgctactcgggtatagcccagtgaaaactggattaatccccgatggcatcttacgctgacatcaaagtaagattaaaggttacggtagcggatggggatgcgtccgattagctatgttggcggggtaacggcccaccaaggcgacgatcggtaggggttctgagaggaaggtcccccacattggaactgagacacggtccaaactcctacgggaggcagcagtgaggaatattggtcaatggacgagagtctgaaccagccaagtagcgtgcaggatgacggccctatgggttgtaaactgcttttatcagggaataaagtgcggcacgcgtgccgttttgtatgtacctgacgaata

SEQ ID NO: 5580 - DNA, 490 bp, unidentified
  misc_feature 1..490: note = Ascusbbf_1535, encodes 16S rRNA
  source 1..490: mol_type = genomic DNA
agagtttgatcatggctcaggacgaacgctggcggcgtgcctaatacatgcaagtcgagcgaacagataaggagcttgctcctttgacgttagcggcggacgggtgagtaacacgtgggcaacctgccctatagttggggataactccgggaaaccggggctaataccgaataatccattccatctcctgatggaatgttgaaagatggttctgctatcgctataggatgggcccgcggcgcattagctagttggtgaggtaacggctcaccaaggcgacgatgcgtagccgacctgagagggtgatcggccacactgggactgagacacggcccagactcctacgggaggcagcagtagggaatcttccacaatgggcgaaagcctgatggagcaacgccgcgtgagtgaagaaggttttcggatcgtaaaactctgttgtaagggaagaacaagtacagtagtaactggctgtaccttgacggtacct

SEQ ID NO: 5581 - DNA, 490 bp, unidentified
  misc_feature 1..490: note = Ascusbbf_75483, encodes 16S rRNA
  source 1..490: mol_type = genomic DNA
agagtttgatcatggctcagattgaacgctggcggcatgctttacacatgcaagtcgaacggcagcacggaagagcttgctctttttggtggcgagtggcgaacgggtgagtaacatatcggaacgtaccgagtagtgggggataaccagtcgaaagattggctaataccgcatattctctgaggaggaaagccggggaccatttggcctggtgctatttgagcggccgatatctgattagctggttggtggggtaaaggcctaccaaggcgacgatcagtagcgggtctgagaggatgatccgccacactgggactgagacacggcccagactcctacgggaggcagcagtggggaattttggacaatgggggaaaccctgatccagccatgccgcgtgtatgaagaaggccttcgggttgtaaagtacttttgtcagggaagaaaagcacggtgttaatagcattgtgtgatgacggtacctgaagaa

SEQ ID NO: 5582 - DNA, 490 bp, unidentified
  misc_feature 1..490: note = Ascusbbf_116631, encodes 16S rRNA
  source 1..490: mol_type = genomic DNA
agagtttgatcctggctcaggacgaacgctggcggcgtgcttaacacatgcaagtcgaacggtaaggcccttcggggtacacgagtggcgaacgggtgagtaacacgtgagtaatgtgcccttgactctgggataaccgccggaaacggtggctaatactggatatgacctggccctgcatggggttgggtggaaagcttttgcggtcttggatcaactcgcggcctatcagcttgttggtgaggtagtggctcaccaaggcttcgacgggtagccggcctgagagggcgaccggccacactgggactgagatacggcccagactcctacgggaggcagcagtggggaatattgcacaatgggcggaagcctgatgcagcaacgccgcgtgcgggatgacggccttcgggttgtaaaccgctttcacccatgacgaagcgaaagtgacggtagtgggagaagaagcaccggccaactacgtgccagcagc

SEQ ID NO: 5583 - DNA, 490 bp, unidentified
  misc_feature 1..490: note = Ascusbbf_284826, encodes 16S rRNA
  source 1..490: mol_type = genomic DNA
agagtttgatcatggctcaggacgaacgctggcggcgtgcttaacacatgcaagtcgagcgagaaagctccttcgggagtgagtacagcggcgaacgggtgagtaacacgtgggcaacctgccccaaggagcgggacaacttgaggaaactcgggctaataccgcatgattcgcctcggcataagccgaggtggtaaatggtagcttcggcctccgccttgggatgggcccgcggcgcattagcttgttggtggggtaacggctcaccaaggcgacgatgcgtagctggtctgagaggacgatcagccacactgggactgagacacggcccagactcctacgggaggcagcagtggggaatcttgcgcaatgggcggaagcctgacgcagcaacgccgcgtgtgggaagacggctttcgggttgtaaaccactttcaggggggacgaagcttccggggttaatagcctacggggtgacggtacccccaga

SEQ ID NO: 5584 - DNA, 490 bp, unidentified
  misc_feature 1..490: note = Ascusbbf_881304, encodes 16S rRNA
  source 1..490: mol_type = genomic DNA
agagtttgatcctggctcagattgaacgctagcggcatgcttaacacatgcaagtcgaacggtaacaggtctagcttgctagatgctgacgagtggcggacgggtgagtaatgcgcaggaatctgccttatagtgggggataacttggggaaactcgagctaataccgcatatgccttacgtggtaaagcaggggactttcgggccttgtgctataagatgagcctgcgtcggattagcttattggtggggtaaaggcctaccaaggcgacgatccgtagctggtctgagaggatgatcagccacactgggactgagacacggcccagactcctacgggaggcagcagtggggaatattggacaatgggcgcaagcctgatccagcaatgccgcgtgtgtgaagaaggcctgcgggttgtaaagcactttcagtggggaggaaggattcagcgctaataccgttgaatattgacgttacctacagaagaa

SEQ ID NO: 5585 - DNA, 490 bp, unidentified
  misc_feature 1..490: note = Ascusbbf_217782, encodes 16S rRNA
  source 1..490: mol_type = genomic DNA
agagtttgatcctggctcagattgaacgctggcggcatgcctaacacatgcaagtcgaacggcagcatgacctagcttgctaggttgatggcgagtggcgcacgggtgagtaacgcgtgggaatatgccttaaagagggggacaacttggggaaactcaagctaataccgcataatctcttcggagaaaagctggggactttcgagcctggcgctttaagaatagcctgcgtctgattagctagttggtagggtaagagcctaccaaggcgacgatcggtagctggtctgagaggatggtcagccacactgggactgagacacggcccagactcctacgggaggcagcagtggggaatattggacaatgggggcaaccctgatccagcaatgccgcgtgtgtgaagaaggcctgagggttgtaaagcactttcagtggggaggaggattgacaggttaagagctagttaattggacgttacccacagaag

SEQ ID NO: 5586 - DNA, 490 bp, unidentified
  misc_feature 1..490: note = Ascusbbf_254709, encodes 16S rRNA
  source 1..490: mol_type = genomic DNA
agagtttgatcatggctcaggatcaacgctggcggcgtgcctaatgcatgcaagtcgaacggggtcgccttcgggcggctcacgtggcggacgggtgaggaacacgtgggcgatctgccccgaggtgggggatagccaccagaaatggtgggtaagaccgcatgagctccctggtttacggatcagggaggaaaacgcttcggcgtgccttgggaggagcctgcggcggattagctagttggtggggtaacggcttaccaaggcgatgatccgtagctggtctgagaggatgaccagccacaggggaactgagacacggtccccactcctacgggaggcagcagcaaggaattttccgcaatgggcgaaagcctgacggagcaacgccgcgtgggggatgacgcttttcggagtgtaaaccccttttctcagggaagaacacaatgacggtacctgaggaataaggaccggctaactacgtgccagcagc

SEQ ID NO: 5587 - DNA, 490 bp, unidentified
  misc_feature 1..490: note = Ascusbbf_715963, encodes 16S rRNA
  source 1..490: mol_type = genomic DNA
agagtttgatcatggctcaggacgaacgctggctgcgtgcttaacacatgcaagtcgaacgctgaagccctggtgcttgcaccggggtggatgagtggcgaacgggtgagtaacacgtgagtaacctgcccccgacttcgggataagcccgggaaactgggtctaataccggatatgaccatgactcgcatgagtgatggtggaaagttttttcggttggggatgggctcgcggcctatcagtttgttggtgaggtaatggctcaccaagacgacgacgggtagccggcctgagagggcgaccggccacactgggactgagacacggcccagactcctacgggaggcagcagtggggaatattgcacaatgggggaaaccctgatgcagcgacgcagcgtgcgggatgacggccttcgggttgtaaaccgctttcagcagggaagaagcccttcggggtgacggtacctgcagaagaagtaccggctaac

SEQ ID NO: 5588 - DNA, 490 bp, unidentified
  misc_feature 1..490: note = Ascusbbf_257886, encodes 16S rRNA
  source 1..490: mol_type = genomic DNA
agagtttgatcctggctcaggacgaacgctggcggcgtgcttaacacatgcaagtcgaacgatgaagcaccagcttgctggtgtggaagagtggcgaacgggtgagtaccacgtgagtaacctgccccgaactctgggataagcgctggaaacggtgtctaatactggatatgcatcatggccgcatggtctgtgatgggaaagactttgtcggttcgggatggactcgcggcctatcagcttgatggtggggtaatggcctaccatggcgacgacgggtagccggcctgagagggtgaccggccacactgggactgagacacggcccagactcctacgggaggcagcagtggggaatattgcacaatgggcgcaagcctgatgcagcaacgccgcgtgagggatgacggccttcgggttgtaaacctcttttagtagggaagaagcgaaagtgacggtacctgcagaaaaagcaccggctaactacgtg

SEQ ID NO: 5589 - DNA, 490 bp, unidentified
  misc_feature 1..490: note = Ascusbbf_335916, encodes 16S rRNA
  source 1..490: mol_type = genomic DNA
agagtttgatcctggctcagattgaacgctggcggcatgctttacacatgcaagtcgagcggcagcgggggtgcttgcacctgccggcgagcggcgaacgggtgagtaatgcatcggaacgtacccatttgtgggggatagcccggcgaaagccggattaataccgcatacgccctgagggggaaagcgggggattcttcggaacctcgcgcaattggagcggccgatgtcggattagctagtaggtggggtaaaggctcacctaggcgacgatccgtagctggtctgagaggatgatcagccacactgggactgagacacggcccagactcctacgggaggcagcagtggggaattttggacaatgggcgaaagcctgatccagccatgccgcgtgagtgaagaaggccttcgggttgtaaagctctttcagttgggaagaaaaggcgctctctaatatagggcgctgctgacggtaccgacagaagaa

SEQ ID NO: 5590 - DNA, 490 bp, unidentified
  misc_feature 1..490: note = Ascusbbf_649723, encodes 16S rRNA
  source 1..490: mol_type = genomic DNA
agagtttgatcctggctcaggacgaacgctggcggcgggcttaacacatgcaagtcgaacgagaagctccccttcgggggagtggaaagtggcgcacaggtgagtaacacgtgggcaacctaccctcaggcggggaataactacgggaaaccgtggctaataccgcataactgtccggaccccgcatggggaccggatcaaaggcttcggccacctggggatgggcctgcgtcggattagcttgttggtgaggtaacggctcaccaaggcaacgatccgtagctggtctgagaggatgatcagccacactggcactgagacacgggccagactcctacgggaggcagcagtgaggaatcttgcgcaatggaggaaactctgacgcagccacgccgcgtgcaggaagacacccctcaggggcgtaaactgcttttatacgagaagaacaccctactcggtagggtctgacggtatcgtatgaataaggacc

SEQ ID NO: 5591 - DNA, 490 bp, unidentified
  misc_feature 1..490: note = Ascusbbf_16471, encodes 16S rRNA
  source 1..490: mol_type = genomic DNA
agagtttgatcctggctcaggatgaacgctggcggcgtgcttaacacatgcaagtcgaacgggaaacttttcattgaagcttcggcagatttggtctgtttctagtggcggacgggtgagtaacgcgtgggtaacctgccttatacagggggataacaaccagaaatggttgctaataccgcataagcgcacaggaccgcatggtccggtgtgaaaaactccggtggtataagatggacccgcgttggattagctagttggcagggtaacggcctaccaaggcgacgatccatagccggcctgagagggtgaacggccacattgggactgagacacggcccagactcctacgggaggcagcagtggggaatattgcacaatgggggaaaccctgatgcagcgacgccgcgtgaaggaagaagtatctcggtatgtaaacttctatcagcagggaagatagtgacggtacctgactaagaagccccggcta

SEQ ID NO: 5592 - DNA, 490 bp, unidentified
  misc_feature 1..490: note = Ascusbbf_29601, encodes 16S rRNA
  source 1..490: mol_type = genomic DNA
agagtttgatcatggctcaggatgaacgctagcggcaggcctaacacatgcaagtcgaggggtagaaatagcttgctattttgagaccggcggatgggtgcgtaacgcgtatgcaatctaccttgtacattgggatagcccggagaaatccggattaataccttatagttttattgattggcatcaattaataagtaaagatttatcggtacaagatgagcatgcgtcccattagttagttggtgtggtaacggcataccaagacgatgatgggtaggggtcctgagagggagatcccccacactggtactgagacacggaccagactcctacgggaggcagcagtgaggaatattggtcaatggacgcaagtctgaaccagccatgccgcgtgcaggaagaatgtcctatggattgtaaactgcttttatacgggaagaaacctatccacgagtggataattgacggtaccgtaagaataaggatcggc

SEQ ID NO: 5593 - DNA, 490 bp, unidentified
  misc_feature 1..490: note = Ascusbbf_1508164, encodes 16S rRNA
  source 1..490: mol_type = genomic DNA
agagtttgatcctggctcaggattaacgctggcggcgtgcctaacacatgcaagtcgaacgaaatacttttgtatttagtggcgaacgggtgagtaatgtacaggtaatgtaccttcgtactgcgaataacaagctgaaaagtttgctaatacggaatagcttcctacgagggcatccttaaaggaataaagatttatcgtgcggagatcagcctgtatcctattagttagttggtggggtaatggcctaccaagacgacgatgggtaactggtctgagaggatgagcagtcacattggaactgagaaacggtccaaactcctacgggaggcagcagtgaggaattttgcgcaatgggggaaaccctgacgcagcaacgccgcgtgagtgatgacggccttcgggttgtaaagctttgtcgtgtgtgacgagtagggacggtaacacacaaggaagcctcggctaactacgtgccagcagccgcggtaat

SEQ ID NO: 5594 - DNA, 490 bp, unidentified
  misc_feature 1..490: note = Ascusbbf_84177, encodes 16S rRNA
  source 1..490: mol_type = genomic DNA
agagtttgatcctggctcaggacgaacgctggcggcgtgcttaacacatgcaagtcgaacggtaaggcccttcggggtacacgagtggcgaacgggtgagtaacacgtgagtgacctgccctctacttcgggataacctccagaaatggtggctaataccggatattcatgcgtcccttcctgggggtgtgtggaaagctttggcggtagtggatggactcgcggcctatcagcttgttggtgaggtagtggctcaccaaggcttcgacgggtagccggcctgagagggtgaccggccacattgggactgagatacggcccagactcctacgggaggcagcagtggggaatattgcgcaatgggcggaagcctgacgcagcaacgccgcgtgcgggatgacggccttcgggttgtaaaccgctttcagtagggacgaagcttttgtgacggtacctacagaagaagcaccggccaactacgtgccagcag

SEQ ID NO: 5595 - DNA, 490 bp, unidentified
  misc_feature 1..490: note = Ascusbbf_22018, encodes 16S rRNA
  source 1..490: mol_type = genomic DNA
agagtttgatcctggctcaggacgaacgctggcggcatgcctaacacatgcaagtcgaacggaacaaaggacgctgtagcgatacaatggaatttgtttagtggcgaacgggtgagtaacacgtgagcaacctgcctttcacacagggataacagccggaaacggctgctaataccggataagaccacactgaggcatctcagaggggtcaaagcgtttagcggtgaaagatgggctcgcgtcccattagctagttggtgagataacagcccaccaaggcgacgatgggtagccgacttgagagagtgatcggccacattggaactgagacacggtccagactccttcgggaggcagcagtggggaatattgggcaatggaggaaactcttacccagcaatgccgcgtgaatgaagaaggccttcgggttgtaaagttcttttattgatgataaagaaagtgatattagtcaatgaataagccccggcta

SEQ ID NO: 5596 - DNA, 490 bp, unidentified
  misc_feature 1..490: note = Ascusbbf_8883, encodes 16S rRNA
  source 1..490: mol_type = genomic DNA
agagtttgatcctggctcagagtgaacgctggcggcaggcctaacacatgcaagtcgaacggcagcgggtaggaagcttgcttcctatgccggcgagtggcggacgggtgaggaacacatcggaatctactccgtcgtgggggataacgtagggaaacttacgctaataccgcatacgacctaagggtgaaagtgggggaccgcaaggcctcacgcgatggaatgagccgatgtccgattagctagttggcggggtaaaggcccaccaaggcgacgatcggtagctggtctgagaggatgatcagccacactgggactgagacacggcccagactcctacgggaggcagcagtggggaatattggacaatgggcgaaagcctgatccagccatgccgcgtgggtgaagaaggccttcgggttgtaaagcccttttgttggggaagaaatcctgctggctaatacccggcggggatgacggtacccaaaga

SEQ ID NO: 5597 - DNA, 490 bp, unidentified
  misc_feature 1..490: note = Ascusbbf_54217, encodes 16S rRNA
  source 1..490: mol_type = genomic DNA
agagtttgatcatggctcaggacgaacgctggcggcgtgcctaacacatgcaagtcgagcggagattatcgggatgaaagcttcggccggattcctggtaatttcagcggcggacgggtgagtaacgcgtgagcaatctgtctcagacagggggataacgcagcgaaagttgcactaataccgcatgagaccacaacgtcacatgacgaaggggtcaaaggagcaatccggtctgaggtgagctcgcgtcccattaggtagttggtgaggtaacggcccaccaagccgacgatgggtagccgacctgagagggtgatcggccacactggaactgagacacggtccagactcctacgggaggcagcagtgggaatattgggcaatgggcgaaagcctgacccagcaacgccgcgtgagtgaagaaggtcttcggattgtaaatctctgtcctaagagaagaggggaagacggtatcttaggaggaagcccc

SEQ ID NO: 5598 - DNA, 490 bp, unidentified
  misc_feature 1..490: note = Ascusbbf_40432, encodes 16S rRNA
  source 1..490: mol_type = genomic DNA
agagtttgatcctggctcaggatgaacgctggcggcgtgcctaacacatgcaagtcgaacggttaagccggccctcgggccgggaatacagtggcgaacgggtgagtaacacgtgaccaacctgccccccgcacggggacagccccgcgaaagcggggttgatacccggcgtcccgcctcccccgcatggggagggcggggaagctccggcggcgggggatggggtcgcggcccattaggctgacggcggggcaacggcccaccgtgccgacgatgggtagccgggttgagagaccgaccggccacattgggactgagatacggcccagactcctacgggaggcagcagtggggaatattgcgcaatgggggaaaccctgacgcagcaacgccgcgtgcgggacgacggccctcgggctgtaaaccgctttcagcggggaagacatcgacggtacccgcagaagaagccccggctaactacgtgccagca

SEQ ID NO: 5599 - DNA, 470 bp, unidentified
  misc_feature 1..470: note = Ascusbbf_46003, encodes 16S rRNA
  source 1..470: mol_type = genomic DNA
agagtttgatcctggctcagaacgaacgctggcggcaggcttaacacatgcaagtcgaacgcatccttcggggtgagtggcagacgggtgagtaacgcgtgggaatctaccctttcctacgggatagctccgggaaactggaattaataccgtatacgtccttagggagaaagatttatcggggaaggatgagcccgcgttggattagctagttggtgaggtaaaggctcaccaaggcgacgatccatagctggtctaagaggatgatcagccacattgggactgagacacggcccaaactcctacgggaggcagcagtggggaatattggacaatgggcgcaagcctgatccagccatgccgcgtgagtgatgaaggccctagggttgtaaagctctttcagtggggacgataatgacggtacccacagaagaagccccggctaacttcgtgccagcagccgcggtaat

SEQ ID NO: 5600 - DNA, 490 bp, unidentified
  misc_feature 1..490: note = Ascusbbf_22239, encodes 16S rRNA
  source 1..490: mol_type = genomic DNA
agagtttgatcctggctcaggatgaacgctagctacaggcttaacacatgcaagtcgaggggcagcataagagtagcttgctacttttgatggcgaccggcgcacgggtgcgtaacacgtatccaatctacccacggctcagggatagcctttcgaaagaaagattaatacctgatggtctcctttagggacatccctttaggagtaaagattcatcggccatggatgaggatgcgtccgattagcttgacggcggggtaacggcccaccgtggctacgatcggtaggggttctgagaggaaggtcccccacactggaactgagacacggtccagactcctacgggaggcagcagtgaggaatattggtcaatggtcggaagactgaaccagccaagtagcgtgagggatgactgccctatgggttgtaaacctcttttattggggaacaaattgggccacgtgtggtcctttgcgtgtaccctatgaat

SEQ ID NO: 5601 - DNA, 490 bp, unidentified
  misc_feature 1..490: note = Ascusbbf_1373162, encodes 16S rRNA
  source 1..490: mol_type = genomic DNA
agagtttgatcctggctcaggatgaacgctggcggcgtgcctaacacatgcaagtcgagcgagaaattcatgacgaattcttcggatgcctgattgaatggaaagcggcggacgggtgagtaacgcgtaggtaacctgccctgtacaaagggatagccattggaaacggtgattaataccttatgataccgcagcatcacatggtgaagcggtcaaagattttatcggtacaggatggacctgcgtctgattagttagttggtggggtaacggctcaccaaggcgacgctcagtagccgtcataagagggggatcggccacatgggaactgagacacggtccaaactcatacgggaggcagcagtggggaatattgcacaatgggcgcaagccttatgcagcaacgccgcgtgaacgaagaaggcctttgggtcgtaaagttctgttctgagggaagaagaaagtgacggtacctcaggagaaagccccg

SEQ ID NO: 5602 - DNA, 490 bp, unidentified
  misc_feature 1..490: note = Ascusbbf_32848, encodes 16S rRNA
  source 1..490: mol_type = genomic DNA
agagtttgatcatggctcagaatgaacgttggcggcgtggattaggcatgcaagtcgagcggcaaggttttttatcttcggattttagaccctagagcggcgaaagggataggaacgtatagatacatgcctcttagctcaggatagcgtctggaaacgggcgataatactgaatgaggtctccggaccaaaggtgtgattccgctaggagattggtctatatcctattagctagttggtaaggtaacggcttaccaaggcgatgatgggtacggggcgtgagagcgtgaccccgatcactgggactgagacactgcccagacgcctacgggcggctgcagtcgagaatcttcggcaatggacgaaagtctgaccgagcgacgccgcgtgtatgatgaaggtcttcggattgtaaagtactgtcgatagggcggaaatttacggtggcaatccatcgtatttgacctatcttttgaggaaggacgggcta

SEQ ID NO: 5603 - DNA, 490 bp, unidentified
  misc_feature 1..490: note = Ascusbbf_51123, encodes 16S rRNA
  source 1..490: mol_type = genomic DNA
agagtttgatcctggctcaggatgaacgctagctacaggcttaacacatgcaagtcgaggggcagcatgtcgtgtgcttgcacacgatgatggcgaccggcgcacgggtgagtaacgcgtatccaacctgcccatgaccccgggatagcccgctgaaaagcggattaacaccggatggggtcgaacgaggacatctgatttcgaccaaagcttcggcggtgatggatggggatgcgtctgattagcttgttggcggggtaacggcccaccaaggcgacgatcagtaggggttctgagaggaaggtcccccacattggaactgagacacggtccaaactcctacgggaggcagcagtgaggaatattggtcaatgggcggaagcctgaaccagccaagtagcgtggaggacgacggccctacgggttgtaaactccttttttgcggggataaagtgccctacgcgtagggtattgcaggtaccgcacgaat

SEQ ID NO: 5604 - DNA, 490 bp, unidentified
  misc_feature 1..490: note = Ascusbbf_17325, encodes 16S rRNA
  source 1..490: mol_type = genomic DNA
agagtttgatcctggctcaggacgaacgctggcggcgtgcctaacacatgcaagtcgaacggagttacgggagcttgctcctgtaacttagtggcggacgggtgagtaacgcgtgagcaacctgccttacagagggggatagccattggaaacgatggataataccgcataacgtattcgcatggcatcttgtgaataccaaaggagcaatccgctgtaagatgggctcgcgtccgattagatagttggcggggcaacggcccaccaagtcgacgatcggtagccggactgagaggttgaacggccacattgggactgagacacggcccagactcctacgggaggcagcagtgagggatattgcacaatgggcgcaagcctgatgcagcaacgccgcgtgagggatgacggttttcggattgtaaacctctgtcttcggtgatgataatgacattagccgaggaggaagccacggctaactacgtgccag

SEQ ID NO: 5605 - DNA, 490 bp, unidentified
  misc_feature 1..490: note = Ascusbbf_23714, encodes 16S rRNA
  source 1..490: mol_type = genomic DNA
agagtttgatcctggctcagaatgaacgttggcggcgtggattaggcatgcaagtcgagcgagatcataccttcgggtatgtgagagcggcggaagggataggaacatatagatacgcgcctcttagcccgggatagcgtctggaaacggacgataataccggatgacgtattcgtacgaaaggtgtaattccgctaggagatcggtctatatcctattagctagttggtagggtaacggcctaccaaggcgatgatgggtacggggcgtgagagcgcgaccccgatcactgggactgagacactgcccagacgcctacgggcggctgcagtcgagaatcttcggcaatggacgaaagtctgaccgagcgacgccgcgtgtatgatgaaggtcttcggattgtaaaatactgtcgatggggcggaagttgcagaggaacgcttctgtaattgacctatccgttgaggaaggacgggctaagttcgtgcca

SEQ ID NO: 5606 - DNA, 490 bp, unidentified
  misc_feature 1..490: note = Ascusbbf_404428, encodes 16S rRNA
  source 1..490: mol_type = genomic DNA
agagtttgatcctggctcaggatgaacgctagcgacaggcttaacacatgcaagtcgaggggcagcgtggcggcagcaatgccgccgacggcgaccggcgcactggtgagtaacacgtatgcaacctgccccccacagggggacaatccagagaaatttggtctaataccgcataagagcgtccccggcatcggggttgcttgaaagctaatttgcggtgggggatgggcatgcggcgcattagcttgttggcggggtgacggcccaccaaggcgacgatgcgtaggggttctgagaggaaggtcccccacactggtactgagacacggaccagactcctacgggaggcagcagtgaggaatattggtcaatggacggaagtctgaaccagccaagtcgcgtgagggaagaaggtccttcggattgtaaacctcttttgccggggagtaaccgggcggacttgtccgtccctgagagtacccggagaaaa

SEQ ID NO: 5607 - DNA, 490 bp, unidentified
  misc_feature 1..490: note = Ascusbbf_60821, encodes 16S rRNA
  source 1..490: mol_type = genomic DNA
agagtttgatcatggctcaggatgaacgctggcggcgtgcttaacacatgcaagtcgaacggggaagtatttttgaagttttcggatggatgaaatgctttctagtggcggacgggtgagtaacgcgtaaacaatctgccttagagagggggataacagatagaaatatttgctaataccgcataagaccacgagtgggcatccactaggggtaaaaggagaaatccgctttaagatgagtttgcgtactattagctagttggtgaggtaacggcccaccaaggcgacgatggttagccggcctgagagggtgaacggccacattggaactgagatacggtccagactcctacgggaggcagcagtgaggaatattgggcaatgggcgaaagcctgacccagcaacgccgcgtggaggaagaaggtcttcggattgtaaacttctgttatgggggaaaaagaaagtgatggtaccccatgagaaagctac

SEQ ID NO: 5608 - DNA, 490 bp, unidentified
  misc_feature 1..490: note = Ascusbbf_32994, encodes 16S rRNA
  source 1..490: mol_type = genomic DNA
agagtttgatcatggctcaggatgaacgctggcggcaggcttaatacatgcaagtcgaacggtaacgaccggtagcaatactggggcgacgagtggcgcacgggtgcgtaacgcgtatgcaacctaccctcaaccggggcataacgccgagaaattggcgctaatatcccatgtgtatatggagtggcatctcttcatatataaagatccgttggttaaggatgggcatgcgtaacattagctagttggcggggtaacggcccaccaaggcgacgatgtttaggggttctgagaggattcacccccacactggaactgagacacggtccagactcctacgggaggcagcagtagggaatattgggcaatggaggcaactctgacccagccatgccgcgtgaaggaagacggccctatgggttgtaaacttcttttgccgcagagtaaccgcggggacgtgtccctgcctgagagtatgcggcgaataagt

SEQ ID NO: 5609 - DNA, 490 bp, unidentified
  misc_feature 1..490: note = Ascusbbf_142188, encodes 16S rRNA
  source 1..490: mol_type = genomic DNA
agagtttgatcctggctcaggatgaacgctggcggcgtgcttaacacatgcaagtcgagcgagaagctcatgaccaattcttcggaggcgtgattgagtggaaagcggcggacgggtgagtaacgcgtaggcaacctgccccatacaaagggatagctactggaaacggtaattaatacctcataacacgagaggatcgcatgttcttctcgtcaaagatttatcggtatgggatgggcctgcgtctgattagctggttggtggggtaacggcccaccaaggcgacgatcagtagccgacctgagagggtaaacggccacattggaactgagacacggtccaaactcctacgggaggcagcagtggggaatattgcacaatggggggaaccctgatgcagcaacgccgcgtgagcgaagaaggcctttgggtcgtaaagctctgtcctgaaggaagaaggaagtgacggtacttcaggaggaagccccgg

SEQ ID NO: 5610 - DNA, 490 bp, unidentified
  misc_feature 1..490: note = Ascusbbf_104234, encodes 16S rRNA
  source 1..490: mol_type = genomic DNA
agagtttgatcctggctcaggatgaacgctggcggcaggcttaatacatgcaagtcgaacggtaaggcctgatgtagcaatacagagggtacacgagtggcgcacgggtgcgtaacgcgtatgtaatctgcctgcaaccgggacaaaacagttggaaacggctgctaatatcccatggtcaatttttcaggcatctgggagattgtaaagatttattggttgcagatgagcatgcgtattattaggtagttggtgaggtaaaggctcaccaagccgacgatgattaggggtcctgagagggttaacccccacactggaactgagacacggtccagactcctacgggaggcagcagtagggaatattgggcaatggaggaaactctgacccagccatgccgcgtgaaggaagacggccctatgggttgtaaacttcttttgttgcagagtaaaggcagccacgagtggttgtttgagagtatgcgacgaat

SEQ ID NO: 5611 - DNA, 490 bp, unidentified
  misc_feature 1..490: note = Ascusbbf_287631, encodes 16S rRNA
  source 1..490: mol_type = genomic DNA
agagtttgatcctggctcaggatgaacgctggcggcgtgcttaacacatgcaagtcgaacgggacttacgtagaaagcggcttcggccaatggaaatgtaagtttagtggcggacgggtgagtaacgcgtggacaacctgccccataccgggggataacacccagaaatgagtgctaataccgcataagcgcacggaaccgcatggttttgtgtgaaaaactccggtggtatgggatgggtccgcgttggattagctggttggcggggcaacggcccaccaaggcgacgatccatagccggcctgagagggtgaacggccacattgggactgagacacggcccagactcctacgggaggcagcagtggggaatattgcacaatggggggaaccctgatgcagcgacgccgcgtgaaggaagaagtatctcggtatgtaaacttctatcatcggggaagaagatgacggtacccgaggaagaagccccggc

SEQ ID NO: 5612 - DNA, 490 bp, unidentified
  misc_feature 1..490: note = Ascusbbf_207303, encodes 16S rRNA
  source 1..490: mol_type = genomic DNA
agagtttgatcatggctcaggatgaacgctagcgacaggcctaacacatgcaagtcgaggggtagcagattttagcttgctaaaatgctgacgaccggcgcacgggtgagtaacgcgtatgcaacctgcctactacaggggaataacccggagaaattcggactaataccgcataacacaggggtcccgcatgggaatatttgttaaagatttatcggtagtagatgggcatgcgtgccattagctagttggtgaggtaacggctcaccaaggcaacgatggctaggggaactgagaggtttatcccccacactggaactgagacacggaccagactcctacgggaggcagcagtgaggaatattggtcaatgggcgagagcctgaaccagccaagtcgcgtgaaggaagactgccttatgggttgtaaacttcttttatacaggaataaaaaataccacgtgtggtatattgcatgtactgtatgaata

SEQ ID NO: 5613 - DNA, 490 bp, unidentified
  misc_feature 1..490: note = Ascusbbf_182273, encodes 16S rRNA
  source 1..490: mol_type = genomic DNA
agagtttgatcatggctcaggacgaacgctggcggcgtgcttcatacatgcaagtcgaacgagaaattcacttcggtggatggacagtggcggacgggtgagtaatgtgtagagaatctgccctatggagggggacaacagagggaaacttctgctaataccccatatgcgcgtagctgagatgctattcgtgaaagatttatcgccataggatgagtctgcatctgattagctagttgggggtgtaatggaccaccaaggcgacgatcagtagctggtttgagaggatgatcagccacaatgggactgagacacggcccatactcctacgggaggcagcagtagggaattttgcgcaatgggcgaaagcctgacgcagcaacgccgcgtgatcgagaagaccttcgggttgtaaagatctgtcagtagggacgaataatgactgtacctacagaggaagcaccggctaactccgtgccagcagccgcgg

SEQ ID NO: 5614 - DNA, 490 bp, unidentified
  misc_feature 1..490: note = Ascusbbf_489839, encodes 16S rRNA
  source 1..490: mol_type = genomic DNA
agagtttgatcctggctcaggatgaacgctggcggcgtgcttaacacatgcaagtcgaacgaagaggtacgagcggataggcttcggctttgaagcttgtacatatcttagtggcggacgggtgagtaacgcgtgggcaacctgccctttacaggggaataatcattggaaacgatgactaataccgcatgtcaccgcgagatggcatcatcttgcggaaaaaggagaaatccggtaaaggatgggcccgcgtctgattagcttgttggtggggtaacggcctaccaaggcgacgatcagtagccgacctgagagggtgatcggccacattgggactgagacacggcccaaactcctacgggaggcagcagtggggaatattgcacaatggggggaaccctgatgcagcaacgccgcgtgaaggaagaaggttttcggatcgtaaacttctatcaatagggacgaaaaagatgacggtacctaaataaga

SEQ ID NO: 5615 - DNA, 490 bp, unidentified
  misc_feature 1..490: note = Ascusbbf_309235, encodes 16S rRNA
  source 1..490: mol_type = genomic DNA
agagtttgatcatggctcaggataaacgctggcggcgcacataagacatgcaagtcgaacggaagtcgttatattcgaaatcgatatgaacagagaacttgttcgaagtgattagacattgactttataacaatggctttagtggcggactggtgagtaacgcgtgagcaacctgcctatcagaggggaataacagtgagaaatcattgctaataccgcatatgccataatcaccacatggtgatagtgggaaaggagcaatccactgatagatgggctcgcgtctgattagatagttggtggggtaacggcctaccaagtcgacgatcagtagccggactgagaggttgaacggccacattgggactgagatacggcccagactcctacgggaggcagcagtcgggaatattgcgcaatggaggaaactctgacgcagtgacgccgcgtataggacgaaggtcttcggattgtaaactattgtcgttag

SEQ ID NO: 5616 - DNA, 490 bp, unidentified
  misc_feature 1..490: note = Ascusbbf_1658537, encodes 16S rRNA
  source 1..490: mol_type = genomic DNA
agagtttgatcctggctcaggacgaacgctggcggcgtgcctaacacatgcaagtcgaacgagaatttaattaatgaaccttcgggggaattaattgaaggacagtggcggacgggcgagtaacgcgtgagtaacctgcccataagagagggatagcctatggaaacgtggagtaatacctcatattgtattttaatcgcatggttgaaatatgaaagatttatcgcttatggatggactcgcgtcagattagatagttggtgaggtaacggctcaccaagtcgacgatctgtagccgaactgagaggttgatcggccgcattgggactgagacacggcccagactcctacgggaggcagcagtggggaatattgcgcaatgggggaaaccctgacgcagcaacgccgcgtgcaggaagaaggtcttcggattgtaaactgttgtcgcaagggaagaagaaagtgacggtaccttgtgagaaagtcacgg

SEQ ID NO: 5617 - DNA, 490 bp, unidentified
  misc_feature 1..490: note = Ascusbbf_1066181, encodes 16S rRNA
  source 1..490: mol_type = genomic DNA
agagtttgatcctggctcaggacgaacgctggcggcgtgcttaacacatgcaagtcgagcggaaaggccccttcgggggtactcgagcggcgaacgggtgagtaacacgtgagcaacctgcccctgactctgggataagcccgggaaaccaggtctaataccggatacgacctcctcgctcctgcgatgggggtggaaagattcatcggttggggatgggctcgcggcctatcagcttgttggtggggtaacggcctaccaaggcgacgacgggtaaccggcctgagagggcgaccggtcacactgggactgagacacggcccagactcctacgggaggcagcagtgggaatattgcgcaatgggcggaagcctgacgcagcgacgccgcgtgggggatgacggccttcgggttgtaaacccctttcagcagggacgaagctaacgtgacggtacctgcagaagaagcgccggctaactacgtgccagca

SEQ ID NO: 5618 - DNA, 490 bp, unidentified
  misc_feature 1..490: note = Ascusbbf_562296, encodes 16S rRNA
  source 1..490: mol_type = genomic DNA
agagtttgatcctggctcagattgaacgctggcggcaggcttaacacatgcaagtcgaacggtagcgggaagaaagcttgctttctttgccgacgagtggcggacgggtgagtaatgcttggggatctggcttatggagggggataacgacgggaaactgtcgctaataccgcgtaatatcttcggattaaagggtgggactttcgggccacccgccataagatgagcccaagtgggattaggtagttggtggggtaaaggcctaccaagccgacgatctctagctggtctgagaggatgaccagccacactggaactgagacacggtccagactcctacgggaggcagcagtggggaatattgcacaatggggggaaccctgatgcagccatgccgcgtgaatgaagaaggccttcgggttgtaaagttctttcggtgatgaggaaggtatcagatttaatagatttggtaattgacgttattcacaga

SEQ ID NO: 5619 - DNA, 472 bp, unidentified
  misc_feature 1..472: note = Ascusbbf_670426, encodes 16S rRNA
  source 1..472: mol_type = genomic DNA
agagtttgatcctggctcagaacgaacgctggcggcaggcctaacacatgcaagtcgagcgcgtctcttcggaggcgagcggcgcacgggtgagtaacgcgtgggaacctaccctggggtaggggataaccgctggaaacggcggctaataccctatacgtccttcgggagaaagatttatcgccccgggatgggcccgcgtcggattagctagttggtggggtaacggctcaccaaggcgacgatccgtagctggtctgagaggatgatcagccacactgggactgagacacggcccagactcctacgggaggcagcagtggggaatattggacaatgggcgcaagcctgatccagccatgccgcgtgagtgaagaaggccttagggttgtaaagctctttcacccgcgaagatgatgacggtagcgggagaagaagccccggctaactccgtgccagcagccgcggtaat

SEQ ID NO: 5620 - DNA, 490 bp, unidentified
  misc_feature 1..490: note = Ascusbbf_1765990, encodes 16S rRNA
  source 1..490: mol_type = genomic DNA
agagtttgatcctggctcaggatgaacgctggcggcgtgcctaacacatgcaagtcgagcgagaaacttgtaaatgaaacttcggtagattttacaagcggacagcggcggacgggtgagtaacgcgtaggcaacctgcctcatacagagggatagcattgggaaactaatattaatacctcataacacgaagttgactcatgtcaacatcgtcaaagatttatcggtatgagatgggcctgcgtctgattagttagttggtgaggtaacggctcaccaaggcgacgatcagtagccgacctgagagggtgatcggccacattggaactgagacacggtccaaactcctacgggaggcagcagtggggaatattgcacaatgggcgaaagcctgatgcagcaacgccgcgtgaacgatgaaggcccttgggtcgtaaagttctgtccttggggaagaaaaaaatgacggtacccaagaagaaagccccgg

SEQ ID NO: 5621 - DNA, 490 bp, unidentified
  misc_feature 1..490: note = Ascusbbf_1468324, encodes 16S rRNA
  source 1..490: mol_type = genomic DNA
agagtttgatcctggctcaggacgaacgctggcggcatgcctaacacatgcaagtcgaacggagaaaaggagcttgctccttttcttagtggcggacgggcgagtaacgcgtgagtaacctgcctttcagtggggaataacgactggaaacggtcgctaataccgcataatgtagcgaggtcgcctggccatgctaccaaggagcaattcgctgaaagatggactcgcgtccgattagctagttggtgaggtaatggctcaccaaggcgacgatcggtagccgaactgagaggttgatcggccgcattgggactgagacacggcccagactcctacgggaggcagcagtgggggatattgcacaatgggggaaaccctgatgcagcaatgccgcgtgagggaagaaggtcttcggattgtaaacctaagtagtcagggacgaataaatgacggtacctgaaaagtaagctccggctaactacgtgccagc

SEQ ID NO: 5622 - DNA, 490 bp, unidentified
  misc_feature 1..490: note = Ascusbbf_1446030, encodes 16S rRNA
  source 1..490: mol_type = genomic DNA
agagtttgatcctggctcaggatgaacgctggcggcgtgcctaacacatgcaagtcgaacgaagcaccttttcacgatcccttcggggtgacgagattgtgacttagtggcggacgggtgagtaacgcgtggggaacctgccctgtactgggggatagcgactggaaacggtcgataataccgcataagcgcacgacatcacatgatgatgtgtgaaaaactccggtggtacaggatggccccgcgtctgattagctagttggtgaggtaacggctcaccaaggcgaagatcagtagccgacctgggatggtgacgggccacatggggactgagacacgggccagactcctacggggggcagcagtggggaatattgcacaatgggcgaaagcctgatgcagcgacgccgcgtgagcgatgaagtatttcggtatgtaaagctctatcagcagggaagaaattgacggtacctgactaagaagctccggc

SEQ ID NO: 5623 - DNA, 490 bp, unidentified
  misc_feature 1..490: note = Ascusbbf_1585325, encodes 16S rRNA
  source 1..490: mol_type = genomic DNA
agagtttgatcctggctcaggatgaacgctagctacaggcttaacacatgcaagtcgaggggcagcatgaagtttgcttgcaaactttgatggcgaccggcgcacgggtgagtaacgcgtatccaaccttccctatactagaggatagcccggcgaaagtcggattaatactctatgttcttcgtagaagacatctgaaatgaagcaaaggtttaccggtataggatggggatgcgtctgattaggttgttggcgaggtaacggctcaccaaggcgatgatgcgtagccgacctgagagggtaatcggccacattgggactgagacacggcccagactcctacgggaggcagcagtagggaatcttccacaatggacgcaagtctgatggagcaacgccgcgtgagtgaagaagggtttcggctcgtaaagctctgttgttaaagaagaacgtgggtgagagtaactgttcacccagtgacggtatttaa

SEQ ID NO: 5624 - DNA, 490 bp, unidentified
  misc_feature 1..490: note = Ascusbbf_105, encodes 16S rRNA
  source 1..490: mol_type = genomic DNA
agagtttgatcatggctcaggacgaacgctggcggcgtgcttaacacatgcaagtcgaacgaagcttgacgaatgaattcttcggaatgatttctgaaatgactgagtggcggacgggtgagtaacgcgtgagtaacctgcctcttggagggggatagtgtttggaaacgaacagtaataccgcataatgtgcattgatggcatcttcgatgtaccaaagatttatcgccaagagatggactcgcgtctgattagatagttggtgaggtaacggctcaccaagtcgacgatcagtagccggactgagaggttgaacggccacattgggactgagacacggcccagactcctacgggaggcagcagtggggaatattgcacaatgggcgcaagcctgatgcagcaacgccgcgtggaggaagacggttttcggattgtaaactcctgttcttagggaagaagaaagtgacggtacctaaggagcaagccac

SEQ ID NO: 5625 - DNA, 490 bp, unidentified
  misc_feature 1..490: note = Ascusbbf_7590, encodes 16S rRNA
  source 1..490: mol_type = genomic DNA
agagtttgatcatggctcaggatgaacgctagctacaggcttaacacatgcaagtcgaggggcagcattaagttagcttgctaacttagatggcgaccggcgcacgggtgagtaacgcgtatccaaccttccccctgctcagggatagcccgctgaaaggcggattaacacctgatagcttcactagatggcatctgacggtgaataaagataacggcaagggatggggatgcgtctgattagcttgttggcggggtaacggcccaccaaggcaacgatcagtaggggttctgagaggaaggtcccccacattggaactgagacacggtccaaactcctacgggaggcagcagtgaggaatattggtcaatgggcggaagcctgaaccagccaagtagcgtgcaggaagacggccctatgggttgtaaactgcttttgtacgggaataaagtcattcacgtgtggatgtttgcatgtaccgtaagaataa

SEQ ID NO: 5626 - DNA, 490 bp, unidentified
  misc_feature 1..490: note = Ascusbbf_3187, encodes 16S rRNA
  source 1..490: mol_type = genomic DNA
agagtttgatcatggctcaggatgaacgctagcggcaggcttaacacatgcaagtcgaggggcagcgcggagtagcaatactctggcggcgaccggcggaagggtgcgtaacgcgtgagcaacttgcccgtcactgtgggataggcactggaaacggtgtgtaataccacgtaacacatatactcgcatgggtagatgttgaaaggtttaccggtgacggatgggctcgcgtgccattagctagtcggcggggtaacggcccaccgaggcgacgatggctaggggttctgagaggaaggtcccccacactggaactgagacacggtccagactcctacgggaggcagcagtgaggaatattggtcaatgggcggaagcctgaaccagccatgccgcgtgcaggaataaggccctatgggtcgtaaactgcttttgttgtggagcaataagggccacgcgtggtccgatgagagtacacagcgaataagca

SEQ ID NO: 5627 - DNA, 490 bp, unidentified
  misc_feature 1..490: note = Ascusbbf_1192, encodes 16S rRNA
  source 1..490: mol_type = genomic DNA
agagtttgatcatggctcaggacgaacgctggcggcgtgcttaacacatgcaagtcgaacggaaaggccctgcttttgtggggtgctcgagtggcgaacgggtgagtaacacgtgagtaacctgcccttgactttgggataacttcaggaaactggggctaataccggataggagctcctgctgcatggtgggggttggaaagtttcggcggttggggatggactcgcggcttatcagcttgttggtggggtagtggcttaccaaggctttgacgggtagccggcctgagagggtgaccggccacattgggactgagatacggcccagactcctacgggaggcagcagtgggaatattgcacaatgggcggaagcctgatgcagcaacgccgcgtgcgggatgacggccttcgggttgtaaaccgctttcgcctgtgacgaagcgtgagtgacggtaatgggtaaagaagcaccggctaactacgtgcca

SEQ ID NO: 5628 - DNA, 490 bp, unidentified
  misc_feature 1..490: note = Ascusbbf_1801, encodes 16S rRNA
  source 1..490: mol_type = genomic DNA
agagtttgatcctggctcaggataaacgctggcggcgcacataagacatgcaagtcgaacgaacttaacctttagtttactaatggagcggttagtggcggactggtgagtaacacgtaagcaacctgcctatcagaggggaacaacagttagaaatgactgctaataccgcatatgccttgaatatcacatgatataaaagggaaaggagcaatccgctgatagatgggcttgcgtctgattagatagttggtggggtaacggcctaccaagtcgacgatcagtagccggactgagaggttgaacggccacattgggactgagatacggcccagactcctacgggaggcagcagtcgggaatattgcgcaatggaggaaactctgacgcagtgacgccgcgtgcaggaagaaggttttcggattgtaaactgctttagacagggaagaacaaggacagtacctgtagaataagctccggctaactacgt

SEQ ID NO: 5629 - DNA, 490 bp, unidentified
  misc_feature 1..490: note = Ascusbbf_2642, encodes 16S rRNA
  source 1..490: mol_type = genomic DNA
agagtttgatcctggctcaggacgaacgctggcggcatgcttaacacatgcaagtcgaacggactgattccttcgggatgaaagttagtggcgaacgggtgagtaatgtatgagcaacctgcctctgtcaacgggataacagttggaaacgactgctaatacggtataagaccacggcaccgcatggtgctgcggtaaaagatttttcggacagagatgggctcatatcccattagctagttggtgagataatagcccaccaaggcgacgatgggtagccgagctgagaggctgatcggccacattgggactgaaacacggcccagactcctacgggaggcagcagtggggaatattgggcaatggaggaaactctgacccagcaatgccgcgtgagcgatgaaggtaattttattgtaaagctcttttctcaggaacgaataaagatgacggtacctgaggaataagccccggctaactacgtgccagc

SEQ ID NO: 5630 - DNA, 490 bp, unidentified
  misc_feature 1..490: note = Ascusbbf_5122, encodes 16S rRNA
  source 1..490: mol_type = genomic DNA
agagtttgatcctggctcaggacgaacgctggcggcgtgcctaatacatgcaagtagaacgctgaagactttagcttgctaaagttggaagagttgcgaacgggtgagtaacgcgtaggtaacctgcctactagcgggggataactattggaaacgatagctaataccgcataacagcatttaacacatgttagatgcttgaaaggagcaattgcttcactagtagatggacctgcgttgtattagctagttggtgaggtaacggctcaccaaggcgacgatacatagccgacctgagagggtgatcggccacactgggactgagacacggcccagactcctacgggaggcagcagtagggaatcttcggcaatgggggcaaccctgaccgagcaacgccgcgtgagtgaagaaggttttcggatcgtaaagctctgttgtaagagaagaacgtgtgtgagagtggaaagttcacacagtgacggtaact

SEQ ID NO: 5631 - DNA, 488 bp, unidentified
  misc_feature 1..488: note = Ascusbbf_2607, encodes 16S rRNA
  source 1..488: mol_type = genomic DNA
agagtttgatcatggctcagaacgaacgctggcggcatggattaggcatgcaagtcgaacgaagcagcaatgcttagtggcggaagggtgaggaacgcgtgagcaacctgcccccaagttgggaataacagttggaaacgactgctaataccgaatgtggcttttggaccgcatggtttgatggctaaagatttattgcttggggatgggctcgcgtcccattagctagttggtgaggtaacggctcaccaaggcgatgatgggtagctggtctgagaggatggtcagccacactgggactgagacactgcccagactcctacgggaggctgcagtcgagaatcttgggcaatgcgcgaaagcgtgacccagcaatgccgcgtgcgggatgaaggtcttcggattgtaaaccgctgtcacccgggacgaaagttgactgtaccgggggaggaagccacggctaactacgtgccagcagccgcggtaat

SEQ ID NO: 5632 - DNA, 490 bp, unidentified
  misc_feature 1..490: note = Ascusbbf_4628, encodes 16S rRNA
  source 1..490: mol_type = genomic DNA
agagtttgatcatggctcaggatgaacgctagctacaggcttaacacatgcaagtcgaggggcagcatgttggttgcttgcaaccgatgatggcgaccggcgcacgggtgcgtaacgcgtatccaatctgccctgtgctcggggatagccttgcgaaagtaagattaacacccgatggtctccctggcccgcatggtccttggagtaaagtttcacggcacgggatgtggatgcgtccgattaggtagtaggcggggcaacggcccacctagccgacgatcggtaggggttctgagaggaaggtcccccacactggaactgagacacggtccagactcctacgggaggcagcagtgaggaatattggtcaatggtcggaggactgaaccagccaagtagcgtgagggaaggcggccctacgggttgtaaacctcttttgttcgggaataacagggtccacttgtggtcctctgcatgtaccgttcgaata

SEQ ID NO: 5633 - DNA, 490 bp, unidentified
  misc_feature 1..490: note = Ascusbbf_991, encodes 16S rRNA
  source 1..490: mol_type = genomic DNA
agagtttgatcatggctcaggatgaacgctggcggcgtgcttaacacatgcaagtcgaacgaagctcttacgttgattctttcgggatgaagtgtaagatgacttagtggcggacgggtgagtaacgcgtgaggaacctgccttgcagtggggaataacagatggaaacgtctgctaataccgcataatacgaagggaccgcatgatttcttcgtcaaagatttatcgctgtgagatggcctcgcgtctgattagctggttggtgaggtaacggctcaccaaggcgacgatcagtagccggactgagaggttgatcggccacattgggactgagacacggcccagactcctacgggaggcagcagtggggaatattgggcaatgggcgcaagcctgacccagcaacgccgcgtgaaggaagaaggctttcgggttgtaaacttcttttatcagggacgataatgacggtacctgatgaataagctccggc

SEQ ID NO: 5634 - DNA, 490 bp, unidentified
  misc_feature 1..490: note = Ascusbbf_3848, encodes 16S rRNA
  source 1..490: mol_type = genomic DNA
agagtttgatcatggctcagaacgaacgctggcggcaggcttaacacatgcaagttgagcgggattgattagtagcttgctattaatcatgagagcagcgcactggtgagtaacacgtgggaacataccttttggtgggggacaacagttggaaacgactgctaataccgcataagccctgagggggaaaggagcaatttgccgaaagattggcccgcggaagattaggtagtaggtggggcaacggcctacctagccgacgatctatagctggtctgagaggacgatcagccacattggaactgagacacggtccagactcctacgggaggcagcagtgaggaatattgggcaatggaggaaactctgacccagccatgccgcgtgagtgaagaaggttttcggattgtaaagctctttcggacgggaagataatgacggtaccgtctaaagaagcaccggctaacttcgtgccagcagccgcggtaat

SEQ ID NO: 5635 - DNA, 488 bp, unidentified
  misc_feature 1..488: note = Ascusbbf_3662, encodes 16S rRNA
  source 1..488: mol_type = genomic DNA
agagtttgatcatggctcaggacgaacgctggcggcgtgcttaacacatgcaagtcgagcgggaaacttcggtttccagcggcggacgggtgagtaacacgtgggcaacctgcctcacaatgagggatagccttccgaaaggaagattaatacctcataacacaagagaaacgcatgtttctcttgccaaagaatttcgttgtgagatgggcccgcggcgcattagcttgttggtgaggtaacggctcaccaaggcttcgatgcgtagccgacctgagagggtgatcggccacattggaactgagacacggtccagactcctacgggaggcagcagtggggaatattgcacaatggaggaaactctgatgcagcaacgccgcgtgagtgatgaaggtcttcggattgtaaagctctgtcttctgggacgataatgacggtaccagaggaggaagccacggctaactacgtgccagcagccgcggtaat

SEQ ID NO: 5636 - DNA, 472 bp, unidentified
  misc_feature 1..472: note = Ascusbbf_4296, encodes 16S rRNA
  source 1..472: mol_type = genomic DNA
agagtttgatcatggctcagagcgaacgctggcggcatgcttaacacatgcaagtcgcacggatctttcgggattagtggcggacgggtgagtaacgcgtagggatctatccatgggtgggggacaactccgggaaactggagctaataccgcatgatacctgagggtcaaaggcgcaagtcgcctgtggaggaacctgcgttcgattagctagttggtggggtaaaggcctaccaaggcgatgatcgatagctggtttgagaggatgatcagccacactgggactgagacacggcccagactcctacgggaggcagcagtggggaatattggacaatgggcgaaagcctgatccagcaatgccgcgtgtgtgaagaaggtcttcggattgtaaagcactttcgacggggacgatgatgacggtacccgtagaagaagccccggctaacttcgtgccagcagccgcggtaat

SEQ ID NO: 5637 - DNA, 490 bp, unidentified
  misc_feature 1..490: note = Ascusbbf_6375, encodes 16S rRNA
  source 1..490: mol_type = genomic DNA
agagtttgatcctggctcaggacgaacgctggcggcgtgcctaacacatgcaagtcgagcgagaatttctgaaatgaattcttcggaaggaattttgggaaggaaagcggcggacgggtgagtaacgcgtgagtaacctgcctatcagagggggacaacatttcgaaaggaatgctaataccgcatgaaattgtattatcgcatgatagaacaatcaaagatttatcgctgatagatggactcgcgtctgattagatagttggtggggtaaaggcctaccaagtcgacgatcagtagccgaactgagaggttgatcggccacattgggactgagacacggcccagactcctacgggaggcagcagtggggaatattgcgcaatgggggcaaccctgacgcagcaacgccgcgtgaaggatgaaggttttcggattgtaaacttctttaagtgtggaagaagatgacggtacacacagaataagccacggc

SEQ ID NO: 5638 - DNA, 490 bp, unidentified
  misc_feature 1..490: note = Ascusbbf_12586, encodes 16S rRNA
  source 1..490: mol_type = genomic DNA
agagtttgatcatggctcaggatgaacgctggcggcgtgcctaacacatgcaagtcgagcgagaagctcatgatcgaaacttcggttgattgattgagtggaaagcggcggacgggtgagtaacgcgtaggcaacctgccccttgcagagggatagcctcgggaaaccgggattaaaacctcataatgcgtttcgaagacatctttgaaacgccaaagatttatcggcaagggatgggcctgcgtctgattagttagttggtggggtaacggcctaccaaggcagcgatcagtagccgacctgagagggtgatcggccacattggaactgagacacggtccaaactcctacgggaggcagcagtggggaatattgcacaatgggggaaaccctgatgcagcaacgccgcgtgaaggatgaaggcccttgggtcgtaaacttctgttctaagggaagataatgacggtaccttaggagcaagtcccggcta

SEQ ID NO: 5639 - DNA, 490 bp, unidentified
  misc_feature 1..490: note = Ascusbbf_8092, encodes 16S rRNA
  source 1..490: mol_type = genomic DNA
agagtttgatcatggctcaggatgaacgctggcggcgtgcctaacacatgcaagtcgaacgaagcacattccttcggggatgtgactgagtggcggacgggtgagtaacgcgtgggtaacctgccctttacagggggacaacagttagaaatgactgctaataccgcataagcgcacagggaggcatcttcccgtgtgaaaaacttaggtggtaaaggatgggcccgcgtctgattagctagttggcagggtaaaggcctaccaaggcgacgatcagtagccggtctgagaggatgaacggccacattggaactgagacacggtccaaactcctacgggaggcagcagtgagggatattgcacaatggggggaaccctgatgcagcaacgccgcgtgggtgaagaagtatttcgatatgtaaagccctatcagcagggaagataatgacggtacctgactaagaagctccggctaaatacgtgccagcag

SEQ ID NO: 5640 - DNA, 490 bp, unidentified
  misc_feature 1..490: note = Ascusbbf_21947, encodes 16S rRNA
  source 1..490: mol_type = genomic DNA
agagtttgatcctggctcaggatgaacgctagctacaggcttaacacatgcaagtcgaggggcagcatgaacttagcttgctaagtttgatggcgaccggcgcacgggtgagtaacgcgtatccaacctgccccatagtcagggacagcccggcgaaagtcggattaatacctgatgttctcccttgagggcctctgacggggagcaaagattcatcgctatgggatggggatgcgtaggattaggcagtcggcggggtaacggcccaccgagccgacgatccttaggggttctgagaggaaggtcccccacactggtactgagacacggaccagactcctacgggaggcagcagtgaggaatattggtcaatgggcggtagcctgaaccagccaagtagcgtgcaggaagacggccctacgggttgtaaactgcttttgccgggggataacgggcgtcacgtgtggcgccgtgcaggtacccggcgaat

SEQ ID NO: 5641 - DNA, 490 bp, unidentified
  misc_feature 1..490: note = Ascusbbf_18750, encodes 16S rRNA
  source 1..490: mol_type = genomic DNA
agagtttgatcctggctcaggatgaacgctagctacaggcttaacacatgcaagtcgaggggcagcatggaggtagcttgctatctccgatggcgaccggcgcacgggtgagtaacgcgtatccaaccttccctgaggtaggggacagcccggtgaaaaccggattaataccctatgttgtcacgaaaaggcatctgggcgtgacgaaagattgatcgcctcaggatggggatgcgtctgattaggcagtaggcggggcaacggcccacctagccaccgatcagtaggggttctgagaggaaggtcccccacattggaactgagacacggtccaaactcctacgggaggcagcagtgaggaatattggtcaatgggcggaagcctgaaccagccaagtagcgtgagggatgacggccctacgggttgtaaacctcttttatgcggggataaccgcccccacgcgtgggggtctgcaggtaccgcatgaat

SEQ ID NO: 5642 - DNA, 490 bp, unidentified
  misc_feature 1..490: note = Ascusbbf_61382, encodes 16S rRNA
  source 1..490: mol_type = genomic DNA
agagtttgatcctggctcaggatgaacgctagcggcaggcttaacacatgcaagtcgaggggcagcgcgggtagcaatacctggcggcgaccggcggaagggtgcgtaacacgtgagcaacttgcccgtcacagggggataagcgctggaaacggtgtctaatatcccataacatgtcgtatcgcatggtacgacattgaaaactccggtggtgacggatgggctcgcggggcattaggtagacggcggggtaacggcccaccgtgccgacgatgtctaggggttctgagaggaagatcccccacactgggactgagacacggcccagactcctacgggaggcagcagtgaggaatattggacaatgggggcaaccctgatccagccatgccgcgtgcgggactaaggccctatgggtcgtaaaccgcttttgttggggagcaataaggtgtacgcgtacaccgatgagagtacctggcgaataagcatc

SEQ ID NO: 5643 - DNA, 489 bp, unidentified
  misc_feature 1..489: note = Ascusbbf_9708, encodes 16S rRNA
  source 1..489: mol_type = genomic DNA
agagtttgatcctggctcagaacgaacgctggcggcaggcttaacacatgcaagttgaacgggaattgatggtagcttgctatcattgaggagagtagcgcactggtgagtaacacgtgggaacgtacatttcagtgggggataacagagggaaacttctgctaataccgcatacgccctgagggggaaaggagaaatttgctgagatatcggcccgcggaagattaggtagttggtggggtaaaggcctaccaagcctacgatctatagctggtctgagaggacgatcagccacattggaactgagacacggtccagactcctacgggaggcagcagtgaggaatattgggcaatggagggaactctgacccagccatgccgcgtgagtgagaaggttttaggattgtaaagctctttcgggtgagaagatgatgacggtatcaccagaagaagccccggcaaacttcgtgccagcagccgcggtaat

SEQ ID NO: 5644 - DNA, 490 bp, unidentified
  misc_feature 1..490: note = Ascusbbf_14158, encodes 16S rRNA
  source 1..490: mol_type = genomic DNA
agagtttgatcatggctcaggatgaacgctggcggcgtgcctaacacatgcaagtcgaacgggaactccaagatgaagcttcggcagatttttggaaattctagtggcggacgggtgagtaacgcgtgggtaacctgcccttaagaggggaataacattgagaaatcagtgctaatacaccatatgcttacggtgtcgcatgacacagtgaggaaaggaatttcgcttaaggatggacccgcgtttgattagccagttggcagggtaacggcctaccaaagcgacgatcaatagccggcctgagagggtgaacggccacattggaactgagacacggtccaaactcctacgggaggcagcagtggggagtattgcacaatgggcgcaagcctgatgcagcaacgccgcgtgagtgaagaagtatttcggtatgtaaagctctatcgatggggaataaaatgaaggtacccaagtaagaagccccggctaa

SEQ ID NO: 5645 - DNA, 490 bp, unidentified
  misc_feature 1..490: note = Ascusbbf_22209, encodes 16S rRNA
  source 1..490: mol_type = genomic DNA
agagtttgatcctggctcaggatgaacgctagctacaggcttaacacatgcaagtcgaggggcagcattgaggttgcttgcaacttcagatggcgaccggcgaatgggtgagtaacgcgtatccaacctgccgtgtgctctgggatagcccttagaaatgaggattaatacgagatagtctcctttgatcgcctgagattaggagtaaagattcatcggcacacgatggggatgcgttccattagatagttggcggggtaacggcccaccaagtctatgatggataggggttctgagaggaaggtcccccacactggtactgagacacggaccagactcctacgggaggcagcagtgaggaatattggtcaatgggcgggagcctgaaccagccaagtagcgtgaaggaagacggccctacgggttgtaaacttcttttgtcggggaataaccgccactacgtgtagtggtctgcatgtacccggtgaat

SEQ ID NO: 5646 - DNA, 490 bp, unidentified
  misc_feature 1..490: note = Ascusbbf_712027, encodes 16S rRNA
  source 1..490: mol_type = genomic DNA
agagtttgatcctggctcagaacgaacgctggcggcgtgcttaacacatgcaagtcgaacgcgaaatcggcttcggtcgagagtagagtggcgcacgggtgagtaacgcgtagataacctgtcttcatattcgggataacacgccgaaaggggtactaataccggatacgcttgtatttcataggcaaggcaaggaaaggtggcctctacatgtaagctactgtatgaagaggggtctgcgtaccattagctagtaggtggggtaatggcctacctaggcgacgatggttagcgggtctgggaggatgatccgccacactggcactggaatacgggccagactcctacgggaggcagcagtgaggaatattgcgcaatgggggcaaccctgacgcagcgacgccgcgtgagtgaggaaggtcttcggatcgtaaagctctgtcaagagggaagaagtgcataatggtcaatacccgttatgtttgacggt

SEQ ID NO: 5647 - DNA, 490 bp, unidentified
  misc_feature 1..490: note = Ascusbbf_1342259, encodes 16S rRNA
  source 1..490: mol_type = genomic DNA
agagtttgatcctggctcagaacgaacgctggcggcgcgttttaagcatgcaagtcgagcggcaaggacttcggtccccagagcggcggacgggtgagtaacacgtggataatctgccctgcagtccggaataccccatggaaacatgggctaatgccggatgcgagatggaggcgatggccttcatgggaaagctcccacgggagcgctgcaggatgagtccgcggcccattagctggatggcggggtaaaggcccaccatggcgccgatgggtagccggcctgtgagggtggacggccaaatgggagctgggacacggtccagactctaacgggaggcagcagctaagaagcttccaaaatggacggaagtctgagggagcgacgccgcgtggacgatgaaggccgtaaggtgggaaagtccttttatggagggagaataaccgcttcagggaatgggagcgggatgacgtgaatccatgaataagcc

SEQ ID NO: 5648 - DNA, 490 bp, unidentified
  misc_feature 1..490: note = Ascusbbf_74852, encodes 16S rRNA
  source 1..490: mol_type = genomic DNA
agagtttgatcatggctcaggatgaacgctggcggcgtgcctaatacatgcaagtcgaacgaacttccgttaattgattatgacgtgcttgcactgaatgagattttaacacgaagtgagtggcggacgggtgagtaacacgtgggtaacctgcccagaagcaggggataacacctggaaacagatgctaataccgtataacagagaaaaccgcctggttttcttttaaaagatggctctgctatcacttctggatggacccgcggcgcattagctagttggtgaggtaacggctcaccaaggcgatgatgcgtagccgacctgagagggtaatcggccacattgggactgagacacggcccagactcctacgggaggcagcagtagggaatcttccacaatggacgcaagtctgatggagcaacgccgcgtgagtgaagaagggtttcggctcgtaaagctctgttgttaaagaagaacgtgggtgaga

SEQ ID NO: 5649 - DNA, 490 bp, unidentified
  misc_feature 1..490: note = Ascusbbf_1698580, encodes 16S rRNA
  source 1..490: mol_type = genomic DNA
agagtttgatcatggctcaggatgaacgccggcggtgtgcctaatacatgcaagtcgaacgcgttggcccaactgattggacgtgcttgcacggacttgacgttggtttaccagcgagtggcggacgggtgagtaacacgtaggtaacctgccccaaagcgggggataacatttggaaacagatgctaataccgcataacaatttgaatcgcatgattcaaatttaaaagatggcttcggctatcactttgggatggacctgcggcgcattagcttgttggtagggtaacggcctaccaaggctgtgatgcgtagccgagttgagagactgatcggccacaatggaactgagacacggtccatactcctacgggaggcagcagtagggaatcttccacaatgggcgcaagcctgatggagcaacaccgcgtgagtgaagaagggtttcggctcgtaaagctctgttgttagagaagaacgtgcgtgagag

SEQ ID NO: 5650 - DNA, 215 bp, unidentified
  misc_feature 1..215: note = Ascusbbf_6721, encodes 16S rRNA
  source 1..215: mol_type = genomic DNA
agagtttgatcctggctcaggatgaacgctagctacaggcttaacacatgcaagtcgaggggaaaccctgatgcagccatgccgcgtgtgtgaagaaggccttcgggttgtaaagcacttttgcattcgaggaagacagcacgtaaataaacgtgttatttgacgttagagtgtgaataagcaccggcaaactccgtgccagcagccgcggtaat

SEQ ID NO: 5651 - DNA, 208 bp, unidentified
  misc_feature 1..208: note = Ascusbbf_37998, encodes 16S rRNA
  source 1..208: mol_type = genomic DNA
agagtttgatcctggctcaggacgaacgctggcggcgtgcttaacaatgggcgaaagcctgacggagcaacgccgcgtgagtgaagaaggtcttcggatcgtaaagctctgttgtcggggacgaatgttgaggcctagaacataggtttcaaatgacggtacctgacgaggaagccacggctaactacgtgccagcagccgcggtaat

SEQ ID NO: 5652 - DNA, 490 bp, unidentified
  misc_feature 1..490: note = Ascusbbf_103977, encodes 16S rRNA
  source 1..490: mol_type = genomic DNA
agagtttgatcctggctcaggatgaacgctagctacaggcttaacacatgcaagtcgaggggcagcgggggcgtagcaatacgcctgccggcgaccggcgcacgggtgagtaacgcgtatccaacctcccccccagtaggggatagcccggcgaaagtcggattaataccctatgtcgtccaggacgggcatcttttccggacgaaagattgatcgctgggggatggggatgcgtctgattaggcagtcggcggggtaacggcccaccgagccttcgatcagtaggggttctgagaggaaggtcccccacattggtactgagacacggaccaaactcctacgggaggcagcagtgaggaatattggtcaatgggcgcgagcctgaaccagccaagtagcgtgcaggatgacggccctacgggttgtaaactgcttttgccgggggataaagttcgccacgcgtggcgttttgcatgtacccggagaataa

SEQ ID NO: 5653 - DNA, 490 bp, unidentified
  misc_feature 1..490: note = Ascusbbf_116614, encodes 16S rRNA
  source 1..490: mol_type = genomic DNA
agagtttgatcctggctcaggatgaacgctagctacaggcttaacacatgcaagtcgcggggcagcgtggggatggcttgccatctctgacggcgaccggcgcacgggtgagtaacgcgtatccaacctgccccttaccacgggatagccctccgaaagggggattaataccgtatgtggccacgagacggcatccgaccgtggctaaaggctcagcggtaagggatggggatgcgtctgattaggtagtcggcggggtaacggcccaccgagccatcgatcagtaggggttctgagaggaaggtcccccacattggaactgagacacggtccaaactcctacgggaggcagcagtgaggaatattggtcaatgggcgcgagcctgaaccagccaagtagcgtgagggatgacggccctacgggttgtaaacctcttttatgcggggataaagtgagccacgtgtggctttttgcaggtaccgcatgaat

SEQ ID NO: 5654 - DNA, 490 bp, unidentified
  misc_feature 1..490: note = Ascusbbf_91322, encodes 16S rRNA
  source 1..490: mol_type = genomic DNA
agagtttgatcctggctcagaacgaacgctggcggcgcgttttaagcatgcaagtcgagcggcaagggccttcgggcccctagagcggcggacgggtgagtaacacgtggacaatctgccccccggcccgggatagcccagggaaacctggattaataccggatgagacgggacctgcgatggcgggatccgggaaaggcgctacggcgccgccgggggatgagtctgcgtcccattagctagacggcggggtaacggcccaccgtggcgacgatgggtagccggcctgagagggtggacggccacattggaactgagacacggtccagactcctacgggaggcagcagctaagaatcttccgcaatgggcgaaagcctgacggagcgacgccgcgtgaacgaagaaggccgtgaggttgtaaagttcttttcgggagggggaacaaccgtggcagggaatggccgcgggatgacgtgaatcccggaata

SEQ ID NO: 5655 - DNA, 490 bp, unidentified
  misc_feature 1..490: note = Ascusbbf_188938, encodes 16S rRNA
  source 1..490: mol_type = genomic DNA
agagtttgatcctggctcaggacgaacgctggcggcgtgcctaatacatgcaagtcgagcggactttcaagaagcttgctttttgaaagttagcggcggacgggtgagtaacacgtgggcaacctgcctgcaagacggggataactccgggaaaccggggctaataccggataatatcttccttcgcatgaaggaaggttgaaaggcggcgcaagctgccgcttgcagatgggcccgcggcgcattagctagttggtgaggtaacggctcaccaaggcgacgatgcgtagccgacctgagagggtgatcggccacactgggactgagacacggcccagactcctacgggaggcagcagtagggaatcttccgcaatggacgaaagtctgacggagcaacgccgcgtgagcgaagaaggtcttcggatcgtaaagctctgttgtcagggaagaacaagtaccgttcgaacagggcggtaccttgacggtac

SEQ ID NO: 5656 - DNA, 490 bp, unidentified
  misc_feature 1..490: note = Ascusbbf_124387, encodes 16S rRNA
  source 1..490: mol_type = genomic DNA
agagtttgatcctggctcaggatgaacgctggcggcgtgcctaacacatgcaagtcgaacggagagccaatgacggagttttcggacaacggatttggtttcttagtggcggacgggtgagtaacgcgtgagcaacctgccttggagtggggaataacagctggaaacagttgctaataccgcatgatgcagcgaggggacatcctcttgctgccaaagatttatcgctctgagatggactcgcgtctgattagctggttggcggggtaacggcccaccaaggcgacgatcagtagccggactgagaggttgaccggccacattgggactgagatacggcccagactcctacgggaggcagcagtggggaatattgggcaatgggcgaaagcctgacccagcaacgccgcgtgaaggaagaaggccctcgggttgtaaacttcttttatcagggacgaaacaaatgacggtacctgatgaataagccacg

SEQ ID NO: 5657 - DNA, 490 bp, unidentified
  misc_feature 1..490: note = Ascusbbf_1597649, encodes 16S rRNA
  source 1..490: mol_type = genomic DNA
agagtttgatcatggctcagaatgaacgttggcggcgtggattaggcatgcaagtcgcgcgataattttccttcggggagaggacagcggcgaaagggagagtaacgcgtggttacataccctcgggaccgggatagtagcgggaaactgctagtaataccggataatatctttggatcaaaggtgtgattccgcccgaggattggaccgcgttctattagcttgttggcggggtaatggcccaccaaggcgacgatggataccgggtgtgagagcatggcccggctcaccgggactgagacactgcccagacacctacgggtggctgcagtcgagagtcttcggcaatgggggcaaccctgaccgagcgacgccgcgtgcgggatgaaggccttcgggttgtaaaccgctgtcagttgggaggaagtatcagggggttatccccttggtttgaccgatcttcagaggaaggacgagctaagttcgtgcc

SEQ ID NO: 5658 - DNA, 490 bp, unidentified
  misc_feature 1..490: note = Ascusbbf_419534, encodes 16S rRNA
  source 1..490: mol_type = genomic DNA
agagtttgatcctggctcaggatgaacgctggcggcgtgcctaacacatgcaagtcgagcgggaatctgttgattgagacttcggtggattgatgcagaggatagcggcggacgggtgagtaacgcgtaggtaacctgccccttacacagggatagcctcgggaaactgggattaatacctgataatgcgatggagtcacatggctttatcgccaaagatttatcggtgagggatggacctgcgtctgattagctagttggtgaggtaacggcccaccaaggcaacgatcagtagccgacctgagagggtaatcggccacattggaactgagacacggtccaaactcctacgggaggcagcagtggggaatattgcacaatgggcgcaagcctgatgcagcaacgccgcgtgagcgaagaaggtcttcggatcgtaaagctctgtccttaggaacgaagaagtgacggtacctgaggaggaagccccggc

SEQ ID NO: 5659 - DNA, 490 bp, unidentified
  misc_feature 1..490: note = Ascusbbf_134263, encodes 16S rRNA
  source 1..490: mol_type = genomic DNA
agagtttgatcatggctcagaacgaacgctggcggcgcgtcttaagcatgcaagtcgagcgggattatggtgcttgcaccatatgagagcggcggactggtgagtaacgcgtaggtgacgaaccccccggacggggacagcctctagaaatagagggtaataccggatgaagcgtgcagtgttagaggctgcacgtgaaagcagctccggctgcgccgggggatcggcctgcgtactattagcttgttggcggggtaacggcccaccaaggcgacgatagttatccggcctgagagggtgagcggacacattgggactgagatacggcccagactcctacgggaggcagcagctaagaatattccgcaatggggggaaccccgacggagcgacgccgcgtggacgatgaaggccgtgaggttgtaaagtccttttaggcatgaagaataagtgcgggagggaatgcccgcatggtgacggtagtgcctga

SEQ ID NO: 5660 - DNA, 490 bp, unidentified
  misc_feature 1..490: note = Ascusbbf_119712, encodes 16S rRNA
  source 1..490: mol_type = genomic DNA
agagtttgatcatggctcaggatgaacgctggcggcgtgcctaatacatgcaagtcgagcgaactgattagaagcttgcttctatgacgttagcggcggacgggtgagtaacacgtgggcaacctgcctgtaagactgggataacttcgggaaaccgaagctaataccggataggatcttctccttcatgggagatgattgaaagatggtttcggctatcacttacagatgggcccgcggtgcattagctagttggtgaggtaacggctcaccaaggcaacgatgcatagccgacctgagagggtgatcggccacactgggactgagacacggcccagactcctacgggaggcagcagtagggaatcttccgcaatggacgaaagtctgacggagcaacgccgcgtgagtgatgaaggctttcgggtcgtaaaactctgttgttagggaagaacaagtacgagagtaactgctcgtaccttgacggtacc

SEQ ID NO: 5661 - DNA, 490 bp, unidentified
  misc_feature 1..490: note = Ascusbbf_195449, encodes 16S rRNA
  source 1..490: mol_type = genomic DNA
agagtttgatcctggctcagattgaacgctggcggcaggcttaacacatgcaagtcgagcggggagatgtagcttgctacatatcctagcggcggacgggtgagtaatgcttaggaatctgcctattagtgggggacaacgttccgaaaggaacgctaataccgcatacgccctacgggggaaagcaggggatcttcggaccttgcgctaatagatgagcctaagtcggattagctagttggtggggtaaaggcctaccaaggcgacgatctgtagcgggtctgagaggatgatccgccacactgggactgagacacggcccagactcctacgggaggcagcagtggggaatattggacaatgggcggaagcctgatccagccatgccgcgtgtgtgaagaaggccttttggttgtaaagcactttaagcgaggaggaggctcctttagttaatacctaaagtgagtggacgttactcgcagaataagca

SEQ ID NO: 5662 - DNA, 490 bp, unidentified
  misc_feature 1..490: note = Ascusbbf_54963, encodes 16S rRNA
  source 1..490: mol_type = genomic DNA
agagtttgatcctggctcagagtgaacgctggcggcgtgcctaatacatgcaagtcgaacggacgactgggagcttgctcctggaagttagtggcgcacgggtgagtaatgtatagctaatctgccctatgctggaggacaacagttagaaatgactgctaatactccatactccttcttaacataagttaagttgggaaagtttttcggcataggatgaggctatatcgtatcagctagttggtgaggtaatggctcaccaaggctatgacgcgtaactggtctgagaggatgatcagtcacactggaactgagacacggtccagactcctacgggaggcagcagtagggaatattgctcaatgggggaaaccctgaagcagcaacgccgcgtggaggatgacacttttcggagcgtaaactccttttgttagggaagaaccatgacggtacctaacgaataagcaccggctaactccgtgccagcagc

SEQ ID NO: 5663 - DNA, 490 bp, unidentified
  misc_feature 1..490: note = Ascusbbf_141536, encodes 16S rRNA
  source 1..490: mol_type = genomic DNA
agagtttgatcatggctcaggacgaacgctggcggcgtgcctaacacatgcaagtcgaacggagttcttacagatgaagcttcggccgatgaagtttgaacttagtggcggacgggtgagtaacgcgtgagcaacctgccttacagagggggacaacagttggaaacgactgctaataccgcataacgtatttggggggcatcctctggataccaaagatttatcgctgtaagatgggctcgcgtatgattagatagttggtgaggtaacggctcaccaagtcgacgatcattagccggactgagaggttgaacggccacattgggactgagatacggcccagactcctacgggaggcagcagtggggaatattgcgcaatgggggcaaccctgacgcagcaacgccgcgtgaaggatgaaggttttcggattgtaaacttcttttgtcgaggacgatagtgacggtactcgacgaataagccacggcta

SEQ ID NO: 5664 - DNA, 490 bp, unidentified
  misc_feature 1..490: note = Ascusbbf_58853, encodes 16S rRNA
  source 1..490: mol_type = genomic DNA
agagtttgatcctggctcagattgaacgctggcggcatgctttacacatgcaagtcggacggcagcgggggtgcttgcacctgccggcgagtggcgaacgggtgagtaatgcattggaacgtaccgagtagtgggggataaccagtcgaaagattggctaataccgcatacgacctgagggtgaaagcgggggatcttcggacctcgcgctatttgagcggccaatgtctgattaggtagttggtggggtaaaggcctaccaagccgacgatcagtagcgggtctgagaggatgatccgccacactgggactgagacacggcccagactcctacgggaggcagcagtggggaattttggacaatgggcgaaagcctgatccagccatgccgcgtgtctgaagaaggccttcgggttgtaaaggacttttgtcagggaagaaaagcaggatgttaataccattttgtgatgacggtacctgaagaataagc

SEQ ID NO: 5665 - DNA, 490 bp, unidentified
  misc_feature 1..490: note = Ascusbbf_285801, encodes 16S rRNA
  source 1..490: mol_type = genomic DNA
agagtttgatcctggctcaggatgaacgctagcgataggcctaacacatgcaagtcgaggggcagcatagagtagcaatactttgatggcgaccggcgcacgggtgagtaacacgtatgcaacctacctacatcaggggaataacccggagaaattcggactaataccgcataatacagggatgccgcatggtaatatttgttaaagatttatcggatgtagatgggcatgcgttccattagctagttggtaaggtaacggcttaccaaggcaacgatggataggggaactgagaggtttgtcccccacactggaactgagacacggaccagactcctacgggaggcagcagtgaggaatattggtcaatggacgagagtctgaaccagccaaatcgcgtgaaggaagactgccctacgggttgtaaacttcttttgtacaggaataaaagacattacgtgtagtgtattgcatgtactgtacgaataag

SEQ ID NO: 5666 - DNA, 490 bp, unidentified
  misc_feature 1..490: note = Ascusbbf_68846, encodes 16S rRNA
  source 1..490: mol_type = genomic DNA
agagtttgatcatggctcaggatgaacgctagctacaggcttaacacatgcaagtcgaggggcagcatgattctagcttgctggaattgatggcgaccggcgcacgggtgagtaacgcgtatccaaccttccccttagtagggcatagcccgtagaaatgcggattaataccctatgttgttcgaagcgggcatctaattcgaaccaaaggttctccgctaagggatggggatgcgtctgattaggaagtaggcggggcaacggcccacctatccatcgatcagtaggggttctgagaggaaggtcccccacactggtactgagacacggaccagactcctacgggaggcagcagtgaggaatattggtcaatgggcggaagcctgaaccagccaagtagcgtgcaggacgacggccctacgggttgtaaactgcttttacggggggataaacggcgggacttgtcctgccctgcaggtaccccgtgaat

SEQ ID NO: 5667 - DNA, 490 bp, unidentified
  misc_feature 1..490: note = Ascusbbf_173328, encodes 16S rRNA
  source 1..490: mol_type = genomic DNA
agagtttgatcatggctcaggatgaacgctggcggcgtgcttaacacatgcaagtcgaacggggttatgcagagcagagatttcggtcaaagcactgcataacctagtggcggacgggtgagtaacgcgtgggtaacctgccatatacagggggataacacttagaaataggtgctaaaaccgcataagcgcacagcatcgcatgatgcagtgtgaaaaactccggtggtatatgatggacccgcgtctgattagccagttggcagggtaacggcctaccaaagcgacgatcagtagccggcctgagagggtgaacggccacattgggactgagacacggcccaaactcctacgggaggcagcagtggggaatattgcacaatgggggaaaccctgatgcagcgacgccgcgtgagtgaagaagtatttcggtatgtaaagctctatcagcagggaagaaatcaatgacggtacctgactaagaagcccc

SEQ ID NO: 5668 - DNA, 470 bp, unidentified
  misc_feature 1..470: note = Ascusbbf_84664, encodes 16S rRNA
  source 1..470: mol_type = genomic DNA
agagtttgatcctggctcagaacgaacgctggcggcaggcctaacacatgcaagtcgaacgcccacttcggtgggagtggcagacgggtgagtaacacgtgggaacctacctgatggtacggaataacacagggaaacttgtgctaataccgtatgtgcccttcgggggaaagatttatcgccatcagatgggcccgcgtcggattagctagttggtggggtaatggcctaccaaggcgacgatccgtagctggtctgagaggatgatcagccacactgggactgagacacggcccagactcctacgggaggcagcagtggggaatattggacaatgggcgcaagcctgatccagccatgccgcgtgagtgatgaaggccttagggttgtaaagctctttcagctgggaagataatgacggtaccagcagaagaagccccggctaacttcgtgccagcagccgcggtaat

SEQ ID NO: 5669 - DNA, 490 bp, unidentified
  misc_feature 1..490: note = Ascusbbf_76622, encodes 16S rRNA
  source 1..490: mol_type = genomic DNA
agagtttgatcatggctcagaacgaacgctggcggtatgcttaacacatgcaagtcgtacgagaaagttcttcggaatgagtaaagtggcgtacgggtgagtaatgtatgggaatctacccagtaatgaggaataagcactggaaacggtgtctaataccacatactaccgatttatcgggaaagatttaaccttcgggttaagttgttattggatgagcccatatctgattagctagttggtggggtaaaggcctaccaaggcgatgatcagtagctgatctgagagggtgatcagccacattgggactgcgacacggcccaaactcctacgggaggcagcagtgaggaatattggacaatgggcgaaagcctgatccagcaataccgcgtgaatgatgaaggccttcgggttgtaaaattcttttagtggggaggataatgacgttacccacagaaaaagcaccggctaacttcgtgccagcagccgc

SEQ ID NO: 5670 - DNA, 470 bp, unidentified
  misc_feature 1..470: note = Ascusbbf_37970, encodes 16S rRNA
  source 1..470: mol_type = genomic DNA
agagtttgatcatggctcagaacgaacgctggcggcaggcctaacacatgcaagtcgaacgccgtagcaatacggagtggcagacgggtgagtaacacgtgggaacatgccctttggttcggaataactcagggaaacttgagctaataccggataagcccgagaggggaaagatttatcgccgaaggattggcccgcgtccgattagctagttggtgaggtaatggctcaccaaggcgacgatcggtagctggtctgagaggatgatcagccacactgggactgagacacggcccagactcctacgggaggcagcagtggggaatattggacaatgggcgcaagcctgatccagccatgccgcgtgagtgatgaaggccctagggttgtaaagctctttcgccagggacgataatgacggtacctggataagaagccccggctaacttcgtgccagcagccgcggtaat

SEQ ID NO: 5671 - DNA, 470 bp, unidentified
  misc_feature 1..470: note = Ascusbbf_81114, encodes 16S rRNA
  source 1..470: mol_type = genomic DNA
agagtttgatcatggctcagaacgaacgctggcggcaggcctaacacatgcaagtcgaacgcactcttcggagtgagtggcagacgggtgagtaacacgtgggaatctacccggtggtacggaataactcagggaaacttgtgctaataccgtataagccctcagggggaaagatttatcgccatcggatgagcccgcgtcggattagctagttggcggggtaatggcccaccaaggcgacgatccgtagctggtctgagaggatgatcagccacattgggactgagacacggcccaaactcctacgggaggcagcagtggggaatattggacaatgggcgcaagcctgatccagccatgccgcgtgagtgatgaaggccttagggttgtaaagctctttcagcggggaagataatgacggtacccgcagaagaagccccggctaacttcgtgccagcagccgcggtaat

SEQ ID NO: 5672 - DNA, 490 bp, unidentified
  misc_feature 1..490: note = Ascusbbf_106872, encodes 16S rRNA
  source 1..490: mol_type = genomic DNA
agagtttgatcctggctcaggatgaacgctagcggcaggcttaacacatgcaagtcgaggggtataagtagcttgctacttagagaccggcaaacgggtgcggaacacgtacgcaatctgcccttatctcagggatagcccatagaaatgtggattaatacctgatagtattatttggtggcatcaccaggtaattaaagatttattggatagggatgagcgtgcgtaagattaggtagttggtagggtaacggcctaccaagcccacgatctttagctgatgtgagagcatgatcagccacacgggcactgagacacgggcccgactcctacgggaggcagcagtgaggaatattggtcaatggacggaagtctgaaccagccatgccgcgtgaaggatgaaggcgttctgcgttgtaaacttcttttatctaagaagaaatcacatttttctaaatgtgttgacggtattagatgaataagcaccggc

SEQ ID NO: 5673 - DNA, 490 bp, unidentified
  misc_feature 1..490: note = Ascusbbf_318862, encodes 16S rRNA
  source 1..490: mol_type = genomic DNA
agagtttgatcctggctcaggatgaacgctggcggcgtgcttaacacatgcaagtcgaacggacctgtgacaccgaagcggatttagcttgctattgaagcttcaccgttgcaggttagtggcggacgggtgagtaacgcgtgggcaacctgcctttatccgggggataacagttagaaatgactgctaataccgcataagcgcacgaatgggcatccatttgtgtgaaaaactccggtggatagagatgggcccgcgttagattagccagttggcggggtaacggcccaccaaagcgacgatctatagccggcctgagagggcgaccggccacattgggactgagacacggcccaaactcctacgggaggcagcagtggggaatattgcacaatgggggaaaccctgatgcagcgacgccgcgtgagtgaagaagtatttcggtatgtaaagctctatcagcagggaagaaaaaggacggtacctgcac

SEQ ID NO: 5674 - DNA, 490 bp, unidentified
  misc_feature 1..490: note = Ascusbbf_58053, encodes 16S rRNA
  source 1..490: mol_type = genomic DNA
agagtttgatcatggctcaggatgaacgctggcggcgtgcttaacacatgcaagtcgaacgaggtccatggagcttgctccggaagacctagtggcgaacgggtgcgtaacacgtgagaaacctgccccgatctctgggataacagttggaaacgactgctaataccggatgccgtcacaccgcttcatggcggagtgccgaaagatttatcggattgggagggtctcgcggcctatcagctagttggagaggtaacggctcaccaaggcatcgacgggtagctggtctgagaggatgatcagccacactgggactgagacacggcccagactcctacgggaggcagcagtggggaatcttgcacaatgggcgaaagcctgatgcagcaacgccgcgtgcgggatgaaggccctagggttgtaaaccgctttcagtagggaagaaaatgacggtacctacagaagaaggtgcggccaactacgtgccagc

SEQ ID NO: 5675 - DNA, 469 bp, unidentified
  misc_feature 1..469: note = Ascusbbf_401888, encodes 16S rRNA
  source 1..469: mol_type = genomic DNA
agagtttgatcatggctcagaacgaacgctggcggcaggcttaacacatgcaagtcgaacggtctcttcggaggcagtggcagacgggtgagtaacgcgtgggaatctacctagttctacggaacaacagagggaaacttctgctaataccgtatacgccctacgggggaaagatttatcggaattagatgagcccgcgtaagattagctagttggtggggtaatggcctaccaaggcgacgatctttagctggtctgagaggatgatcagccacactgggactgagacacggcccagactcctacgggaggcagcagtggggaatattggacaatgggcgaaagcctgatccagccatgccgcgtgagtgatgaaggccttagggttgtaaagctctttcagtagggaagataatgacggtacctacagaagaagccccggctaacttcgtgccagcagccgcggtat

SEQ ID NO: 5676 - DNA, 490 bp, unidentified
  misc_feature 1..490: note = Ascusbbf_136860, encodes 16S rRNA
  source 1..490: mol_type = genomic DNA
agagtttgatcctggctcaggacgaacgctggcggcgtgcttaacacatgcaagtcgagcgaagcccttgccttcgggtgaggtgacttagcggcgaacgggtgagtaacacgtgggcaacctgcccttagctctgggataagcgatggaaacgtcgtctaatactggatatgacatatggacgcatgttctgtgtgtggaaagatttatcggctaaggatgggcccgcggcctatcagcttgttggtggggtaatggcctaccaaggcggcgacgggtaaccggcctgagagggcgaccggtcacactgggactgagatacggcccagactcctacgggaggcagcagtggggaatattgcacaatgggcgaaagcctgatgcagcgacgccgcgtgagggatgacggccttcgggttgtaaacctctttcagcagggacgaagcgaaagtgacggtacctgcagaagaagcgccggccaactacgtgc

SEQ ID NO: 5677 - DNA, 490 bp, unidentified
  misc_feature 1..490: note = Ascusbbf_252845, encodes 16S rRNA
  source 1..490: mol_type = genomic DNA
agagtttgatcctggctcaggacgaacgctggcggcacgcttaacacatgcaagtcgaacggtgaaatggtgcttgcaccatggatcagtggcggacgggtgagtaacacgtgagcaatctgccttcgggtgggggataccagttggaaacgactgttaataccgcataacatagcgaaaccgcatgattttgctatcaaagatttattgcctgaagatgagctcgcgtctgattagctagttggtgaggtaacggcccaccaaggcgacgatcagtagccggactgagaggttgaacggccacattgggactgagacacggcccagactcctacgggaggcagcagtggggaatattgcacaatgggcgcaagcctgatgcagcgatgccgcgtgagggaagaaggttttcggattgtaaacctctgttgacagggacgataatgacggtacctgttcagaaagctccggctaactacgtgccagcagc

SEQ ID NO: 5678 - DNA, 490 bp, unidentified
  misc_feature 1..490: note = Ascusbbf_114580, encodes 16S rRNA
  source 1..490: mol_type = genomic DNA
agagtttgatcctggctcaggatgaacgctggcggcgtgcttaacacatgcaagtcgaacgaagcaggtttgaaggagacttcggtcaatggatgatctgacttagtggcggacgggtgagtaacgcgtgggcaacctgcctcatggagggggacaacagttggaaacgactgctaataccgcataagaccaagcatcgcatgatgcaatggtaaaagatttatcgccatgagatggacccgcgttagattagctagttggtgaggtaacggctcaccaaggcgacgatctatagccgacctgagagggtgatcggccacattgggactgagacacggcccaaactcctacgggaggcagcagtggggaatattggacaatgggggaaaccctgatccagcgacgccgcgtgagtgaagaagtatttcggtatgtaaagctctatcagcagggaagaaaatgacggtacctgactaagaagccccggcta

SEQ ID NO: 5679 - DNA, 486 bp, unidentified
  misc_feature 1..486: note = Ascusbbf_72554, encodes 16S rRNA
  source 1..486: mol_type = genomic DNA
agagtttgatcctggctcagggctaacgctggcggcgcgcctaacacatgcaagtcgaacgaaccttcgggttagtggcagacgggtgagtaatgcgtggataatgtgcctttttgctggggataccgtttcgaaaggaacgttaataccgaatgtgctgggttggtggcatcatcgacccagtaaactgttagggtgaaaagagcagtccgcgttctatcagcttgttggtggggtaatggcctaccaaggctacgacggataactggtctgagaggatgatcagtcacactggaactgagacacggtccagactcctacgggaggcagcagtgaggaatcttgcacaatgggcgaaagcctgatgcagcgacgccgcgtgagggacgacggccttcgggttgtaaacctctgtcagtggggaagaagtatgacggtacccactgaggaagcttcggctaactacgtgccagcagccgcggtaat

SEQ ID NO: 5680 - DNA, 490 bp, unidentified
  misc_feature 1..490: note = Ascusbbf_358397, encodes 16S rRNA
  source 1..490: mol_type = genomic DNA
agagtttgatcatggctcaggatcaacgctggcggcgtgcctaatgcatgcaagtcgaacgggcttttcttcggaggagtcacgtggcggacgggtgaggaacacgtgggcgacctaccctggggcgggggatagccgcgagaaatcgtggataattccgcatgtgctcccatcggggtgactgatgggaggaaaggtgtgcgcaagcacgccaccctaggcggggcctgcggccgattagctagttgggggggtaacggcttcccaaggcgatgatcggtagctggtctgagaggacggccagccacacggggactgagacacggccccgactcctacgggaggcagcagcaaggaatcttccgcaatgggcgaaagcctgacggagcaacgccgcgtgcgggatgacgcctttcggggtgtaaaccgcttttctgggggaagaagacggactttggtccgtttgacggtaccgcaggaagaaggaccg

SEQ ID NO: 5681 - DNA, 490 bp, unidentified
  misc_feature 1..490: note = Ascusbbf_292034, encodes 16S rRNA
  source 1..490: mol_type = genomic DNA
agagtttgatcatggctcaggatgaacgctggcggcgtgcctaacacatgcaagtcgaacggttaagccggcttcggccgggtatacagtggcgaacgggtgagtaacacgtgaccaacccgccccccgcaccgggacagccccgcgaaagcgcggttaataccggatacgccccccgctccgcatggcgcgggggggaaagcccaggcggcgggggatggggtcgcggcccatcaggtagtaggtcgggtagaggccgacctagccgacgacgggtagccgggttgagagaccgaccggccacattgggactgagatacggcccagactcctacgggaggcagcagtggggaatattgcgcaatgggggcaaccctgacgcagcaacgccgcgtgcgggacgaaggcgtccgcgtcgtaaaccgctttcagcagggaagacatcgacggtacctgcagaagaagccccggctaactacgtgccagcagc

SEQ ID NO: 5682 - DNA, 468 bp, unidentified
  misc_feature 1..468: note = Ascusbbf_143991, encodes 16S rRNA
  source 1..468: mol_type = genomic DNA
agagtttgatcctggctcagaacgaacgctggcggcaggcttaatacatgcaagtcgaggggcccgcaagggcaccggcgcacgggtgcgtaacgcgtgggaacatgcccttaggtgcggaacaacgtctggaaacggacgctaataccgcataatatcttcggatcaaagatttatcgcctaaggattggcccgcgttagattaggtagttggtagggtaatggcctaccaagccgacgatctatagctggtctgagaggatgatcagccacactgggactgagacacggcccagactcctacgggaggcagcagtaaggaatattggacaatgggcgaaagcctgatccagccatgccgcgtgagtgacgaaggccttagggttgtaaagctctttcaggtgcgaagataatgacagtaacaccagaagaagccccggctaaattcgtgccagcagccgcggtaat

SEQ ID NO: 5683 - DNA, 468 bp, unidentified
  misc_feature 1..468: note = Ascusbbf_67298, encodes 16S rRNA
  source 1..468: mol_type = genomic DNA
agagtttgatcctggctcagaacgaacgctggcggcaggcctaaaacatgcaagtcgaacgaaccttcgggttagtggcgcacgggtgcgtaacacgtgggaatgtgcccctgggtacggaataactcaccgaaaggtgtgctaataccgtataatgactccggtccaaagatttatcgcccagggatcagcccgcgtctgattaggtagttggtgaggtaagagctcaccaagccgacgatcagtagctggtttgagaggatgatcagccacactggaactgagacacggtccagactcctacgggaggcagcagttaggaatattgcgcaatgggggaaaccctgacgcagccatgccgcgtgagtgacgacggccttagggttgtaaagctctttcagatgcgaagataatgacggtaacatcagaagaagccccggctaaattcgtgccagcagccgcggtaat

SEQ ID NO: 5684 - DNA, 490 bp, unidentified
  misc_feature 1..490: note = Ascusbbf_284423, encodes 16S rRNA
  source 1..490: mol_type = genomic DNA
agagtttgatcctggctcaggatgaacgctagcgacaggcttaacacatgcaagtcgaggggcatcatgtaggttgcttgcgacctatgatggcgaccggcgcacgggtgagtaacgcgtatgcaaccttcccgcggcagggggatagcccggcgaaagtcggattaataccccatgagacaggggccccgcatggggatatttgttaaaggtttgttccggccgcggatgggcatgcgtaggattaggtagtcggcggggtgacggcccaccgagccatcgatccttaggggttctgagaggaaggtcccccacactggtactgagacacggaccagactcctacgggaggcagcagtgaggaatattggtcaatgggcggaagcctgaaccagccaagtcgcgtgagggatggaggccctacgggttgtaaacctcttttgccgggggataattggccgcacgcgtgcggcgttgcaggtacccggcg

SEQ ID NO: 5685 - DNA, 490 bp, unidentified
  misc_feature 1..490: note = Ascusbbf_1878286, encodes 16S rRNA
  source 1..490: mol_type = genomic DNA
agagtttgatcctggctcaggatgaacgctggcggcatgcctaagacatgcaagtcgaacgagacgaccttaagaaagctgcgtgcttgcacaaggctggaagaagatcatcgtctagtggcagacgggtgagtaacacgtgggtaacctaccttcaagttggggataacagttggaaacgactgctaataccgaataaggtattcgtactgaaaggagcctttaaagcttcgcttaaagatgggcctgcggcgtattaactagttggtgaggtaatggctcaccaaggtaacgatgcgtagccgaactgagaggttgaacggccacactgggactgagacacggcccagactcctacgggagacagcagttaggaatattcgtcaatgggggaaaccctgaacgagcaatgccgcgtgagtgatgaaggccctatgggttgtaaaactctgttgtatgggaagaacggccatattaggaaatgaatatg

SEQ ID NO: 5686 - DNA, 490 bp, unidentified
  misc_feature 1..490: note = Ascusbbf_309401, encodes 16S rRNA
  source 1..490: mol_type = genomic DNA
agagtttgatcctggctcaggacgaacgctggcggcgtgcttaacacatgcaagtcgaacggggtctattagcttgctaagacgacctagtggcaaacgggtgagtaacgcgtgggcaacctgccggaaagatggggacaacatcccgaaaggggtgctaataccgaatgttgtatatgaggcgcatgccttgtatattaaaggattctatccgctttccgatgggcccgcgtccgattagctagttgggggggtagaggcccaccaaggcgacgatcggtagccggcctgagagggtgaacggccacattgggactgagacacggcccagactcctacgggaggcagcagtggggaatcttccgcaatgggcgaaagcctgacggagcaacgccgcgtgggtgaagaaggtcttcggaccgtaaagccctgttgccggggaagagtggtctaagggaacttagacagggacggtacccggcgaggaagc

SEQ ID NO: 5687 - DNA, 490 bp, unidentified
  misc_feature 1..490: note = Ascusbbf_240766, encodes 16S rRNA
  source 1..490: mol_type = genomic DNA
agagtttgatcctggctcaggatgaacgctggcggcgtgcctaatacatgcaagtcgagcgagaaatgagcaaatgaaacttcggtagattttgctcatggacagcggcggacgggtgagtaacgcgtaggcaacctgcctcacacagagggatagccattggaaacgatgaataatacctcatgaaaccggaataacacatgttgatccggtcaaagatttatcggtgtgagatgggcctgcgtctgattaactagttggtgaggtaacggctcaccaaggtgacgatcagtagccgacctgagagggtgatcggccacattggaactgagacacggtccaaacttctacggaaggcagcagtagggaatcttgcacaatgggcgaaagcctgatgcagcaacgccgcgtgaaggatgaaggccttcgggttgtaaacttctgttcccggggacgaagaaagtgacggtacccgggcagcaagccccgg

SEQ ID NO: 5688 - DNA, 468 bp, unidentified
  misc_feature 1..468: note = Ascusbbf_112256, encodes 16S rRNA
  source 1..468: mol_type = genomic DNA
agagtttgatcatggctcagaacgaacgctggcggcaggcttaacacatgcaagtcgaacgccccgcaaggggagtggcagacgggtgagtaacgcgtgggaatctaccctgaactgcgggatagctccgggaaactggaattaataccgcatgtgccctgaggggcaaagattcatcggttcaggatgagcccgcgtccgattagctagttggtggggtaaaggcctaccaaggcgacgatcggtagctggtctaagaggatgatcagccacattgggactgagacacggcccaaactcctacgggaggcagcagtggggaatattggacaatgggcgcaagcctgatccagccatgccgcgtgagtgatgaaggccctagggttgtaaagctctttcaccggggacgataatgacggtacccggagaagaagccccggctaacttcgtgccagcagccgcggtaat

SEQ ID NO: 5689 - DNA, 470 bp, unidentified
  misc_feature 1..470: note = Ascusbbf_144979, encodes 16S rRNA
  source 1..470: mol_type = genomic DNA
agagtttgatcctggctcagaacgaacgctggcggcatgcttaacacatgcaagtcgaacgcagtagcaatactgagtggcggacgggtgagtaacacgtgggaacttgccaaatggtgggggataactgtgggaaactgcagctaataccgcataagccctgagggggaaagatttattgccatttgataggcccgcgtcggattaggtagttggtagggtaaaggcctaccaagccgatgatccgtagctggtttgagaagatgaccagccacactgggactgagacacggcccagactcctacgggaggcagcagtggggaatattggacaatgggggaaaccctgatccagcgatgccgcgtgaatgaagaaggccttagggttgtaaagttctttcacctgtgacgatgatgacggtaacaggagaagaagccccggctaactccgtgccagcagccgcggtaat

SEQ ID NO: 5690 - DNA, 490 bp, unidentified
  misc_feature 1..490: note = Ascusbbf_373934, encodes 16S rRNA
  source 1..490: mol_type = genomic DNA
agagtttgatcctggctcaggatgaacgctggcggcgtgcttaacacatgcaagtcgaacgaacggaggagtgcttgcactccaaagttagtggcggacgggtgagtaacgcgtgggtaacctgcctcatgcagggggataacatctggaaacggatgctaataccgcataaactatggatgaccgcatggtcattatagcaaagatttatcggcatgagatggacccgcgttggattagctagttggtgagataacagcccaccaaggcgacgatccatagccggcctgagagggtgaacggccacattgggactgagacacggcccaaactcctacgggaggcagcagtggggaatattgcacaatgggcgaaagcctgatgcagcaacgccgcgtgaaggatgaaggtcttcggattgtaaacttctatcagcagggaagaataaatgacggtacctgactaagaagctccggctaactacgtgcca

SEQ ID NO: 5691 - DNA, 490 bp, unidentified
  misc_feature 1..490: note = Ascusbbf_1638364, encodes 16S rRNA
  source 1..490: mol_type = genomic DNA
agagtttgatcctggctcaggatgaacgctagcgacaggcttaacacatgcaagtcgaggggcagcgggggcgatggcaacattgcccgccggcgaccggcgcactggtgagtaacacgtatgcaacctgccccgcacagggggataacccagagaaatttggcctaataccccgtaacacccccgtgggcatccttggtggttgaaagaggcgactcggtgcgggatgggcatgcggcgcattagatagttggcggggcgacggcccaccaagtcgacgatgcgtaggggttctgagaggaaggtcccccacactggtactgagacacggaccagactcctacaggaggcagcagtgaggaatattggtcaatggacggaggtctgaaccagccaagtcgcgtgggggaagaaggtcctacggattgtaaaccccttttgccggggagtaaagggcgccacgcgtggcgcgttgagagtacccggagaa

SEQ ID NO: 5692 - DNA, 490 bp, unidentified
  misc_feature 1..490: note = Ascusbbf_792053, encodes 16S rRNA
  source 1..490: mol_type = genomic DNA
agagtttgatcatggctcagattgaacgctggcggcatgctttacacatgcaagtcggacggcagcgaagtagtgcttgcactactgtcggcgagtggcgaacgggtgagtaatgcattggaacgtaccgggtagtgggggataactagtcgaaagattagctaataccgcatacgacctgagggtgaaagcgggggatcttcggacctcgtgctatttgagcggccaatgtctgattagctagttggtggggtaaaggcccaccaaggcgacgatcagtagcgggtctgagaggatgatccgccacactgggactgagacacggcccagactcctacgggaggcagcagtggggaattttggacaatgggcgcaagcctgatccagccatgccgcgtgtctgaagaaggccttcgggttgtaaaggacttttgttagggaagaaaaggcgattgctaatatcgattgctgctgacggtacctaaagaat

SEQ ID NO: 5693 - DNA, 490 bp, unidentified
  misc_feature 1..490: note = Ascusbbf_1559547, encodes 16S rRNA
  source 1..490: mol_type = genomic DNA
agagtttgatcatggctcaagatgaacgctagcggcaggcctaacacatgcaagtcgagcgggattcggtggcttgccaccgatgagagcggcgcacgggtgcgtaacgcgtatgcaacctaccttttgctacgggatagcccagggaaacttggattaacaccgtatagtatggttttctggcatcgggaaaccattaaaggctacggcaaaagatgggcatgcgtcctattagctagatggtgtggtaacggcataccatggcaacgataggtaggggccctgagagggggatcccccacactggtactgagacacggaccagactcctacgggaggcagcagtgaggaatattggacaatgggcggaagcctgatccagccatgccgcgtgcaggaagactgccctatgggttgtaaactgcttttatacgggaagaaacaccccctcgtgagggggcttgacggtaccgtaggaataaggatcggc

SEQ ID NO: 5694 - DNA, 490 bp, unidentified
  misc_feature 1..490: note = Ascusbbf_1869505, encodes 16S rRNA
  source 1..490: mol_type = genomic DNA
agagtttgatcatggctcagattgaacgctggcggcaggcttaacacatgcaagtcgaacggtaacagaaggaagcttgctttcttgctgacgagtggcggacgggtgagtaatgcttgggaatctggcttatggagggggataactactggaaacggtagctaataccgcgtaatgtctacggactaaaggatgggactttcgagccattcgccataagatgagcccaagtgggattaggtagttggtgaggtaaaggcttaccaagccgtcgatctctagctggtctgagaggatgaccagccacaccgggactgagacacggcccggactcctacgggaggcagcagtggggaatattgcacaatgggggaaaccctgatgcagccatgccgcgtgaatgaagaaggccttcgggttgtaaagttctttcggtgacgaggaaggcgggtattttaatagaatacctgattgacgttaatcacagaag

SEQ ID NO: 5695 - DNA, 470 bp, unidentified
  misc_feature 1..470: note = Ascusbbf_1604153, encodes 16S rRNA
  source 1..470: mol_type = genomic DNA
agagtttgatcatggctcagaacgaacgctggcggcaggcttaacacatgcaagtcgaacggttccttcggggacagtggcagacgggtgagtaacacgcgggaatctacctggttctacgggataacagttggaaacgactgctaataccggatacgcccttttggggaaagatttatcggaatcagatgagcccgcgtaagattagctagttggtgaggtaatggctcaccaaggcgacgatctttagctggtctgagaggatgatcagccacactgggactgagacacggcccagactcctacgggaggcagcagtggggaatattggacaatgggcgcaagcctgatccagccatgccgcgtgagtgatgaaggccttagggttgtaaagctctttcaccggtgaagataatgacggtaaccggagaagaagccccggctaacttcgtgccagcagccgcggtaat

SEQ ID NO: 5696 - DNA, 490 bp, unidentified
  misc_feature 1..490: note = Ascusbbf_651188, encodes 16S rRNA
  source 1..490: mol_type = genomic DNA
agagtttgatcctggctcaggatgaacgctagcggcaggcctaacacatgcaagtcgaggggtagagtacttcggtgcttgagaccggcgcacgggtgcgtaacgcgtatgcaatctaccttatactttgggatagcccggagaaatccggattaataccttatggttatttatagtggcatcgttaaaaatataaagattaattggtataagatgagcatgcgtcccattagttagttggtgtggtaacggcacaccaagacgatgatgggtaggggtcctgagagggagatcccccacactggtactgagacacggaccagactcctacgggaggcagcagtgaggaatattggtcaatggaggcaactctgaaccagccatgccgcgtgcaggaagaatgtcctatggattgtaaactgcttttgtacgggaagaaaaagagctacgcgtagtttattgacggtaccgtaagaataaggatcggcta

SEQ ID NO: 5697 - DNA, 490 bp, unidentified
  misc_feature 1..490: note = Ascusbbf_582940, encodes 16S rRNA
  source 1..490: mol_type = genomic DNA
agagtttgatcctggctcaggatgaacgctggcggcgtgcttaacacatgcaagtcgaacggagcacccctgacggagttttcggacaacgaaagggaatgcttagtggcggacgggtgagtaacgcgtgagtaacctgccttggagtggggaataacagccggaaacggctgctaataccgcatgatgtatctggatcgcatggttctggataccaaagatttatcgctctgagatggactcacgtctgattagctagttggtgaggtaacggctcaccaaggcgacgatcagtagccggactgagaggttggccggccacattgggactgagacacggcccagactcctacgggaggcagcagtggggaatattgggcaatgggcgaaagcctgacccagcaacgccgcgtgaaggaagaaggccctcgggttgtaaacttcttttgtcagggacgaagcaagtgacggtacctgacgaataagccac

SEQ ID NO: 5698 - DNA, 490 bp, unidentified
  misc_feature 1..490: note = Ascusbbf_518770, encodes 16S rRNA
  source 1..490: mol_type = genomic DNA
agagtttgatcatggctcaggacgaacgctggcggcgtgcctaatacatgcaagtcgaacgaacggattgaggagcttgctcttcaagaagttagtggcggacgggtgagtaacacgtgggtaacctgcccttcagcgggggataacatccggaaacgggtgctaataccgcatagtttctttttccgcctggaagaagaaggaaagatggcctttgtgctatcactgagggatggacccgcggcgtattagttagttggtggggtaatggcctaccaagacgatgatacgtagccgacctgagagggtgatcggccacattgggactgagacacggcccaaactcctacgggaggcagcagtagggaatcttccgcaatggacgaaagtctgacggagcaacgccgcgtgagtgaagaaggttttcggatcgtaaaactctgttgtcggagaagaacaagtaggagagtaactgttcctaccttgacgg

SEQ ID NO: 5699 - DNA, 490 bp, unidentified
  misc_feature 1..490: note = Ascusbbf_199465, encodes 16S rRNA
  source 1..490: mol_type = genomic DNA
agagtttgatcatggctcagattgaacgctggcggcaggcctaacacatgcaagtcgggcggtaacagggagaagcttgcttctctgctgacgagcggcggacgggtgagtaatgtatggggatctgcctgatggcgggggataactactggaaacggtagctaataccgcataatgtctacggaccaaagcgggggacctccgggcctcgcgccatcagatgaacccatatgggattagcttgtaggtgaggtaacggctcacctaggcgacgatccctagctggtctgagaggatgatcagccacactgggactgagacacggcccagactcctacgggaggcagcagtggggaatattgcacaatgggcgcaagcctgatgcagccatgccgcgtgtatgaagaaggccttcgggttgtaaagtactttcagtcgggaggaaggtggtaaggttaataaccttatcaattgacgttaccgacagaag

SEQ ID NO: 5700 - DNA, 490 bp, unidentified
  misc_feature 1..490: note = Ascusbbf_766302, encodes 16S rRNA
  source 1..490: mol_type = genomic DNA
agagtttgatcctggctcaggatgaacgctggcggcgtgcctaacacatgcaagtcgaacgtgaggttaccatctagcaatagaaggtaactgaaagtggcgaacgggtgagtaacacgtagataacctaccctgaagtgggggataaccacgggaaactgtggctaataccgcatacgcttgaccgtctgggaatatggtcaaggaaagcttaatgtgctttgggaggggtctgcggtcgattagttagatggtggggtaacggcctaccatggcgatgatcgatagctggtctgagaggatgatcagccacacgggaactgagatacggtcccgactcctacggggggcagcagtgaggaatattgcacaatgggggcaaccctgatgcagcaacgccgcgtggaggaagaaggcccttgggtcgtaaactccttttctatgggacgagagaggacggtaccataggaataagtcacggctaactacg

SEQ ID NO: 5701 - DNA, 186 bp, unidentified
  misc_feature 1..186: note = Ascusbbf_147952, encodes 16S rRNA
  source 1..186: mol_type = genomic DNA
agagtttgatcatggctcagaacgaacgctggcggcaggcttattgggcaatggaggcaactctgacccagccatgccgcgtgagtgaagaaggttttcggattgtaaagctctttcagacgggaagatgatgacggtaccgtcagaagaagcaccggctaacttcgtgccagcagccgcggtaat

SEQ ID NO: 5702 - DNA, 490 bp, unidentified
  misc_feature 1..490: note = Ascusbbf_198654, encodes 16S rRNA
  source 1..490: mol_type = genomic DNA
agagtttgatcctggctcaggatgaacgctggcggcgtgcctaacacatgcaagtcgagcgagaaacctgcaattgacgcttcggttgattttgcaggcggaaagcggcggacgggtgagtaacgcgtaggcaacctgcccttcacacagggatagcctcgggaaaccgggattaaaacctgatgacaccgggacatcacatgttgatccggtcaaagatttatcggtgaaggatgggcctgcgtctgattagttagttggtgaggtaacggctcaccaaggcgacgatcagtagccgacctgagagggtgatcggccacattggaactgagacacggtccaaactcctacgggaggcagcagtggggaatattgcacaatgggggaaaccctgatgcagcaacgccgcgtgagcgaagaaggcggattcgtcgtaaagctctgtccttggggaagaagaactgacggtacccttggaggaagccccggc

SEQ ID NO: 5703 - DNA, 490 bp, unidentified
  misc_feature 1..490: note = Ascusbbf_431277, encodes 16S rRNA
  source 1..490: mol_type = genomic DNA
agagtttgatcatggctcaggatgaacgctagcgggaggcctaacacatgcaagccgagcggtagaagtccttcgggactttgagagcggcgtacgggtgcgtaacacgtgtgcaacctgcctttatcttggggatagcctttcgaaaggaagattaatacccactaatatattgattggcatcaattgatattgaaaactccggtggataaagatgggcacgcgcaagattagatagttggtgaggtaacggctcaccaagtcaatgatctttagggggcctgagagggtgatcccccacactggtactgagacacggaccagactcctacgggaggcagcagtgaggaatattggacaatgggtgaaagcctgatccagccatcccgcgtgaaggatgacggtcctatggattgtaaacttcttttgtacagggataaaccttcccacgtgtggggagctgaaggtactgtacgaataagcaccggct

SEQ ID NO: 5704 - DNA, 469 bp, unidentified
  misc_feature 1..469: note = Ascusbbf_294364, encodes 16S rRNA
  source 1..469: mol_type = genomic DNA
agagtttgatcctggctcagaacgaacgctggcggcaggcttaacacatgcaagtcgaacgatcccttcggggatagtggcagacgggtgagtaacacgtgggaatctacctggttcttcgggataacagttggaaacgactgctaataccggatacgcccttttggggagagatttatcggaatcggatgagcccgcgtaagattagctagatggtggggtaatggcccaccatggcgacgatctttagctggtctgagaggatgatcagccacactgggactgagacacggcccagactcctacgggaggcagcagtggggaatattggacaatgggggcaaccctgatccagccatgccgcgtgagtgatgaaggccttagggttgtaaagctctttcagtagggaagataatgacggtacctacacaagaagccccggctaacttcgtgccagcagccgcgtaat

SEQ ID NO: 5705 - DNA, 490 bp, unidentified
  misc_feature 1..490: note = Ascusbbf_213653, encodes 16S rRNA
  source 1..490: mol_type = genomic DNA
agagtttgatcatggctcaggacgaacgctggcggtgtgcttaacacatgcaagtggtgcgacgaaccagagcttgctctggggcaaagccgcgaacgggtgagtaacacgtgggtaatctaccccgatgaccgggacaacccgaggaaactcgggctaataccggatgtggtgtactggcataagccggtccactaaaggtagcttcggcttccgcattgggaggggcccgcggcccattagcttgttggtggggtcaaggcctaccaaggcaacgatgggtagctggtctgagaggacgatcagccacactgggactgagacacggcccagactcctacgggaggcagcagtggggaatcttgcgcaatgcgcgaaagcgtgacgcagcaacaccgcgtgagggaagacggccttagggttgtaaacctctttcagatgggacgaaggtgatgcggtgaatagccgatgtcattgacggtaccgtcag

SEQ ID NO: 5706 - DNA, 490 bp, unidentified
  misc_feature 1..490: note = Ascusbbf_935384, encodes 16S rRNA
  source 1..490: mol_type = genomic DNA
agagtttgatcatggctcaggatgaacgctggcggcgtgcctaacacatgcaagtcgaacggagattagttggaacggagcacttgtgctcagggaagattaattttagtggcggacgggtgagtaacacgtgagcaacctgccttggtcagggggataacaacgggaaaccgttgctaataccgcatgatatatctttacggcatcgtacgggatatcaaaggagcaatccggactgagatgggctcgcgtccgattagttagttggtggggtaatggcctaccaagactgcgatcggtagccggactgagaggttgaccggccacattgggactgagacacggcccagactcctacgggaggcagcagtggggaatattgggcaatgggggcaaccctgacccagcgacgccgcgtgaaggacgaaggtcttcgggttgcaaacttctttgatcgaggacgataatgacggtactcgaggaacaagcc

SEQ ID NO: 5707 - DNA, 490 bp, unidentified
  misc_feature 1..490: note = Ascusbbf_195552, encodes 16S rRNA
  source 1..490: mol_type = genomic DNA
agagtttgatcctggctcaggacgaacgctggcggtatgcttaacacatgcaagtcgaacgagacgagatggaaggaaccttcgggtgacggaaatcttagaaagtggcgaacgggtgagtaacgcgtgggtaacctgccctatggaaaggaatagcctcgggaaactgggagtaatgccttataatatagtgaagtcgcatggctttgctattaaacgctccggtgccataggatggacccgcgtcccattagctagttggtgagataacagctcaccaaggcgacgatgggtaaccggtctgagagggcgaacggtcacactggaactgagacacggtccagactcctacgggaggcagcagtggggaatattgcgcaatgggggcaaccctgacgcagcaataccgcgtgagtgaagaaggttttcggatcgtaaagctctgttattggggaagaaaaaagacggtacccaaggagaaagtcccggc

SEQ ID NO: 5708 - DNA, 352 bp, unidentified
  misc_feature 1..352: note = Ascusbbf_1815364, encodes 16S rRNA
  source 1..352: mol_type = genomic DNA
agagtttgatcatggctcaggacgaacgctggcggcgtgcttcatacatgcaagtcgaacgagaagctgacttcggtcagtggaaagtggcggacgggtgagtaatatgtaggaaatctgcctcagagagggggacaacagggggaaactcttgctaataccccatatgagcttggctgcaatgccaatcttgaaaactccggtgctctgagatgagcctgcatctgattagcttgttggcggtgtaatggaccaccaaggcgacgatcagtagctggtttgagaggatgatcagccacaatgggactgagacacggcccatactcctacgggagccagcagccgcggtaat

SEQ ID NO: 5709 - DNA, 490 bp, unidentified
  misc_feature 1..490: note = Ascusbbf_1745154, encodes 16S rRNA
  source 1..490: mol_type = genomic DNA
agagtttgatcctggctcagaacgaacgctggcggcgtgcctaacacatgcaagtcgagcgcgaaaagggcaacctgagtagagcggcgcacgggtgcgtaacacgtgggtaatctgccctggagattcagataaccatccgaaagggtggctaatacggaataagcccacggtctcttcggaggctgagggaaaaggtgacctctatttataagttaccacttcaggatgagcccgcggcccatcagcttgttggcggggtaatggcccaccaaggctacgacgggtagctggtctgagaggacgatcagccacactggaactgagacacggtccagactcctacgggaggcagcagtggggaattttgcgcaatgggcgaaagcctgacgcagcaacgccgcgtgtgtgatgaaggtcttcggatcgtaaagcactttcgaccgggaagaaaaagcgagtgctaatcagctcgtgttgacggtaccgg

SEQ ID NO: 5710 - DNA, 490 bp, unidentified
  misc_feature 1..490: note = Ascusbbf_1780735, encodes 16S rRNA
  source 1..490: mol_type = genomic DNA
agagtttgatcatggctcaggacgagcgctggcggcgtgcttaacacatgcaagtcgaacggagcgtttttgtttaatccttcgggaagcgacgaaaaggcttagtggcggacgggtgagtaacgcgtgagcaatctgccttggacagggggataacagttggaaacgactgctaataccgcataaagtaacggggaggcatctttctgttaccaaaggagaaatccggtacaagatgagctcgcgtccgattagatagttggcggggtaaaggcccaccaagtcgactatcggtagccggactgagaggttgaccggccacattgggactgagacacggcccagactcctacgggaggcagcagtggggaatattgggcaatgggcgaaagcctgacccagcaacgccgcgtgaaggacgaaggttttcggattgtaaacttctttgactgaggacgacacaaggacggtactcagaaaacaagccacg

SEQ ID NO: 5711 - DNA, 490 bp, unidentified
  misc_feature 1..490: note = Ascusbbf_698572, encodes 16S rRNA
  source 1..490: mol_type = genomic DNA
agagtttgatcctggctcaggatgaacgctagcgataggcttaacacatgcaagtcgaggggcagcagggctttcgggccgctggcgaccggcgcacgggtgcgtaacgcgtatgcaacttgccctacagagggggataacccgtcgaaagacggactaataccgcgtacacttgggaggaggcatctctttctaaggaaatgaaattcgctgtaggataggcatgcgtcccattagctagttggtgaggtaacggctcaccaaggcgacgatgggtaggggaactgagaggtttatcccccacactggtactgagacacggaccagactcctacgggaggcagcagtgaggaatattggtcaatggacgagagtctgaaccagccaagtcgcgtgaaggatgactgtcttatggattgtaaacttcttttgtatgggaataacatcacccacgtgtgggtgtctgcatgtaccatacgaataagcatcg

SEQ ID NO: 5712 - DNA, 490 bp, unidentified
  misc_feature 1..490: note = Ascusbbf_345436, encodes 16S rRNA
  source 1..490: mol_type = genomic DNA
agagtttgatcctggctcaggatgaacgctggcggcgtgcttaacacatgcaagtcgaacgctgaagcctggtgcttgcactgggtggatgagtggcgaacgggtgagtaacacgtgagtaacctgcccctgactctgggataagcctgggaaactgggtctaatactggatatgactgatcatcgcatggtggttggtggaaagagtttttggttggggatggactcgcggcctatcagcttgttggtgaggtagtggctcaccaaggcgacgacgggtagccggcctgagagggtgaccggccacactgggactgagacacggcccagactcctacgggaggcagcagtggggaatattgcacaatgggcgcaagcctgatgcagcgacgccgcgtgagggatgacggccttcgggttgtaaacctctttcagttaggaagaagcctttcggggtgacggtactagcagaagaagcgccggctaacta

SEQ ID NO: 5713 - DNA, 490 bp, unidentified
  misc_feature 1..490: note = Ascusbbf_222168, encodes 16S rRNA
  source 1..490: mol_type = genomic DNA
agagtttgatcctggctcagaacgaacgctggcggcgtggattaggcatgcaagtcgtacgagaaagcgtccttcggggcgtgagtacagtggcgaactggtgagtacaaggtgactaacctgcccttgagtgggggataacttcgggaaaccggagctaataccgcatagtctctttgccttgcgaggtaatgagtaaagcatttatgcgctcgaggatggggtcaccccccattagcttgttggtagggtaacggcctaccaaggctgcgatgggtagctggactgagaggttggccagccacactgggactgagatacggcccagactcctacggggggcagcagtctagaggcttcgacaatgcccgaaagggtgatcgagcgacgccgcgtgtgggatgacggtcttcggattgtaaaccacttttgtttgggaagaaggcttgtatcgtgaatatgagattgacggtaccaaacgaataagccc

SEQ ID NO: 5714 - DNA, 490 bp, unidentified
  misc_feature 1..490: note = Ascusbbf_943921, encodes 16S rRNA
  source 1..490: mol_type = genomic DNA
agagtttgatcctggctcaggacgaacgctggcggcgtgcctaacacatgcaagtcgaacggagttaagcccttcgggacttaacttagtggcgaacgggtgagtaacgcgtgagaaacctgcctttcagtgggggacaacagttggaaacgactgctaataccgcatgatacttcttgagggcatccttgagaagtcaaagctttatgtgctgaaagatggtctcgcgtctgattagctagttggtggggtaacggcccaccaaggcgacgatcagtagccggtctgagaggatgaacggccacattgggactgagatacggcccagactcctacgggaggcagcagtggggaatattgggcaatgggggaaaccctgacccagcaacgccgcgtgaaggaagaaggccttcgggttgtaaacttcttttaccagggacgaagaacgtgacggtacctggagaaaaagcaacggctaactacgtgccag

SEQ ID NO: 5715 - DNA, 490 bp, unidentified
  misc_feature 1..490: note = Ascusbbf_690143, encodes 16S rRNA
  source 1..490: mol_type = genomic DNA
agagtttgatcctggctcaggatgaacgctagctacaggcttaacacatgcaagtcgaggggcagcatggtcttagcttgctaaggccgatggcgaccggcgcacgggtgagtaacacgtatccaacctgccgtctactcttggacagccttctgaaaggaagattaatacaagatggcatcatgagtccgcatgttcacatgattaaaggtattccggtagacgatggggatgcgttccattagatagtaggcggggtaacggtccacctagtcttcgatggataggggttctgagaggaaggtcccccacattggaactgagacacggtccaaactcctacgggaggcagcagtgaggaatattggtcaatgggcgagagcctgaaccagccaagtagcgtgaaggatgactgccctatgggttgtaaacttcttttatacagggataaagtcgggaacgtgttcccgtttgtaggtactgtatgaat

SEQ ID NO: 5716 - DNA, 490 bp, unidentified
  misc_feature 1..490: note = Ascusbbf_1879192, encodes 16S rRNA
  source 1..490: mol_type = genomic DNA
agagtttgatcatggctcaggatgaacgctggcggcgtgcttaacacatgcaagtcgagcggagatataaaaaggaagcccttcggggtggaatttttacatcttagcggcggacgggtgcgtaacacgtgggtaacctgcccctatcactgggataacacactgaaaagtgtgctaataccagataatataagcttttggcatcattagcttatcaaagaatttcggatagggatgggcccgcgtctgattagctagttggtgaggtaacggctcaccaaggcaacgatcagtagccgacctgagagggtgatcggccacactggaactgagacacggtccagactcctacgggaggcagcagtggggaatattgcacaatgggcgaaagcctgatgcagcaacgccgcgtgagcgatgaaggccttcgggtcgtaaagctctgtcctatgggaagataatgacggtaccataggaggaagccccggct

SEQ ID NO: 5717 - DNA, 490 bp, unidentified
  misc_feature 1..490: note = Ascusbbf_1848530, encodes 16S rRNA
  source 1..490: mol_type = genomic DNA
agagtttgatcatggctcaggatcaacgctggcggcgtgcctaatgcatgcaagtcggacggggcgcctttcggggcgctcacgtggcggacgggtgaggaacgcgtggggaagctgccgtgcgcacgggggtagccatcggaaacggtgggtaattccggatacgctcgcgtcccgggtaggggatgtgaggaaagatcttcggatcggcgcacgaggcacctgcggccgattagctagacggtggggtaacggcctaccgtggcgatgatcggtagctggtctgagaggatgatcagccacacggggactgagacacggccccgactcctacgggaggcagcagcaaggaattttccgcaatgggcgcaagcctgacggagcaacgccgcgtgcgggaggacgcctttcggggtgtaaaccgctgttcgtggggacgaagcactgacggtacccacggaggaaggcccggctaactacgtgccagcag

SEQ ID NO: 5718 - DNA, 490 bp, unidentified
  misc_feature 1..490: note = Ascusbbf_537366, encodes 16S rRNA
  source 1..490: mol_type = genomic DNA
agagtttgatcctggctcagattgaacgctggcggcaggcctaatacatgcaagtcgaacggtaacataagaaaagcttgcttttcttgatgacgagtggcggacgggtgagtaagatttgggaagctacctgatagagggggacaacagttggaaacgactgctaataccgcatacagcctcagggtgaaagaagaaattcgctatcagatgtgcccaaacgggattagctagtaggtgaggtaaaggctcacctaggcgacgatctctagctggtctgagaggatgatcagccacattgggactgagacacggcccagactcctacgggaggcagcagtagggtatattgcacaatggacgcaagtctgatggagcaacgccgcgtgagtgaagaaggttttcggatcgtaaagctctgttgttggtgaagaaggatagaggtagtaactggcctttatttgacggtaatcaaccagaaagtcacggc

SEQ ID NO: 5719 - DNA, 490 bp, unidentified
  misc_feature 1..490: note = Ascusbbf_1004053, encodes 16S rRNA
  source 1..490: mol_type = genomic DNA
agagtttgatcctggctcaggacgaacgctggcggcgtgcctaacacatgcaagtcgagcgaagtttttaaagtgaatcccttcggggtgaaactttaattatcttagcggcggacgggtgagtaacgcgtgagaaacctgcctttcacaaaggaatagcctcgggaaactgggaataataccttatgatacttctacttcacatgaagaagaagttaaagcgtaaagcggtgaaagatggtctcgcgtcccattagctagttggtgaggtaatagctcaccaaggcgacgatgggtagccggcctgagagggtgaacggccacactggaactgagacacggtccagactcctacgggaggcagcagtggggaatattgcacaatggaggaaactctgatgcagcgacgccgcgtgaacgatgaaggctttcgggtcgtaaagttctgtccttggggacgataatgacggtacccaaggaggaagccccg

SEQ ID NO: 5720 - DNA, 489 bp, unidentified
  misc_feature 1..489: note = Ascusbbf_368775, encodes 16S rRNA
  source 1..489: mol_type = genomic DNA
agagtttgatcatggctcaggacgaacgctggcggcgtgcctaatacatgcaagtcgagcgggaaacttcggtttccagcggcgaacgggtgagtaacacgtgggcaacctgccctcaagcttgggataactccgggaaaccggggctaacaccaaataatcttttctctcgcatgagagaaaagtaaaagtttacacttgaggatgggcccgcggtgcattagcttgttggtgaggtaacggctcaccaaggcaacgatgcatagccgacctgagagggtgaccggccacactgggactgagacacggcccagactcctacgggaggcagcagtagggaattttccgcaatgggcgcaagcctgacggagcaacgccgcgtgagtgaagacggccttcgggttgtaaagctctgttcttggggaagaaacaaatgacggtacccaagcagaaagccccggctaactacgtgccagcagccgcggtaat

SEQ ID NO: 5721 - DNA, 490 bp, unidentified
  misc_feature 1..490: note = Ascusbbf_633227, encodes 16S rRNA
  source 1..490: mol_type = genomic DNA
agagtttgatcatggctcaggacgaacgctggcggcgtgcttaacacatgcaagtcgaacgatgaagccggggctttttgttttggtggattagtggcgaacgggtgagtaatacgtgagtaacctgcccttgtctttgggataagcctgggaaactgggtctaataccggatattctgcttttgccgcatggtgggggttggaaagattttttggatggggatgggctcacggcctatcagcttgttggtggggtgatggcctaccaaggcgtcgacgggtagccggcctgagagggtgaccggccacattgggactgagatacggcccagactcctacgggaggcagcagtggggaatattgcacaatggacgcaagtctgatgcagcgacgccgcgtgggggatgaaggctttcgggttgtaaactcctttcagtacagaagaagcatttttgtgacggtatgtgcagaagaagcgccggctaacta

SEQ ID NO: 5722 - DNA, 490 bp, unidentified
  misc_feature 1..490: note = Ascusbbf_1510063, encodes 16S rRNA
  source 1..490: mol_type = genomic DNA
agagtttgatcatggctcaggatgaacgctagcggcaggcctaacacatgcaagtcgaggggtagaggaagcttgcttccttgagaccggcgcacgggtgcgtaacgcgtatgcaatctgccttgtactgagggatagcccagagaaatttggattaatacctcatagcattatgaaatcgcatggttttataattaaagttccaacggtacaagttgagcatgcgtcccattagttagttggtaaggtaacggcttaccaagacgatgatgggtaggggtcctgagagggagatcccccacactggtactgagacacggaccagactcctacgggaggcagcagtgaggaatattggtcaatggacgcaagtctgaaccagccatgccgcgtgcaggatgaagcatctatggtgtgtaaactgcttttgtacgggaagaaacactcctacgtgtaggagcttgacggtaccgtaagaataaggatcggc

SEQ ID NO: 5723 - DNA, 490 bp, unidentified
  misc_feature 1..490: note = Ascusbbf_609566, encodes 16S rRNA
  source 1..490: mol_type = genomic DNA
agagtttgatcctggctcaggatgaacgctagcgacaggcctaacacatgcaagccgaggggtagcacaaagtagcaatacttgggtgacgaccggcgcacgggtgagtaacgcgtatgcaacctaccttctacaggggcataacccggagaaattcggactaataccccataatacagggactccgcctggagatatttgttaaagattaatcggtagaagatgggcatgcgttccattagccagttggtgaggtaacggctcaccaaagcaacgatggataggggaactgagaggtttatcccccacactggaactgagacacggaccagactcctacgggaggcagcagtgaggaatattggtcaatgggtgagagcctgaaccagccaagtcgcgtgaaggaagactgccttatgggttgtaaacttcttttataggagaataaaaaaggttatgtataacctattgcatgtatcctatgaataag

SEQ ID NO: 5724 - DNA, 490 bp, unidentified
  misc_feature 1..490: note = Ascusbbf_877372, encodes 16S rRNA
  source 1..490: mol_type = genomic DNA
agagtttgatcctggctcagagtgaacgctggcggcaggcctaacacatgcaagtcgagcggcagcgcggggcaacctggcggcgagcggcggacgggtgaggaacacatcggaatctacccagtcgtgggggataacgtagggaaacttacgctaataccgcatacgacctgagggtgaaagcaggggaccgcaaggccttgcgcgattggatgagccgatgtccgattagctggttggtgaggtaaaggctcaccaaggcgacgaccggtagctggtctgagaggatgatcagccacactggaactgagacacggtccagactcctacgggaggcagcagtggggaatattggacaatgggcgcaagcctgatccagccatgccgcgtgtgtgaagaaggccttcgggttgtaaagcacttttgttggggaagaaaagccgcgggttaataccctgtggttctgacggtacccaaagaataagcaccg

SEQ ID NO: 5725 - DNA, 481 bp, unidentified
  misc_feature 1..481: note = Ascusbbf_527308, encodes 16S rRNA
  source 1..481: mol_type = genomic DNA
agagtttgatcctggctcagaacgaacgctggcggcatgcctaacacatgcaagtcgaacgaaggcccctcttcggagggtgtccttagtggcggacgggtgagtaacgcgtgggaacctgcccagcagtacggaataactacgggaaactgtggctaataccgtatacgccctacgggggaaagtttttcgctgttggatgggcccgcgtcggattagcttgttggtggggtaatggcctaccaaggcgacgatccgtagctggtctgagaggatgatcagccacactgggactgagacacggcccagactcctacgggaggcagcagtggggaatattggacaatgggggaaaccctgatccagcaatgccgcgtgagtgaagaaggccttagggttgtaaaactctttcaccggggaagatgatgacggtacccggagaagaagccccggctaactccgtgccagcagccgcggtaat

SEQ ID NO: 5726 - DNA, 490 bp, unidentified
  misc_feature 1..490: note = Ascusbbf_322538, encodes 16S rRNA
  source 1..490: mol_type = genomic DNA
agagtttgatcctggctcaggatgaacgctggcggcgtgcttaacacatgcaagtcgaacggacttgtccaattggaagcggaagatgcttgcattcgaagcttccgcccgggcaagttagtggcggacgggtgagtaacgcgtggagaacctgcctttatctgggggataacagttagaaatgactgctaataccgcataagcgcacactggggcatcccagagtgtgaaaaactccggtggatagagatggctccgcgtcagattagccagttggcggggtaacggcccaccaaagcgacgatctgtagccggcctgagagggcgaccggccacattgggactgagacacggcccaaactcctacgggaggcagcagtggggaatattgcacaatgggggaaaccctgatgcagcgacgccgcgtgagtgatgacgtatttcggtatgtaaagctctatcagcagggaagaaaatgacggtacctgac

SEQ ID NO: 5727 - DNA, 490 bp, unidentified
  misc_feature 1..490: note = Ascusbbf_772199, encodes 16S rRNA
  source 1..490: mol_type = genomic DNA
agagtttgatcatggctcagaatgaacgctggtggcgtgcctaacacatgcaagtcgagcgagaacgctccttcgggagttagtaaagcggcggacgggtgagtaacgcgtaagaatctgccctttagtggagaataccttcgagaaatcgaagttaatactgcataagttccttcgggaagaaagatggcctctttgctgtcgctaagggatgagcttgcgtactattagcttgttggtggggtaaaggcctaccaaggcgatgatggttagccggcctgagagggtgtacggccacactggaacttagacacggtccagactcctacgggaggcagcagtgaggaatattgcgcaatgggcgaaagcctgacgcagcgacgccgcgtggaggatgaaggttttcggattgtaaactcctgttaagtgggaagaaaagcttggggttaatacccctaagtcatgacggtactacttgagaaagcaccgg

SEQ ID NO: 5728 - DNA, 372 bp, unidentified
  misc_feature 1..372: note = Ascusbbf_469879, encodes 16S rRNA
  source 1..372: mol_type = genomic DNA
agagtttgatcctggctcaggacgaacgctggcggcgtgcttcatacatgcaagtcgaacgagaatctctagcttgctagagaggaaagtggcggacgggtgagtaaaatgtagagaatctgcccttgagagggggacaacagttggaaacggctgctaataccccatatgagcgtacctgagatggtattcttgaaaactccggtgctcaaggatgagtctgcatctgattagctagttggcggggtaatggcccaccaaggcgacgatcagtagctggtttgagaggatgatcagccacaatggggacgaacaaatgacggtacccacagaggaagcaccggctaactccgtgccagcagccgcggtaat

SEQ ID NO: 5729 - DNA, 490 bp, unidentified
  misc_feature 1..490: note = Ascusbbf_575647, encodes 16S rRNA
  source 1..490: mol_type = genomic DNA
agagtttgatcatggctcaggatgaacgctagctacaggcttaacacatgcaagtcgaacggtaaggcttccttcgggaagcacacgagtggcgaacgggtgagtaacacgtgggtaacctgcccttgactgggggaaaaccggaggaaactccggctaataccgcataatgtgcactctcataagtgggtgtaccaaagctccggcggtcaaggatgggcccgcggcggattagcttgttggtggggtaacggcctaccaaggcaacgatccgtagctggtctgagaggacgatcagccacactgggactgagacacggcccagactcctacgggaggcagcagtggggaatcttgcgcaatgggcgaaagcctgacgcagcaatgccgcgtgagggaagacggccttagggttgtaaacctctttcagcagggacgaattcagacggtacctgcagaagaagccccggctaactacgtgccagcagcc

SEQ ID NO: 5730 - DNA, 247 bp, unidentified
  misc_feature 1..247: note = Ascusbbf_622350, encodes 16S rRNA
  source 1..247: mol_type = genomic DNA
agagtttgatcctggctcaggatgaacgctagctacaggcttaacacatgcaagtcgaggggcatcaggtatctagcttgctaggtatgctggcgaccggcgcacgggtgcgtaacacgtatccaacctgcccgcagctcagggacagcctttcgaaagaaagattaatacctgacggtctcttccggggacatccccggcagagtaaagattcatcggctaattccgtgccagcagccgcggtaat

SEQ ID NO: 5731 - DNA, 490 bp, unidentified
  misc_feature 1..490: note = Ascusbbf_1410197, encodes 16S rRNA
  source 1..490: mol_type = genomic DNA
agagtttgatcatggctcaggatgaacgctagcggcaggcctaatacatgcaagtcggacgggatttcggtgtagcttgctataccggatgagagtggcgcacgggtgcgtaacgcgtgagcaacctgcccatgtcagggggatagcccgttgaaagacggattaataccgcatgacacataagtaccgcatggttcttatgtcaaatatttataggacatggatgggctcgcgtggcattagctagttggtaaggtaacggcttaccaaggcaatgatgcctaggggctctgagaggagtgacccccacactggtactgagacacggaccagactcctacgggaggcagcagtagggaatattggtcaatgggcgggagcctgaaccagccatgccgcgtgcgggaagaaggccctatgggtcgtaaaccgcttttatacgggaacaaccgcagctacgtgtagctgtctgagtgtaccgtaggaataa

SEQ ID NO: 5732 - DNA, 490 bp, unidentified
  misc_feature 1..490: note = Ascusbbf_1153008, encodes 16S rRNA
  source 1..490: mol_type = genomic DNA
agagtttgatcatggctcaggacgaacgctggcggcgtgcctaacacatgcaagtcgagcggagccaatcgaacaatcccttcggggtgcgttggaggaagtttagcggcggacgggtgagtaacgcgtgagtaacctgcccataagagggggataacacagagaaatttgtgctaataccgcatatagatatttaattgcatgattaaatattgaaagatttatcgcttatggatggactcgcgtctgattagatagttggtgaggtaacggctcaccaagtcgacgatcagtagccgaactgagaggttgatcggccacattgggactgagacacggcccagactcctacgggaggcagcagtgggggatattgcgcaatgggggaaaccctgacgcagcaacgccgcgtgaaggaagaaggccttcgggttgtaaacttttgttgcaagggaagaaaaaaatgacggtaccttgtgaggaagccacg

SEQ ID NO: 5733 - DNA, 490 bp, unidentified
  misc_feature 1..490: note = Ascusbbf_1515000, encodes 16S rRNA
  source 1..490: mol_type = genomic DNA
agagtttgatcctggctcagaacgaacgctttcgacatgcttaacacatgcaagtcgtacggactgttttttttatagcaatataaaagaaatatgttagtggcaaacgggtgagtaatacatgagaacataccctgtaatcacggataatcattggaaacgatgtgtaatacgagataatgtggagacaccaaaggagaaatctgttatgggagtggctcgtggtagattagatagttggtagtgtaatggactaccaagtcaaagatctatagctggtctgagaggacggacagccacattgggactgagacacggcccagacttctacggaaggcagcagtggggaatattaggcaatgggagaaatcctgacctagcgatgtcgagtgaatgatgaaggactttggtctgtaaaattcttttgcaaaggaatattatgaaattactttgcgaataagcaccggctaacttcgtgccagcagccgcg

SEQ ID NO: 5734 - DNA, 490 bp, unidentified
  misc_feature 1..490: note = Ascusbbf_1635685, encodes 16S rRNA
  source 1..490: mol_type = genomic DNA
agagtgatcctggctcaggatgaacgctagctacaggcttaacacatgcaagtcgaggggaaacgacagagagtgcttgcacactttgggcgtcgaccggcgaatgggtgagtaacgcgtatccaacttgcccttgactgagggatagcccagtgaaaactgaattaatacctcatgttctcctcagacggcatcagacgaggagcaaagattaatcggtcaaggatggacccgcgtctgattagcttgttggtggggtaacggcctaccaaggcgacgatcagtagccgacctaagagggtgaccggccacattgggactgagacacggcccaaactcctacgggaggcagcagtggggaatattgcccaatgggggaaaccctgatgcagcgacgccgcgtgagtgaagaagtatttcggtatgtaaagctctatcagcagggaagaaaatgacggtacctgactaagaagccccggctaactacgtg

SEQ ID NO: 5735 - DNA, 490 bp, unidentified
  misc_feature 1..490: note = Ascusbbf_1009, encodes 16S rRNA
  source 1..490: mol_type = genomic DNA
agagtttgatcatggctcaggatgaacgctggcggcgtgcctaatacatgcaagtcgaacgggtgtagcaatacatcagtggcgaacgggtgagtaacacgttggtgacctgccccaaagatgggaatatcacctggaaacgggtggcaaaaccgaataagcttgactcagtcagagaaggtcaagtaaaagcgaaagctactttgggaggggcctgcggcccatcagttagttggtgagggtaacggcccaccaagacgaagacgggtaggggacctgagagggtggtcccccacaatggaactgaaacacggtccatacacctgcgggtggcagcagtagggaatattgcttaatgggcgaaagcctgaagcagcaacgccgcgtggacgaaggaggccttcgggtcgtaaagtccttttatgggggaaaaggaaggatggtaccccatgaataagtctcggctaactacgtgccagcagccgcggta

SEQ ID NO: 5736 - DNA, 490 bp, unidentified
  misc_feature 1..490: note = Ascusbbf_1673, encodes 16S rRNA
  source 1..490: mol_type = genomic DNA
agagtttgatcatggctcaggatgaacgctagctacaggcctaacacatgcaagtcgaggggcagcagatcgaaagcttgcttttgatgctggcgaccggcgaatgggtgagtcacgcgtgtccaacctgccttcagcccggggatagcccttggaaatgaggattaacacccgataggtgcgcattccgcatggcgtgcgcatgaaactggactggagatggggacgcgtcggattagcttgacggcggggcgacggcccaccgtggcgacgatccgcaggggttctgagaggaaggtcccccacactggcactgagacacgggccagactcctacgggaggcagcagtgaggaatattggtcaatggccgagaggctgaaccagccaagtagcgtgcaggacgacggccctacgggttgtaaactgcttttgcgggaggataaaggacactacgtgtagtgttttgcaggtatcccgtgaataaggac

SEQ ID NO: 5737 - DNA, 490 bp, unidentified
  misc_feature 1..490: note = Ascusbbf_5577, encodes 16S rRNA
  source 1..490: mol_type = genomic DNA
agagtttgatcatggctcaggatgaacgctagctacaggcttaacacatgcaagtcgaggggcagcatgggattagcttgctaatcctgatggcgaccggcgcacgggtgagtaacgcgtatccaaccttccccttactcagggatagcccgctgaaaggcggattaacacctgatggtttcattagatggcatctgacgatgaataaaggcttacggtaagggatggggatgcgtctgattagcttgttggcggggtaacggcccaccaaggcaacgatcagtaggggttctgagaggaaggtcccccacattggaactgagacacggtccaaactcctacgggaggcagcagtgaggaatattggtcaatgggcgagagcctgaaccagccaagtagcgtgcaggatgacggccctatgggttgtaaactgcttttgtacgggaataaagtgacctacgtgtaggtttttgcatgtaccgtaagaata

SEQ ID NO: 5738 - DNA, 490 bp, unidentified
  misc_feature 1..490: note = Ascusbbf_4841, encodes 16S rRNA
  source 1..490: mol_type = genomic DNA
agagtttgatcatggctcaggatgaacgctggcggcgtgcgtaacacatgcaagttgagcgacgacgtgcttgaagtggcaacatggaaagtacgagcggagcagcggacgggtgagtacaacatgagaagctgtcctgtggtgggggacaacgtctagaaatggacgctaataccccataggccgaaaggttaaagcagcaatgcgccactggaggtgctcgtgccctatcagctagttggtgaggtaacggctcaccaaggcgacgacgggtagccggcctgagagggtgtccggccacactgggactgagatacggcccagactcctacgggaggcagcagtggggaatattgggcaatgggagaaatcctgacccagcgacgccgcgtgaatgaagaaggccttcgggtcgtaaagttcttttatgcgggaagaaggaagtgacggtaccgcatgaataagccccggctaactacgtgccagcagc

SEQ ID NO: 5739 - DNA, 490 bp, unidentified
  misc_feature 1..490: note = Ascusbbf_75373, encodes 16S rRNA
  source 1..490: mol_type = genomic DNA
agagtttgatcatggctcaggacgaacgctggcggcgtgcctaatacatgcaagtagaacgctgaagtctggtgcttgcaccggatggatgagttgcgaacgggtgagtaacgcgtaggtaacctgcctggtagcgggggataactattggaaacgatagctaataccgcataacagtttttctcgcatgagaggagcttgaaaggagcaactgcttcactaccagatggacctgcgttgtattagctagttggtgaggtaacggctcaccaaggcgacgatacatagccgacctgagagggtgatcggccacactgggactgagacacggcccagactcctacgggaggcagcagtagggaatcttcggcaatgggggcaaccctgaccgagcaacgccgcgtgagtgaagaaggttttcggatcgtaaagctctgttgtaagtcaagaacaggtgtgagagtggaaagttcacactatgacggtagct

SEQ ID NO: 5740 - DNA, 490 bp, unidentified
  misc_feature 1..490: note = Ascusbbf_65315, encodes 16S rRNA
  source 1..490: mol_type = genomic DNA
agagtttgatcatggctcaggatgaacgctagcggcaggcttaacacatgcaagtcgaggggcagcgcgttgtagcaatacgatggcggcgaccggcggaagggtgcgtaacacgtgagcaacttgcccgcatctgggggaaaagcgatggaaacgccgtctaataccccataacaacagggaccgcatgatccccgtttgaaagaaattcggatgcggatgggctcgcgggacattagctagttggagtggtaacggcacaccaaggcgacgatgtctaggggttctgagaggaaggtcccccacattggaactgagacacggtccaaactcctacgggaggcagcagtgaggaatattggtcaatggacggaagtctgaaccagccatgccgcgtgaaggaataaggccctatgggtcgtaaacttcttttgtggcggagcaataaggcgtacgtgtacgccgatgagagtacgtcacgaataagcat

SEQ ID NO: 5741 - DNA, 490 bp, unidentified
  misc_feature 1..490: note = Ascusbbf_130824, encodes 16S rRNA
  source 1..490: mol_type = genomic DNA
agagtttgatcatggctcaggacgaacgctggcggcgtgcctaacacatgcaagtcgaacggagtacccgcaaatgaggcttcggccaaatgagcggaatgcttagtggcggacgggtgagtaacgcgtgagtaacctgccggggagagtggaataacacatcgaaaggtgtgctaataccgcatattgcatagcagtcacatggctgatatgtgaaagatttatcgctccctgatggactcgcgtctgattagctagttggtagggtagaggcctaccaaggcgacgatcagtagccggactgagaggttgaacggccacattgggactgagacacggcccagactcctacgggaggcagcagtggggaatattgcgcaatgggggcaaccctgacgcagcaacgccgcgtgaaggaagaaggtcttcggattgtaaacttttgtctttggtgaagatagtgacggtagccaaggaggaagccacggct

SEQ ID NO: 5742 - DNA, 490 bp, unidentified
  misc_feature 1..490: note = Ascusbbf_231894, encodes 16S rRNA
  source 1..490: mol_type = genomic DNA
agagtttgatcctggctcaggacgaacgctggcggcgtgcctaacacatgcaagtcgaacggagatattttgaatgaagacttcggttggatttcgatttatcttagtggcggacgggtgagtaacgcgtgagtaacctgcctttttgagggggataacatcgggaaatcgatgctaataccgcataaaattcaggattcgcatggattttgaatcaaaggagcaatccgcaaaaagatggactcgcgtccgattagccagttggtgaggtaacggctcaccaaagcaacgatcggtagccgggttgagagactgaacggccacattgggactgagacacggcccagactcctacgggaggcagcagtgggggatattgcacaatgggcgaaagcctgatgcagcaacgccgcgtgagggaagaaggttttcggattgtaaacctctgtccaaagggaagaaacaaatgacggtacctttggaggaagct

SEQ ID NO: 5743 - DNA, 490 bp, unidentified
  misc_feature 1..490: note = Ascusbbf_138702, encodes 16S rRNA
  source 1..490: mol_type = genomic DNA
agagtttgatcatggctcagattgaacgctagcgggatgctttacacatgcaagtcgaacggcagcgcggaacttcggttctggcggcgagtggcgaacgggtgagtaatgtatcggaacgtgcccagtagcgggggataactacgcgaaagcgtggctaataccgcatacgccctacgggggaaagagggggactcttcggagcctctcactattggagcggccgatatcagattagctagttggtggggtaatggcctaccaaggccgcgatctgtagctggtttgagaggacgaccagccacactgggactgagacacggcccagactcctacgggaggcagcagtggggaattttggacaatgggggcaaccctgatccagccatcccgcgtgtgcgatgaaggccttcgggttgtaaagcacttttggcagggaagaaaaggcgcaggctaataccctgtgctgctgacggtacctgcagaataa

SEQ ID NO: 5744 - DNA, 490 bp, unidentified
  misc_feature 1..490: note = Ascusbbf_185815, encodes 16S rRNA
  source 1..490: mol_type = genomic DNA
agagtttgatcctggctcaggacgaacgctggcggcatgcctaacacatgcaagtcgaacggagagttttcaccgtcgaagaggaagtgcttgcacggaattggagacaccgaaaaatcttagtggcggacgggtgagtaacgcgtgagcaacctggctttaagagggggacaacactgagaaatcagtgctaataccgcataagactcaagcatcgcatgatggaagagttaaaggagaaatccgcttaaagatgggctcgcgtcccattagttagttggcgaggtaacggctcaccaagacgacgatgggtagccggactgagaggttgaacggccacactgggactgagacacggcccagactcctacgggaggcagcagtggggaatattgggcaatgggcgaaagcctgacccagcaatgccgcgtgaatgaagaaggtcttaggattgtaaaattctgtcctatgggaagaaaaaaatgacggt

SEQ ID NO: 5745 - DNA, 490 bp, unidentified
  misc_feature 1..490: note = Ascusbbf_191129, encodes 16S rRNA
  source 1..490: mol_type = genomic DNA
agagtttgatcctggctcaggacgaacgctggcggcgtgcctaacacatgcaagtcgaacggagtaaggttcttcggaattttgcttagtggcgaacgggtgagtaacgcgtgagcaacctgcctctttgagggggataacaaccggaaacggttgctaataccgcataagaccacactgtcgcatggcagaggggtcaaaggagcaatccgcagagagaggggctcgcgtcccattaggtagacggcggggtaacggcccaccgtgccgacgatgggtagccgagctgagaggctgatcggccacactggaactgagacacggtccagactcctacgggaggcagcagtggggaatattgggcaatgggcgaaagcctgacccagcaacgccgcgtgagggaagaaggtcttcggattgtaaacctctgtccttggtgacgaaggaagtgacggtagccaaggaggaagccccggctaactacgtgcca

SEQ ID NO: 5746 - DNA, 490 bp, unidentified
  misc_feature 1..490: note = Ascusbbf_74753, encodes 16S rRNA
  source 1..490: mol_type = genomic DNA
agagtttgatcctggctcaggatgaacgctggcggcgtgcctaacacatgcaagtcgaacgattaaaccgccttcgggcggatataaagtggcgaacgggtgagtaacacgtgaccaacctaccccgcacatcgggacagccctccgaaagggggattaataccgaatactccgtatttttcgcatgattaatacgggaaagcttttgcggtgcgggatggggtcgcggcccatcaggtagtaggcggggcagcggcccgcctagccaacgacgggtagccgggttgagagaccgaccggccacattgggactgagatacggcccagactcctacgggaggcagcagtggggaatattgcgcaatgggggcaaccctgacgcagcaacgccgcgtgcgggatgaaggcattcgtgtcgtaaaccgctttcagcagggaagacatcgacggtacctgcagaagaagccccggctaactacgtgccagcagc

SEQ ID NO: 5747 - DNA, 490 bp, unidentified
  misc_feature 1..490: note = Ascusbbf_511694, encodes 16S rRNA
  source 1..490: mol_type = genomic DNA
agagtttgatcctggctcaggatgaacgctggcggcgtgcctaacacatgcaagtcgagcggggatgcgccaaagatgatgactcgtctgattcttagcgcatcttagcggcggatgggtgagtaacgcgtggacaacctgcccgcaacagggggataacagctggaaacggctgataataccgcatatgcacacggttccgcatgggactgggtggaaagatttatcggttgcggatgggtccgcgtcggattaactggttggtgaggtaacggcccaccaaggtgatgatccgtagccggcctgagagggcgaccggccacattgggactgagacacggcccaaactcctacgggaggcagcagtgggggatattgcacaatgggcgcaagcctgatgcagcgacgccgcgtgagcgaagaagtgcttcggtatgtaaagctctatcagcagggaagaagatgacggtacctgcagaagcagccccgg

SEQ ID NO: 5748 - DNA, 490 bp, unidentified
  misc_feature 1..490: note = Ascusbbf_599273, encodes 16S rRNA
  source 1..490: mol_type = genomic DNA
agagtttgatcctggctcaggacgaacgctggcggcgtgcttaacacatgcaagtcgagcggtaaggcctttcggggtacacgagcggcgaacgggtgagtaacacgtgagtaatctgcccttcactttgggataactaccggaaacggtggctaataccgaatatgacctccttctgcatggttgggggtggaaagttctggcggtgaaggatgtgctcgcggcctatcagcttgttggtgaggtaatggctcaccaaggcttcgacgggtagccggcctgagagggtgaccggccacactgggactgagacacggcccagactcctacgggaggcagcagtggggaatattggacaatgggcgaaagcctgatccagcaacgccgcgtgagggatgaatgccttcgggttgtaaacctctttcgcctgcgacgaagcgagagtgacggtagcaggtaaagaagcaccggccaactacgtgccagcagc

SEQ ID NO: 5749 - DNA, 490 bp, unidentified
  misc_feature 1..490: note = Ascusbbf_374531, encodes 16S rRNA
  source 1..490: mol_type = genomic DNA
agagtttgatcctggctcagaacgaacgctggcggcgtggattaggcatgcaagtcgtacgcgaaaccgggcttcggcctgggagtagagtggcgaactggtgagtacaaggtgactaacctgcccttgagtgggggataaccagccgaaaggttggctaataccgcatggtctctttggtctgcggaccaacgagtaaagcagtaatgcgctcgaggatggggtcaccccccattagcttgttggtagggtaatggcctaccaaagctgcgatgggtagctggactgagaggttgaccagccacactgggactgagatacggcccagactcctacggggggcagcagtctagaggcttcgacaatgcccgaaagggtgatcgagcgacgccgcgtgcgggatgacggtcttcggattgtaaaccgcttttacctgggaagaacgtgcgggtcgtgaacccgtgcttgacggtaccaggggaataagccc

SEQ ID NO: 5750 - DNA, 490 bp, unidentified
  misc_feature 1..490: note = Ascusbbf_350853, encodes 16S rRNA
  source 1..490: mol_type = genomic DNA
agagtttgatcctggctcaggacgaacgctggcggcgtgcctaacacatgcaagtcgagcgatgaaaatacaaatgatcccttcggggagaatgcgtgttggattagcggcggacgggtgagtaacacgtgagcaacctgcctatcacattgggatagcctcgggaaactgggattaataccgaatgaaacatagaattagcattaattcaatgtcaaagatttatcggtgatagatgggctcgcgtctgattagctagttggtgaggtaacggctcaccaaggcgacgatcagtagccggcctgagagggtgaacggccacattgggactgagacacggcccaaactcctacgggaggcagcagtggggaatattgcacaatggagggaactctgatgcagcgacgccgcgtgagcgaagaaggctttcgagtcgtaaagctctgtcctatgggaagataatgacggtaccataggaggaagccccggc

SEQ ID NO: 5751 - DNA, 472 bp, unidentified
  misc_feature 1..472: note = Ascusbbf_73439, encodes 16S rRNA
  source 1..472: mol_type = genomic DNA
agagtttgatcctggctcagaacgaacgctggcggcaggcttaacacatgcaagtcgaacgggcgtagcaatacgtcagtggcagacgggtgagtaacgcgtgggaatctacccagtggtttggaataactcagggaaacttgagctaataccggatacgcccttcgggggaaagatttatcgccattggaagagcccgcgtcggattagctagttggtggggtaatggcccaccaaggcgacgatccgtagctggtctgagaggatgatcagccacactgggactgagacacggcccagactcctacgggaggcagcagtggggaatattggacaatgggcgcaagcctgatccagccatgccgcgtgagtgatgaaggccttagggttgtaaagctctttcgcctgggaagataatgacggtaccaggagaagaagccccggctaacttcgtgccagcagccgcggtaat

SEQ ID NO: 5752 - DNA, 206 bp, unidentified
  misc_feature 1..206: note = Ascusbbf_82361, encodes 16S rRNA
  source 1..206: mol_type = genomic DNA
agagtttgatcatggctcagaatgaacgctggcggcatggattaggcatgcaagtcgagaatcttccgcaatgggcgcaagcctgacggagcgatgccgcgtgagggacggaggccttcgggtcgtgaacctctgtcgcccgggacgatgatgacggtaccgggaaaggaagccacggctaaccacgtgccagcagccgcggtaat

SEQ ID NO: 5753 - DNA, 490 bp, unidentified
  misc_feature 1..490: note = Ascusbbf_363834, encodes 16S rRNA
  source 1..490: mol_type = genomic DNA
agagtttgatcctggctcaggatgaacgctagcggcaggcctaatacatgcaagtcgaacgggatctaattttaagcttgcttaagattagtgagagtggcgcacgggtgcgtaacgcgtgagcaacctacccatatcagggggatagcccggagaaatccggattaacaccgcatgacacagcaatttcgcatgataatgctgttaaatatttataggatatggatgggctcgcgtgacattagctagttggtaaggtaacggcttaccaaggctacgatgtctaggggctctgagaggagaatcccccacactggtactgagacacggaccagactcctacgggaggcagcagtaaggaatattggtcaatggagggaactctgaaccagccatgccgcgtgcaggatgactgccctatgggttgtaaactgcttttatccaggaataaacctttctacgtgtagggagctgaatgtactggaagaat

SEQ ID NO: 5754 - DNA, 490 bp, unidentified
  misc_feature 1..490: note = Ascusbbf_188557, encodes 16S rRNA
  source 1..490: mol_type = genomic DNA
agagtttgatcctggctcaggatgaacgctagctacaggcttaacacatgcaagtcgaggggcagcatggcggtggcttgccaccgctgatggcgaccggcgcacgggtgcgtaacgcgtatccaatctacccatggctcggggatagccttctgaaaggaagattaatacccgatggtcttttccgggggcatccccggtgaagtaaagttgttttacggcgatggatgaggatgcgaccgattaggtagttggtggggtaacggcccaccaagccatcgatcggtaggggttctgagaggaaggtcccccacactggaactgagacacggtccagactcctacgggaggcagcagtgaggaatattggtcaatgggcggaagcctgaaccagccaagtagcgtgcgggaagacggccctatgggttgtaaaccgcttttgttcgggaataatttgggggacgtgtcccccattgcatgtaccgttcga

SEQ ID NO: 5755 - DNA, 470 bp, unidentified
  misc_feature 1..470: note = Ascusbbf_505249, encodes 16S rRNA
  source 1..470: mol_type = genomic DNA
agagtttgatcctggctcagaacgaacgctggcggcaggcttaacacatgcaagtcgaacgcatccttcggggtgagtggcagacgggtgagtaacgcgtgggaacgtgcccttcagtttgggataacccagggaaacttgggctaataccggatacgtgcgagagcagaaagatttatcgctgaaggatcggcccgcgtctgattagctagttggtgaggtaatggctcaccaaggcgacgatcagtagctggtctgagaggatgatcagccacattgggactgagacacggcccaaactcctacgggaggcagcagtggggaatattggacaatgggcgcaagcctgatccagccatgccgcgtgagtgatgaaggccttagggttgtaaagctctttcgtccgggacgataatgacggtaccggaagaagaagccccggctaacttcgtgccagcagccgcggtaat

SEQ ID NO: 5756 - DNA, 490 bp, unidentified
  misc_feature 1..490: note = Ascusbbf_731933, encodes 16S rRNA
  source 1..490: mol_type = genomic DNA
agagtttgatcatggctcaggacgaacgctggcggcgtgcctaatacatgcaagtcgaacgcactctcgttagattgaagaagcttgcttctgattgataacatttgagtgagtggcggacgggtgagtaacacgtgggtaacctgccctaaagtgggggataacatttggaaacagatgctaataccgcataaaacctagcaccgcatggtgcaaggttgaaagatggtttcggctatcactttaggatggacccgcggtgcattagttagttggtgaggtaaaggctcaccaagaccgtgatgcatagccgacctgagagggtaatcggccacactgggactgagacacggcccagactcctacgggaggcagcagtagggaatcttccacaatggacgaaagtctgatggagcaacgccgcgtgagtgaagaaggttttcggatcgtaaaactctgttgttggagaagaacgtatttgatagtaact

SEQ ID NO: 5757 - DNA, 490 bp, unidentified
  misc_feature 1..490: note = Ascusbbf_665112, encodes 16S rRNA
  source 1..490: mol_type = genomic DNA
agagtttgatcctggctcaggatgaacgctagcgacaggcttaacacatgcaagtcgaggggcagcatggatgtagcaatacatttgatggcgaccggcgcactggtgagtaacacgtatgcaacctgccccgcgcagggggataacccgcggaaacgcggcctaataccccgtaattcccgttgtcgcatgacatcgggctgaaaggagcgatccggcgcgggatgggcatgcggcgcattaggcagttggcggggtaacggcccaccaagccgtcgatgcgtaggggttctgagaggaaggtcccccacactggtactgagacacggaccagactcctacgggaggcagcagtgaggaatattggtcaatgggcggatgcctgaaccagccaagtcgcgtgagggacgacggccctacgggttgtaaacctcttttgcgggggagtaaccggcggcgctcgcgccgccctgagagtaccccgcgaata

SEQ ID NO: 5758 - DNA, 490 bp, unidentified
  misc_feature 1..490: note = Ascusbbf_1315779, encodes 16S rRNA
  source 1..490: mol_type = genomic DNA
agagtttgatcatggctcaggacgaacgctggcggcgtgcttaacacatgcaagtcgagcgaagcctttcctttcggggagagtgacttagcggcgaacgggtgagtaacacgtgggcaacctgcccttagctctgggataagcgatggaaacgtcgtctaataccggatatgacatggggacgcatgttcttgtgtggaaagattttttggctaaggatgggcccgcggcctatcagcttgttggtggggtagtggcctaccaaggcggcgacgggtaaccggcctgagagggcgaccggtcacactgggactgagacacggcccagactcctacgggaggcagcagtggggaatattgcacgatgggcgaaagcctgatgcagcgacgccgcgtgagggatgacggccttcgggttgtaaacctctttcagcagggacgaagcgagagtgacggtacctgcagaagaagcgccggccaactacgtgcc

SEQ ID NO: 5759 - DNA, 490 bp, unidentified
  misc_feature 1..490: note = Ascusbbf_1039910, encodes 16S rRNA
  source 1..490: mol_type = genomic DNA
agagtttgatcctggctcaggacgaacgctggcggcgtgcctaacacatgcaagtcgaacggagttacttaggacggaggattcgtccaaagacctttgtaacttagtggcgaacgggtgagtaacgcgtgagcaatctgcctcggagtgggggacaacagttggaaacgactgctaataccgcataatgtgtcgggagggcatccttctgataccaaagctttatgtgctctgagatgagctcgcgtctgattagatagttggtggggtaacggcctaccaagtcgacgatcagtagccggactgagaggttgaacggccacattgggactgagatacggcccagactcctacgggaggcagcagtggggaatattgggcaatgggggaaaccctgacccagcaacgccgcgtgaaggaagaaggccctcgggttgtaaacttcttttaccagggacgaaggaagtgacggtacctggagaaaaagcca

SEQ ID NO: 5760 - DNA, 265 bp, unidentified
  misc_feature 1..265: note = Ascusbbf_179683, encodes 16S rRNA
  source 1..265: mol_type = genomic DNA
agagtttgatcctggctcaggatgaacgctagctacaggcttaacacatgcaagtcgaggggcatcaggattctagcttgctagaattgctggcgaccggcgcacgggtgagtaacgcgtatccaacctggcccttagtagaggatagcccggcgaaagtcggattaaactgcttttataggggaataaagtgaggcacttgtgcctttttgtatgtaccctatgaataaggaccggctaattccgtgccagcagccgcggtaat

SEQ ID NO: 5761 - DNA, 490 bp, unidentified
  misc_feature 1..490: note = Ascusbbf_1624004, encodes 16S rRNA
  source 1..490: mol_type = genomic DNA
agagtttgatcatggctcaggatgaacgctggcggcgtgcttaacacatgcaagtcgaacgatgaagcctagcttgctgggtggattagtggcgaacgggtgagtaacacgtgagtaacctgcccttgactctgggataagcctgggaaactgggtctaatactggatatgacctgtcaccgcatggtggtgggtggaaagttttttatggttggggatggactcgcggcctatcagtttgttggtgaggtagtggctcaccaaggcgacgacgggtagccggcctgagagggtgaccggccacactgggactgggacacggcccagactcctacgggaggcagcagtggggaatattgcacaatgggcgcaagcctgatgcagcgacgccgcgtgagggatgacggccttcgggttgtaaacctctttcagttaggaagaagccttttaggtgacggtactagcagaagaagcgccggctaactacgtg

SEQ ID NO: 5762 - DNA, 490 bp, unidentified
  misc_feature 1..490: note = Ascusbbf_73725, encodes 16S rRNA
  source 1..490: mol_type = genomic DNA
agagtttgatcatggctcaggatgaacgctggcggcgtgcctaacacatgcaagtcgaacggagtcgttttggaaatctcttcggagatggaattctcgacttagtggcggacgggtgagtaacgcgtgagcaatctgcctttaagagggggataacagtcggaaacggctgctaataccgcataaagcatcaaattcgcatgtttttgatgccaaaggagcaatccgcttttagatgagctcgcgtctgattagctggttggcggggtaacggcccaccaaggcgacgatcagtagccggactgagaggttgaacggccacattgggactgagacacggcccagactcctacgggaggcagcagtggggaatattgcgcaatgggggaaaccctgacgcagcaacgccgcgtgattgaagaaggccttcgggttgtaaagatctttaatcagggacgaaaaaaatgacggtacctgaagaataagctcc

SEQ ID NO: 5763 - DNA, 490 bp, unidentified
  misc_feature 1..490: note = Ascusbbf_155492, encodes 16S rRNA
  source 1..490: mol_type = genomic DNA
agagtttgatcatggctcaggacgaacgctggcggcgtgcctaatacatgcaagtcgtgcgggccttgttgaaagcttgcttttaacaaggctagcggcggacgggtgagtaacacgtgggcaacctgcctgtaagaccgggataacgccgggaaaccggggctaataccggatagttttttcctccgtatggaggaaaaaggaaaggcggcttcggctgccacttacagatgggcccgcggcgcattagctagttggcggggtaacggcccaccaaggcaacgatgcgtagccgacctgagagggtgatcggccacattgggactgagacacggcccaaactcctacgggaggcagcagtagggaatcttccgcaatggacgaaagtctgacggagcaacgccgcgtgagtgaagaaggccttcgggtcgtaaaactctgttgctggggaagaacatgtgccgttcgaacagggcggcaccttgacggt

SEQ ID NO: 5764 - DNA, 490 bp, unidentified
  misc_feature 1..490: note = Ascusbbf_114270, encodes 16S rRNA
  source 1..490: mol_type = genomic DNA
agagtttgatcatggctcaggacgaacgctggcggcgtgcctaacacatgcaagtcgaacgaggtccatgcagtggcaacactgcggaagacctagtggcgaacgggtgagtaacacgtgaggaacctgccccgaagaccgggataaccctccgaaaggagggctaataccggatacccccttcagatcgcatgatttgatgaggaaatggattccgcttcgggagggcctcgcggcctatcagctagttggtggggtaacggcctaccaaggcatcgacgggtagctggtctgagaggacgatcagccacactgggactgagacacggcccagactcctacgggaggcagcagtggggaatcttgcgcaatgggcgaaagcctgacgcagcaacgccgcgtgggggatgaaggctttcgggttgtaaacccctttcagcagggacgaatcaagacggtacctgcagaagaagccccggctaactacgtg

SEQ ID NO: 5765 - DNA, 488 bp, unidentified
  misc_feature 1..488: note = Ascusbbf_5501, encodes 16S rRNA
  source 1..488: mol_type = genomic DNA
agagtttgatcctggctcaggatgaatgctggcggcatgcctaatacatgcaagtcgagcggtaacaggactagcttgctagttgctgacgagcggcggacggctgagtaacgcatgggaacgcaccccaaactgagggataacgcaccgaaaggtgtgctaataccgcatgtgatcttcggattaaagctttcgggcggtttgggagcggcctgtgtacgattagatagttggtgaggtaatggctcaccaagtcgacgatcgttagatggtttgagaggatgatcatccagactgggactgagacacggcccagactcctacgggaggcagcagtagggaatctttcacaatgggcgaaagcctgatggagcaatgccgcgtgcaggacgaaggccttcgggttgtaaactgcttttataagcgaggaatatgacggtaacttatgaataaggatcggctaactacgtgccagcagccgcggtaat

SEQ ID NO: 5766 - DNA, 490 bp, unidentified
  misc_feature 1..490: note = Ascusbbf_125002, encodes 16S rRNA
  source 1..490: mol_type = genomic DNA
agagtttgatcatggctcaggacgaacgctggcggcgtgcctaatacatgcaagtcgaacgaaactttcttacaccgaatgcttgcattcaccgtaagaagttgagtggcggacgggtgagtaacacgtgggtaacctgcctaaaagaaggggataacacttggaaacaggtgctaataccgtatatctctaaggatcgcatgatccttagatgaaagatggttctgctatcgcttttagatggacccgcggcgtattaactagttggtggggtaacggcctaccaaggtgatgatacgtagccgaactgagaggttgatcggccacattgggactgagacacggcccaaactcctacgggaggcagcagtagggaatcttccacaatggacgcaagtctgatggagcaacgccgcgtgagtgaagaaggtcttcggatcgtaaaactctgttgttagagaagaacacgagtgagagtaactgttcattc

SEQ ID NO: 5767 - DNA, 490 bp, unidentified
  misc_feature 1..490: note = Ascusbbf_135317, encodes 16S rRNA
  source 1..490: mol_type = genomic DNA
agagtttgatcctggctcaggatgaacgctagctacaggcttaacacatgcaagtcgcggggcagcagggcgtcagcttgctgacgttgctggcgaccggcgcacgggtgcgtaacgcgtatccaacctacccatgagtcaggaacagcccggcgaaagtcggattaatgcctgatgccgtgtgaagatggcatctgattcacacgaaaggcctcggccgctgatggatggggatgcgtacgattaggtagtaggcggggcaacggcccacctagccatcgatcgttaggggttctgagaggaaggtcccccacactggtactgagacacggaccagactcctacgggaggcagcagtgaggaatattggtcaatgggcgcgagcctgaaccagccaagtagcgtgcaggatgacggccctatgggttgtaaactgcttttatgcggggataaatcgcgggacgtgtcctgcgttgcaggtaccgcatga

SEQ ID NO: 5768 - DNA, 490 bp, unidentified
  misc_feature 1..490: note = Ascusbbf_16874, encodes 16S rRNA
  source 1..490: mol_type = genomic DNA
agagtttgatcatggctcaggacgaacgctggcggcgtgcctaatacatgcaagtcgagcgaatgacgagaagcttgcttctctgatttagcggcggacgggtgagtaacacgtgggcaacctgccctgtagactgggataacttcgggaaaccggagctaataccggataatccatttcacctcatggtgaaatgttaaaaggcgcatctcgcgtcactacaggatgggcccgcggtgcattagctagttggtggggtaacggcctaccaaggcaacgatgcatagccgacctgagagggtgatcggccacattgggactgagacacggcccaaactcctacgggaggcagcagtagggaatcttccacaatggacgaaagtctgatggagcaacgccgcgtgagtgatgaaggttttcggatcgtaaaactctgttgtaagggaagaacaagtacgttaggaaatgaacgtaccttgacggtacctta

SEQ ID NO: 5769 - DNA, 490 bp, unidentified
  misc_feature 1..490: note = Ascusbbf_40070, encodes 16S rRNA
  source 1..490: mol_type = genomic DNA
agagtttgatcatggctcaggacgaacgctggcggcgtgcttcaaacatgcaagtcgaacggagttaagtgaaagcttgcttttacttaacttagtggcggactggtgagtaacgcgtgaacaatctgcctatcacagggggataacagttggaaacgactgctaataccgcataagaccacagggtggcatcacctaggggtcaaaggagttaaatctggtgatagatgagtttgcgtatcattagctagttggtgagggtaacggcccaccaaggcaacgatgattagccgatctgagaggatgaccggccacactgggactgagatacggcccagactcctacgggaggcagcagttaggaatattgggcaatggaggaaactctgacccagcaacgccgcgtgaaggaagaaggttttcggactgtaaacttctgatctgagggaaaaagaaagtgatggtacctcaggagaaagccacggctaac

SEQ ID NO: 5770 - DNA, 490 bp, unidentified
  misc_feature 1..490: note = Ascusbbf_26240, encodes 16S rRNA
  source 1..490: mol_type = genomic DNA
agagtttgatcctggctcaggatgaacgctggcggcgtgcctaatacatgcaagtcgaacgggtacagctatgtactagtggcgaacgggtgagtaacacgttggtgacctgccccaaagatgggaatatcacctggaaacgggtggcaaaaccgaataagcttatgatagttagagagtcataagtaaaagagcgatctactttgggaggggcctgcggcccatcagttagttggtgagggtaacggcccaccaagacgaagacgggtaggggacctgagagggtggtcccccacaatggaactgaaacacggtccatacacctgcgggtggcagcagtagggaatattgctaaatgggcgaaagcctgaagcagcaacgccgcgtggacgaaggaggccttcgggtcgtaaagtccttttatgtgggaaaaggaaggatggtaccacatgaataagtctcggctaactacgtgccagcagccgcggta

SEQ ID NO: 5771 - DNA, 490 bp, unidentified
  misc_feature 1..490: note = Ascusbbf_30259, encodes 16S rRNA
  source 1..490: mol_type = genomic DNA
agagtttgatcctggctcagattgaacgctagcgggatgctttacacatgcaagtcgaacggcagcgcgggtcttcggacctggcggcgagtggcgaacgggtgagtaatatatcggaacgtgcccagtagcgggggataactacgcgaaagcgtggctaataccgcatacgccctacgggggaaagggggggatcgcaagacctctcactattggagcggccgatatcggattagctagttggtgaggtaaaggctcaccaaggctgcgatccgtagctggtttgagaggacgaccagccacactgggactgagacacggcccagactcctacgggaggcagcagtggggaattttggacaatgggggaaaccctgatccagccatcccgcgtgtgcgatgaaggccttcgggttgtaaagcacttttggcagggaagaaacggcgccggataatacctggcgcaactgacggtacctgcagaataagc

SEQ ID NO: 5772 - DNA, 487 bp, unidentified
  misc_feature 1..487: note = Ascusbbf_10191, encodes 16S rRNA
  source 1..487: mol_type = genomic DNA
agagtttgatcatggctcagaatgaacgttggcggcatggattaggcatgcaagtcgcgcgagaaccgagaaagcttgctttcgaggggacagcggcgaaagggagagtaacaggtagatacctaccctcaggtttgggatagcgtcgggaaactggcggtaataccaaataatatctccggatcaaagctccggcgcctgaggatgggtctgcttcctattagcttgttggtggggtaatggcctaccaaggctacgatgggtagcgggcgtgagagcgtggcccgtctcactgggactgagacactgcccagacacctacgggtggctgcagtcgagaatcttcggcaatggacgcaagtctgaccgagcgatgccgcgtgcgggatgaaggccttcgggttgtaaaccgctgtcagagggaaggaaattttgactgaacctcagaggaagggcgggctaagttcgtgccagcagccgcggtaat

SEQ ID NO: 5773 - DNA, 490 bp, unidentified
  misc_feature 1..490: note = Ascusbbf_13593, encodes 16S rRNA
  source 1..490: mol_type = genomic DNA
agagtttgatcatggctcagaacgaacgctggcggcgtgcttaacacatgcaagtcgaacgcgaaagcggcttcggccgtgagtagagtggcgcacgggtgagtaacgcgtagataacctgtcttcatattcgggataacacgccgaaaggggtactaataccggatacgcttgtatttcataggcaaggcaaggaaaggtggcctctacatgtaagctactgtatgaagaggggtctgcgtaccattagctagtaggtggggtaatggcctacctaggcgacgatggttagcgggtctgagaggatgatccgccacactggcactggaatacgggccagactcctacgggaggcagcagtgaggaatattgcgcaatgggggcaaccctgacgcagcgacgccgcgtgagtgaggaaggtcttcggatcgtaaagctctgtcaagagggaagaagtgctgggtggctaatatccgccctgtttgacggt

SEQ ID NO: 5774 - DNA, 490 bp, unidentified
  misc_feature 1..490: note = Ascusbbf_7524, encodes 16S rRNA
  source 1..490: mol_type = genomic DNA
agagtttgatcctggctcaggacgaacgctggcggcgtgcctaacacatgcaagtcgaacgagaatttataaaaagattccttcgggatgaaatttgtaaaggaaagtggcggacgggcgagtaacgcgtgaataacctgcccataagagtggaataatccgtggaaacgcggactaataccgcatatagagtatgaatcgcatggttaatacttgaaagatttatcgcttatggatggattcgcgtcagattagatagttggagaggtaacggctcaccaagtcgacgatctgtagccgaactgagaggttgatcggccgcattgggactgagacacggcccagactcctacgggaggcagcagtggggaatattgcgcaatggggggaaccctgacgcagcaacgccgcgtgcaggaagaaggtcttcggattgtaaactgttgtcgcaagggaagaagaagatgacggtaccttgtgagaaagtcac

SEQ ID NO: 5775 - DNA, 490 bp, unidentified
  misc_feature 1..490: note = Ascusbbf_66851, encodes 16S rRNA
  source 1..490: mol_type = genomic DNA
agagtttgatcatggctcaggatgaacgctagcggcaggcttaacacatgcaagtcgaggggcatcgcgaggtagcaatactttggcggcgaccggcgaaagggtgagtaacgcgtgagcaacatgcccttgagcgggggatagtcattggaaacgatgcgtaataccccgtaacacaatttcccgcatgggtggttgttgaaagatttatcgctcaaggattggctcgcgtaccattaggtagatggcggggtaacggcccaccatgccgacgatggttaggggttctgagaggaaggtcccccacattggaactgagacacggtccagactcctacgggaggcagcagtgaggaatattggtcaatggccgagaggctgaaccagccatgccgcgtgcgggaggacggccctatgggttgtaaaccgcttttgtcggggagcaataatcaccacgtgtggtgagacgagagtacccggcgaataagca

SEQ ID NO: 5776 - DNA, 490 bp, unidentified
  misc_feature 1..490: note = Ascusbbf_235419, encodes 16S rRNA
  source 1..490: mol_type = genomic DNA
agagtttgatcctggctcaggatgaacgctagctacaggcttaacacatgcaagtcgcggggtaacatgtcgagttcttcggaacctgacgatgacgaccggcgcacgggtgagtaacgcgtatccaacctgcctgttacccgggtatagcccgccgaaaggcggattaatccccgatgtgtccgatgacggcatcagaattggacgaaaggtttggcggtaacagatggggatgcgtctgattagcttgttggcggggtaacggcccaccaaggcaacgatcagtaggggttctgagaggaaggtcccccacattggaactgagacacggtccaaactcctacgggaggcagcagtgaggaatattggtcaatgggcgcaagcctgaaccagccaagtagcgtgcaggacgacggccctatgggttgtaaactgcttttatgcggggataaagtgagggacgtgtcccttattgtaggtaccgcatgaa

SEQ ID NO: 5777 - DNA, 490 bp, unidentified
  misc_feature 1..490: note = Ascusbbf_330788, encodes 16S rRNA
  source 1..490: mol_type = genomic DNA
agagtttgatcatggctcaggacgaacgctggcggcacgcttaacacatgcaagtcgaacgaggtccacggagcttgctcctgaagaccgagtggcgaacgggtgagtaacacgtgagaaacctgccccgaagaccgggataactcaccgaaaggtgagctaataccggataccttcacgacgtctcctggcgatgtgaagaaatggattccgctttgggagggtctcgcggcctatcagcttgttggtgaggtaacggctcaccaaggcgacgacgggtagctgttctgagaggaagatcagccacactgggactgagacacggcccagactcctacgggaggcagcagtggggaatcttgcgcaatgggcgaaagcctgacgcagcgatgccgcgtgcgggaagacggccttcgggttgtaaaccgctttcagcagggacgaaattgacggtacctgcagaagaagctccggccaactacgtgccagc

SEQ ID NO: 5778 - DNA, 490 bp, unidentified
  misc_feature 1..490: note = Ascusbbf_1617850, encodes 16S rRNA
  source 1..490: mol_type = genomic DNA
agagtttgatcctggctcaggatgaacgctagcgacaggcttaacacatgcaagtcgaggggcagcggggtgtagcaatacattgccggcgaccggcgcacgggtgagtaacgcgtatgcaacttacctatcagaggggaatagcccggcgaaagtcggattaatgccccataaaacaggggtcccgcatgggactatttgttaaagattcatcgctgatagataggcatgcgttccattaggcagttggcggggtaacggcccaccaaaccaacgatggataggggttctgagaggaaggtcccccacattggaactgagacacggtccaaactcctacgggaggcagcagtgaggaatattggtcaatggacgtgagtctgaaccagccaagtcgcgtgaaggaagaaggttctatggattgtaaacttcttttatacgggaataaagtgcgccacgtgtggtgttttgtatgtaccgtatgaataag

SEQ ID NO: 5779 - DNA, 488 bp, unidentified
  misc_feature 1..488: note = Ascusbbf_746, encodes 16S rRNA
  source 1..488: mol_type = genomic DNA
agagtttgatcatggctcagaacgaacgctggcggcaggcttaacacatgcaagttgaacgggattggaaggtagcttgctatttttcatgagagtagcgcactggtgagtaacacgtgggaacgtacctattggtgggggacaacagttggaaacgactgctaataccgcataagccctgagggggaaagattaattgccgatagatcggcccgcggaagattaggtagtaggtggggtaacggcctacctagccgacgatctatagctggtctaagaggacgatcagccacattggaactgagacacggtccagactcctacgggaggcagcagtgaggaatattgggcaatggaggcaactctgacccagccatgccgcgtgagtgatgaaggttttcggattgtaaagctctttcagatgagaagatgatgacggtatcatcagaagaagcaccggctaacttcgtgccagcagccgcggtaat

SEQ ID NO: 5780 - DNA, 490 bp, unidentified
  misc_feature 1..490: note = Ascusbbf_146686, encodes 16S rRNA
  source 1..490: mol_type = genomic DNA
agagtttgatcctggctcaggatgaacgctggcggcgtgcctaatacatgcaagtcgagcgaatggattgagagcttgctctcaagaagttagcggcggacgggtgagtaacacgtgggtaacctgcccataagactgggataactccgggaaaccggggctaataccggataacattttgaactgcatggttcgaaattgaaaggcggcttcggctgtcacttatggatggacccgcgtcgcattagctagttggtgaggtaacggctcaccaaggcaacgatgcgtagccgacctgagagggtgatcggccacactgggactgagacacggcccagactcctacgggaggcagcagtagggaatcttccgcaatggacgaaagtctgacggagcaacgccgcgtgagtgatgaaggctttcgggtcgtaaaactctgttgttagggaagaacaagtgctagttgaataagctggcaccttgacggtac

SEQ ID NO: 5781 - DNA, 490 bp, unidentified
  misc_feature 1..490: note = Ascusbbf_1463, encodes 16S rRNA
  source 1..490: mol_type = genomic DNA
agagtttgatcatggctcagattgaacgctggcggcaggcttaatacatgcaagtcgaacggtaacagtgaggaagcaattccttagctgacgagtggcggacgggtgagtaaagtttgggaatctgtcctgcagagggggatagcagctggaaacggctgataaaaccgcgtacgctctgaggaggaaagtgacgggatcagcgatgaccgtcagctgtagggtgagcccaaatgggattagctagtaggggtggtaaaggcacacctaggcgatgatctctagctggttttagcggatgaccagccacattggaactgagacacggtccaaactcctacgggaggcagcagtagggaatattgcacaatggagggaactctgatgcagccatgccgcgtgtgtgaagaaggccttcgggttgtaaagcacttttattatagagaagagtgggagtaataataagactgccatgagatgtaacataatg

SEQ ID NO: 5782 - DNA, 490 bp, unidentified
  misc_feature 1..490: note = Ascusbbf_19689, encodes 16S rRNA
  source 1..490: mol_type = genomic DNA
agagtttgatcctggctcaggatgaacgctagcgacaggcttaacacatgcaagtcgaggggcagcggggctggcaacagccgccggcgaccggcgcacgggtgagtaacacgtatgcgacctgcccgccacagggggataaccgggagaaatcccgactaataccgcgtaagcctacggggggcatcccccggaggtgaaagccacggcggtggcggatgggcatgcggggcattagctagacggcggggcaacggcccaccgtggcgacgatgcctaggggttctgagaggaaggtcccccacactggtactgagacacggaccagactcctacgggaggcagcagtgaggaatattggtcaatgggcgggagcctgaaccagccaagtcgcgtgagggatgaaggtcctatggattgcagacctcttttgccggggagcaacgtgcgccacgcgtggcgcagtgagagtacccggagaaaaagcatc

SEQ ID NO: 5783 - DNA, 490 bp, unidentified
  misc_feature 1..490: note = Ascusbbf_3390, encodes 16S rRNA
  source 1..490: mol_type = genomic DNA
agagtttgatcctggctcaggataaacgctggcggcgcgcataacacatgcaagtcgagcgagaggagtagcttcggttacgaatctagcggcggacgggtgagtaacacgtagacaacctgccttgtagagggggatagccggaagaagttccggataataccgcataatacattttaatcgcatgattggaatgggaaaggtgaataaccgctataagaggggtctgcgactgattagctagttggagtggtaacggcacaccaaggcgacgatcagtagccggtttgagagaatgaacggccacattgggactgagatacggcccagactcctacgggaggcagcagtggggaatattgcgcaatgggggaaaccctgacgcagcgacgccgtgtaaaggatgaaggtcttcggatcgtaaacttatatcgattgtgaaaagtaaggatggtagcaaagtaagaagccccggctaactacgtgccag

SEQ ID NO: 5784 - DNA, 490 bp, unidentified
  misc_feature 1..490: note = Ascusbbf_3571, encodes 16S rRNA
  source 1..490: mol_type = genomic DNA
agagtttgatcatggctcaggacgaacgctggcggcatgcctaacacatgcaagtcgaacggagttcgaggggcttgctccttgaacttagtggcggacgggtgagtaacgcgtgagtaacctgcctttcagtggggaataatattctgaaaagagtactaataccgcataacgtatagaagccgcatgacttttataccaaagatttatcgctgagagatggactcgcgtccgattagccagttggtgaggtaacggctcaccaaagcaacgatcggtagccggactgagaggttgaacggccacattgggactgagacacggcccagactcctacgggaggcagcagtgggggatattgtgcaatgggggaaaccctgacacagcaatgccgcgtgaaggatgaaggtcttcggattgtaaacttcttttgtcaaggacgataatgacggtacttgacgaataagctccggctaactacgtgccagca

SEQ ID NO: 5785 - DNA, 490 bp, unidentified
  misc_feature 1..490: note = Ascusbbf_45998, encodes 16S rRNA
  source 1..490: mol_type = genomic DNA
agagtttgatcctggctcaggacgaacgctggcggcgtgcctaacacatgcaagtcgaacggagtgaaagcagcttgctgctggagcttagtggcggacgggtgagtaacacgtgagtaacctgcctttcagaggggaataatgtttggaaacggacactaataccgcataacatacaatcaacgcatgttgaatgtatcaaaggagcaatccgctgaaagatggactcgcgtctgattagccagttggcggggtaacggcccaccaaagcgacgatcagtagccggactgagaggttgaacggccacattgggactgagacacggcccagactcctacgggaggcagcagtgggggatattgcacaatgggcgcaagcctgatgcagcaacgccgcgtgcaggaagacggtcttcggattgtaaactgttgtcctctgtgacgaaagatgacggtagcagaggaggaagccacggctaactacgtgcca

SEQ ID NO: 5786 - DNA, 490 bp, unidentified
  misc_feature 1..490: note = Ascusbbf_16650, encodes 16S rRNA
  source 1..490: mol_type = genomic DNA
agagtttgatcctggctcaggatgaacgctagctacaggcttaacacatgcaagtcgaggggcatcatgtatctggcttgccagatatgatggcgaccggcgcacgggtgcgtaacgcgtgttcgacctgccctttactcgggaacagcccatcgaaagatggattaatgcccgatgttctccttatgccgcatgacatttggagcaaagatttatcggtagaggatgggaacgcgtccgattagcttgacggcggggtaacggcccaccgtggcgacgatcggtaggggttctgagaggaaggtcccccacactggaactgagacacggtccagactcctacgggaggcagcagtgaggaatattggtcaatggccgtaaggctgaaccagccaagtagcgtgaaggatgactgccctatgggttgtaaacttcttttgtacgggaataacccggtccacgtgtggtccgctgcatgtaccgtacgaat

SEQ ID NO: 5787 - DNA, 470 bp, unidentified
  misc_feature 1..470: note = Ascusbbf_4926, encodes 16S rRNA
  source 1..470: mol_type = genomic DNA
agagtttgatcctggctcagaacgaacgctggcggcaggcttaacacatgcaagtcgaacggttccttcggggacagtggcagacgggtgagtaacacgtgggaatctacccagtccttcgggataactgatggaaacgtcagctaataccggatacgcccttatggggaaagatttatcgggattggatgagcccgcgtaagattagctagttggtggggtaatggcccaccaaggcgacgatctttagctggtctgagaggatgatcagccacactgggactgagacacggcccagactcctacgggaggcagcagtggggaatattggacaatgggcgcaagcctgatccagccatgccgcgtgagtgatgaaggccttagggttgtaaagctctttcaccggtgaagataatgacggtaaccggagaagaagccccggctaacttcgtgccagcagccgcggtaat

SEQ ID NO: 5788 - DNA, 490 bp, unidentified
  misc_feature 1..490: note = Ascusbbf_630747, encodes 16S rRNA
  source 1..490: mol_type = genomic DNA
agagtttgatcatggctcaggacgaacgctggcggcgtgcctaacacatgcaagtcgaacggagctaaggaagcttgcttccggagcttagtggcggacgggtgagtaacacgtgagtaacctgcctttcagaggggaataatgtttggaaacggacactaataccgcataacgtatctgaaccgcatgattcggataccaaaggagcaatccgctgaaagatggactcgcgtctgattagccagttggcggggtaacggcccaccaaagcgatggtcagtagccggactgagaggttgaacggtcacattgggactgagacacggcccagactcctacgggaggcagcagtgggggatattgcacaatgggcgcaagcctgatgcagcaacgccgcgtgcaggaagacggtcttcggattgtaaactgttgtcctctgtgacgataatgacggtagcagaggaggaagccacggctaactacgtgccag

SEQ ID NO: 5789 - DNA, 490 bp, unidentified
  misc_feature 1..490: note = Ascusbbf_7804, encodes 16S rRNA
  source 1..490: mol_type = genomic DNA
agagtttgatcatggctcaggacgaacgctggcggcgtgcttcatacatgcaagtcgaacgtgattttggtgcttgcaccaaatgaaagtggcggacgggtgagtaatgtgtagagaatctgcccttgagtgggggacaacagttggaaacgactgctaataccccatatgcgcgtagttgagatactattcgtgaaagatttattgctcaaggatgagtctgcatctgattagctagttgggggtgtaatggaccaccaaggcgacgatcagtagctggtttgagaggatgatcagccacaatgggactgagacacggcccatactcctacgggaggcagcagtagggaattttgcgcaatgggcgaaagcctgacgcagcaacgccgcgtgatcgtagacgcttttcggagtgtaaagatctgtcagtggggacgaattttgactgtacccacagaggaagcaccggctaactccgtgccagcagccg

SEQ ID NO: 5790 - DNA, 490 bp, unidentified
  misc_feature 1..490: note = Ascusbbf_20244, encodes 16S rRNA
  source 1..490: mol_type = genomic DNA
agagtttgatcctggctcaggatgaacgctggcggcgtgcctaatacatgcaagtcgaacggagcacttcggtgcttagtggcgaacgggtgagtaatatatgaacaacctacccctttgaccgggataacacactgaaaagcgtgctaataccggataggcgatcgagaggcatctcttgattattaaaggagcgcatgctccacattgggatgggttcatatcgcattagctagttggtgaggtaacggcccaccaaggcgatgatgcgtagccgatctgagaggatgaccggccacattgggactgagacacggcccagactcctacgggaggcagcagtagggaattttcggcaatgggcgcaagcctgaccgagcaacgccgcgtgaacgatgaaggtcttatggattgtaaagttctgttacgagggaagaacagcactgataggaaatgatcagtgtgtgacggtacctcgccagaaagccac

SEQ ID NO: 5791 - DNA, 490 bp, unidentified
  misc_feature 1..490: note = Ascusbbf_10077, encodes 16S rRNA
  source 1..490: mol_type = genomic DNA
agagtttgatcatggctcagaacgaacgctggcggcgcgtcttaagcatgcaagtcgaacggcaagaagagagcttgctctcttcctagagtggcggactggtgagtaacacgtgggtgacgtaccctttggacggggatagccgatagaaatatcgggtaataccggataaggacacacaggttggagctgtgtgtggaaagtagctacggctacgccgaaggaacggcctgcgacccatcagctagtaggtgaggtaagagcccacctaggcaatgacgggtatccggcctgagagggtgaacggacacattgggactgagatacggcccagactcctacgggaggcagcagctaagaatattccgcaatggacgaaagtctgacggagcgacgccgcgtggacgatgaaggccggaaggttgtaaagtccttttattattgaagaataatcagaagagggaatgcttctgaggtgaccgtagataat

SEQ ID NO: 5792 - DNA, 490 bp, unidentified
  misc_feature 1..490: note = Ascusbbf_228882, encodes 16S rRNA
  source 1..490: mol_type = genomic DNA
agagtttgatcatggctcaggatgaacgctagctacaggcttaacacatgcaagtcgaggggtaacatgatcggagcttgctccgattgatgacgaccggcgcacgggtgagtaacgcgtatccaacctgcccatgagtcagggataaccttccgaaagggagcctaatacctgatgttgtgcgatgatggcatcagagttgcaccaaagagttttgctcatggatggggatgcgtaggattaggcagtcggcggggtaacggcccaccgagccgacgatccttaggggttctgagaggaaggtcccccacactggtactgagacacggaccagactcctacgggaggcagcagtgaggaatattggtcaatggtcggaagactgaaccagccaagtagcgtgcaggacgacggccctacgggttgtaaactgcttttatgcggggataaagtcggggacgcgttccccgtttgcaggtaccgcatgaat

SEQ ID NO: 5793 - DNA, 485 bp, unidentified
  misc_feature 1..485: note = Ascusbbf_21459, encodes 16S rRNA
  source 1..485: mol_type = genomic DNA
agagtttgatcatggctcagaacgaacgctggcggcaggcttaacacatgcaagtcgaacggaacgtaggtagcttgctatctatgtcagtggcgcacgggtgagtaacgcgtaggaatctgtcctttagcctgggatagcctctggaaacggagggtaaaaccggatgagccctgagggggaaatgagaaatcagccgaaggaggagcctgcgttagattaggcagttggtggggtaatggcctaccaaaccgacgatctatagctggtctgagaggatgatcagccacattgggactgagacacggcccaaactcctacgggaggcagcagtggggaatattggacaatgggggagaccctgatccagccatgccgcgtgagtgatgacggccttcgggttgtaaagctcttttacatgggaagatgatgacggtaccatgagaataagcaccggcaaacttcgtgccagcagccgcggtaat

SEQ ID NO: 5794 - DNA, 490 bp, unidentified
  misc_feature 1..490: note = Ascusbbf_71572, encodes 16S rRNA
  source 1..490: mol_type = genomic DNA
agagtttgatcatggctcaggatgaacgctggcggcgtgcctaatacatgcaagtcgaacgaggtggatgggagcttgctccttgatacctagtggcgaacgggtgagtaacacgtaggtaacctgcccttaagcttgggatacccagaggaaactttggctaataccggataacaacagaagaggcatctcttttgtttgaaaggcccttcacggggtcacttaaggatggacctgcggcgcattagctagttggtgagataacagcccaccaaggcgaggatgcgtagccgacctgagagggtgatcggccacattggaactgagacacggtccaaactcctacgggaggcagcagtaaggagttttcggcaatgggggaaaccctgaccgagcaacgccgcgtgagtgatgacggccctatgggttgtaaagctctgttgtgagggacgaatgactagtcgaggaaatgcgattagtttgacggtac

SEQ ID NO: 5795 - DNA, 490 bp, unidentified
  misc_feature 1..490: note = Ascusbbf_24806, encodes 16S rRNA
  source 1..490: mol_type = genomic DNA
agagtttgatcatggctcaggatgaacgctggcggcgtgcctaacacatgcaagtcgagcgagaagttcatgaagaattcttcggaggacggattgagcggaaagcggcggacgggtgagtaacgcgtaggtaacctgccctgtacaaagggatagccactggaaacggtgattaataccttatgataccggacagtcacatggttgaccggtcaaagattttatcggtacaggatggacctgcgtctgattagttagttggtgaggtaacggctcaccaaggcgacgatcagtagccgacctgagagggtgatcggccacattggaactgagacacggtccaaactcctacgggaggcagcagtggggaatattgcacaatgggcgcaagcctgatgcagcaacgccgcgtgaacgaagaaggctcttgggtcgtaaagttctgttctgagggaagaagaaagtgacggtacctcaggagaaagccccg

SEQ ID NO: 5796 - DNA, 470 bp, unidentified
  misc_feature 1..470: note = Ascusbbf_715764, encodes 16S rRNA
  source 1..470: mol_type = genomic DNA
agagtttgatcatggctcagaacgaacgctggcggcaggcttaacacatgcaagtcgagcacctcagcaatgaggagcggcagacgggtgagtaacgcgtgggaatctacccatctctacggaacaactgcgggaaactggagctgataccgtatacgtccttcgggagaaagatttatcggagatggatgagcccgcgttggattagctagttagtagggtaatggcctaccaaggcgacgatccatagctggtctgagaggatgatcagccacactgggactgagacacggcccagactcctacgggaggcagcagtggggaatattggacaatgggcgcaagcctgatccagccatgccgcgtgagtgatgaaggccctagggttgtaaagctctttcaccggtgaagataatgacggtaaccggagaagaagccccggctaactacgtgccagcagccgcggtaat

SEQ ID NO: 5797 - DNA, 490 bp, unidentified
  misc_feature 1..490: note = Ascusbbf_69157, encodes 16S rRNA
  source 1..490: mol_type = genomic DNA
agagtttgatcctggctcagattgaacgctagcgggatgctttacacatgcaagtcgaacggcagcgcggacttcggtctggcggcgagtggcgaacgggtgagtaatatatcggaacgtgcccagtagcgggggataactacgcgaaagcgtggctaataccgcatacgccctacgggggaaagggggggatcgcaagacctctcactattggagcggccgatatcagattagctagttggtggggtaaaggcccaccaaggctgtgatctgtagctggtttgagaggacgaccagccacactgggactgagacacggcccagactcctacgggaggcagcagtggggaattttggacaatgggggaaaccctgatccagccatcccgcgtgtgcgatgaaggccttcgggttgtaaagcacttttggcagggaagaaacggcaccggctaataccgggtgtcactgacggtacctgcagaataagcac

SEQ ID NO: 5798 - DNA, 490 bp, unidentified
  misc_feature 1..490: note = Ascusbbf_22010, encodes 16S rRNA
  source 1..490: mol_type = genomic DNA
agagtttgatcatggctcaggattaacgctggcggcgtgcctaatacatgcaagtcgaatggtagcaataccatggcgaacgggtgagtaacacgtaggtaacctgtccttaagacgaggataaccattggaaacgatggataatactggataggagtgattgaggcatcttgattgctttaaagatttatcacttgaggaggggcctgcggcgcattagctagatggcggggtaatagcccaccatggcgatgatgcgtagccggactgagaggttgaacggccacaatggaactgagaacggtccatactcctacgggaggcagcagtagggaattttcggcaatgggcgaaagcctgaccgagcaacgccgcgtgaacgaagaagtatttcggtatgtaaagttcttttattggggaagaaaagataaagattgacggtacccaatgaataagctccggctaactacgtgccagcagccgcggtaat

SEQ ID NO: 5799 - DNA, 490 bp, unidentified
  misc_feature 1..490: note = Ascusbbf_58294, encodes 16S rRNA
  source 1..490: mol_type = genomic DNA
agagtttgatcatggctcagattgaacgctggcggcgtgcttaacacatgcaagtcgagcggtaacgcgggggcaaccctggcgacgagcggcgaacgggtgagtaatgcttcggaatcttcccggtggtggggaataacttggggaaactcaagctaataccgcatacgacctacgggtgaaagcaggggatcgcaagaccttgcgccattggatgagccgaagtcggattagctagttggtggggtaaaggcctaccaaggcgacgatccgtagctggtctgagaggacgaccagccacactgggactgagacacggcccagactcctacgggaggcagcagtggggaatattggacaatgggggaaaccctgatccagcgacgccgcgtgtgtgaagaaggcctgcgggttgtaaagcacttttagtagggatgaaaagccaagggctaatatcctttggtgttgacctaacctacagaaaaagcac

SEQ ID NO: 5800 - DNA, 490 bp, unidentified
  misc_feature 1..490: note = Ascusbbf_104018, encodes 16S rRNA
  source 1..490: mol_type = genomic DNA
agagtttgatcatggctcagaacgaacgctggcggcgcgtcttaagcatgcaagtcgagcggcaaggtaaagcttgctttaccctagagcggcggactggtgagtaacgcgtgggtgacgcaccccctcggcggggatagcctgcagaaatgcagggtaataccggataagccggcttccgttggaggggagccgggaaaggagccattgctccgcgaggggagcggcccgcgtcccatcagctagtaggcggtgtaacggaccacctaggctatgacgggtacccggcctgagagggcggacgggcacattgggactgagatacggcccagactcctacgggaggcagcagctaagaatattccgcaatgggcgaaagcctgacggagcgacgccgcgtggacgatgaaggccggaaggttgcagagtcctttggcgcgcgaggaaggaggggaggagtggaaagcctccccggtgactgtagcgcgag

SEQ ID NO: 5801 - DNA, 490 bp, unidentified
  misc_feature 1..490: note = Ascusbbf_133455, encodes 16S rRNA
  source 1..490: mol_type = genomic DNA
agagtttgatcctggctcaggataaacgctagcggcaggcctaacacatgcaagtcgagcggcagcacgaagtagcaatattttggtggcgagcggcggacgggtgagtaacgcgtatgcaacctgcccatcacacggagatagccgaccgaaaggacgattaaactccgatggcatcaagagggggcatccccatttgattaaatattcataggtgatggatgggcatgcgtggcattagttagttggcggggcaacggcccaccaagacgatgatgcctatgggttctaaaaggaagatcccacacatcggtactgagacacggaccgaactcctacgggaggcagcagtgaggaatattggacaatgggggcaaccctgatccagccaaaccgcgtgggggaaggaggccgttaaggtcgtaaaccccttttatatgggagcaatccgcttcatgtatggagcgttgagagtaccatttgaataagc

SEQ ID NO: 5802 - DNA, 490 bp, unidentified
  misc_feature 1..490: note = Ascusbbf_65575, encodes 16S rRNA
  source 1..490: mol_type = genomic DNA
agagtttgatcctggctcaggatgaacgctagctacaggcttaacacatgcaagtcgaggggcatcacgtgaggcagcaatgcatctgggtggcgaccggcgaatgggtgagtaacgagtatccaacctggcccatactcgggcacagccccgcgaaagcgggattaatgcccgatgcggcgtatttcccgcatgggaattacgtcaaaggtataaactggtatgggatggggatgcgtccgattagctagacggcggggtaacggcccaccgtggcgatgatcggtaggggttctgagaggaaggtcccccacattggaactgagacacggtccaaactcctacgggaggcagcagtgaggaatattggtcaatggccgcaaggctgaaccagccaagtagcgtgagggatgaccgccctatgggtcgtaaacctcttttgcgcgggaataatccgcactacgtgtagtgcgttgcatgtaccgtgcga

SEQ ID NO: 5803 - DNA, 468 bp, unidentified
  misc_feature 1..468: note = Ascusbbf_20773, encodes 16S rRNA
  source 1..468: mol_type = genomic DNA
agagtttgatcatggctcagaacgaacgctggcggcaggcctaacacatgcaagtcgaacgccccgcaaggggagtggcagacgggtgagtaacgcgtgggaacctacctagtggtacggaataactcggggaaacccgtgctaataccggataagcccgaaaggggaaagatttatcgccattagatgggcccgcgtcggattagcttgttggtgaggtaatggctcaccaaggcgacgatccgtagctggtctgagaggatgatcagccacactgggactgagacacggcccagactcctacgggaggcagcagtggggaatattggacaatgggggaaaccctgatccagccatgccgcgtgagtgacgaaggccttagggttgtaaagctcttttggcggggacgataatgacggtacccgcagaataagccccggctaacttcgtgccagcagccgcggtaat

SEQ ID NO: 5804 - DNA, 490 bp, unidentified
  misc_feature 1..490: note = Ascusbbf_102571, encodes 16S rRNA
  source 1..490: mol_type = genomic DNA
agagtttgatcctggctcaggacgaacgctggcggcgtgcttaaaacatgcaagtcgaacgggaagttgagaagcttgcttttcaacttctagtggcggacgggtgagtaacgcgtgagtaacctgcctactacaggggaataacacagagaaatttgtgctaataccgcataagaccacaggatggcatcatctaggggtcaaaggagcaatccggtagtagaggggcttgcgtctcattagcttgttggtggggtaacggcctaccaaggcaacgatgagtagccgatctgagaggatgaacggccacactggaactgagaaacggtccagactcctacgggaggcagcagttaggaatattgggcaatggaggaaactctgacccagcaacgccgcgtgaaggatgaaggttttcggattgtaaacttctgatctgagggaaaaagaaagcgatggtacctcaggagaaagccacggctaactacgt

SEQ ID NO: 5805 - DNA, 490 bp, unidentified
  misc_feature 1..490: note = Ascusbbf_394443, encodes 16S rRNA
  source 1..490: mol_type = genomic DNA
agagtttgatcatggctcaggacgaacgctggcggcgtgcctaatacatgcaagtcgagcgaaccaattgaaagcctagctttcatgaggttagcggcggacgggtgagtaacacgtgggtaacctgccctatagactgggataactcgcggaaacgcgtgctaataccggataacacatcagagtgcatactttgatgttgaaagatggttctgctatcactataggatgggcccgcggcgcattagcttgttggtggggtaacggcctaccaaggcgacgatgcgtagccgacctgagagggtgatcggccacactgggactgagacacggcccagactcctacgggaggcagcagtagggaatcttccacaatgggcgaaagcctgatggagcaacgccgcgtgagcgaagaaggtcttcggatcgtaaagctctgttgtaagggaagaacaagtgcagtagtaactggctgcaccttgacggtacc

SEQ ID NO: 5806 - DNA, 490 bp, unidentified
  misc_feature 1..490: note = Ascusbbf_113623, encodes 16S rRNA
  source 1..490: mol_type = genomic DNA
agagtttgatcctggctcaggatgaacgctggcggcgtgcataacacattcaagtcgaacggagttaagggcttcggtccttaacttagtggcggacgggtgagtaacgcgtgagcaacctgcccctgtgtgtgggataacgtctggaaacggacgctaataccgcatgaaccaacgggaccgcatgattctgttggcaaagatttattgcacagggatgggctcgcgtccgattagatagttggtggggcaacggcctaccaagtcgacgatcggtagccggactgagaggttgaacggccacattggaactgagagacggtccagactcctacgggaggcagcagtggggaatattgggcaatgggcgaaagcctgacccagcgacgccgcgtgaaggaagacggtcttcggattgtaaacttcttttatgtaggacgaagagagtgacggtactacaagaataagccacggctaactacgtgccagc

SEQ ID NO: 5807 - DNA, 490 bp, unidentified
  misc_feature 1..490: note = Ascusbbf_194010, encodes 16S rRNA
  source 1..490: mol_type = genomic DNA
agagtttgatcatggctcagaacgaacgctggcggcgcgtcttaagcatgcaagtcgagcggcaagctgccttcgggcagcctagagcggcggactggtgagtaacgcgtggatgacgcaccctcgcgacggggatagcctgtggaaacacagggtaataccggataagccgggcattgttggaggatgtccgggaaaggggctattgccccgcgggaggagcggtccgcgtcccatcagctggtaggcggtgtaacggaccacctaggcgatgacgggtacccggcctgagagggcggacgggcacattgggactgagatacggcccagactcctacgggaggcagcagctaagaatattccgcaatgggcgaaagcctgacggagcgacgccgcgtggacgatgaaggccggaaggttgcagagtcctttggcgcgcgaggaaggaggggaggaatggaaagcctccccggtgactgtagcgcgagaa

SEQ ID NO: 5808 - DNA, 490 bp, unidentified
  misc_feature 1..490: note = Ascusbbf_124726, encodes 16S rRNA
  source 1..490: mol_type = genomic DNA
agagtttgatcctggctcaggacgaacgctggcggcacgcttaacacatgcaagtcgaacggtgaagatgcttcggtatcggaacagtggcggacgggtgagtaacacgtgagcaatctgcctttaagagtggaatagcaactggaaacggttggtaataccgcataatatacatttaccgcatgatagatgtatcaaagatttatcgcttaaagatgagctcgcgtctgattagctagttggtgaggtaacggcccaccaaggcgacgatcagtagccggactgagaggttgaacggccacattgggactgagacacggcccagactcctacgggaggcagcagtggggaatattgcacaatgggcgcaagcctgatgcagcgatgccgcgtgagggaagaaggttttcggattgtaaacctctgttgacagggacgataatgacggtacctgttcagaaagctccggctaactacgtgccagcagccg

SEQ ID NO: 5809 - DNA, 490 bp, unidentified
  misc_feature 1..490: note = Ascusbbf_239868, encodes 16S rRNA
  source 1..490: mol_type = genomic DNA
agagtttgatcatggctcaggacgaacgctggcggcgtgcctaacacatgcaagtcgaacggagataatttgaatgaagatttcggttggaattcgttttatcttagtggcggacgggtgagtaacgcgtgagtaacctgccgatgagagtggaataacgttctgaaaagaacgctaataccgcataacatatcgaaaccgcatgattttgatatcaaagattttatcgctcatcgatggactcgcgtccgattagccagttggcggggtaacggcccaccaaagcaacgatcggtagccggactgagaggttgaacggccacattgggactgagacacggcccagactcctacgggaggcagcagtgggggatattgcgcaatgggggcaaccctgacgcagcaacgccgcgtgaaggatgacggtcttcggattgtaaacttcttttgttaaggacgaagaaagtgacggtacttaacgaataagctc

SEQ ID NO: 5810 - DNA, 490 bp, unidentified
  misc_feature 1..490: note = Ascusbbf_99590, encodes 16S rRNA
  source 1..490: mol_type = genomic DNA
agagtttgatcctggctcaggatgaacgctggcggcgtgcctaacacatgcaagtcgaacgggaaccatcggatcggagattcgtcaaagagagggtggttttagtggcggacgggtgagtaacgcgtgggtaacctgcctcaaagagggggataacagttggaaacgattgctaataccgcataagcgcacgttcccgcatgggaacgggtgaaaaggaattatcgctttgagatggacccgcgtctgattaactagttggtggggtaacggcccaccaaggttacgatcagtagccggactgagaggttggacggccacattgggactgagacacggcccaaactcctacgggaggcagcagtgggggatattgcacaatgggggaaaccctgatgcagcgacgccgcgtgggtgaagaagtttttcggaatgtaaagccctatcagcagggaagatgatgacggtacctgactaagaagccccggct

SEQ ID NO: 5811 - DNA, 490 bp, unidentified
  misc_feature 1..490: note = Ascusbbf_102028, encodes 16S rRNA
  source 1..490: mol_type = genomic DNA
agagtttgatcatggctcaggacgaacgctggcggcgtgcttaacacatgcaagtcgaacgatgaactgggtgcttgcacctggggattagtggcgaacgggtgagtaacacgtgagtaacctgccctggactctgggataaccccgagaaatcggagctaataccggataggaccctgtaccgcatggtgtggggtggaaagtttttcggtttgggatggactcgcggcctatcagcttgttggtgaggtaatggctcaccaaggcgtcgacgggtagccggcctgagagggtgaccggccacactgggactgagacacggcccagactcctacgggaggcagcagtggggaatattgcacaatgggcgcaagcctgatgcagcaacgccgcgtgcgggatgacggccttcgggttgtaaaccgcttttagtagggaagaagggcttcggcttgacggtacctgcagaaaaaggaccggctaactacgt

SEQ ID NO: 5812 - DNA, 490 bp, unidentified
  misc_feature 1..490: note = Ascusbbf_1560936, encodes 16S rRNA
  source 1..490: mol_type = genomic DNA
agagtttgatcctggctcaggatgaacgctggcggcgtgcttaacacatgcaagtcgaacggggtacccttgattgaggcttcggccgattgataggactacctagtggcggacgggtgcgtaacacgtgagtaacctgcccttcagagggggacaacagttggaaacgactgctaataccgcataacgtatgagtatcgcatggtacacataccaaagattttatcgctgaaggatggactcgcggccgattagctagttggtggggtaacggcctaccaaggcgacgatcggtagccggactgagaggttgaccggccacattgggactgagacacggcccagactcctacgggaggcagcagtggggaatattgcacaatgggcgcaagcctgatgcagcaacgccgcgttaaggatgaaggttttcggatcgtaaacttatgtcttcagggacgaaatttgacggtacctgaggaggaagccacgg

SEQ ID NO: 5813 - DNA, 490 bp, unidentified
  misc_feature 1..490: note = Ascusbbf_1817314, encodes 16S rRNA
  source 1..490: mol_type = genomic DNA
agagtttgatcctggctcaggatgaacgctggcggcgtgcttaacacatgcaagtcgaacgggcagagatcagagaagttttcggatggaactgaaggaagctagtggcggacgggtgagtaacgcgtaaacaatctgccttagagagggggataacagatagaaatatttgctaataccgcataagaccacgttagggcatcctaatggggtaaaaggaggaatccgctttaagatgagtttgcgtactattagctagttggtgaggtaacggcccaccaaggcaacgatggttagccggcctgagagggtgaacggccacattggaactgagaacggtccagactcctacgggaggcagcagtgaggaatattgggcaatggaggaaactctgacccagcaacgccgcgtgaaggaagaaggttttaggattgtaaacttctgttataggggaagaaaaggtgacggtaccctatgagaaagctacgg

SEQ ID NO: 5814 - DNA, 490 bp, unidentified
  misc_feature 1..490: note = Ascusbbf_431008, encodes 16S rRNA
  source 1..490: mol_type = genomic DNA
agagtttgatcatggctcagaacgaacgctggtagcgtggattaggcatgcaagtcgaacgggatccatgaagtagcaatacggattggtgagagtggcggaagggcgaggaacacgtgagcaacctgtccttgaggtggggaaaaccgttggaaacgacggctaataccgaatgtggcgcccggagacatctccggagcgctaaagggggcgaaagctctccctcttcgaggggctcgcgcaccatcagcttgttggcggggtaacggcccaccaaggcttacggttagctggtctgagaggatggccagccgcactgggactgagatactgcccagactcctacgggaggctgcagtcgaggatcattcgcaatgggggaaaccctgacgatgcgacgctgcgtggaggatgaaggccttcgggttgtaaactcctgtcatgatggaaaaggagaggggacctaatacgtcccttatttgatggtaca

SEQ ID NO: 5815 - DNA, 490 bp, unidentified
  misc_feature 1..490: note = Ascusbbf_191987, encodes 16S rRNA
  source 1..490: mol_type = genomic DNA
agagtttgatcatggctcaggatgaacgctagcggcaggcttaacacatgcaagtcgaggggcagcaggctgtagcaatacggtgctggcgaccggcgcaagggtgcgtaacgcgtgagcaacatacccgtcacagggggataagcgatggaaacgtcgtctaataccgcataaaacttagggcggcatcgtccggagttgaaacttacgagggtgacggattggctcgcgagacattagctagtcggcggggtaacggcccaccgaggctacgatgtctaggggttctgagaggaaggtcccccacactggaactgagacacggtccagactcctacgggaggcagcagtgaggaatattggacaatggccggaaggctgatccagccatgccgcgtgcaggaagacggtcctatggattgtaaactgcttttgtacgggagcaataagggcgtcgtgacgtccgatgagagtaccgtacgaataagca

SEQ ID NO: 5816 - DNA, 490 bp, unidentified
  misc_feature 1..490: note = Ascusbbf_105165, encodes 16S rRNA
  source 1..490: mol_type = genomic DNA
agagtttgatcctggctcaggacgaacgctggcggcgtgcctaacacatgcaagtcgaacggagtcatacgacggaagttttcggatggaagatgtattgacttagtggcggacgggtgagtaacgcgtgagtaacctgcctttcagagggggacaacatttggaaacgaatgctaataccgcataatgtatttttaccgcatgatagagataccaaaggagcaatccgctgaaagatggactcgcgtccgattagatagttggtgaggtaacggctcaccaagtcgacgatcggtagccggactgagaggttgaacggccacattgggactgagacacggcccagactcctacgggaggcagcagtgggggatattgcacaatgggcgaaagcctgatgcagcaacgccgcgtgagggaagacggttttcggattgtaaacctctgttcttagtgaagaaacaaatgacggtagctaagcagcaagcca

SEQ ID NO: 5817 - DNA, 490 bp, unidentified
  misc_feature 1..490: note = Ascusbbf_734888, encodes 16S rRNA
  source 1..490: mol_type = genomic DNA
agagtttgatcatggctcaggatgaacgctagcggcaggcttaacacatgcaagtcgaggggcagcgaggatagcaatatctgtcggcgaccggcggaagggtgagtaacgcgtgagcaacatgcccgcatcagggggatagtcactggaaacggtgcgtaataccccgtaacatcatgtgaggcatctcatatggttgaaagattaatcggatgcggattggctcgcgtgccattaggtagacggcggggtaacggcccaccgtgccgacgatggctaggggttctgagaggaaggtcccccacattggaactgagacacggtccagactcctacgggaggcagcagtgaggaatattggacaatggccgggaggctgatccagccatgccgcgtgatggagtaaggccctatgggtcgtaaacatcttttctcgggaggcaataagggccacgagctggtccgatgagagtacccggggaataagcat

SEQ ID NO: 5818 - DNA, 490 bp, unidentified
  misc_feature 1..490: note = Ascusbbf_929471, encodes 16S rRNA
  source 1..490: mol_type = genomic DNA
agagtttgatcatggctcaggatgaacgctagctacaggcttaacacatgcaagtcgcggggcagcatgtatctggcttgccagatatgatggcgaccggcgcacgggtgagtaacgcgtatccaacctgccccttaccacgggatagccctccgaaagggggattaataccgtatgtggccacgagacggcatccgaccgtggctaaaggtttagcggtaagggatggggatgcgtctgattagccagccggcggggtaacggcccaccggggcgacgatcagtaggggttctgagaggaaggtcccccacattggaactgagacacggtccaaactcctacgggaggcagcagtgaggaatattggtcaatgggcgcgagcctgaaccagccaagtagcgtgagggaagacggccctacgggttgtaaacctcttttgcgcggggataaactgcgccacgtgtggcgttttgcaggtaccgcgcgaat

SEQ ID NO: 5819 - DNA, 490 bp, unidentified
  misc_feature 1..490: note = Ascusbbf_93189, encodes 16S rRNA
  source 1..490: mol_type = genomic DNA
agagtttgatcctggctcaggatgaacgctagcgacaggcctaacacatgcaagtcgaggggtaacagggagcttgctccgctgacgaccggcgcacgggtgagtaacgcgtatgcaacctgcccgcaacattgggataatccggcgaaagtcggtctaataccgaatgatatcaattgatcgcatgtttaattgattaaagatttattggttgcggatgggcatgcgtagcattaggcagttggtgaggtaacggctcaccaaaccgacgatgcttaggggttctgagaggaaggtcccccacactggtactgagacacggaccagactcctacgggaggcagcagtgaggaatattggtcaatggacgcaagtctgaaccagccaagtcgcgtgcaggaagactgccctatgggttgtaaactgcttttatataggaataaagttagttacgtgtagctatttgcatgtactatatgaataaggatcg

SEQ ID NO: 5820 - DNA, 490 bp, unidentified
  misc_feature 1..490: note = Ascusbbf_278793, encodes 16S rRNA
  source 1..490: mol_type = genomic DNA
agagtttgatcatggctcaggatgaacgctggcggcgtgcttaacacatgcaagtcgaacggacttgttctaaaggcgagcgaagtgcttgcattgaactcaactgtgaacaagttagtggcggacgggtgagtaacgcgtgggtaacctgcctttatcagggggataacagttagaaatgactgctaataccgcataagcgcacagtgaggcatctcacggtgtgaaaagatttatcggatagagatggacccgcgttagattagccagttggcggggtaacggcccaccaaagcgacgatctatagccggcctgagagggcgaccggccacattgggactgagacacggcccaaactcctacgggaggcagcagtggggaatattgcacaatgggggaaaccctgatgcagcgacgccgcgtgagcgaagaagtatttcggtatgtaaagctctatcagcagggaagaaaatgacggtacctgactaa

SEQ ID NO: 5821 - DNA, 490 bp, unidentified
  misc_feature 1..490: note = Ascusbbf_731332, encodes 16S rRNA
  source 1..490: mol_type = genomic DNA
agagtttgatcctggctcaggacgaacgctggcggcgtgcctaacacatgcaagtcgagcggggatgcaaggaacggaggcttcggcagaagggagctgcattccagcggcggacgggtgagtaacgcgtgaacaatctgtcccgaacagggggataacacttggaaacaggtgctaataccgcataagaccacagcaccgcatggtggaggggtcaaaggagagatccggtttagggtgagttcgcgtctgattagatagttggtgaggtaacggcccaccaagtcaacgatcagtagccgacctgagagggtgatcggccacattggaactgagagacggtccaaactcctacgggaggcagcagtgggaatattgggcaatgggcgaaagcctgacccagcaacgccgcgtgagggaagaaggttttcggattgtaaacctctgttgtggatgacgaaggaagtgacggtaatccacaaggaagccc

SEQ ID NO: 5822 - DNA, 490 bp, unidentified
  misc_feature 1..490: note = Ascusbbf_1527014, encodes 16S rRNA
  source 1..490: mol_type = genomic DNA
agagtttgatcctggctcaggatgaatgctggcggcgtgcctaatacatgcaagtcgagcggtaacagggggtctcaccgtttccttgacacacctagcgctatgatcgtaggttgtgcaaatctcgagggaacagtgagaccctgctgacgagcggcggacggctgagtaacgcgtgggaacggaccccaaactgagggataactactcgaaagagtggctaataccgcatgtgatcttcggattaaagtcttcggacggtttgggactggcctgcgtacgattagatagttggtgaggtaatggctcaccaagtcgacgatcgttagatggtttgagaagatgatcatccagactgggactgagacacggcccagactcctacgggaggcagcagtagggaatctttcacaatgggcgaaagcctgatggagcaacgccgcgtgcaggatgacggccttcgggttgtaaactgcttttataaccgaga

SEQ ID NO: 5823 - DNA, 490 bp, unidentified
  misc_feature 1..490: note = Ascusbbf_36703, encodes 16S rRNA
  source 1..490: mol_type = genomic DNA
agagtttgatcctggctcaggatgaacgctggcggcgtgcttaacacatgcaagtcgaacgggaattactttattgaaacttcggtcgatttaatttaattctagtggcggacgggtgagtaacgcgtgggtaacctgccttatacagggggataacagtcagaaatgactgctaataccgcataagcgcacggaaccgcatggttctgtgtgaaaaactccggtggtataagatggacccgcgttggattagcttgttggcagggtaacggcctaccaaggcgacgatccatagccggcctgagagggtgaacggccacattgggactgagacacggcccagactcctacgggaggcagcagtggggaatattgcacaatgggggaaaccctgatgcagcgacgccgcgtgaaggaagaagtatctcggtatgtaaacttctatcagcagggaagatagtgacggtacctgactaagaagccccggcta

SEQ ID NO: 5824 - DNA, 490 bp, unidentified
  misc_feature 1..490: note = Ascusbbf_10846, encodes 16S rRNA
  source 1..490: mol_type = genomic DNA
agagtttgatcatggctcagattgaacgctggcggcaggcttaacacatgcaagtcgaacggtagcaggaagaagcttgcttctttgctgacgagtggcggacgggtgagtaatgcttgggaatctggcttatggagggggataactactggaaacggtagctaataccgcgtaatgtctaaggactaaagggtgggactttcgggccacctgccataagatgagcccaagtgggattaggtagttggtggggtaaaggcctaccaagccgacgatctctagctggtctgagaggatgaccagccacactggaactgagacacggtccagactcctacgggaggcagcagtggggaatattgcacaatggggggaaccctgatgcagccatgccgcgtgaatgaagaaggccttcgggttgtaaagttctttcggtgatgaggaaggcagataagttaatagcttatttgattgacgttagtcacagaag

SEQ ID NO: 5825 - DNA, 490 bp, unidentified
  misc_feature 1..490: note = Ascusbbf_1959, encodes 16S rRNA
  source 1..490: mol_type = genomic DNA
agagtttgatcctggctcaggatgaacgctagcggcaggcttaacacatgcaagtcgaggggtaacgcggggtagcaatactctggcgacgaccggcgcacgggtgcgtaacgcgtatgcaacctacctgtaacagggggataacggagggaaacttccactaataccccatattgttattctttcgcatgttgggatgacgaaagcttcggtggttacggatgggcatgcgtgacattaggtagttggtgaggcaacggctcaccaagccgacgatgtctaggggagctgagaggcttatcccccacactggtactgagacacggaccagactcctacgggaggcagcagtgaggaatattggtcaatggacggaagtctgaaccagccatgccgcgtggaggaagaaggtcctatgggttgtaaactccttttgttcgagagtaataagtgggatgcgtcccacgatgagagtatcggacgaataagc

SEQ ID NO: 5826 - DNA, 490 bp, unidentified
  misc_feature 1..490: note = Ascusbbf_6599, encodes 16S rRNA
  source 1..490: mol_type = genomic DNA
agagtttgatcatggctcaggacgaacgctggcggcacgcctaacacatgcaagtcgaacggacgagaaggagcttgcttcttcaagttagtggcggacgggtgagtaacacgtgagcaacctgcctttgagagggggatagcttctggaaacggatggtaataccccataacatacatttttcgcatggagagtgtatcaaatgaatttcgctcgaagatgggctcgcgtctgattagatagttggtgaggtaacggctcaccaagtcgacgatcagtagccggactgagaggttgaacggccacattgggactgagacacggcccagactcctacgggaggcagcagtggggaatattgcacaatgggggaaaccctgatgcagcgatgccgcgtggaggaagaaggttttcggattgtaaactccttttatgagggacgataatgacggtacctcaagaaaaagctccggctaactacgtgccagca

SEQ ID NO: 5827 - DNA, 490 bp, unidentified
  misc_feature 1..490: note = Ascusbbf_86522, encodes 16S rRNA
  source 1..490: mol_type = genomic DNA
agagtttgatcatggctcagaatgaacgctggcggcatggattaggcatgcaagtcgaacgagaaagcccgcaagggcgagtaaagtggcgaaagggtgagtaacacgtgagcaacctgcccccgagaccggaacaagcctgggaaaccgggtctgaaaccggatgaggaccgggaaggcatcttcccgcctccaaacattcatggctcggggatgggctcgcggcccattagctcgttggcggggtaacggcccaccaaggctacgacgggtaggtggtctgagaggatggtcacccacactgggactgagacactgcccagactcctacgggaggctgcagtcgagaatcttccgcaatgggcgaaagcctgacggagcgatgccgcgtgagggacgaaggccttcgggtcgtaaacctctgtcgcaggggacgaaacaaaatgacggtaccctgcaagaaagccacggctaactacgtgccagcagc

SEQ ID NO: 5828 - DNA, 490 bp, unidentified
  misc_feature 1..490: note = Ascusbbf_71021, encodes 16S rRNA
  source 1..490: mol_type = genomic DNA
agagtttgatcctggctcaggacgaacgctggcggcgtgcttaacacatgcaagtcgaacgctgaagcactagcttgctggtgtggatgagtggcgaacgggtgagtaacacgtgagcaacctgccctggactctgggataagcgctggaaacggtgtctaatactggatatgacctatcaccgcatggtgtgtaggtggaaagatttatcggtttgggatgggctcgcggcctatcagcttgatggtgaggtagtggctcaccatggcgacgacgggtagccggcctgagagggtgaccggccacactgggactgagacacggcccagactcctacgggaggcagcagtggggaatattgcacaatgggcgcaagcctgatgcagcaacgccgcgtgagggatgacggccttcgggttgtaaacctcttttagtagggaagaagccttttaggtgacggtacttgcagaaaaagcgccggctaactacg

SEQ ID NO: 5829 - DNA, 489 bp, unidentified
  misc_feature 1..489: note = Ascusbbf_62291, encodes 16S rRNA
  source 1..489: mol_type = genomic DNA
agagtttgatcctggctcagaacgaacgctggcggcatggattaggcatgcaagtcgaacgaagtagcaatacttagtggcgcaagggtgaggaacacgtgagtgacctacccgcaagtttggaacagctcctggaaacgggaattaataccggatgtgatcatatttctgcatggagatatgattaaagcagtaatgcgcttgcggctgggctcgcgtcccattagctagttggtgaggtaacggcccaccaaggccatgatgggtagctggtctgagaggacgaccagccacactgggactgagaactgcccagactcctacgggaggctgcagtcgagaattttgggcaatggacgaaagtctgacccagcaatgccgcgtgcgggatgaaggtcttcggattgtaaaccgctgtttggagggacgaaacttgacggtacttccagagaaagccacggctaactacgtgccagcagccgcggtaat

SEQ ID NO: 5830 - DNA, 472 bp, unidentified
  misc_feature 1..472: note = Ascusbbf_35830, encodes 16S rRNA
  source 1..472: mol_type = genomic DNA
agagtttgatcctggctcagagcgaacgctggcggcaggcttaacacatgcaagtcgaacgggtaccttcgggtgctagtggcagacgggtgagtaacacgtgggaacgtacctttcggttcggaataatacagggaaacttgtactaataccggatacgccctttgggggaaagatttatcgccgatagatcggcccgcgtctgattagctagttggtgaggtaatggctcaccaaggcgacgatcagtagctggtctgagaggatgatcagccacactgggactgagacacggcccagactcctacgggaggcagcagtggggaatattggacaatgggcgcaagcctgatccagccatgccgcgtgagtgatgaaggccttagggttgtaaagctcttttgtccgggaagataatgactgtaccggaagaataagccccggctaacttcgtgccagcagccgcggtaat

SEQ ID NO: 5831 - DNA, 490 bp, unidentified
  misc_feature 1..490: note = Ascusbbf_7538, encodes 16S rRNA
  source 1..490: mol_type = genomic DNA
agagtttgatcatggctcaggatgaacgctagcgacaggcctaacacatgcaagtcgaggggcagcggccggtagcaataccgggccggcgaccggcgaatgggtgagtaacgcgtatgcaacctttccgcgagacgggtatagccttccgaaagggagattaacccccggtagtcctggttccccgcatgagggaccaggtaaatatttatagcttgcgggtgggcatgcgtcccattaggcagttggcggggtaacggcccaccaaaccggcgatgggtaggggttctgagaggaaaatcccccacattggaactgagacacggtccaaactcctacgggaggcagcagtgaggaatattggtcaatgggcgaaagcctgaaccagccaagtcgcgtgcgggacgaaggccctacgggtcgtaaaccgcttttgtacgggaataaagtcagggacgcgtccctgtttgtaggtaccgtaagaataagg

SEQ ID NO: 5832 - DNA, 490 bp, unidentified
  misc_feature 1..490: note = Ascusbbf_132780, encodes 16S rRNA
  source 1..490: mol_type = genomic DNA
agagtttgatcctggctcaggatgaacgctggcggcgtgcctaacacatgcaagtcgagcgagaaactcatgaccaatacttcggttgcgtgattgagcggaaagcggcggacgggtgagtaacgcgtaggcaacctgccctttgcagagggatagcctcgggaaaccgggattaaaacctcataacgcatcagccggacatccggcagatgccaaagatttatcggcagaggatgggcctgcgtctgattagttagttggtggggtaacggcctaccaaggcgacgatcagtagccgacctgagagggtgatcggccacattggaactgagacacggtccaaactcctacgggaggcagcagtggggaatattgcacaatgggcgaaagcctgatgcagcaacgccgcgtgaaggatgaaggcccttgggtcgtaaacttctgttctaagggaagataatgacggtaccttaggagcaagtcccggcta

SEQ ID NO: 5833 - DNA, 488 bp, unidentified
  misc_feature 1..488: note = Ascusbbf_8073, encodes 16S rRNA
  source 1..488: mol_type = genomic DNA
agagtttgatcctggctcagaacgaacgctggcggcaggcttaacacatgcaagttgaacgggattcattagtagcttgctattgatgatgagagtggcgcacgggtgagtaatacgtgggaacgtacctagtagttcggaacaactgatggaaacgtcagctaataccggataagccctgagggggaaagatttatcgctattagaacggcccgcggcagattaggcagttggtggggtaaaggcctaccaaacctacgatctgtagctggtctgagaggacgatcagccacattgggactgagacacggcccagactcctacgggaggcagcagtgaggaatattgggcaatgggggcaaccctgacccagccatgccgcgtgagtgaagaaggttttcggattgtaaagctctttcgggagagaagatgatgacggtatctccagaagaagccccggcaaacttcgtgccagcagccgcggtaat

SEQ ID NO: 5834 - DNA, 490 bp, unidentified
  misc_feature 1..490: note = Ascusbbf_1340931, encodes 16S rRNA
  source 1..490: mol_type = genomic DNA
agagtttgatcctggctcaggatgaacgctagcggcaggcttaacacatgcaagtcgaggggtaacgcggggtagcaatactctggcgacgaccggcgcacgggcgcgtaacgcgtatgcaacctacctgtaacaggggtataacggagagaaatttccactaatcccccatattgttagagattcgcatgtttctctaacgaaagcttcggtggttacggatgggcatgcgtgacattagctagttggtaaggtaacggcttaccaaggcgacgatgtctaggggggctgagaggctgacccccaaaacgggtccggggaaacggacaagattccaacgggaggcagcagtgaggaatattggtcaatggacggaagtctgaaccagccatgccgcgtggaggaagaaggtcctatgggttgtaaactccttttgttcgagagtaataagaggcttgcgagcctcgatgagagtatcggacgaataagc

SEQ ID NO: 5835 - DNA, 490 bp, unidentified
  misc_feature 1..490: note = Ascusbbf_21624, encodes 16S rRNA
  source 1..490: mol_type = genomic DNA
agagtttgatcctggctcaggatgaacgctggcggcatgcctaagacatgcaagtcgaacgaggtggcccatagaagatggagtgcttgcacaaagttggaaatggtttaccacctagtggcagacgggtgagtaacacgtaggtgacctgccctttagatggggataacaattggaaacgattgataataccgaataagatataagagtcaatcttatattgaaaggagcctttaaagcttcgcttaaggatgggcctgcggcgtattaactagttggtggggtaatggcctaccaaggtaacgatgcgtagccgaactgagaggttgatcggccacactgggactgagacacggcccagactcctacgggagacagcagttaggaatattcgtcaatgggggaaaccctgaacgagcaatgccgcgtgagtgatgaaggtctttggattgtaaaactctgttgtatggaaaaaatgattaggttagga

SEQ ID NO: 5836 - DNA, 490 bp, unidentified
  misc_feature 1..490: note = Ascusbbf_74368, encodes 16S rRNA
  source 1..490: mol_type = genomic DNA
agagtttgatcctggctcaggatgaacgctggcggcgtgcctaacacatgcaagtcgaacgggacttattgagacgatttcggtctgatcattaagtttagtggcggacgggtgagtaacgcgtggacaacctgcctttcacagggggatagcagctggaaacggctggtaataccgcatacgctcatgccaccgcatggtggtgtgaggaaagatttatcggtgaaagatggatccgcgtctgattagccagttggcggggtaacggcccaccaaagcgacgatcagtagccggcctgagagggcggacggccacattgggactgagacacggcccagactcctacgggaggcagcagtgggggatattgcacaatgggcgcaagcctgatgcagcgacgccgcgtgagtgaagaagtatttcggtatgtaaagctctatcagcagggaagaaaggcccgcaagggagatgacggtacctgactaagaa

SEQ ID NO: 5837 - DNA, 490 bp, unidentified
  misc_feature 1..490: note = Ascusbbf_32155, encodes 16S rRNA
  source 1..490: mol_type = genomic DNA
agagtttgatcctggctcaggacgaacgctggcggcgtgcctaacacatgcaagtcgaacggagttacgagacttcggttttgtaacttagtggcggacgggtgagtaacgcgtgagcaacctgccttacagagggggatagccattggaaacgatggataataccgcataacgtatggtcatggcatcttgatcataccaaaggagcaatccgctgtaagatgggctcgcgtccgattagatagttggcggggtaacggcccaccaagtcgacgatcggtagccggactgagaggttgaacggccacattgggactgagacacggcccagactcctacgggaggcagcagtgagggatattgcacaatgggcgaaagcctgatgcagcaacgccgcgtgaaggatgacggttttcggattgtaaacttctgttctaagtgaagataatgacattagcttaggagaaagccacggctaactacgtgccag

SEQ ID NO: 5838 - DNA, 490 bp, unidentified
  misc_feature 1..490: note = Ascusbbf_487771, encodes 16S rRNA
  source 1..490: mol_type = genomic DNA
agagtttgatcatggctcaggatgaacgctagcggcaggcttaacacatgcaagtcgcggggcagcgagggtagcaatacctgtcggcgacctgcggaagggtgcgtaacgcgtgagcaacttgcccgtggttgggggataaccggtggaaacgccgcctaataccccgtaacaattggaatcacatgtttctgatttgatagccttaaggtgtccacggataggctcgcgtccgattagccagttggcggggcaacggcccaccaaagctacgatcggtaggggatctgagaggatggccccccacattgggactgagacacggcccaaactcctacgggaggcagcagtgaggaatattggtcaatgggcggaagcctgaaccagccatgccgcgtgcgggatgtaggtcctatggattgtgaaccgcttttgcagtggagcaataaggtggtcgtgaccagcgatgagagtacactgcgaataagca

SEQ ID NO: 5839 - DNA, 472 bp, unidentified
  misc_feature 1..472: note = Ascusbbf_11684, encodes 16S rRNA
  source 1..472: mol_type = genomic DNA
agagtttgatcctggctcagaacgaacgctggcggcatgcctaacacatgcaagtcgcacggtcctttcgggggcagtggcgaacgggtgagtaacgcgtgggaacctaccctggagtgggggataaccactggaaacggtggctaataccgcatatgccctgcggggcaaagcagcaatgcgctcttggaggggcccgcgtccgattagctagttggtggggtgacggcctaccaaggctgcgatcggtagctggtctgagaggatgatcagccacactgggactgagacacggcccagactcctacgggaggcagcagtggggaatattggacaatgggcgcaagcctgatccagcaatgccgcgtgcgtgatgaaggccttcgggttgtaaagcgctttcgcccacgacgatgatgacggtagtgggagaagaagccccggctaactccgtgccagcagccgcggtaat

SEQ ID NO: 5840 - DNA, 490 bp, unidentified
  misc_feature 1..490: note = Ascusbbf_9836, encodes 16S rRNA
  source 1..490: mol_type = genomic DNA
agagtttgatcctggctcaggacgaacgctggcggcgtgcctaacacatgcaagtcgaacggagcgaaagaagcttgcttctggagcttagtggcggacgggtgagtaacacgtgagtaacctgcctttcagaggggaataatgtctggaaacggacactaataccgcataatatattggaatcgcatgattttgatatcaaaggagcaatccgctgaaagatggactcgcgtctgattagccagttggcggggtaacggcccaccaaagcgacgatcagtagccggactgagaggttgaacggccacattgggactgagacacggcccagactcctacgggaggcagcagtgggggatattgcacaatggggggaaccctgatgcagcaacgccgcgtgcaggaagacggtcttcggattgtaaactgttgtcctctgtgacgataatgacggtagcagaggaggaagccacggctaactacgtgccag

SEQ ID NO: 5841 - DNA, 490 bp, unidentified
  misc_feature 1..490: note = Ascusbbf_162254, encodes 16S rRNA
  source 1..490: mol_type = genomic DNA
agagtttgatcatggctcaggataaacgctggcggcgtgcttaacacatgcaagtcgaacggggttaatgacttcggtcgttaacttagtggcggacgggtgagtaacgcgtgggtaacctgccctgcagagggggacaacagctggaaacggctgctaataccgcatacgccggtcataccgcatggtattaccgggaaagattcatcgctgcaggatggacccgcgtctgattagccagttggcggggtaacggcccaccaaagcgacgatcagtagccgatctgagaggatgtacggccacattgggactgagacacggcccagactcctacgggaggcagcagtggggaattttgcacaatggggggaaccctgatgcagcgacgccgcgtgagtgaagaagtatttcggtatgtaaagctctatcagcagggacaaagatgatggtacctgaataagaagcaccggctaaatacgtgccagcagc

SEQ ID NO: 5842 - DNA, 490 bp, unidentified
  misc_feature 1..490: note = Ascusbbf_15329, encodes 16S rRNA
  source 1..490: mol_type = genomic DNA
agagtttgatcctggctcaggataaacgctggcggcgcacataagacatgcaagtcgaacggaagtcgttgtaatgatgccctcatgaacagagaacttgttcaacgtgaatgaagattgacttacaacaatggctttagtggcggactggtgagtaacacgtaagcaacctgcctattagaggggaataacaacgagaaatcgttgctaataccgcatatgcccggccattcacatgaatagccggggaaaggagcaatccgctaatagatgggcttgcgtctgattagttagttggtggggtaacggcctaccaagaccgcgatcagtagccggactgagaggttcaacggccacattgggactgagatacggcccagactcctacgggaggcagcagtcgggaatattgcgcaatggaggaaactctgacgcagtgacgccgcgtataggaagaaggttttcggattgtaaactattgtctgcaggg

SEQ ID NO: 5843 - DNA, 490 bp, unidentified
  misc_feature 1..490: note = Ascusbbf_7615, encodes 16S rRNA
  source 1..490: mol_type = genomic DNA
agagtttgatcatggctcaggataaacgctggcggcgcacataagacatgcaagtcgaacgaacttaattacttgcttgcaagtaaagcggttagtggcggactggtgagtaacacgtaagaaatctacctattagtggggaataacagtgagaaatcattgctaataccgcatatgccataggaatcgcatgattctagtgggaaaggagcaattcgctaatagatgagcttgcgtctgattagctagttggtggggcaatggcctaccaaggcaacgatcagtagccggactgagaggttgaacggccacattgggactgagatacggcccagactcctacgggaggcagcagtcgggaatattgcgcaatggaggaaactctgacgcagtgacgccgcgtataggaagaaggttttcggattgtaaactattgtctactgggaagataacagactgtaccagtaaagaaagctccggctaactacgt

SEQ ID NO: 5844 - DNA, 490 bp, unidentified
  misc_feature 1..490: note = Ascusbbf_1567199, encodes 16S rRNA
  source 1..490: mol_type = genomic DNA
agagtttgatcctggctcagaatgaacgctggcggcatggattaggcatgcaagtcgaacgagaaagcggcttcggccgcgagtaaagtggcgaaagggtgagtaacacgtgaggaacctgccccctggcccggaacaagcctgtgaaaacgggtctgaaaccggatgaggccccttcccgcatgggaagtcggccaaatattcatagccaagggatggcctcgcgtcccattagctagttggcggggtaacggcccaccaaggctgcgacgggtaggtggtctgagaggatggtcacccacactgggactgagacactgcccagactcctacgggaggctgcagtcgagaatcttccgcaatgggcgcaagcctgacggagcgatgccgcgtgagggacgaaggccttcgggtcgtaaacctctgtgggggggaacgaacgcaatgacggtacccccttagaaagccacggctaactccgtgccagcag

SEQ ID NO: 5845 - DNA, 490 bp, unidentified
  misc_feature 1..490: note = Ascusbbf_8746, encodes 16S rRNA
  source 1..490: mol_type = genomic DNA
agagtttgatcctggctcaggacgaacgctggcggcgtgcttaacacatgcaagtcgaacggaccccagcaatggggttagtggcggacgggtgagtaacacgtgagcaacctgccctgtattacgggataacacagagaaatttgtgctaatacggtataagaccacgaggaaggcatctttcggtggtaaaagattttatcgatacaggaggggctcgcggcccattagatagttggtgagggtaacggcccaccaagtcgacgatgggtagccgacctgagagggtgatcggccacattggaactgagatacggtccaaactcctgcgggaggcagcagtggggaatattgggcaatggaggcaactctgacccagcaacgccgcgtgaacgaagaaggccttcgggttgtaaagttctttaattggtgaagaagacaatgacggtagccaaagaataagccacggctaactacgtgccagcagccg

SEQ ID NO: 5846 - DNA, 490 bp, unidentified
  misc_feature 1..490: note = Ascusbbf_2713, encodes 16S rRNA
  source 1..490: mol_type = genomic DNA
agagtttgatcatggctcagattgaacgctggcggcaggcttaacacatgcaagtcgaacggtagcaggagaaagcttgctttcttgctgacgagtggcggacgggtgagtaatgcttgggaatctggcttatggagggggataactactggaaacggtagctaataccgcgtaatctcttaggagtaaagggtgggactttcgggccacctgccataagatgagcccaagtgggattaggtagttggtggggtaaaggcctaccaagccgacgatctctagctggtctgagaggatggccagccacactggaactgagacacggtccagactcctacgggaggcagcagtggggaatattgcacaatggggggaaccctgatgcagccatgccgcgtgaatgaagaaggccttcgggttgtaaagttctttcggtgatgaggaaggtatcaaatttaatagatttggtaattgacgttagtcacagaag

SEQ ID NO: 5847 - DNA, 490 bp, unidentified
  misc_feature 1..490: note = Ascusbbf_11809, encodes 16S rRNA
  source 1..490: mol_type = genomic DNA
agagtttgatcatggctcagattgaacgctggcggcaggcttaacacatgcaagtcgagcgcgaaagggtttcggcctgagtagagcggcggacgggtgagtaacgcgtgggaatctgcctggtaatgggggataacgtttcgaaaggagcgctaataccgcatacgccctaagggggaaagtgggggatcttcggacctcacgttatcagatgagcctgcgtcggattagctagtaggtggggtaaaggcctacctaggcgacgatccgtaactggtctgagaggatgatcagtcacactggaactgagacacggtccagactcctacgggaggcagcagtggggaatattggacaatgggggcaaccctgatccagccatgccgcgtgtgtgaagaaggccttcgggttgtaaagcactttaagttgggaggaaggctttaaggttaataaccttgaagattgacgttaccaacagaataagcaccgg

SEQ ID NO: 5848 - DNA, 490 bp, unidentified
  misc_feature 1..490: note = Ascusbbf_222241, encodes 16S rRNA
  source 1..490: mol_type = genomic DNA
agagtttgatcatggctcaggacgaacgctggcggcgtgcttaacacatgcaagtcgagcggtaaggccctttcgggggtacacgagcggcgaacgggtgagtaacacgtgagtaatctgcccttcacttcgggataactaccggaaacggtggctaataccggatatgaccatgcgacgcatgttgtgtggtggaaagttctggcggtggaggatgtgctcgcggcctatcagcttgttggtgaggtaacggctcaccaaggcttcgacgggtagccggcctgagagggtgaccggccacactgggactgagacacggcccagactcctacgggaggcagcagtggggaatattggacaatgggcgaaagcctgatccagcaacgccgcgtgagggatgactgccttcgggttgtaaacctctttcagtagggacgaagcgcaagtgacggtacctacagaagaagcaccggccaactacgtgccagca

SEQ ID NO: 5849 - DNA, 490 bp, unidentified
  misc_feature 1..490: note = Ascusbbf_1261527, encodes 16S rRNA
  source 1..490: mol_type = genomic DNA
agagtttgatcatggctcaggatgaacgctagcggcaggcttaacacatgcaagtcgaggggcagcgcggacttcggtctggcggcgagtggcgaacgggtgagtaatgtatcggaacgtgcctagtagcgggggataactacgcgaaagcgtagctaataccgcatacgccctacgggggaaagcgggggaccttcgggcctcgcactattagagcggccgatatcggattagctagttggtgaggtaaaggctcaccaaggcgacgatccgtagctggtttgagaggacgaccagccacactgggactgagacacggcccagactcctacgggaggcagcagtggggaattttggacaatgggggcaaccctgatccagccatcccgcgtgtgcgatgaaggccttcgggttgtaaagcacttttggcaggaaagaaacggctccggctaatatctggagcaactgacggtacctgcagaataagcac

SEQ ID NO: 5850 - DNA, 490 bp, unidentified
  misc_feature 1..490: note = Ascusbbf_266837, encodes 16S rRNA
  source 1..490: mol_type = genomic DNA
agagtttgatcatggctcaggataaacgctggcggcgcacataagacatgcaagtcgaacggaagtcgttacagtagaagtggattgaagatttatcagattgaagcggaagttgtaacaatggctttagtggcggactggtgagtaacacgtaagcaatctacctattagaggggaataacaatgagaaatcattgctaataccgcataagcttgtaggatcgcatgatccagcaagaaaaggagtaatccgctaatagatgagcttgcggctgattagctagttggttaggtaacggctgaccaaggcgacgatcagtagccgggctgagaggctctgcggccacattgggactgagatacggcccagactcctacgggaggcagcagtcgggaatattgcgcaatggaggaaactctgacgcagtgacgccgcgtataggaagaaggttttaggattgtaaactattttagacagggaagaaaaatg

SEQ ID NO: 5851 - DNA, 490 bp, unidentified
  misc_feature 1..490: note = Ascusbbf_7227, encodes 16S rRNA
  source 1..490: mol_type = genomic DNA
agagtttgatcctggctcaggacgaacgctggcggcgtgcttcatacatgcaagtcgaacgagaagttaccttcgggtaatggaaagtggcggacgggtgagtaatgtgtagagaatctgccctagagagggggacaaccgttggaaacgacagctaataccccatatgagcgtaactgaaatgttattcttgaaaactccggtgctctgggatgagtctgcatctgattagctagttgggggtgtaatggaccaccaaggcgacgatcagtagctggtttgagaggatgatcagccacaatgggactgagacacggcccatactcctacgggaggcagcagtagggaattttgcgcaatgggcgaaagcctgacgcagcaacgccgcgtgatcgagacgcttttcggagtgtaaagatctgtcacaggggacgaacgatgacggtaccctgagaggaagcaccggctaactccgtgccagcagccgcgg

SEQ ID NO: 5852 - DNA, 490 bp, unidentified
  misc_feature 1..490: note = Ascusbbf_8884, encodes 16S rRNA
  source 1..490: mol_type = genomic DNA
agagtttgatcatggctcagattgaacgctggcggcaggcttaacacatgcaagtcgaacggtagcacataggagcttgctccttgggtgacgagtggcggacgggtgagtaatgcttgggaatctggcttatggagggggataactactggaaacggtagctaataccgcgtaatctcttaggagtaaagggtgggactttcgggccacctgccataagatgagcccaagtgggattaggtagttggtggggtaaaggcctaccaagccgacgatctctagctggtctgagaggatggccagccacactggaactgagacacggtccagactcctacgggaggcagcagtggggaatattgcacaatggggggaaccctgatgcagccatgccgcgtgaatgaagaaggccttcgggttgtaaagttctttcggtgatgaggaaggtgattgttttaatagaacagtcaattgacgttagtcacagaag

SEQ ID NO: 5853 - DNA, 490 bp, unidentified
  misc_feature 1..490: note = Ascusbbf_16205, encodes 16S rRNA
  source 1..490: mol_type = genomic DNA
agagtttgatcctggctcaggatgaacgctggcggcatgcctaagacatgcaagtcgaacgaagtagcctaatgaagattgagtgcttgcacgatttctgatttagatttctacttagtggcagacgggtgagtaacacgtgggtaacctacctcagagactgggataacagttagaaatgattgctaataccggatgattcatagttagataactaattatgctaaaaggagctttcgcttcactttgagatgggcttgcgttgtattagttagttggtggggtaatggcctaccaagacaacgatgcatatccgagctgagaggctgatcggacacactgggactgagacacggcccagactcctacgggagacagcagttaggaatattcgtcaatgggggaaaccctgaacgagcaatgccgcgtgagtgattaaggtcttatagattgtaaaactctgttgtaaagaaagaaaccttgagatagg

SEQ ID NO: 5854 - DNA, 490 bp, unidentified
  misc_feature 1..490: note = Ascusbbf_184350, encodes 16S rRNA
  source 1..490: mol_type = genomic DNA
agagtttgatcatggctcaggatgaacgctggcggcgtgcctaacacatgcaagtcgagcgagaaatcgcgcaatgaagcttcggtagatttgagcgatggacagcggcggacgggtgagtaacgcgtgggaaacctgccctttacagggggacagccgagagaaatttcgattaataccccataacgcatgggagtcgcatggctctgatgccaaagatttatcggtaaaggatggtcccgcgtctgattagctggttggtgaggtagcggctcaccaaggcgacgatcagtagccggcctgagagggtgaacggccacattggaactgagacacggtccaaactcctacgggaggcagcagtggggaatattgcacaatgggcgcaagcctgatgcagcaacgccgcgtgaaggatgaaggctttcgagtcgtaaacttctgtccttggggaagaacaaatgacggtacccttggaggaagccccggc

SEQ ID NO: 5855 - DNA, 490 bp, unidentified
  misc_feature 1..490: note = Ascusbbf_5442, encodes 16S rRNA
  source 1..490: mol_type = genomic DNA
agagtttgatcatggctcaggatgaacgctggcggcgtgcttaacacatgcaagtcgaacggagtatgttaaccgagaccttcgggtctcacctgatatacttagtggcggacgggtgagtaacgcgtgagcaaccaaccttatgcagagggataacaattagaaatgattgctaatacctcataagaccacgctatcgcatggtaaagtgggaaaaactccggtggcataagacgggctcgcgttcgattagctagatggtggggtaacggcctaccatggcgacgatcgatagccggactgagaggtcgaccggccacattgggactgagacacggcccagactcctacgggaggcagcagtggggaatattgcacaatgggggaaaccctgatgcagcgacgccgcgtgagtgaagaagtatttcggtatgtaaagctcttttagcagggaagatgatgacggtacctgcagaaaaagccccggcta

SEQ ID NO: 5856 - DNA, 490 bp, unidentified
  misc_feature 1..490: note = Ascusbbf_103243, encodes 16S rRNA
  source 1..490: mol_type = genomic DNA
agagtttgatcctggctcaggatgaacgccggcggtgtgcctaatacatgcaagtcgagcgcactggcccaactgatatgacgtgcttgcactgatttgacgatggattaccagtgagcggcggacgggtgagtaacacgtgggcaacctgccctggagcgggggataacatctggaaacaggtgctaataccgcatgactactaaaaccacatggttttagtataaaagaaggcttcggctttcactctaggatgggcccgcggtgcattagctagttggtaaggtaacggcttaccaaggcgatgatgcatagccgagttaagagactgatcggccacaatggaactgagacacggtccatactcctacgggaggcagcagtagggaatcttccacaatgggcgcaagcctgatggagcaacaccgcgtgagtgaagaagggtttcggctcgtaaagctctgttgttgaagaagaacgtgcgtgagag

SEQ ID NO: 5857 - DNA, 490 bp, unidentified
  misc_feature 1..490: note = Ascusbbf_193661, encodes 16S rRNA
  source 1..490: mol_type = genomic DNA
agagtttgatcctggctcaggataaacgctggcggcgcacataagacatgcaagtcgaacggaagtcgttatcaatgagtttgattgaaagatttatctggaaagagaatgatttgataacaatggctttagtggcggactggtgagtaacgcgtgagcaacctgcctattagaggggaataacagtgagaaatcattgctaataccgcatatgccatagttatcgcatgatagcagtgggaaaggagtaatccactagtagatgggctcgcgtctgattagatagttggtggggtaatggcctaccaagtcaacgatcagtagccggactgagaggttgaacggccacattgggactgagatacggcccagactcctacgggaggcagcagtcgggaatattgcgcaatggaggaaactctgacgcagtgacgccgcgtataggaagaaggttttcggattgtaaactattgtcgttagggaagataaa

SEQ ID NO: 5858 - DNA, 490 bp, unidentified
  misc_feature 1..490: note = Ascusbbf_14197, encodes 16S rRNA
  source 1..490: mol_type = genomic DNA
agagtttgatcatggctcaggatgaacgctggcggcgtgcctaacacatgcaagtcgaacggtgatggtttgatattttcggatggataatcatcatagtggcggacgggtgagtaacgcgtggataacctgcctctcactgggggatagcagctggaaacggctggtaataccgcatacgatcctttaatcgcatgattgaaggaagaaagatttatcggtgagagatggatccgcgtctgattagccagttggcggggtaacggcccaccaaagcgacgatcagtagccggcctgagagggtgatcggccacattgggactgagacacggcccaaactcctacgggaggcagcagtgggggatattgcacaatgggcgcaagcctgatgcagcgacgccgcgtgagtgaagaagtatttcggtatgtaaagctctatcggcagggaagaaaggcccgaaagggagatgacggtacctgactaagaagc

SEQ ID NO: 5859 - DNA, 490 bp, unidentified
  misc_feature 1..490: note = Ascusbbf_9419, encodes 16S rRNA
  source 1..490: mol_type = genomic DNA
agagtttgatcatggctcaggacgaacgctggcggcatgcttaacacatgcaagtcgaacgggtctgattccttcgggatgaaagattagtggcggacgggtgagtaatgtatgagcaatctgcccttgtcattgggataacatagggaaacttatgctaataccaaatatgaccacggtgtcgcatggcactgcggtgaaagctccggcggacaaggatgagctcatatcctattagttagttggtgagataacagcccaccaagactgcgatgggtagccgagctgagaggctgatcggccacattgggactgaaacacggcccagacttctacggaaggcagcagtggggaatattggtcaatggaggcaactctgaaccagcaatgccgcgtgagtgaagaagatcttacgatcgtaaaactctaaacttaggaacgataatgacggtacctaaggataagccccggctaactacgtgccagcagc

SEQ ID NO: 5860 - DNA, 490 bp, unidentified
  misc_feature 1..490: note = Ascusbbf_109452, encodes 16S rRNA
  source 1..490: mol_type = genomic DNA
agagtttgatcatggctcagaacgaacgctggcggcgcgtcttaagcatgcaagtcgggcggcaaggatgtgcttgcacatccctagagcggcggactggtgagtaacgcgtgggtgacgcaccctccggacggggatagcctgcagaaatgcagggtaataccggatacggttccgtgtcctggaagcacggaaggaaaggagcttcggctccgccggaggagcggcctgcggcccatcagctagtcggcggggtaaaggcccaccgaggcgatgacgggtacccggcctgagagggtgggcgggcacattgggactgagatacggcccagactcctacgggaggcagcagctaagaatattccgcaatgggcgaaagcctgacggagcgacgccgcgtggacgatgaaggccggaaggttgcagagtcctttggcacgcgaggaaggagcggggaagggaatgtccccgcggtgactgtagcgtgaga

SEQ ID NO: 5861 - DNA, 490 bp, unidentified
  misc_feature 1..490: note = Ascusbbf_161627, encodes 16S rRNA
  source 1..490: mol_type = genomic DNA
agagtttgatcctggctcaggacgaacgctggcggcgtgcctaatacatgcaagtcgagcgcatgacgaggagcttgctcctctgattgagcggcggacgggtgagtaacacgtgggcaacctgccctgtagacggggataacttcgggaaaccggagctaataccggataatcctcttccccacatggggaagagttgaaaggcgcttttgcgtcactacaggatgggcccgcggtgcattagctagttggtggggtaacggcctaccaaggcgacgatgcatagccgacctgagagggtgatcggccacattgggactgagacacggcccaaactcctacgggaggcagcagtagggaatcttccacaatggacgaaagtctgatggagcaacgccgcgtgagtgatgaaggttttcggatcgtaaaactctgttgtaagggaagaaccagtacgtcaggcaatggacgtaccttgacggtaccttat

SEQ ID NO: 5862 - DNA, 490 bp, unidentified
  misc_feature 1..490: note = Ascusbbf_217178, encodes 16S rRNA
  source 1..490: mol_type = genomic DNA
agagtttgatcctggctcaggataaacgctggcggcgcacataagacatgcaagtcgaacggaagtcgttataattgagtccaattgaaagatttatctggattgaagatgattttataacaatggctttagtggcggactggtgagtaacgcgtgagcaacctgcctatcagaggggaataacagtgagaaatcattgctaataccgcatatgccatatttatcgcatgataaaagtgggaaaggagtaatccactggtagatgggctcgcgtctgattagatagttggtggggtaacggcctaccaagtcaacgatcagtagccggactgagaggttgaacggccacattgggactgagatacggcccagactcctacgggaggcagcagtcgggaatattgcgcaatggaggaaactctgacgcagtgacgccgcgtataggaagaaggttttcggattgtaaactattgtcgttagggaagataaa

SEQ ID NO: 5863 - DNA, 490 bp, unidentified
  misc_feature 1..490: note = Ascusbbf_7141, encodes 16S rRNA
  source 1..490: mol_type = genomic DNA
agagtttgatcatggctcagaacgaacgctggcggcaggcttaacacatgcaagttgaacgggattaaattggtagcttgctattgatttatgagagtagcgcactggtgagtaacacgtgggaacgcacctattggtgggggacaacagttggaaacgactgctaataccgcataagccctaagggggaaaggagaaatttgccgatagaacggcccgcggaagattaggcagttggtggggtaaaggcctaccaaacctacgatctatagctgatctgagaggatgaacagccacattggaactgagacacggtccagactcctacgggaggcagcagtgaggaatattgggcaatggaggaaactctgacccagccatgccgcgtgagtgagaaggtcttcggattgtaaagctcttttatgcaggaagatgatgacagtactgcaagaaaaagcaccggcaaacttcgtgccagcagccgcggtaa

SEQ ID NO: 5864 - DNA, 490 bp, unidentified
  misc_feature 1..490: note = Ascusbbf_306235, encodes 16S rRNA
  source 1..490: mol_type = genomic DNA
agagtttgatcctggctcaggacgaacgctggcggcgtgcttaacacatgcaagtcgaacggggcgattgaaagcttgcttttatgagcctagtggcaaacgggtgagtaacgcgtgggcaacctaccggaaagatggggacaacatcccgaaaggggtgctaataccgaatgttgtacagggaacgcatgttccctgtattaaaggatctaatccgctttccgatgggcccgcgtccgattagctagttgggggggtagcggcccaccaaggcgacgatcggtagccggcctgagagggtgaacggccacattgggactgagacacggcccagactcctacgggaggcagcagtggggaatcttccgcaatgggcgaaagcctgacggagcaacgccgcgtgagtgaagaaggccttcgggccgtaaagctctgttgccggggaagagtggtccaaggggacttggacagggacggtacccggcgagga

SEQ ID NO: 5865 - DNA, 468 bp, unidentified
  misc_feature 1..468: note = Ascusbbf_1738646, encodes 16S rRNA
  source 1..468: mol_type = genomic DNA
agagtttgatcctggctcagaacgaacgctggcggcaggcttaacacatgcaagtcgaacgcatcgcaagatgagtggcagacgggtgagtaacgcgtgggaatctaccgtgccctgcggaatagctccgggaaactggaattaataccgcatacgccctacgggggaaagatttatcggggtatgatgagcccgcgttggattagctagttggtggggtaaaggcctaccaaggcgacgatccatagctggtctgagaggatgatcagccacattgggactgagacacggcccaaactcctacgggaggcagcagtggggaatattggacaatgggcgcaagcctgatccagccatgccgcgtgagtgatgaaggccttagggttgtaaagctctttcaccgatgaagataatgacggtagtcggagaagaagccccggctaacttcgtgccagcagccgcggtaat

SEQ ID NO: 5866 - DNA, 488 bp, unidentified
  misc_feature 1..488: note = Ascusbbf_483267, encodes 16S rRNA
  source 1..488: mol_type = genomic DNA
agagtttgatcctggctcaggatgaatgctggcggcgtgcctaatacatgcaagtcgagcggtaacagaggtagcttgctacctgctgacgagcggcggacggctgagtaacgcgtgggaacggaccccaaactgagggataactactcgaaagagtggctaataccgcatgtgatcttcggattaaaggatttatccggtttgggactggcctgcgtacgattagatagttggcggggtaaaggcccaccaagtcgacgatcgttagatggtttgagaggatgatcatccagactgggactgagacacggcccagactcctacgggaggcagcagtagggaatctttcacaatgggcgaaagcctgatggatcaacgccgcgtgcaggacgaaggccttcgggttgtaaactgcttttatatccgagaaatatgatggtaagatatgaataaggaccggctaactacgtgccagcagccgcggtaat

SEQ ID NO: 5867 - DNA, 490 bp, unidentified
  misc_feature 1..490: note = Ascusbbf_1008900, encodes 16S rRNA
  source 1..490: mol_type = genomic DNA
agagtttgatcctggctcaggatgaacgctggcggcgcgcctaacacatgcgagtcgaacggcacccacctccgggtggaagcgagtggcgaacggctgagtaacacgtggagaacctgcccccttccccgggatagccgcccgaaaggacgggtaataccggatacccccgggtgccgcatggcgcccgggctaaagccccgacgggaggggatggctccgcggcccatcaggtagacggcggggtgacggcccaccgtgccgacaacgggtagccgggttgagagaccgaccggccagattgggactgagacacggcccagactcctacgggaggcagcagtggggaatcttgcgcaatgggggcaaccctgacgcagcgacgccgcgtgcgggacggaggccttcgggtcgtaaaccgctttcagcagggaagagacgagactgtacctgcagaagaagccccggctaactacgtgccagcagccgc

SEQ ID NO: 5868 - DNA, 490 bp, unidentified
  misc_feature 1..490: note = Ascusbbf_35023, encodes 16S rRNA
  source 1..490: mol_type = genomic DNA
agagtttgatcatggctcaggatgaacgctggcggcacgcttaacacatgcaagtcgagcggagcaaatacttcggtagttgcttagcggcggacgggtgagtaacacgtgggtaacctaccccatacagggggataacgtatagaaatgtacgctaataccgcataagccaacagggaggcatcttctggttggaaaagcgctagtggtatgggatgggcccgcgactgattagctggttggtgaggtaacggcccaccaaggcgacgatcagtagccggtctgagaggatggacggccacattgggactgagacacggcccagactcctacgggaggcagcagtggggaatattgcacaatggggggaaccctgatgcagcgatgccgcgtgaaggaagaagtatttcggtatgtaaacttctatcagcagggaagaagaaagacagtacctgagtaagcagccccggctaactacgtgccagcagcc

SEQ ID NO: 5869 - DNA, 490 bp, unidentified
  misc_feature 1..490: note = Ascusbbf_83882, encodes 16S rRNA
  source 1..490: mol_type = genomic DNA
agagtttgatcctggctcaggacgaacgctggcggcgcgcctaacacatgcaagtcggacggggatcatgtagaagcttgcttagacatgattttagtggcggacgggtgagtaacgcgtgaggacttgtcagttacagggggacaacggatggaaacgtcagctaataccccataagccgagaggtaaaaggagcgatccggtaacagagagactcgcgttccatcagctagttggaggggtaaaggctctccaaggcgaagacggatagccggactgagaggttggccggccacattggaactgagagacggtccagactcctacgggaggcagcagtggggaatattgggcaatgggggaaaccctgacccagcgacgccgcgtgggtgaagaaatccttcgggatgtaaagccctgttttgcgggaagaagcgagtgacggtaccgcaagagaaagccacggcaaactacgtgccagcagccgcgg

SEQ ID NO: 5870 - DNA, 490 bp, unidentified
  misc_feature 1..490: note = Ascusbbf_230, encodes 16S rRNA
  source 1..490: mol_type = genomic DNA
agagtttgatcctggctcaggacgaacgctggcggcgtgcctaacacatgcaagtcgaacgaagcactgaaattgatttcttcggaatgatttttctttgactgagtggcggacgggtgagtaacacgtgagcaacctgcctttcagagcgggatagcagttggaaacgactgataataccgcatgacatgttttctccgcatgaggaaaacatcaaatgatttttcgctgaaagatgggctcgcgtccgattaggtagttggtgaggcaacggctcaccaagccgacgatcggtagccggactgagaggtcgatcggccacattgggactgagacacggcccagactcctacgggaggcagcagtgggggatattgcacaatgggcgcaagcctgatgcagcaacgccgcgtgagggaggacggtcttcggattgtaaacctctgtccttggggaagaaacaaatgacggtacccttggaggaagccac

SEQ ID NO: 5871 - DNA, 490 bp, unidentified
  misc_feature 1..490: note = Ascusbbf_8633, encodes 16S rRNA
  source 1..490: mol_type = genomic DNA
agagtttgatcctggctcaggatgaacgctagcgataggcctaacacatgcaagtcgaggggcagcacatgaagtagcaatacggatggtggcgaccggcgcacgggtgagtaacgcgtatgcaacctacctacaacaggggaataactcgttgaaagacggactaataccccataatacagggatcccgcatgggaatatttgttaaagatttatcggttgtagatgggcatgcgttccattagctagttggtgaggtaacggctcaccaaggcaacgatggataggggaactgagaggtttatcccccacactggtactgagacacggaccagactcctacgggaggcagcagtgaggaatattggtcaatggacgcaagtctgaaccagccacgtcgcgtgaaggaagacggccctacgggttgtaaacttcttttgtaagggaataaagtgagccacgtgtggctttttgcatgtaccttacgaat

SEQ ID NO: 5872 - DNA, 490 bp, unidentified
  misc_feature 1..490: note = Ascusbbf_15081, encodes 16S rRNA
  source 1..490: mol_type = genomic DNA
agagtttgatcctggctcaggataaacgctggcggcgcacataagacatgcaagtcgaacggacttaatcgattcttttagtttcgaagcggttagtggcggactggtgagtaatacataagcaacctgcctataagaggggaacaacagttagaaatgactgctaataccgcatatgccataattatcacatgataatagtgggaaaggagcaatccgcttatagatgggcttatgcctgattagctagttggtggggtaatggcctaccaaggcaacgatcagtagccggactgagaggttcaacggccacattgggactgagatacggcccagactcctacgggaggcagcagtcgggaatattgcgcaatggaggaaactctgacgcagtgacgccgcgtgcaggaagaaggttttcggattgtaaactgctttagacagggaagatacaagacagtacctgtagaataagctccggctaactacg

SEQ ID NO: 5873 - DNA, 470 bp, unidentified
  misc_feature 1..470: note = Ascusbbf_15532, encodes 16S rRNA
  source 1..470: mol_type = genomic DNA
agagtttgatcctggctcagaacgaacgctggcggcaggcttaacacatgcaagtcgagcgcccttttcggagggagcggcagacgggtgagtaacacgtgggaatctacccatctctagggaataactcagggaaacttgtgctaataccctatacgccctttgggggaaagatttatcggagatggatgagcccgcgttggattagctagttggtgaggtaatggctcaccaaggcgacgatccatagctggtctgagaggatgatcagccacactgggactgagacacggcccagactcctacgggaggcagcagtggggaatattggacaatgggcgcaagcctgatccagccatgccgcgtgtgtgatgaaggccttagggttgtaaagcactttcaccgatgaagataatgacggtagtcggagaagaagccccggctaacttcgtgccagcagccgcggtaat

SEQ ID NO: 5874 - DNA, 490 bp, unidentified
  misc_feature 1..490: note = Ascusbbf_8482, encodes 16S rRNA
  source 1..490: mol_type = genomic DNA
agagtttgatcctggctcaggacgaacgctggcggcatgcctaacacatgcaagtcgaacggagctttcgagagcttgcttttgaaagcttagtggcggacgggtgagtaacgcgtgagcaacctgcctttcagtggggaataatattctgaaaagagtactaataccgcataacgtacagaaaccgcatgatttttgtaccaaagatttatcgctgagagatgggctcgcgtccgattagccagttggtggggtaacggcctaccaaagcgacgatcggtagccggactgagaggttgaacggccacattgggactgagacacggcccagactcctacgggaggcagcagtgggggatattgcgcaatgggggaaaccctgacgcagcaatgccgcgtggaggatcgaaggtcttcggattgtaaactccttttgtcagggacgaaaaatgacggtacctgacgaataagctccggctaactacgtgcc

SEQ ID NO: 5875 - DNA, 490 bp, unidentified
  misc_feature 1..490: note = Ascusbbf_10701, encodes 16S rRNA
  source 1..490: mol_type = genomic DNA
agagtttgatcatggctcaggacgaacgctggcggcgtgcctaacacatgcaagtcgaacgagaatttacgaattgatttcttcggaatgacgtttgtaaaggaaagtggcggacgggcgagtaacgcgtgaataacctgcccataagagggggataatccatggaaacgtggactaataccgcatattgaagttttatcgcatggtgagactttgaaagattttatcgcttatggatggattcgcgtcagattagctagttggtgaggtaacggctcaccaaggcgacgatctgtagccgaactgagaggttgatcggccgcattgggactgagacacggcccagactcctacgggaggcagcagtggggaatattgcgcaatgggggcaaccctgacgcagcaacgccgcgtgcaggaagaaggtcttcggattgtaaactgttgtcgcaagggaagaagacagtgacggtaccttgtgagaaagtca

SEQ ID NO: 5876 - DNA, 486 bp, unidentified
  misc_feature 1..486: note = Ascusbbf_6883, encodes 16S rRNA
  source 1..486: mol_type = genomic DNA
agagtttgatcatggctcagaacgaacgctggcggcaggcttaacacatgcaagttgaacgggattattgatagcttgctattaatatgagagtggcgcacgggtgagtaatacgtgggaacatacctatcggttcggaacaactgttggaaacgacagctaataccggatacggcctaagggggaaagatttatcgccgatagaatggcccgcggcagattaggcagttggtggggtaaaggcctaccaaaccgacgatctgtagctggtctgagaggacgatcagccacattgggactgagacacggcccagactcctacgggaggcagcagtgaggaatattgggcaatgggggaaaccctgacccagccatgccgcgtgagtgaagaaggttttcggattgtaaagctctttcagatgtgaagatgatgacggtagcatcagaagaagccccggcaaacttcgtgccagcagccgcggtaat

SEQ ID NO: 5877 - DNA, 490 bp, unidentified
  misc_feature 1..490: note = Ascusbbf_7158, encodes 16S rRNA
  source 1..490: mol_type = genomic DNA
agagtttgatcatggctcaggagaaacgctggcggcgcacataagacatgcaagtcgaacggaaccaagtcgaatgtttacatgagactgaagtttagtggcggacgggtgagtaacacgtgagcaacctgcctttaggagggggataacattgagaaatcagtgctaataccgcataacgcataaggttcgcatggaccatatgccaaaggagaaatccacctaaagatgggctcgcggctgattagccagttggtggggtaacggcctaccaaagcgatgatcagtagccgagctgagaggcacaacggccacattgggactgagacacggcccagactcctacgggaggcagcagtcgggaatattgcacaatggaggaaactctgatgcagtgacgccgcgtacaggaagaaggtctttggattgtaaactgttgtcgacagggaagaaaaatgacagtacctgtggaggaagctccggcaaacta

SEQ ID NO: 5878 - DNA, 490 bp, unidentified
  misc_feature 1..490: note = Ascusbbf_16359, encodes 16S rRNA
  source 1..490: mol_type = genomic DNA
agagtttgatcctggctcaggataaacgctggcggcgcacataagacatgcaagtcgaacggaagtcgtctaaaaatggattgaagatttatctgattgaagtttatagacaatggctttagtggcggactggtgagtaacgcgtgagcaacctgcctattagaggggaataacagtgagaaatcattgctaataccgcataagctgatagaatcgcatgatttagtcagaaaaggagtaatccgctaatagatgggctcgcgtctgattagctagttggtggggcaacggcctaccaaggcgacgatcagtagccggactgagaggttgaacggccacattgggactgagatacggcccagactcctacgggaggcagcagtcgggaatattgcgcaatggaggaaactctgacgcagtgacgccgcgtataggaagaaggttttcggattgtaaactattgtcgttagggaagaagaagtgacagtac

SEQ ID NO: 5879 - DNA, 490 bp, unidentified
  misc_feature 1..490: note = Ascusbbf_13452, encodes 16S rRNA
  source 1..490: mol_type = genomic DNA
agagtttgatcatggctcagaacgaacgctggcggcgcgtcttaagcatgcaagtcgaacgggatccacgcgcttgcgcgtggtgagagtggcggactggtgagtaacgcgtaggtgacgtaccctccggacggggatagcccttagaaataaggggtaataccggatacggttccgtgtgtcagaggcacggaaggaaaggagcttcggctccgccgggggatcggcctgcgtcccatcagccagttggcggggtaacggcccaccaaggcaatgacgggtatccggcctaagagggtgaacggacacattgggactgagatacggcccagactcctacgggaggcagcagctaagaatattccgcaatgggggaaaccctgacggagcgacgccgcgtggacgatgaaggccggaaggttgtaaagtcctttagtctgtgaggaataacgccggagggaatgccggcggatgactgtagcagaagaat

SEQ ID NO: 5880 - DNA, 490 bp, unidentified
  misc_feature 1..490: note = Ascusbbf_52339, encodes 16S rRNA
  source 1..490: mol_type = genomic DNA
agagtttgatcatggctcagaatgaacgctggcggcatggattaggcatgcaagtcgaacgccccgggcttgcccggggagtggcgaaagggtgcgcaacacgtgaggaacccgcccccgggtccgggacaagcgctggaaacggcgtctaataccggatggcgaccggaatcgcatgattccgcgtcgaaagtcttctcgcccggggaaggcctcgcgtcccattagctggatggcggggtgacggcccaccatggctacgacgggtaggtggtctgagaggatggtcacccacactgggactgagacactgcccagactcctacgggaggctgcagtcgagaatcttccgcaatgggcgcaagcctgacggagcgatgccgcgtgagggacggaggccttcgggtcgtaaacctctgtcacccgggacgaagcacgacggtaccgggagaggaagccacggctaactacgtgccagcagccgcggtaa

SEQ ID NO: 5881 - DNA, 490 bp, unidentified
  misc_feature 1..490: note = Ascusbbf_16320, encodes 16S rRNA
  source 1..490: mol_type = genomic DNA
agagtttgatcatggctcaggacgaacgctggcggcgtgcgtaacacatgcaagttgagcgacgacgtttccgaagtggcgacatggaggggacgagcggagcagcggacgggtgagtaatacatgagaagctgtcctgtggtgggggacaacgtctggaaacggacgctaataccccatagtctgagaggttaaagccgaaaggcgccatgggaggcgctcgtgtcctatcagctagttggtgaggtaacggctcaccaaggcgacgacgggtagccggcctgagagggtgtccggccacactgggactgagatacggcccagactcctacgggaggcagcagtggggaatattgggcaatgggaggaatcctgacccagcgacgccgcgtggatgaagaaggccttcgggtcgtaaaatccttttatgggggaagaaggaagtgacggtaccccatgaataagccccggctaactacgtgccagcagc

SEQ ID NO: 5882 - DNA, 490 bp, unidentified
  misc_feature 1..490: note = Ascusbbf_38130, encodes 16S rRNA
  source 1..490: mol_type = genomic DNA
agagtttgatcatggctcagattgaacgctagcgggatgctttacacatgcaagtcgaacggcagcgcgaaaagagcttgctctttttggcggcgagtggcgaacgggtgagtaatatatcggaacgtgcccagtagcgggggataactacgcgaaagcgtggctaataccgcatacgccctacgggggaaagggggggattcttcggaacctctcactattggagcggccgatatcagattagcttgttggtgaggtaaaggctcaccaaggccgcgatctgtagctggtttgagaggacgaccagccacactgggactgagacacggcccagactcctacgggaggcagcagtggggaattttggacaatgggggaaaccctgatccagccatcccgcgtgtgcgatgaaggccttcgggttgtaaagcacttttggcagggaagaaacggcgtcgactaataattggcgcaactgacggtacctgca

SEQ ID NO: 5883 - DNA, 490 bp, unidentified
  misc_feature 1..490: note = Ascusbbf_56958, encodes 16S rRNA
  source 1..490: mol_type = genomic DNA
agagtttgatcctggctcaggatgaacgctagctacaggcttaacacatgcaagtcgaggggcagcgggaggatagcttgctatccttgccggcgaccggcgcacgggtgcgtaacgcgtatccaacctgcccgcaagtcagggccagcccggcgaaagtcggattaatccctgatgtggtgcgaagaggacatctgattcacattaaaggtttaccgcttgcggatggggatgcgtaggattaggtagtaggcggggcaacggcccacctagccgtcgatccttaggggttctgagaggaaggtcccccacactggtactgagacacggaccagactcctacgggaggcagcagtgaggaatattggtcaatggtcgggagactgaaccagccaagtagcgtgcaggacgacggccctacgggttgtaaactgcttttatgcggggataaaggaagccacgtgtggttttttgcaggtaccgcatgaat

SEQ ID NO: 5884 - DNA, 490 bp, unidentified
  misc_feature 1..490: note = Ascusbbf_55782, encodes 16S rRNA
  source 1..490: mol_type = genomic DNA
agagtttgatcatggctcaggatgaacgctggcggcgtgcctaacacatgcaagtcgagcggagatatatcggagattcttcggatgatcttttatatcttagcggcggatgggtgagtaacacgtgggtaacctgccctgcactggggaataacagttggaaacgactgttaataccgcatatgcgcacgaggtcgcatgaccttgggcggaaagatttatcggtgcaggatgggcccgcgtcggattaacttgttggtgaggtaatggcccaccaaggtgatgatccgtagccgacctgagagggtgaccggccacattgggactgagacacggcccaaactcctacgggaggcagcagtgggggatattgcacaatgggcgcaagcctgatgcagcgacgccgcgtgaaggaagacgtatttcggtatgtaaacttctatcagcggggaagaagatgacggtacccgactaagaagccccggctaat

SEQ ID NO: 5885 - DNA, 490 bp, unidentified
  misc_feature 1..490: note = Ascusbbf_40912, encodes 16S rRNA
  source 1..490: mol_type = genomic DNA
agagtttgatcatggctcaggatgaacgctggcggcgtgcctaacacatgcaagtcgaacgggaaccttgcgacggagacttcggttgaagttgtaagaattctagtggcggacgggtgagtaacgcgtgggtaacctgcccttaagaggggaataacattgagaaatcagtgctaatacaccatatgcttacagcatcgcatgatgcagtgaggaaaagaatttcgcttaaggatggacccgcgtttgattagccagttggtagggtaacggcctaccaaagcaacgatcaatagccggcctgagagggtgaacggccacattggaactgagacacggtccaaactcctacgggaggcagcagtggggagtattgcacaatgggcgaaagcctgatgcagcaacgccgcgtgagtgaagaagtatttcggtatgtaaagctctatcgatggggaataagatgaaggtacccaagtaagaagccccggct

SEQ ID NO: 5886 - DNA, 480 bp, unidentified
  misc_feature 1..480: note = Ascusbbf_47220, encodes 16S rRNA
  source 1..480: mol_type = genomic DNA
agagtttgatcatggctcagaacgaacgctggcggcaggcttaacacatgcaagtcgaacgtgaagctaccttcgggtagtggaaagtggcagacgggtgagtaacgcgtgggaatatacccctcggttcggaataactcatggaaacgtgagctaataccgaatacggcctatgggcgaaagatttatcgccgagggattagcccgcgttggattagctagttggtggggtaaaggcctaccaaggcgacgatccatagctggtctgagaggatgatcagccacactgggactgagacacggcccagactcctacgggaggcagcagtggggaatcttggacaatgggcgaaagcctgatccagccatgccgcgtgagtgaagaaggccttagggttgtaaagctctttcatcagggaagataatgacggtacctgaagaagaagccccggctaactccgtgccagcagccgcggtaat

SEQ ID NO: 5887 - DNA, 470 bp, unidentified
  misc_feature 1..470: note = Ascusbbf_64314, encodes 16S rRNA
  source 1..470: mol_type = genomic DNA
agagtttgatcctggctcagaacgaacgctggcggcaggcctaacacatgcaagtcgaacgctgtagcaatacagagtggcagacgggtgagtaacgcgtgggaaccttcccaatggtacggaatagctcagggaaacttgaggtaataccgtataagcccctagggggaaagatttatcgccattggatgggcccgcgtcggattagctagttggtagggtaatggcctaccaaggcaacgatccgtagctggtttgagagaatgaccagccacactgggactgagacacggcccagactcctacgggaggcagcagtggggaatcttggacaatgggcgcaagcctgatccagccatgccgcgtgagtgaagaaggccttagggttgtaaagctcttttgccggggacgataatgacggtacccggagaataagtcccggctaacttcgtgccagcagccgcggtaat

SEQ ID NO: 5888 - DNA, 490 bp, unidentified
  misc_feature 1..490: note = Ascusbbf_1827789, encodes 16S rRNA
  source 1..490: mol_type = genomic DNA
agagtttgatcatggctcaggatgaacgctagcggcaggcctaacacatgcaagtcgaggggcatcacggaaaagcttgcttttctggtggcgaccggcgcacgggtgaggaacacgtatggaacctgcccctgtcaggggaatagcccagggaaacttggattaatgccccatggtacctggggatcgcatgatcccccggttaaagattcatcggacagggatggccatgcgcaccattagctagttggtagggtaacggcctaccaaggcagcgatggttaggggccctgagagggggatcccccacactggtactgagacacggaccagactcctacgggaggcagcagtgaggaatattggacaatggccgagaggctgatccagccatgccgcgtgcaggatgactgccctatgggttgtaaactgcttttatacggaagaaacccccccacgtgtggggggctgacggtaccgtaagaataag

SEQ ID NO: 5889 - DNA, 490 bp, unidentified
  misc_feature 1..490: note = Ascusbbf_130969, encodes 16S rRNA
  source 1..490: mol_type = genomic DNA
agagtttgatcctggctcaggatgaacgctggcggcgtgcctaatacatgcaagtcgaacgagtggttgcctcttccttcgggttgaggctgccgcgagtggcgtacgggtgagtaacacgtaggcaatctgcccttaggactgggatacccagacgaaagtttggctaataccggataactacgggggaggcatctcctccgcttgaaaggcgcttcggcgccacctttggatgagcctgcggcgcattagctagttggtgagataacagcccaccaaggcagggatgcgtagccgatctgagaggatgaccggccacaatgggactgagacacggcccatactcctacgggaggcagcagtagggagttttcggcaatgggcgaaagcctgaccgagcaacgccgcgtgagtgatgaaggtcttcggattgtaaagctctgttgcgagggacgaatggccgcggtaggcaatgaccgcggagatgacg

SEQ ID NO: 5890 - DNA, 490 bp, unidentified
  misc_feature 1..490: note = Ascusbbf_51715, encodes 16S rRNA
  source 1..490: mol_type = genomic DNA
agagtttgatcctggctcaggatgaacgctggcggcgtgcctaacacatgcaagtcgagcggagtatagtgtctaagagatttcggtcgaattaatctatacttagcggcggatgggtgaggaacgcgtgggcaacctgcccttcacagggggataacagctggaaacggctgttaataccgcatatgctcacagtaccgcatggtacagggaggaaagcgtacacggtgaaggatggacccgcgtcggattagccagttggtgaggtaacggcccaccaaagcgatgatccgtagccggcctgagagggcgaccggccacattgggactgagacacggcccaaactcctacgggaggcagcagtgggggatattgcacaatggggggaaccctgatgcagcgacgccgcgtgaaggaggaagtacttcggtatgtaaacttctatcagcagggaagaagatgacggtacctgcacaagaagccccggct

SEQ ID NO: 5891 - DNA, 490 bp, unidentified
  misc_feature 1..490: note = Ascusbbf_194402, encodes 16S rRNA
  source 1..490: mol_type = genomic DNA
agagtttgatcatggctcaggatgaacgctggcggcgtgcctaacacatgcaagtcgagcgggaatctcctgattgaaacttcggtagattgacggggaggatagcggcggacgggtgagtaacgcgtaggtaagctgccctatgcacagggatagcctagggaaacctggattaatacctgatgacgctgcgaggtcacatggccatgcagccaaagttttttcggcataggatgcacctgcgtctgattagctggttggtgaggtaacggcccaccaaggcgacgatcagtagccgacctgagagggtgatcggccacattggaactgagacacggtccaaactcctacgggaggcagcagtgaggaatattgcacaatggggggaaccctgatgcagcaacgccgcgtgagcgaagaaggtcttcggatcgtaaagctctgtcctaagggacgataatgacggtaccttaggaggaagccccggcta

SEQ ID NO: 5892 - DNA, 490 bp, unidentified
  misc_feature 1..490: note = Ascusbbf_166540, encodes 16S rRNA
  source 1..490: mol_type = genomic DNA
agagtttgatcatggctcaggacgaacgctggcggcgtgcttaacacatgcaagtcgaacgaggtttaccggagagcttgctcgaaggtaaaccgagtggcggacgggtgagtaacgcgtgaacaatctgtctcatacagggggataacgcatcgaaagatgtgctaataccgcgtaggaccacaggaggacatcctccaggggtgaaaggagcaatccggtatgaggtgagttcgcgtctgattagatagttggtgaggtaacggcccaccaagtcaacgatcagtagccgacctgagagggtgatcggccacattgggactgagacacggcccagactcctacgggaggcagcagtggggaatattgggcaatgggcgaaagcctgacccagcaacgccgcgtgaaggaagaaggttttcggatcgtaaacttctgtcctatatgaagatcatgacggtagtataggaggaagccccggctaactacg

SEQ ID NO: 5893 - DNA, 490 bp, unidentified
  misc_feature 1..490: note = Ascusbbf_114984, encodes 16S rRNA
  source 1..490: mol_type = genomic DNA
agagtttgatcatggctcaggacgaacgctggcggcgtgcttaatacatgcaagtcgaacgaggtccaacctttcgcaagattggggaagacctagtggcgaacgggtgcgtaacacgtgagaaacctgccccggtctctggaataacaagtggaaacacttgctaataccggatgccgtctgaccaccgcatggtggattgacgaaagatttatcggatcgggagggtctcgcggcctatcagcttgttggcgaggtaacggctcaccaaggcatcgacgggtagctggtctgagaggatgatcagccacactgggactgagacacggcccagactcctacgggaggcagcagtagggaatcttgcacaatgggcgaaagcctgatgcagcaacgccgcgtgcgggaagaaggccttagggttgtaaaccgctttcagcagggaagaaaatgacggtacctacagaagaaggtgcggccaactacgtgc

SEQ ID NO: 5894 - DNA, 490 bp, unidentified
  misc_feature 1..490: note = Ascusbbf_46288, encodes 16S rRNA
  source 1..490: mol_type = genomic DNA
agagtttgatcatggctcaggatgaacgctagcggcaggcctaacacatgcaagtcgaggggcatcacggaaaagcttgcttttctggtggcgaccggcgcacgggtgaggaccacgtatggaacctgcccctgtcaggggaatagcccagggaaacttggattaatgccccatggtaccggggggtcgcatgaccctttggttaaagatttatcggacagggatggccatgcgcaccattagctagttggtagggtaacggcctaccaaggcgacgatggttaggggccctgagagggggatcccccacactggtactgagacacggaccagactcctacgggaggcagcagtgaggaatattggacaatggccgagaggctgatccagccatgccgcgtgcaggatgactgccctatgggttgtaaactgcttttatacgggaagaaacccccccacgtgtggggggctgacggtaccgtaagaataa

SEQ ID NO: 5895 - DNA, 490 bp, unidentified
  misc_feature 1..490: note = Ascusbbf_138789, encodes 16S rRNA
  source 1..490: mol_type = genomic DNA
agagtttgatcatggctcaggacgaacgctggcggcgtgcctaacacatgcaagtcgaacggagcaggggacttcggttctctgctgagtggcgaacgggtgagtaacgcgtgagcaacctgaccttgagagggggataacgacgggaaactgtcgctaataccgcatgagaccacagcccggcatcggggaggggtcaaaggagaaatccgctgaaggaggggctcgcgtcccattagatagttggcggggcaacggcccaccaagtcgacgatgggtagccgagctgagaggctgatcggccacactggaactgagacacggtccagactcctacgggaggcagcagtggggaatattgggcaatgggcgcaagcctgacccagcaacgccgcgtgagggaagaaggctttcgggttgtaaacctctgtccttggtgacgaaggaagtgacggtagccaaggaggaagccccggctaactacgtgcca

SEQ ID NO: 5896 - DNA, 490 bp, unidentified
  misc_feature 1..490: note = Ascusbbf_116550, encodes 16S rRNA
  source 1..490: mol_type = genomic DNA
agagtttgatcctggctcaggataaacgctggcggcgcacataagacatgcaagtcgaacggaagtcgttatatttgattctgaatgaaagatttatccggaatgatgatgattttataacaatggctttagtggcggactggtgagtaacgcgtaagcaatctgcctattagaggggaataacagtgagaaatcattgctaataccgcatatgccatgagtatcgcatgatacaattgggaaaggagtaatccgctaatagatgagcttgcgtctgattaacttgttggtggggtaacggcctaccaaggtgacgatcagtagccggactgagaggttgaacggccacattgggactgagatacggcccagactcctacgggaggcagcagtcgggaatattgcgcaatggaggaaactctgacgcagtgacgccgcgtataggatgaaggttttcggattgtaaactattgtcgttagggaagattta

SEQ ID NO: 5897 - DNA, 490 bp, unidentified
  misc_feature 1..490: note = Ascusbbf_302938, encodes 16S rRNA
  source 1..490: mol_type = genomic DNA
agagtttgatcctggctcaggacgaacgctggcggcgtgcctaacacatgcaagtcgagcgaggggaggggcttcggccccgaaccgagcggcggacgggtgagtaacgcgtgaatgatctgtccctcacaggggaataacacttggaaacaggtgctaataccgcataagaccacggtgctgcatggcactgaggtaaaaggagcgatccggtgaggggtgagttcgcgtccgattagccagttggcggggtaagagcccaccaaagcgacgatcggtagccgacctgagagggtgatcggccacactggaactgagacacggtccagactcctacgggaggcagcagtgggaatattgggcaatgggcgaaagcctgacccagcaacgccgcgtgagggaagaaggttttcggattgtaaacctctatcgcaggggacgaaggaagtgacggtaccctgcaaggaagccccggctaactacgtgccag

SEQ ID NO: 5898 - DNA, 490 bp, unidentified
  misc_feature 1..490: note = Ascusbbf_64802, encodes 16S rRNA
  source 1..490: mol_type = genomic DNA
agagtttgatcctggctcaggacgaacgctggcggcgtgcttaacacatgcaagtcgaacgaggttatcatcaggaaggcttcggccggagagaggataaccgagtggcggacgggtgagtaacgcgtgagcaacctgtcttctacagggggataacgccccgaaaggggtgctaataccgcataggaccacggtaccgcatggtacagaggtgaaaggagcaatccggtagaaggtgggctcgcgtcccattagatagttggtgaggtaacggctcaccaagtcgacgatgggtagccgacctgagagggtgatcggccacattggaactgagatacggtccagactcctacgggaggcagcagtggggaatattgggcaatgggcgaaagcctgacccagcaacgccgcgtgagggaagaaggtcttcgggttgtaaacctctgtcctaagtgaaaaggaaggatggtagcttaggaggaagccccgg

SEQ ID NO: 5899 - DNA, 490 bp, unidentified
  misc_feature 1..490: note = Ascusbbf_44453, encodes 16S rRNA
  source 1..490: mol_type = genomic DNA
agagtttgatcatggctcaggatgaacgctggcggcgtgcttaacacatgcaagtcgaacgggcttagatcggaagcttgcttttgatttaagttagtggcggacgggtgagtaacgcgtgggtaacctaccctgtgcagggggatagcagctggaaacggctgataaaaccgcataacacggcgatgccgcatggcaatgccgtcaaatatttataggcacaggatgggcccgcgtctgattagctagttggcggggcaacggcccaccaaggcgacgatcagtagccggcctgagagggtgaacggccacattgggactgagacacggcccaaactcctacgggaggcagcagtggggaatattggacaatgggggaaaccctgatccagcgacgccgcgtgagtgaagaagtatttcggtatgtaaagctctatcagcagggaagatgatgacggtacctgactaagaagcaccggctaaatacgtg

SEQ ID NO: 5900 - DNA, 490 bp, unidentified
  misc_feature 1..490: note = Ascusbbf_67583, encodes 16S rRNA
  source 1..490: mol_type = genomic DNA
agagtttgatcatggctcaggacgaacgctggcggcgtgcttaacacatgcaagtcgaacgaggttagagacttcggtttttaaccgagtggcggacgggtgagtaacgcgtgagcaatctgtcccagacagggggataacaactggaaacagttgctaataccgcataagaccacgtcatcgcatggtgatgaggtaaaaggagcaatccggtttggggtgagttcgcgtctgattagatagttggcgaggtaacggctcaccaagtcgacgatcagtagccgacctgagagggtgaccggccacattgggactgagacacggcccagactcctacgggaggcagcagtggggaatattgggcaatgggggaaaccctgacccagcaacgccgcgtgagggaagaaggttttcggattgtaaacctctgtccttggggacgaacaagatgacggtacccgaggaggaagccccggctaactacgtgcca

SEQ ID NO: 5901 - DNA, 490 bp, unidentified
  misc_feature 1..490: note = Ascusbbf_384556, encodes 16S rRNA
  source 1..490: mol_type = genomic DNA
agagtttgatcctggctcaggatgaacgctggcggcatgcctaagacatgcaagtcgaacgaagtagtccaaagaaaaatgagtgcttgcacgaatttggaaatggttcgctacttagtggcagacgggtgagtaacacgtgggtaacctacctcagagactgggataacaattagaaatgattgctaataccggatgatttgtaatatgataacatgttatactaaaaggagctacggctttactttgagatgggcttgcggtgtattagctagttggtgaggtaatggctcaccaaggcaacgatgcatatccgagctgagaggctgatcggacacattgggactgagacacggcccagactcctacgggagacagcagttaggaatattcgtcaatggggggaaccctgaacgagcaatgccgcgtgagtgatgacggtcttatagattgtaaaactctgttgtaaaggaagaaatcttattatagg

SEQ ID NO: 5902 - DNA, 490 bp, unidentified
  misc_feature 1..490: note = Ascusbbf_73740, encodes 16S rRNA
  source 1..490: mol_type = genomic DNA
agagtttgatcatggctcagaatgaacgttggcggcgtggattaggcatgcaagtcgagcgagaacccagcaatgggggacagcggcgaaagggacagtaatgtgtagattatctgccctcaggcccgggatagctgcgggaaactgcaggtaataccggatgatatctccggatcaaaggtgtgattccgcctgaggatgagtctacatcctattagctagttggcagggtaatggcctaccaaggcgatgatgggtagcgggtgtgagagcacgacccgcgtcattgggactgagacactgcccagacacctacgggtggctgcagtcgagaatcttcggcaatgggcgaaagcctgaccgagcgacgccgcgtgcgggatgaaggccttcgggttgtaaaccgctgtcagaggggatgaaatgcaggtgggttctcccatctgtttgacatagcctcagaggaaggacgggctaagttcgtgccagc

SEQ ID NO: 5903 - DNA, 490 bp, unidentified
  misc_feature 1..490: note = Ascusbbf_107690, encodes 16S rRNA
  source 1..490: mol_type = genomic DNA
agagtttgatcatggctcaggacgaacgctggcggcacgcttaacacatgcaagtcgaacggagttgtttggagcttgctctgaacaacttagtggcggacgggtgagtaacacgtgagcaacctgcctttgagagcggaatagcttctggaaacggatggtaataccgcataacattaacggaccgcatgatctgttaatcaaagatttatcgctcaaagatgggctcgcggctgattagatagttggtggggtaacggcctaccaagtcgacgatcagtagccggactgagaggttgaacggccacattgggactgagacacggcccagactcctacgggaggcagcagtggggaatattgcacaatgggcggaagcctgatgcagcgatgccgcgtggaggaagaaggttttcggattgtaaactccttttatcagggacgataatgacggtacctgaagaaaaagctccggctaactacgtgccag

SEQ ID NO: 5904 - DNA, 472 bp, unidentified
  misc_feature 1..472: note = Ascusbbf_82420, encodes 16S rRNA
  source 1..472: mol_type = genomic DNA
agagtttgatcatggctcagaacgaacgctggcggcatgcctaacacatgcaagtcgaacggagggcttcggccctcagtggcggacgggtgagtagcgcgtgggaacctgccccgtggtacggaataacgtctggaaacggacgctaataccgtatgcgccctgtgggggaaagatttatcgccatgggaggggcccgcgtccgattaggtagttggtggggtaacggcctaccaagccgacgatcggtagctggtctgagaggatgatcagccacactgggactgagacacggcccagactcctacgggaggcagcagtggggaatattggacaatgggggcaaccctgatccagcaatgccgcgtgagtgatgaaggccttcgggttgtaaagctctttcgcacgcgacgatgatgacggtagcgtgagaagaagccccggctaacttcgtgccagcagccgcggtaat

SEQ ID NO: 5905 - DNA, 490 bp, unidentified
  misc_feature 1..490: note = Ascusbbf_1499390, encodes 16S rRNA
  source 1..490: mol_type = genomic DNA
agagtttgatcatggctcaggatgaacgctggcggcatgcctaagacatgcaagtcgaacgaagtagcctgttgaagattgagtgcttgcacaatttctgatacagttttctacttagtggcagacgggtgagtaacacgtgggtaacctacctcaatgactgggataacagttagaaatgactgctaataccggataattcatagttagataactagctatgctaaaagaagcgtttgcttcactttgagatgggcttgcgttgtattagcttgttggtggggtaatggcctaccaaggctacgatgcatatccgagctgagaggctgatcggacacactgggactgagacacggcccagactcctacgggagacagcagttaggaatattcgtcaatgggggaaaccctgaacgagcaatgccgcgtgagtgatgaaggtctttttgattgtaaaactctgttgtaaagaaagaaaccttaagatagg

SEQ ID NO: 5906 - DNA, 490 bp, unidentified
  misc_feature 1..490: note = Ascusbbf_191167, encodes 16S rRNA
  source 1..490: mol_type = genomic DNA
agagtttgatcatggctcaggatgaacgctagcggcaggcttaacacatgcaagtcgaggggcatcgcgggggtagcaatacacctggcggcgaccggcggaagggtgcgtaacgcgtgagcaacatgcccgtcacagggggataacagttggaaacgactcctaataccccgtaacatcatttgtggcatcgcagatggttgaaagctttttgcggtgacggattggctcgcgtgacattagctagttggagtggtaacggcacaccaaggcgacgatgtctaggggttctgagaggaaggtcccccacactggaactgagacacggtccagactcctacgggaggcagcagtgaggaatattggtcaatgggcggaagcctgaaccagccatgccgcgtgaaggaataaggtcctatggatcgtaaacttcttttgtacgggagcaataagggcgtcgtgacgtccgatgagagtaccgtacgaataa

SEQ ID NO: 5907 - DNA, 490 bp, unidentified
  misc_feature 1..490: note = Ascusbbf_400781, encodes 16S rRNA
  source 1..490: mol_type = genomic DNA
agagtttgatcatggctcaggatgaacgctggcggcaggcttaatacatgcaagtcgaacggtaaggccgagtgtagcaatacacgaggtacacgagtggcgcacgggtgcgtaacgcgtatgcaacctgcccctgaccgggacaaaacagctggaaacggctgctaatatcccatggttaccgaggagggcatcctcctttgtataaagatttattggtcggggatgggcatgcgtattattaggtagttggtggggtaacggcccaccaagccgacgatgattaggggttctgagaggattaacccccacactggaactgagacacggtccagactcctacgggaggcagcagtagggaatattgggcaatggaggcaactctgacccagccatgccgcgtgaaggaagacggccctatgggttgtaaacttcttttatcgtggagtaaacccggtcacgtgtggccggttgagagtacacgaggaat

SEQ ID NO: 5908 - DNA, 490 bp, unidentified
  misc_feature 1..490: note = Ascusbbf_51195, encodes 16S rRNA
  source 1..490: mol_type = genomic DNA
agagtttgatcatggctcaggattaacgctggcggcgtgcctaatacatgcaagtcgaatggtttagcttgctagaccatggcgaacgggtgagtaacacgtaggtaacctgtcttaaagacgaggataaccattggaaacgatggataatactggataggacataataaagcacatgcaaacatgtttaaaggagcaatccacttaaagaggggcctgcggcgcattagctagttggtgagataagagcccaccaaggcaatgatgcgtagccggactgagaggttgaacggccacaatgggactgagaacggcccatactcctacgggaggcagcagtagggaattttcggcaatgggcggaagcctgaccgagcaacgccgcgtgaacgaagaagtatttcggtatgtaaagttcttttatttgggaagaaaagacagattgactgtaccaaatgaataagctccggctaactacgtgccagcagcc

SEQ ID NO: 5909 - DNA, 490 bp, unidentified
  misc_feature 1..490: note = Ascusbbf_234038, encodes 16S rRNA
  source 1..490: mol_type = genomic DNA
agagtttgatcatggctcagaacgaacgctggcggcgcgtcttaagcatgcaagtcgaatggcaagaagagagcttgctctcttcctagaatggcggactggtgagtaacgcgtgggtgacgtaccctttagctggggatagcttttagaaataagagataataccgaataagctgcattttgttagagggaatgcaggaaaggatctttagattcactgaaggaacggcccgcgtactattagttagttggtgaggtaacggcccaccaaggcgatgatagttacccggcctaagagggggatcgggcacattgggactgagatacggcccagactcctacgggaggcagcagctaagaatattccgcaatggacgaaagtctgacggagcgacgccgcgtggacgaagaaggccggaaggttgtaaagtccttttataactgaggaataaggaagatgagagaaacgtcttctggtgactgtaggtta

SEQ ID NO: 5910 - DNA, 490 bp, unidentified
  misc_feature 1..490: note = Ascusbbf_88954, encodes 16S rRNA
  source 1..490: mol_type = genomic DNA
agagtttgatcatggctcaggacgaacgctggcggcgtgcttaacacatgcaagtcgagcgagggcatttggcttcggctgaatgaccgagcggcggacgggtgagtaacgcgtgaacgatctgtccctaacagggggataccacttggaaacaggtgctaataccgcataagaccacagtgctgcatggcacaggggtaaaaggagcaatccggtgaggggtgagttcgcgtccgattagccagttggcggggtaacggcccaccaaagcgacgatcggtagccgacctgagagggtgatcggccacattggaactgagagacggtccaaactcctacgggaggcagcagtgggaatattgggcaatgggcgaaagcctgacccagcaacgccgcgtgaaggaagaaggttttcggattgtaaacttctgtcctaagagacgaaggaagtgacggtaacttaggaggaagccccggctaactacgtgcc

SEQ ID NO: 5911 - DNA, 490 bp, unidentified
  misc_feature 1..490: note = Ascusbbf_303878, encodes 16S rRNA
  source 1..490: mol_type = genomic DNA
agagtttgatcctggctcaggacgaacgctggcggcgtgcctaacacatgcaagtcgagcgaagaagctccttcgggaggttcttagcggcggacgggtgagtaacacgtgggtaacctgcctcaaagagggggatagcctcccgaaagggagattaataccgcataataagtgcggttcgcatgaaccgcactttaaaggagaaatccgctttgagatggacccgcggcgcattagctagttggtaaggcaatggcttaccaaggcaacgatgcgtagccgacctgagagggtgaacggccacattggaactgagagacggtccagactcctacgggaggcagcagtggggaatattgcacaatgggcgaaagcctgatgcagcaacgccgcgtgagtgaagaaggttttcggattgtaaagctctgtcatctgggacgataatgacggtaccagatgaggaagccacggctaactacgtgccagcagc

SEQ ID NO: 5912 - DNA, 490 bp, unidentified
  misc_feature 1..490: note = Ascusbbf_503803, encodes 16S rRNA
  source 1..490: mol_type = genomic DNA
agagtttgatcatggctcaggatgaacgctggcggcgtgcctaacacatgcaagtcgaacgaagcacttaagctgatccttcgggagaagtttttgtgactgagtggcggacgggtgagtaacgcgtgggtaacctgccctgtacagggggataacagtcagaaatgactgctaataccgcataagcgcacaaaaggacatcctttggtgtgaaaaactccggtggtacaggatgggcccgcgtctgattagcttgttggcggggtaaaggcccaccaaggcgacgatcagtagccggtctgagaggatgaacggccacattggaactgagacacggtccaaactcctacgggaggcagcagtggggaatattgcacaatggggggaaccctgatgcagcaacgccgcgtgagtgaagaagtatttcggtatgtaaagctctatcagcagggaagataatgacggtacctgactaagaagctccggctaa

SEQ ID NO: 5913 - DNA, 490 bp, unidentified
  misc_feature 1..490: note = Ascusbbf_87202, encodes 16S rRNA
  source 1..490: mol_type = genomic DNA
agagtttgatcctggctcaggacgaacgctggcggcgtgcttaatacatgcaagtcgaacgagaagcagatgcttgcatctgtggaaagtggcgaacgggtgagtaacgcgtatgtaaccaacctcatgcagggggatagcccagggaaacctggattaaacccgcataagaccacagtaccgcatgatacagtggtaaaaactccggtggcatgagacggacatgcgtcttattaggtagttggtgaggtaacggctcaccaagccgacgatgagtagccgacctgagagggtgatcggccacattgggactgagacacggcccagactcctacgggaggcagcagtagggaatattgcgcaatgggggcaaccctgacgcagcaacgccgcgtgagtgattgaaggttttcggatcgtaaagctctgttctgggggaagataatgacggtaccccagcaggaagctccggctaaatacgtgccagcag

SEQ ID NO: 5914 - DNA, 490 bp, unidentified
  misc_feature 1..490: note = Ascusbbf_373496, encodes 16S rRNA
  source 1..490: mol_type = genomic DNA
agagtttgatcctggctcaggatgaacgctggcggcgtgcataacacattcaagtcgaacggacatattggcttcggtcgatatgttagtggcggacgggtgagtaacgcgtgagcaacctgcccctatgtgcgggataacggctggaaacggacgctaataccgcataatccaacggaaccgcatgattttgttggcaaagatttattgcatagggatgggctcgcgtccgattagatagttggcggtgcaacggaccaccaagtcgacgatcggtagccggactgagaggttgaacggccacattggaactgagaaacggtccagactcctacgggaggcagcagtggggaatattgggcaatgggcgaaagcctgacccagcgacgccgcgtgaaggaagacggtcctcggattgtaaacttcttttatgtaggacgaagcaatgacggtactacatgaataagccacggctaactacgtgccagca

SEQ ID NO: 5915 - DNA, 490 bp, unidentified
  misc_feature 1..490: note = Ascusbbf_195284, encodes 16S rRNA
  source 1..490: mol_type = genomic DNA
agagtttgatcctggctcaggatgaacgctagcgacaggcctaacacatgcaagtcgaggggtaacaggggagcttgctcccgctgacgaccggcgcacgggtgagtaacacgtatgcaacctacccgtaagagggggataacccggagaaatccggactaacaccgcataataccgtttgggggcatcctcggacggttaaatattcatagcttacggatgggcatgcgcatgattagctagttggtggggtaacggcctaccaaggcgacgatcattaggggtcctgagagggaaatcccccacattggtactgagacacggaccaaactcctacgggaggcagcagtgaggaatattggtcaatgggcgagagcctgaaccagccatgtcgcgtgaaggatgaatgtcctatggattgtaaacttcttttataggggaataaagtgggtcttgcgaggccttttgcatgtaccctatgaataagcat

SEQ ID NO: 5916 - DNA, 490 bp, unidentified
  misc_feature 1..490: note = Ascusbbf_480532, encodes 16S rRNA
  source 1..490: mol_type = genomic DNA
agagtttgatcatggctcaggatgaacgctagcggcaggcttaacacatgcaagtcgcggggcagcgcgggtagcaatacctggcggcgaccggcggaagggtgcgtaacgcgtgagcaacatgcccgtatcagggggataaccgatggaaacgtcgcctaataccccataacaacagtccccgcatgaggacagtttgaaagttacggcggatacggattggctcgcgtgacattagctggttggcggggtaacggcccaccaaggcgacgatgtctaggggttctgagaggaaggtcccccacactggaactgagacacggtccagactcctacgggaggcagcagtgaggaatattggtcaatgggcgcaagcctgaaccagccatgccgcgtgcaggaatgaggccctatgggtcgtaaactgcttttgctgcggagcaataagtgtcacgtgtggcacgatgagagtacgcagcgaataagcatc

SEQ ID NO: 5917 - DNA, 490 bp, unidentified
  misc_feature 1..490: note = Ascusbbf_240570, encodes 16S rRNA
  source 1..490: mol_type = genomic DNA
agagtttgatcatggctcaggatgaacgctggcggcgtgcttaacacatgcaagtcgagcgagaagcccatgatcgatacttcggttgattgattgggtggaaagcggcggacgggtgagtaacgcgtaggcaacctgccccttgcagagggatagccattggaaacgatgattaatacctcataatgcgggaccaagacatcttggacctgccaaagatttatcggcaagggatgggcctgcgtctgattagctggttggtggggtaacggctcaccaaggcgacgatcagtagccgacctgagagggtgatcggccacattggaactgagacacggtccagactcctacgggaggcagcagtggggaatattgcacaatgggcgcaagcctgatgcagcaacgccgcgtgaaggaagaaggcctttgggtcgtaaacttctgtccttagggaagataatgacggtacctttggaggaagccccggcta

SEQ ID NO: 5918 - DNA, 487 bp, unidentified
  misc_feature 1..487: note = Ascusbbf_108476, encodes 16S rRNA
  source 1..487: mol_type = genomic DNA
agagtttgatcatggctcagggtgaacgctggcggcgtgcctaagacatgcaagtcgaacgggcctgatttcggtcaggctagtggcggacgggtgagtaacacgtgggtgatctaccccaaagtctgggacaactaggggaaaccttagctaatcccggatggtgaggcttctcctgtgaagtctctaaagatttatcgctttgggatgagcccgcggcgcatcagctagttggtggggtaatggcctaccaaggcgacgacgcgtagctggtctgagaggacgaccagccacaggagcactgagacacgggctccactcctacgggaggcagcagttaggaatcttcgtcaatgggcgaaagcctgaacgagcgacgccgcttgagggacgaagcccttcggggtgtaaacctctgaacaggggacgatgatgacggtaccctgctaatagcaccggctaactccgtgccagcagccgcggtaat

SEQ ID NO: 5919 - DNA, 490 bp, unidentified
  misc_feature 1..490: note = Ascusbbf_299235, encodes 16S rRNA
  source 1..490: mol_type = genomic DNA
agagtttgatcatggctcagaacgaacgctggcggcgcgtcttaagcatgcaagtcgagcggtagcagcaatgcgagagcggcggacgggtgagtaacacgtgggtaatctgccctccagtcggggatagcctgtggaaacacaggataataccggatgcgatggtcttgcacaagtgagatcaggaaaggggccaaggccccgctggaggatgagcccgcgtcccattagctagatggcggggtaacggcccaccatggcgatgatgggtagccggcctgagagggtgaacggccacattggaactgagacacggtccagactcctacgggaggcagcagctaagaatcttccacaatggacggaagtctgatggagcgacgccgcgtgcgcgatgaaggccgtgaggttgtaaagcgcttttcttgagggggaacaacacgggcagggaatggcccgtggatgacgtgaatcgaggaataagccccgg

SEQ ID NO: 5920 - DNA, 490 bp, unidentified
  misc_feature 1..490: note = Ascusbbf_1735636, encodes 16S rRNA
  source 1..490: mol_type = genomic DNA
agagtttgatcatggctcaggatgaacgctggcggcgtgcctaatacatgcaagtcgaacgctaaccttcgggttagagtggcgaacgggtgagtaacacgtaggtaacctgcccataagacgaggataactactggaaacggtagctaatactggatagtatatagagtcgcatggctttatatttaaagatgccttcaagcatcacttatggatggacctgcggcgcattagctagtcggtgagatagcagcccaccaaggcgacgatgcgtagccggactgagaggttgaacggccacattgggactgagacacggcccagactcctacgggaggcagcagtagggaattttcggcaatggacgcaagtctgaccgagcaacgccgcgtgagtgatgaagttcttcggaacgtaaaattcttttatttgaaaagaacgtatattgtaggaaatgacagtatagtgatggtaccaaatgaataagccc

SEQ ID NO: 5921 - DNA, 490 bp, unidentified
  misc_feature 1..490: note = Ascusbbf_233315, encodes 16S rRNA
  source 1..490: mol_type = genomic DNA
agagtttgatcatggctcaggataaacgctggcaccatgcctaatacatgcatgtcgtacgagagcttcggctcgagtggcaaatgggtgagtaacacgtagggaaccttccctagcgacgaggataacggttggaaacgactgctaatactggatagtatatcggaccgcatgatctgatatttaaagctgtgaagcgcgctaggatggccctgcggcgcattagatagttggtgaggtaacggcccaccaagtctgtgatgcgtagctgcactgagaggtgaaacagccacattgggactgagacacggcccaaactcctacgggaggcagcagtagggaattttcggcaatgggcgaaagcctgaccgagcaatggtgcgtgaacgatgaagatccttggattgtaaagttcttttattggggatgaaaaaacgtgaagagcgtaattgacagtacccattgaataagccccggccaactatgtgcc

SEQ ID NO: 5922 - DNA, 490 bp, unidentified
  misc_feature 1..490: note = Ascusbbf_1817296, encodes 16S rRNA
  source 1..490: mol_type = genomic DNA
agagtttgatcatggctcaggacgaacgctggcggcgtgcctaacacatgcaagtcgagcgaggacattggattagcttgctaagctgatgttcgagcggcggacgggtgagtaacgcgtgaacaatctgtcccggacagggggataacacttggaaacaggtgctaataccgcataagcccacggggtcgcatgacgctgagggaaaaggaggaatccggttcggggtgagttcgcgtccgattagatagttggtgaggtaacggcccaccaagtcaacgatcggtagccgacctgagagggtgatcggccacattggaactgagacacggtccaaactcctacgggaggcagcagtgggaatattgggcaatgggcgaaagcctgacccagcaacgccgcgtgagggaagaaggttttcggattgtaaacctctgtcctcagggacgaaggaagtgacggtacctgaggaggaagccccggctaacta

SEQ ID NO: 5923 - DNA, 490 bp, unidentified
  misc_feature 1..490: note = Ascusbbf_722956, encodes 16S rRNA
  source 1..490: mol_type = genomic DNA
agagtttgatcatggctcaggacgaacgctggcggcgtgcttaacacatgcaagtcgaacggagcgtacggacggaagttttcggacggaagactgtacgcttagtggcggacgggtgagtaacgcgtgagcaatctgcccataagagggggacaacagccggaaacagctgctaataccgcatgagaccacattaccgcatggtagaggggtcaaagaaattcgcttatggatgagctcgcgtccaattaggcagttggcggggcaacggcccaccaaaccgacgattggtagccgacctgagagggtgaacggccacattggaactgagacacggtccaaactcctacgggaggcagcagtggggaatattgggcaatggaggcaactctgacccagcaacgccgcgtgagggaagaaggttttcggattgtaaacctctgtcctatgggacgaacaaatgacggtaccatgggaggaagctccggct

SEQ ID NO: 5924 - DNA, 490 bp, unidentified
  misc_feature 1..490: note = Ascusbbf_282448, encodes 16S rRNA
  source 1..490: mol_type = genomic DNA
agagtttgatcatggctcaggatgaacgctagcggcaggcctaacacatgcaagtcgaggggcagcgcggggtagcaatactctggcggcgaccggcggaagggtgcgtaacgcgtgagcaacctgcccgtgtccggggcataatcggtggaaacgccgtctaattccccataacaacagaactgacatcagttttgtttaaaaactttttgcggacacggatgggctcgcgtctgattagcttgttggcggggtaacggcccaccaaggcgacgatcagtaggggttctgagaggaaggtcccccacactggaactgagacacggtccagactcctacgggaggcagcagtgaggaatattggtcaatgggcggaagcctgaaccagccatgccgcgtgaaggaataaggccctatgggtcgtaaacttcttttgacggggagcaataagggtcacgtgtggtccgatgagcgtactcgtcgaataagc

SEQ ID NO: 5925 - DNA, 490 bp, unidentified
  misc_feature 1..490: note = Ascusbbf_220652, encodes 16S rRNA
  source 1..490: mol_type = genomic DNA
agagtttgatcatggctcaggatgaacgctagcgacaggcctaacacatgcaagtcgaggggcagcacgatgtagcaatacgttggtggcgaccggcgcacgggtgcgtaacaggtatgcaatctgtcccataccggggcatagcccgctgaaaggcggattaattctccatgtgtcatgagagggcatccttttatgatgaaacgtaagggtatgggatgagcatgcttatgattagatagtaggcggggtaacggcccacctagtcgacgatcattaggggtcctgagagggagatcccccacattggaactgagacacggtccaaactcctacgggaggcagcagtgaggaatattggtcaatgggcggaagcctgaaccagccaagtcgcgtgaaggaagacggttctatggattgtaaacttcttttgtccgagggtaaagtgagtcacgtgtggcttattgcaagtatcggacgaataagcatc

SEQ ID NO: 5926 - DNA, 490 bp, unidentified
  misc_feature 1..490: note = Ascusbbf_267757, encodes 16S rRNA
  source 1..490: mol_type = genomic DNA
agagtttgatcctggctcagattgaacgctggcggcatgccttacacatgcaagtcgaacggtaacaggtcttcggatgctgacgagtggcgaacgggtgagtaatacatcggaacgtgcccaagagtgggggataacgaggcgaaagctttgctaataccgcatacgatctcaggatgaaagcaggggaccgcaaggccttgcgctcctggagcggccgatggcagattaggtagttggtgggataaaagcttaccaagccaacgatctgtagctggtctgagaggatgatcagccacactgggactgagacacggcccagactcctacgggaggcagcagtggggaattttggacaatgggcgaaagcctgatccagccatgccgcgtgcaggatgaaggccttcgggttgtaaactgcttttgtacggaacgaaaagcttttctctaataaagggaagtgatgacggtaccgtaagaataagcaccg

SEQ ID NO: 5927 - DNA, 490 bp, unidentified
  misc_feature 1..490: note = Ascusbbf_258156, encodes 16S rRNA
  source 1..490: mol_type = genomic DNA
agagtttgatcatggctcaggatgaacgctggcggcgtgcttaacacattcaagtcgaacggacgaggggagcttgctccccaagttagtggcggacgggtgagtaacgcgtgagcaacctgcctttctaagcgggataacagagggaaaccgctgctaataccgcataacgtatgatgaacgcatgttcgacataccaaaggagcgatccgaagaaagatgggctcgcgtctgattagatagttggtgaggtaacggcccaccaagtctgcgatcagtagccggactgagaggttgaacggccacattggaactgagaaacggtccagactcctacgggaggcagcagtggggaatattgggcaatgggcgaaagcctgacccagcgacgccgcgtgagggaagaaggtcttcggattgtaaacctttgtcaacagggacgaagcaagtgacggtacctgtggaggaagccacggctaactacgtgcca

SEQ ID NO: 5928 - DNA, 490 bp, unidentified
  misc_feature 1..490: note = Ascusbbf_293717, encodes 16S rRNA
  source 1..490: mol_type = genomic DNA
agagtttgatcctggctcaggatgaacgctggcggcgtgcctaacacatgcaagtcgaacggttaaggcggcttcggccgcgaatagagtggcgaacgggtgagtaacacgtgaccaacctgccccgcgcaccgggacagcctcgtgaaaacgggattaataccggatactccggcgggcccgcatgggcccgccgggaaagctccggcggcgcgggatggggtcgcggcccattaggtagacggcggggtgacggcccaccgtgccgacgatgggtagccgggttgagagaccgaccggccacattgggactgagatacggcccagactcctacgggaggcagcagtggggaatattgcgcaatgggggcaaccctgacgcagcaacgccgcgtgcgggaagaaggccttcgggttgtaaaccgctttcagcagggaagacatcgacggtacctgcagaagaagccccggctaactacgtgccagcagc

SEQ ID NO: 5929 - DNA, 490 bp, unidentified
  misc_feature 1..490: note = Ascusbbf_728453, encodes 16S rRNA
  source 1..490: mol_type = genomic DNA
agagtttgatcctggctcagattgaacgctggcggcacgcttaacacatgcaagtcgaacggttgtgaatagcttgctatttacgatagtggcggacgggtgagtaatgcgtaggaacctacctagaagcgggggataacatggggaaactcgtgctaagaccgcatacgctctgaggaggaaaagctggtagtaataccagttacttttagatgggcctacgtcggattagctagttggttaggtaaaggctgaccaaggcgatgatccgtagctggtttgagaggacgaacagccacactgggactgagaacggcccagactcctacgggaggcagcagtggggaatcttggacaatgggggaaaccctgatccagcgatgccgcgtgtgtgaagaaggcctgcgggttgtaaagcactttagtgggggaggaaagccgtaagtttaagagatgtacggattgacgttaccccaagaataagcaccgg

SEQ ID NO: 5930 - DNA, 490 bp, unidentified
  misc_feature 1..490: note = Ascusbbf_725566, encodes 16S rRNA
  source 1..490: mol_type = genomic DNA
agagtttgatcatggctcaggacgaacgctggcggcgtgcttaacacatgcaagtcgaacggggaacaaacgcttcggcatttgtttccagtggcggacgggtgagtaacgcgtgaacaagctgtccttcacagggggataacactgagaaatcagtgctaataccgcataagaccacattgccgcatggcagaggggtcaaaggagtaatccggtgaagggggcgttcgcgtcccattagatagttggtgaggtaacggcccaccaagtcagcgatgggtagccgagctgagaggctgatcggccacactgggactgagacacggcccagactcctacgggaggcagcagtgggaatattgggcaatgggggaaacccttacccagcaacgccgcgtgagagaagaaggttttcggattgtaaatctctgtccttgggggcgaagtaagtgacggtacccagggaggaagccccggctaactacgtgcc

SEQ ID NO: 5931 - DNA, 490 bp, unidentified
  misc_feature 1..490: note = Ascusbbf_1686680, encodes 16S rRNA
  source 1..490: mol_type = genomic DNA
agagtttgatcctggctcaggacgaacgctggcggcgtgcctaacacatgcaagtcgagcggggatacattggaggagagcttcggcaggaatcggatgtatttcagcggcggacgggtgagtaacgcgtgaacaatctgtcccggacagggggataacacttggaaacaggtgctaataccgcatgagaccacagccccgcatgggggaggggtcaaaggagtgatccggtccggggtgagtccgcgtctgattagctggttggtgaggtaatggcccaccaaggcgacgatcagtagccgacctgagagggtgatcggccacattggaactgagagacggtccaaactcctacgggaggcagcagtggggaatattgggcaatgggcgaaagcctgacccagcaacgccgcgtgagggaagaaggttttcggattgtaaacctctgtccttggggacgaaggaagtgacggtacccgaggaggaagcc

SEQ ID NO: 5932 - DNA, 490 bp, unidentified
  misc_feature 1..490: note = Ascusbbf_174382, encodes 16S rRNA
  source 1..490: mol_type = genomic DNA
agagtttgatcatggctcaggatgaacgctggcggcgtgcctaatacatgcaagtcgaacgggggtacttgtaccctagtggcgaacgggtgaggaacacgtaggtaacctgccttttagtttgggatacccagaggaaactttggctaataccggatatgaattttggaggcatctccgaaatttgaaaggagcgtttgctccgctttaagatggacctgcggcgcattagctagttggtgagataacagcccaccaaggcgaggatgcgtatccgatctgagaggatgaccggacacattggaactgagacacggtccaaactcctacgggaggcagcagtaaggagttttcggcaatgggcgaaagcctgaccgagcaacgccgcgtgagtgatgacggccctatgggttgtaaagctctgttgtaagggaagaatgacgaggtgaggaaatgcacttcgtttgacggtaccttaccagaaagccac

SEQ ID NO: 5933 - DNA, 490 bp, unidentified
  misc_feature 1..490: note = Ascusbbf_241703, encodes 16S rRNA
  source 1..490: mol_type = genomic DNA
agagtttgatcatggctcaggatgaacgctggcggcgtgcctaacacatgcaagtcgaacggagcagttccttcgggagctgcttagtggcggacgggtgagtaacgcgtgagcaacctgcccttcagagggggacaacagttggaaacgactgctaataccgcatgatgtatccgggaggcatcttccggataccaaagatttatcgctgaaggatgggctcgcgtctgattagatagttggtgaggtaacggcccaccaagtctacgatcagtagccggactaagaggttgaacggccacattgggactgagatacggcccagactcctacgggaggcagcagtggggaatattgggcaatggggggaaccctgacccagcaacgccgcgtgaaggaagaaggctttcgggttgtaaacttcttttaagagggacgaagaagtgacggtacctcttgaataagccacggctaactacgtgccagcagc

SEQ ID NO: 5934 - DNA, 490 bp, unidentified
  misc_feature 1..490: note = Ascusbbf_1745532, encodes 16S rRNA
  source 1..490: mol_type = genomic DNA
agagtttgatcatggctcaggacgaacgctggcggcgtgcctaacacatgcaagtcgagcggggatatcaggaacggcggcttcggctaaagggagaggtattccagcggcggacgggtgagtaacgcgtgaactatctgtcccggacagggggataacacttggaaacaggtgctaataccgcataagaccacgtggccgcatggccgaggggtcaaaggagcgatccggtccggggtgagttcgcgtctgattaaatagttggtgaggtaacggcccaccaagtcaacgatcagtagccgacctgagagggtgaacggccacattggaactgagagacggtccaaactcctacgggaggcagcagtgggaatattgggcaatgggcgaaagcctgacccagcaacgccgcgtgagggaagaaggttttcggattgtaaacctctgttgtgggtgacgaaggaagtgacggtagtccacaaggaagccc

SEQ ID NO: 5935 - DNA, 490 bp, unidentified
  misc_feature 1..490: note = Ascusbbf_19818, encodes 16S rRNA
  source 1..490: mol_type = genomic DNA
agagtttgatcatggctcaggatgaacgctggcggcgtgcctaacacattcaagtcgaacggagttattccggcgaggtcttcgggccaagctgttttaacttagtggcggacgggtgagtaacgcgtgagcaacctgcctttgcaaccgggataacagccggaaacagctgctaatacgggatgatgtatatctgccgcatgacagatataccaaagatccgttgtgcaaagatgggctcgcgtctgattagatagttggcggggcaacggcccaccaagtcgacgatcagtagccggactgagaggttgaacggccacattggaactgagatacggtccagactcctacgggaggcagcagtggggaatattgggcaatggacgaaagtctgacccagcgacgccgcgtgagggaagaaggtcttcggattgtaaacctctgttgatagggaagaagacagtgacggtacctatcgaggaagtcacgg

SEQ ID NO: 5936 - DNA, 490 bp, unidentified
  misc_feature 1..490: note = Ascusbbf_85825, encodes 16S rRNA
  source 1..490: mol_type = genomic DNA
agagtttgatcctggctcagagttaacgctggcggcgtgcctaacacatgcaagtcgagcgaattcttacagagcatcgtaagagttagcggcaaacgggtgagtaacacatgggaaacctcccttagaatggggaatatctccgtgaaaacggagctaataccgcataagaccacagtttggcatcaaacaggggtaaaagcagcaatgcgttctaagatggtcctgtgtcctatcagctagttggtgagataacggcttaccaaggctaagacgggtatccggcctgaaagggtgaacggacacactggaactgagacacggtccagactcctacgggaggcagcagtggggaattttggacaatgggggaaaccctgatccagcgacgccgcgtggaggacgaaggtcttcggattgtaaactccttttggaggggaagaaaaaaatgacggtaccctcagaaaaagccacggctaacttcgtgcca

SEQ ID NO: 5937 - DNA, 490 bp, unidentified
  misc_feature 1..490: note = Ascusbbf_154177, encodes 16S rRNA
  source 1..490: mol_type = genomic DNA
agagtttgatcatggctcagaacgaacgccggcggcgcgtcttaagcatgcaagtcgggcgggattgaggagcttgctcctcatgagagcggcggactggtgagtaacgcgtgggcgacgtaccccctgcaccgggacagccggcagaaatgccgggtgatacgggataagctcttaccctgcggtggggtgagaggaaagcggctacggccgcggcaggggaacggcccgcgtcccatcagctagtcggcggggtaaaggcccaccgaggcaacgacgggtacccggactgagaggttggacgggcacattgggactgagatacggcccagactcctacgggaggcagcagctaagaatattccgcaatgggcgaaagcctgacggagcgacgccgcgtggacgatggaggccggaaggttgtaaagtcctctggcgggggaagaagaagcaggggagggaatgcccctgcggtgaccgtaccccgaga

SEQ ID NO: 5938 - DNA, 490 bp, unidentified
  misc_feature 1..490: note = Ascusbbf_8939, encodes 16S rRNA
  source 1..490: mol_type = genomic DNA
agagtttgatcatggctcaggacgaacgctggcggcgtgcttcatacatgcaagtcgaacgagaagcaggagcttgctcctgtggaaagtggcggacgggtgagtaatatgtagagaatctgccctagagagggggacaacagagggaaacttctgctaataccccatatgagcgtagctgaaatgctattcttgaaaactccggtgctctaggatgagtctgcatctgattagcttgttggcggtgtaatggaccaccaaggcgacgatcagtagctggtttgagaggatgatcagccacaatgggactgagacacggcccatactcctacgggaggcagcagtagggaattttgcgcaatgggcgaaagcctgacgcagcaacgccgcgtgaacgatgacgcccctcggggtgtaaagttctgtcagtagggacgaaacttgacggtacctacagaggaagcaccggctaactccgtgccagcagccg

SEQ ID NO: 5939 - DNA, 470 bp, unidentified
  misc_feature 1..470: note = Ascusbbf_38717, encodes 16S rRNA
  source 1..470: mol_type = genomic DNA
agagtttgatcatggctcagaacgaacgctggcggcaggcctaacacatgcaagtcgaacgctgtagcaatacagagtggcagacgggtgagtaacacgtgggaatcttcctatcggtgcggaatagcccagggaaacttggggtaataccgcatacgcccttcgggggaaagatttatcgccgatagacgagcccgcgtctgattagctagttggtggggtaatggcctaccaaggcgacgatcagtagctggtctgagaggatgatcagccacactgggactgagacacggcccagactcctacgggaggcagcagtggggaatattggacaatgggcgaaagcctgatccagccatgccgcgtgagtgacgaaggtcttcggattgtaaagctcttttggcggggacgataatgacggtacccgcagaataagccccggctaacttcgtgccagcagccgcggtaat

SEQ ID NO: 5940 - DNA, 490 bp, unidentified
  misc_feature 1..490: note = Ascusbbf_12288, encodes 16S rRNA
  source 1..490: mol_type = genomic DNA
agagtttgatcctggctcaggacgaacgctggcggcgtgcctaatacatgcaagtcgtacgcttctttttccaccggagcttgctccatcggaaaaagaagagtggcgaacgggtgagtaacacgtgggtaacctgcccatcagaaggggataacacttggaaacaggtgctaataccgtataacaatcgaaaccgcatggttttgatttgaaaggcgctttcgggtgtcgctgatggatggacccgcggtgcattagctagttggtgaggtaacggctcaccaaggccacgatgcatagccgacctgagagggtgatcggccacattgggactgagacacggcccaaactcctacgggaggcagcagtagggaatcttcggcaatggacgaaagtctgaccgagcaacgccgcgtgagtgaagaaggttttcggatcgtaaaactctgttgttagagaagaacaaggatgagagtaactgttcatccct

SEQ ID NO: 5941 - DNA, 490 bp, unidentified
  misc_feature 1..490: note = Ascusbbf_27513, encodes 16S rRNA
  source 1..490: mol_type = genomic DNA
agagtttgatcctggctcaggacgaacgctggcggcgtgcttcacacatgcaagtcgaacggaaaggccctttcgggggtactcgagtggcgaacgggtgagtaacacgtgagtaatctgcctttggctttgggataagcctcggaaacggggtctaataccggatgtgacctgtccctgcatgggggtgggtggaaagtttttcggccagagatgagctcgcggtttatcagcttgttggtggggtaatggctcaccaaggctttgacggatagccggcctgagagggcgaccggccacactgggactgagacacggcccagactcctacgggaggcagcagtggggaatattgcgcaatgggcgaaagcctgacgcagcgacgccgcgtgagggatgacggccttcgggttgtaaacctctttcagtaccgacgaagtgagaatgacggtaggtacagaagaagcgccggctaactacgtgccagcag

SEQ ID NO: 5942 - DNA, 490 bp, unidentified
  misc_feature 1..490: note = Ascusbbf_25768, encodes 16S rRNA
  source 1..490: mol_type = genomic DNA
agagtttgatcctggctcaggatgaacgctggcggcgtgcctaacacatgcaagtcgaacggttaaaccggcttcggccggaaatagagtggcgaacgggtgagtaacacgtgaccaacctgccccgcgcaccgggatagccccccgaaagggggattaataccggatgcgccgggagggccgcatggccctcccgggaaagcctttgcggcgcgggatggggtcgcggcccatcaggtagtaggcggggtagaggcccgcctagcctacgacgggtagccgggttgagagaccgaccggccacattgggactgagatacggcccagactcctacgggaggcagcagtggggaatattgcgcaatgggggcaaccctgacgcagcaacgccgcgtgcgggacgaaggccttcgggttgtaaaccgctttcagcagggaagacatcgacggtacctgcagaagaagccccggctaactacgtgccagcagc

SEQ ID NO: 5943 - DNA, 490 bp, unidentified
  misc_feature 1..490: note = Ascusbbf_12913, encodes 16S rRNA
  source 1..490: mol_type = genomic DNA
agagtttgatcatggctcaggacaaacgctggcggcgcacataagacatgcaagtcgaacggacttaatcgatttatttataaattgaagcggttagtggcggactggtgagtaacacgtgggcaacctgcctttaagaggggaataacagtgagaaatcattgctaataccgcataatgttattttgtcgcatgacagagtaaccaaaggagcaatccgcttaaagatgggcccgcgcctgattagctagttggtgtggtaacggcataccaaggcgacgatcagtagccggactgagaggttcaacggccacattgggactgagatacggcccagactcctacgggaggcagcagtcgggaatattgcacaatggaggaaactctgatgcagtgacgccgcgtataggaagaaggttttcggattgtaaactattgtcgaaggggaagaataaatgacagtacccttggaggaagccccggctaacta

SEQ ID NO: 5944 - DNA, 490 bp, unidentified
  misc_feature 1..490: note = Ascusbbf_137997, encodes 16S rRNA
  source 1..490: mol_type = genomic DNA
agagtttgatcatggctcaggacgaacgctggcggcgtgcctaatacatgcaagtcgagcggaccaattagaaagcttgctttttgattggttagcggcggacgggtgagtaacacgtgggtaacctgccctatagaccgggataactcgcggaaacgcgtgctaataccggataacacatcgaagcgcatgcttcggggttgaaagatggttctgctatcactataggatgggcccgcggcgcattagctagttggtggggtaacggcctaccaaggcgacgatgcgtagccgacctgagagggtgatcggccacactgggactgagacacggcccagactcctacgggaggcagcagtagggaatcttccacaatgggcgaaagcctgatggagcaacgccgcgtgagcgaagaaggtcttcggatcgtaaagctctgttgtaagggaagaacaagcgcagcagtcactggctgcgccctgacggtac

SEQ ID NO: 5945 - DNA, 490 bp, unidentified
  misc_feature 1..490: note = Ascusbbf_235920, encodes 16S rRNA
  source 1..490: mol_type = genomic DNA
agagtttgatcatggctcaggacgaacgctggcggcgtgcctaacacatgcaagtcgaacggacgaagggagcttgctcccctagttagtggcgaacgggtgagtaacgcgtgagcaacctgcctttcagagggggacaacggttggaaacgaccgctaataccgcatgaagcatcggggtcgcatggccttgatgttaaagatttatcgctgaaagatgggctcgcgtctgattagatagttggcggggtaacggcccaccaagtcgacgatcagtagccggactgagaggttgaacggccacattgggactgagatacggcccagactcctacgggaggcagcagtggggaatattgggcaatgggggaaaccctgacccagcaacgccgcgtgaaggaagaaggctttcgggttgtaaacttcttttaccagggacgaaggacgtgacggtacctggagaaaaagccacggctaactacgtgccagc

SEQ ID NO: 5946 - DNA, 490 bp, unidentified
  misc_feature 1..490: note = Ascusbbf_20277, encodes 16S rRNA
  source 1..490: mol_type = genomic DNA
agagtttgatcatggctcaggacgaacgctggcggcgtgcctaatacatgcaagtcgagcggacggatgggagcttgctcccagaagttagcggcggacgggtgagtaacacgtgggcaacctgccctatagttggggataactccgggaaaccggggctaataccgaatgatataatttagctcctgctagattgttgaaagatggtttacgctatcgctataggatgggcccgcggcgcattagctagttggtgaggtaacggctcaccaaggcgacgatgcgtagccgacctgagagggtgatcggccacactgggactgagacacggcccagactcctacgggaggcagcagtagggaatcttccacaatgggcgaaagcctgatggagcaacgccgcgtgagtgaagaaggttttcggatcgtaaaactctgttgtaagggaagaacaagtacagtagtaactggctgtaccttgacggtacctt

SEQ ID NO: 5947 - DNA, 490 bp, unidentified
  misc_feature 1..490: note = Ascusbbf_44545, encodes 16S rRNA
  source 1..490: mol_type = genomic DNA
agagtttgatcatggctcagattgaacgctggcggcaggcttaacacatgcaagtcgagcggtaacagagagaagcttgcttctctgctgacgagcggcggacgggtgagtaatgcctaggaatctgcctagtagtgggggataacttgccgaaaggtaagctaataccgcatacgtcctacgggagaaaggaggggaccttcgggcctttcgctattagatgagcctaggtcggattagttagttggtgaggtaatggctcaccaagaccgcgatccgtaactggtctgagaggatgatcagtcacactggaactgagacacggtccagactcctacgggaggcagcagtggggaatattggacaatgggggaaaccctgatccagccatgccgcgtgtgtgaagaaggtcttaggattgtaaagcactttaagttgggaggaagggcagttaactaatatttgactgttttgacgttaccgacagaat

SEQ ID NO: 5948 - DNA, 490 bp, unidentified
  misc_feature 1..490: note = Ascusbbf_5791, encodes 16S rRNA
  source 1..490: mol_type = genomic DNA
agagtttgatcatggctcaggacgaacgctggcggcgtgcttaacacatgcaagtcgaacgaggttattttgatgagatcttcggatggattcggaataaccgagtggcggacgggtgagtaacgcgtgagcaacctgtcttacacagggggataacgctccgaaaggagtgctaataccgcataggaccacggtgctgcatggcattgaggtgaaaggagcaatccggtgtaaggtgggctcgcgtcccattagatagttggtgaggtaacggctcaccaagtcgacgatgggtagccgacctgagagggtgatcggccacattggaactgagatacggtccagactcctacgggaggcagcagtggggaatattgggcaatgggcgaaagcctgacccagcaacgccgcgtgagggaagaaggtcttcgggttgtaaacctctgtcctaagtgaaaaggaaggatggtagcttaggaggaagccccgg

SEQ ID NO: 5949 - DNA, 490 bp, unidentified
  misc_feature 1..490: note = Ascusbbf_9749, encodes 16S rRNA
  source 1..490: mol_type = genomic DNA
agagtttgatcatggctcaggacgaacgctggcggcatgcctaacacatgcaagtcgaacggagttattgagagcttgctcttaataacttagtggcggacgggtgagtaacgcgtgagcaacctgcctttcagtggggaataatactttgaaaagagtactaataccgcatgaagtatattgaccgcatgatcgatataccaaagatttatcgctgagagatgggctcgcgtccgattagctagttggtggggtaacggcccaccaaggcgacgatcggtagccggactgagaggttgaacggccacattgggactgagacacggcccagactcctacgggaggcagcagtgggggatattgcgcaatgggggaaaccctgacgcagcaatgccgcgtgaaggattgaaggtcttcggattgtaaacttcttttgtcagggacgaacaatgacggtacctgacgaataagctccggctaactacgtgcc

SEQ ID NO: 5950 - DNA, 490 bp, unidentified
  misc_feature 1..490: note = Ascusbbf_42129, encodes 16S rRNA
  source 1..490: mol_type = genomic DNA
agagtttgatcctggctcagagttaacgctggcatcgtgcataacacatgcaagtcgaacgggactttgctttgtagcaatacagagtaaagtttagtggcagacgggtgagtaatgtataaggaacctaccttcgagtggggaataacagtccgaaaggattgctaataccccataacataacctagtggcatcacttagttatcaaagatttatcgcttgaagatggtcttatattctatcagctagttggcagtgtaacggactaccaaggctacgacggatagccggcctgaaagggcgaccggccacaagggcactgagacacgggccctactcctacgggaggcagcagtggggaattttggacaatgggcgaaagcctgatccagcaacgatgcgtggaggacgaaggttctcggattgtaaactccttttgtgagggaagaaaaaaatgacggtacctcacgaataagccacggctaactac

SEQ ID NO: 5951 - DNA, 490 bp, unidentified
  misc_feature 1..490: note = Ascusbbf_4121, encodes 16S rRNA
  source 1..490: mol_type = genomic DNA
agagtttgatcatggctcaggacgaacgctggcggcgtgcttaacacatgcaagtcgaacggagttaagcgctgaaatgatgctagcttgctagtggattttcttgcttaacttagtggcggacgggtgagtaacgcgtgagtaacctgcctctcagtggggaataacgccctgaaaagagcgctaataccgcataatatatttttgccgcatgacaggaatatcaaagatttatcgctgagagatggactcgcgtccgattagctagttggcggggtaacggcccaccaaggcgacgatcggtagccggactgagaggttgaacggccacattgggactgagacacggcccagactcctacgggaggcagcagtgggggatattgcgcaatgggggaaaccctgacgcagcaacgccgcgtggaggatgacggttttcggattgtaaactccttttataagggacgaactaagacggtaccttatgaat

SEQ ID NO: 5952 - DNA, 490 bp, unidentified
  misc_feature 1..490: note = Ascusbbf_25066, encodes 16S rRNA
  source 1..490: mol_type = genomic DNA
agagtttgatcatggctcaggattaacgctggcggcgtgcctaacacatgcaagtcgaacggaatatcttcggatatttagtggcgaacgggtgagtaatatacaggtaatgtaccttcgtactgcgaataacaagctgaaaagtttgctaatacggaatagtttccttagagggcatcctttgaggaataaagatttatcgtgcggagatcagcctgtatcctattagttagttggtggggtaatggcctaccaagacgacgatgggtaactggtctgagaggatgagcagtcacattggaactgagaaacggtccaaactcctacgggaggcagcagtgaggaattttgcgcaatgggggaaaccctgacgcagcaacgccgcgtgagtgatgacggccttcgggttgtaaagctctgtcgtgtatgacgagtagggacggtaatacacaaggaagcctcggctaactacgtgccagcagccgcggta

SEQ ID NO: 5953 - DNA, 490 bp, unidentified
  misc_feature 1..490: note = Ascusbbf_1324844, encodes 16S rRNA
  source 1..490: mol_type = genomic DNA
agagtttgatcctggctcaggacgaacgctggcggcgtgcttaacacatgcaagtcgaacgaagctcccaaagcaagacttcggtcaagtggagggaagacttagtggcggacgggtgagtaacgcgtgagcaacctgcccttcagagggggacaacagttggaaacgactgctaataccgcataacatagggagatggcatcatttctctatcaaagaaatatcgctgaaggatgggctcgcgtctgattagctggttggtggggtaaaggcctaccatggcgatgctcagtagccggagtgggaggttgaacggcaacattgggactggggtacggcccagactccgacgggaggcagcagtggggaatattgggcaatgggggaaaccctgacccagcaacgccgcgtgaaggaagaaggctttcgggttgtaaacttcttttatctgggacgaaggaagtgacggtaccagatgaataagccacag

SEQ ID NO: 5954 - DNA, 490 bp, unidentified
  misc_feature 1..490: note = Ascusbbf_947, encodes 16S rRNA
  source 1..490: mol_type = genomic DNA
agagtttgatcctggctcaggacgaacgctggcggcgtgcctaacacatgcaagtcgaacgagaatttagcggatgattccttcgggatgaatttgctgaaggaaagtggcggacgggcgagtaacgcgtgaataacctgcccataagagggggataatccgtggaaacgcggactaataccgcatattgagtgattatcgcatggtttttacttgaaagatttatcgcttatggatggattcgcgtcagattagatagttggtgaggtaacggctcaccaagtcaacgatctgtagccgaactgagaggttgatcggccgcattgggactgagacacggcccagactcctacgggaggcagcagtggggaatattgcgcaatgggggaaaccctgacgcagcaacgccgcgtgcaggaagaaggtcttcggattgtaaactgttgtcgcaagggaagaagaaagtgacggtaccttgtgagaaagtcac

SEQ ID NO: 5955 - DNA, 490 bp, unidentified
  misc_feature 1..490: note = Ascusbbf_1682, encodes 16S rRNA
  source 1..490: mol_type = genomic DNA
agagtttgatcatggctcaggacgaacgctggcggcgtgcctaatacatgcaagtcgagcgagtcccttcgggggctagcggcggacgggtgagtaacacgtaggcaacctgcctctcagaccgggataacatagggaaacttatgctaataccggataggtttttggatcgcatgatccgaaaagaaaagatggcttcggctatcactgggagatgggcctgcggcgcattagctagttggtggggtaacggcctaccaaggcgacgatgcgtagccgacctgagagggtgaccggccacactgggactgagacacggcccagactcctacgggaggcagcagtagggaattttccacaatggacgaaagtctgatggagcaacgccgcgtgaacgatgaaggtcttcggattgtaaagttctgttgtcagggacgaacaagtaccgttcgaacagggcggtaccttgacggtacctgacgagaaagcc

SEQ ID NO: 5956 - DNA, 490 bp, unidentified
  misc_feature 1..490: note = Ascusbbf_5102, encodes 16S rRNA
  source 1..490: mol_type = genomic DNA
agagtttgatcatggctcaggatgaacgctagctacaggcctaacacatgcaagtcgaggggcagcatggagcttgcttgcaagctctgatggcgaccggcgaatgggtgagtcacgcgtgtccaacctgccccgcgcccggggatagcccttggaaatgaggattaagacccgatacgtgcgttgtccgcatggacgtcgcatgaaaccaggcacgggatggggacgcgtcggattagcttgacggcggggcaacggcccaccgtggcgacgatccgcaggggttctgagaggaaggtcccccacactggcactgagacacgggccagactcctacgggaggcagcagtgaggaatattggtcaatggccgagaggctgaaccagccaagtagcgtgcaggatgacggccctacgggttgtaaactgcttttgcgggaggataaagtgcgccacgcgctggcgctttgcaggtatcccgtgaataagga

SEQ ID NO: 5957 - DNA, 490 bp, unidentified
  misc_feature 1..490: note = Ascusbbf_12142, encodes 16S rRNA
  source 1..490: mol_type = genomic DNA
agagtttgatcctggctcaggatgaacgctggcggcgtgcttaacacatgcaagtcgaacgaagcgccggaccttcgggaccggcgactgagtggcggacgggtgagtaacgcgtgggtaacctgccctgtacagggggataacagttagaaatgactgctaataccgcataagcatacgaggaggcatctccttgtgtgaaaaactccggtggtacaggatgggcccgcgtctgattagcttgttggcagggtaagggcctaccaaggcgacgatcagtagccggtctgagaggatgaacggccacattggaactgagacacggtccaaactcctacgggaggcagcagtggggaatattgcacaatgggggaaaccctgatgcagcaacgccgcgtgagtgatgaagtatttcggtatgtaaagctctatcagcagggaagatgatgacggtacctgactaagaagctccggctaaatacgtgccagc

SEQ ID NO: 5958 - DNA, 490 bp, unidentified
  misc_feature 1..490: note = Ascusbbf_19164, encodes 16S rRNA
  source 1..490: mol_type = genomic DNA
agagtttgatcctggctcaggatgaacgctagctacaggcttaacacatgcaagtcgaggggcagcgggaagtttgcttgcaagcttcgccggcgaccggcgcacgggtgagtaacgcgtatccaacctgccccacggtcggggacagcccggcgaaagtcggattaacccccgatggtcccgcaagacggcatcagattgcgggtaaaggcttgtccgccgtgggatggggatgcgtaggattaggcagcaggcggggtgacggcccacctggccggcgatccttaggggttctgagaggaaggtcccccacactggtactgagacacggaccagactcctacgggaggcagcagtgaggaatattggtcaatgggcggaagcctgaaccagccaagtagcgtgcaggatgacggccctacgggttgtaaactgcttttatgcggggataaagtgcgccacgtgtggcgttttgcaggtaccgcatgaa

SEQ ID NO: 5959 - DNA, 490 bp, unidentified
  misc_feature 1..490: note = Ascusbbf_8544, encodes 16S rRNA
  source 1..490: mol_type = genomic DNA
agagtttgatcatggctcagaacgaacgctggcggcatggattaggcatgcaagtcgaacgaggtagcaataccgagtggcggaagggtgaggaacgcgtgagtaatctgccccctagttgggaataacagttggaaacgactgctaataccgaatgtggcttttgggtcgcatgacctgaaggctaaagatttatcgctaggggatgagctcgcgtcccattagctagttggtgaggcaacggctcaccaaggcgacgatgggtagctggtctgagaggatggtcagccacactgggactgagacactgcccagactcctacgggaggctgcagtcgagaatcttgggcaatgcgcgaaagcgtgacccagcaatgccgcgtgcgggatgaaggtcttcggattgtaaaccgctgtcaaccgggacgaacacaatgactgtaccggtgaaggaagccacggctaactacgtgccagcagccgcggtaat

SEQ ID NO: 5960 - DNA, 490 bp, unidentified
  misc_feature 1..490: note = Ascusbbf_15359, encodes 16S rRNA
  source 1..490: mol_type = genomic DNA
agagtttgatcctggctcaggatgaacgctggcggcgtgcttaacacatgcaagtcgagcgagaaacttacagatgacgcttcggttgattcagtaagcggaaagcggcggacgggtgagtaacgcgtaggcaacctgcccctggcagagggatagcatcgggaaactgatattaagacctcataacgcatccacatcacatgatgaggatgccaaagatttatcggcaagggatgggcctgcgtctgattagttagttggtgaggtaacggctcaccaaggcagcgatcagtagccgacctgagagggtgatcggccacattggaactgagacacggtccagactcctacgggaggcagcagtggggaatattgcacaatgggggaaaccctgatgcagcaacgccgcgtgagcgatgaaggcctttgggtcgtaaagctctgtccttggggaagaaaaaaatgacggtacccttggaggaagccccgg

SEQ ID NO: 5961 - DNA, 490 bp, unidentified
  misc_feature 1..490: note = Ascusbbf_224884, encodes 16S rRNA
  source 1..490: mol_type = genomic DNA
agagtttgatcctggctcaggacgaacgctggcggcgtgcttcatacatgcaagtcgaacgagaaactaacttcggttagtggaaagtggcggacgggtgagtaatgtgtagagaatctgccttcaagcgggggatagccactggaaacggtgattaataccccatatgagcgtagctgaaatgctattcttgaaaactccggtgcttggagatgagtctgcatctgattagctagttgggggtgtaatggaccaccaaggcgacgatcagtagctggtttgagaggatgatcagccacaatgggactgagacacggaccatactcctacgggaggcagcagtagggaattttgcgcaatgggggaaaccctgacgcagcaacgccgcgtgatcgagacgcttttcggagtgtaaagatctgtcagtggggacgaataatgacggtacccacagaggaagcaccggctaactccgtgccagcagccgcgg

SEQ ID NO: 5962 - DNA, 490 bp, unidentified
  misc_feature 1..490: note = Ascusbbf_15621, encodes 16S rRNA
  source 1..490: mol_type = genomic DNA
agagtttgatcatggctcagattgaacgctggcggcatgccttacacatgcaagtcgaacggtaacaggggcttcggcccgctgacgagtggcggacgggtgagtaatacatcggaatgtacccagtagtgggggatagctcggcgaaagccggattaataccgcatacgcactgtggtggaaagcgggggaccttcgggcctcgtgctattggagcagccgatgtcagattagctagttggtggggtaaaagcctaccaaggcgacgatctgtaactggtctgagaggacgaccagtcacactgggactgagacacggcccagactcctacgggaggcagcagtggggaattttggacaatgggcgcaagcctgatccagcaatgccgcgtgtgtgacgaaggccttcgggttgtaaagcacttttgttcgggaagaaatctgtcgggataatacctcgacgggatgacggtaccggaagaataagcac

SEQ ID NO: 5963 - DNA, 490 bp, unidentified
  misc_feature 1..490: note = Ascusbbf_12194, encodes 16S rRNA
  source 1..490: mol_type = genomic DNA
agagtttgatcatggctcaggacgaacgctggcggcatgcttaacacatgcaagtcgaacgggcatatttggctatagcgatatagttggatatgtttagtggcgaacgggtgagtaacgcgtgagcaacctgccgtatacactgggataacagaccgaaaggactgctaataccggataagaccacgagaggggcatcccttgggggtcaaagtgatttagcggtatacgatgggctcgcgtcctattaggtagttggtgagataacagcccaccaagcctatgataggtagccgacttgagagagtgatcggccacaatggaactgagacacggtccatactcctacgggaggcagcagtggggaatattgggcaatgggcgaaagccttacccagcaatgccgcgtgaatgatgaaggtcttcggattgtaaatttcttttattggtgacgaacacaatgacggtagccgatgaataagccccggct

SEQ ID NO: 5964 - DNA, 490 bp, unidentified
  misc_feature 1..490: note = Ascusbbf_85994, encodes 16S rRNA
  source 1..490: mol_type = genomic DNA
agagtttgatcctggctcaggacgaacgctggcggcgtgcctaacacatgcaagtcgaacggagttatgtcacgaagttcttcggagcggacgatatagcttagtggcggacgggtgagtaacgcgtgagcaacctgcctttcagagggggacaacggttggaaacgaccgctaataccgcatgaaatgactggatcgcatgatccggtcatcaaagattttatcgctgaaagatgggctcgcgtctgattagatagttggtggggtaacggcccaccaagtcgacgatcagtagccggactgagaggttgaacggccacattgggactgagatacggcccagactcctacgggaggcagcagtggggaatattgggcaatgggggcaaccctgacccagcaacgccgcgtgaaggaagaaggctttcgggttgtaaacttcttttaccgaggacgaagaacgtgacggtactcggagaaaaagccacgg

SEQ ID NO: 5965 - DNA, 490 bp, unidentified
  misc_feature 1..490: note = Ascusbbf_106840, encodes 16S rRNA
  source 1..490: mol_type = genomic DNA
agagtttgatcatggctcaggattaacgctggcggcgtgcctaatacatgcaagtcgaatggtagcaataccatggcgaacgggtgagtaacacgtaggtaacctgtctttaagacgaggataaccgttggaaacgacggataatactcgataggtgattttagggcatcctagaatcattaaagatttatcacttagagaggggcctgcggcgcattagctagatggcggagtaatagcccaccatggcgatgatgcgtagccggactgagaggttgaacggccacaatggaactgagaacggtccatactcctacgggaggcagcagtagggaattttcggcaatgggcgaaagcctgaccgagcaacgccgcgtgaacgaagaagtatttcggtatgtaaagttcttttattggggaagaaaaatatccaaattgacggtacccaatgaataagctccggctaactacgtgccagcagccgcggtaa

SEQ ID NO: 5966 - DNA, 490 bp, unidentified
  misc_feature 1..490: note = Ascusbbf_24125, encodes 16S rRNA
  source 1..490: mol_type = genomic DNA
agagtttgatcatggctcaggacgaacgctggcggcatgcctaatacatgcaagtcgaacgagctgacagagtgcttgcactctcgacgcgagtggcggacgggtgagtaacacgtgggaaacctacctgtaagtatgggataacattcggaaacggatgctaataccatatagattttagttccgcatggaactaaaagaaaagacggctttgctgtcgcttacagatggtcccgcggcgcattagctagttggtgggataaaagctcaccaaggccatgatgcgtagccgacctgagagggtaaccggccacactgggactgagacacggcccagactcctacgggaggcagcagtagggaatcttccgcaatggacgaaagtctgacggagcaatgccgcgtgaatgaagaaggtcttcggatcgtaaaattctgttgttagagaagaacaaggagtaagtaactactactcccttgacggtatcta

SEQ ID NO: 5967 - DNA, 490 bp, unidentified
  misc_feature 1..490: note = Ascusbbf_21126, encodes 16S rRNA
  source 1..490: mol_type = genomic DNA
agagtttgatcatggctcaggacgaacgctggcggtatgcctaacacatgcaagtcgaacgggtgaatgaagagcttgctctttatttcattagtggcggacgggtgagtaacgcgtgagtaatctgccttgaagtgggggataacatttggaaacaagtgctaataccgcgtaagatatgttcttcgcatgaagtctgtatcatagtttttcgcttcaagatgagctcgcgtccgattagtttgttggcgaggtaaatgctcaccaagactgcgatcggtagccgggttgagagactgaacggccacattgggactgagacacggcccagactcctacgggaggcagcagtggggaatattgcacaatgggggaaaccctgatgcagcaataccgcgtgagggatgaaggctctagggttgtaaacctctgtccaaagggacgaattttgacggtacctttgaaggaagctccggctaactacgtgcca

SEQ ID NO: 5968 - DNA, 490 bp, unidentified
  misc_feature 1..490: note = Ascusbbf_31123, encodes 16S rRNA
  source 1..490: mol_type = genomic DNA
agagtttgatcctggctcaggacgaacgctggcggcgtgcttaacacatgcaagtcgaacggacgatttcccttcggggagaaagttagtggcggacgggtgagtaacgcgtgagtaacctgccttggaatgggggataacacagggaaacctgtgctaataccgcataacatcacgatggggcatcccaatgtgatcaaagatttattgttccaagatgggctcgcgtccgattagatagttggtgaggtaacggcccaccaagtcgacgatcggtagccggactgagaggttggccggccacattgggactgagatacggcccagactcctacgggaggcagcagtgaggaatattaggcaatgggggaaaccctgacctagcgacgccgcgtgaaggatgaaggttttcggattgtaaacttcttttatgagggacgatagtgacggtacctcatgaataagccacggctaactacgtgccagcagc

SEQ ID NO: 5969 - DNA, 490 bp, unidentified
  misc_feature 1..490: note = Ascusbbf_16263, encodes 16S rRNA
  source 1..490: mol_type = genomic DNA
agagtttgatcatggctcagattgaacgctggcggcaggcctaacacatgcaagtcgagcgcgaaagttcttcggaatgagtagagcggcggacgggtgagtaacgcgtgggaatctacccagtagtgggggacaacgtctcgaaagggacgctaataccgcatacgccctacgggggaaagggggggatcttcggacctctcgctattggatgagcctgcgtcggattagctagttggtggggtaaaggcctaccaaggcgacgatccgtaactggtctgagaggatgatcagtcacactggaactgagacacggtccagactcctacgggaggcagcagtggggaatattggacaatgggcgaaagcctgatccagccatgccgcgtgtgtgaagaaggccttcgggttgtaaagcactttcagtggggagaaaggctgtttacttaatacgtaagcagattgatgttacccacagaagaagcaccgg

SEQ ID NO: 5970 - DNA, 490 bp, unidentified
  misc_feature 1..490: note = Ascusbbf_58276, encodes 16S rRNA
  source 1..490: mol_type = genomic DNA
agagtttgatcctggctcagattgaacgctggcggcaggcctaacacatgcaagtcgagcgcgaaaggtcttcggactgagtaaagcggcggacgggtgagtaacgcgtgggaatctgcctggtagtgggggacaacagccggaaacggctgctaataccgcatacgccctatgggggaaagcgggggatctttcgagacctcgtgctatcagatgagcccgcgtcggattagctagtaggtgaggtaaaggctcacctaggcgacgatccgtagctggtctgagaggatgatcagccacactggaactgagacacggtccagactcctacgggaggcagcagtggggaatattgcacaatgggggaaaccctgatgcagccatgccgcgtgtgtgaagaaggccttcgggttgtaaagcactttaagttgggaggaaggcctaaaggttaataccctttaggattgacgttaccaacagaataagcacc

SEQ ID NO: 5971 - DNA, 490 bp, unidentified
  misc_feature 1..490: note = Ascusbbf_130629, encodes 16S rRNA
  source 1..490: mol_type = genomic DNA
agagtttgatcatggctcaggatcaacgctggcggcgtgcctaatgcatgcaagtcgaacggggcttccttcgggaggttcacgtggcggacgggtgaggaacacgtgggcgacctaccctggggcgggggatacccgcgagaaatcgtggataattccgcatacgctcgctctgcggttggcagggtgaggaaaggtgcatttcggtgcgccacccttggcggggcctgcggccgattagctagttgggggggtaacggcctcccaaggcgatgatcggtagctggtctgagaggacggccagccacacggggactgagacacggccccgactcctacgggaggcagcagcaaggaatcttccgcaatgggcgaaagcctgacggagcaacgccgcgtgcgggatgacgcctttcggggtgtaaaccgcttttctgggggaagaagatcatcgcaagatggtttgacggtaccgcaggaagaaggaccg

SEQ ID NO: 5972 - DNA, 490 bp, unidentified
  misc_feature 1..490: note = Ascusbbf_141355, encodes 16S rRNA
  source 1..490: mol_type = genomic DNA
agagtttgatcctggctcaggatgaacgctggcggcgtgcttaacacatgcaagtcgaacggacatgtaacaccgctgctgatttagcttgctattgacgcagcaccgttgcatgttagtggcggacgggtgagtaacgcgtgggtaacctgcctttatccgggggataacagttagaaatgactgctaataccgcataagcgcacgagggggcatccttttgtgtgaaaaactccggtggatagagatggacccgcgttagattagccagttggcggggtaacggcccaccaaagcgacgatctatagccggcctgagagggcgaccggccacattgggactgagacacggcccaaactcctacgggaggcagcagtggggaatattgcacaatgggggaaaccctgatgcagcgacgccgcgtgagtgaagaagtatttcggtatgtaaagctctatcagcagggaagaagatgacggtacctgcaca

SEQ ID NO: 5973 - DNA, 490 bp, unidentified
  misc_feature 1..490: note = Ascusbbf_71145, encodes 16S rRNA
  source 1..490: mol_type = genomic DNA
agagtttgatcctggctcaggatgaacgctagcggcaggcttaacacatgcaagtcgaggggcagcaggctgtagcaatacggtgctggcgaccggcgcaagggtgcgtaacgcgtgagcaatctgcccgtatcagggggataagcgatggaaacgtcgtctaataccgcataacaccgttcgtggcatcacggatggttgaaagcttcggtggatacggatgagctcgcgagacattagttagttggcggggtaacggcccaccaagaccgcgatgtctaggggaactgagaggttggtcccccacactggaactgagacacggtccagactcctacgggaggcagcagtgaggaatattggacaatggagggaactctgatccagccatgccgcgtgcaggaataaggtcctatggattgtaaactgcttttgagagggagcaataaggtgtacgtgtacaccgatgagagtacctttcgaataagca

SEQ ID NO: 5974 - DNA, 490 bp, unidentified
  misc_feature 1..490: note = Ascusbbf_109057, encodes 16S rRNA
  source 1..490: mol_type = genomic DNA
agagtttgatcctggctcagattgaacgctggcggcaggcctaacacatgcaagtcgagcggtaacatgggagcttgctcctgatgacgagcggcggacgggtgagtaacgcgcaggaatctacctggtagtgggggatagctcggggaaactcgaattaataccgcatacgtcctacgggagaaagtgggggatcttcggacctcatgctatttgatgagcctgcgtaagattagctagttggtggggtaaaggcctaccaaggcgacgatctttaactggtctgagaggatgatcagtcacaccggaactgagacacggtccggactcctacgggaggcagcagtggggaatattggacaatgggggcaaccctgatccagccatgccgcgtgtgtgaagaaggccttcgggttgtaaagcactttaagttgggaggaaggccttgaggttaatacccttgaggattgacgttaccaacagaataagc

SEQ ID NO: 5975 - DNA, 490 bp, unidentified
  misc_feature 1..490: note = Ascusbbf_142245, encodes 16S rRNA
  source 1..490: mol_type = genomic DNA
agagtttgatcctggctcaggacgaacgctggcggcgtgcctaacacatgcaagtcgaacggagcacccttgacagcggcttcggccaatggataggaatgcttagtggcggacgggcgagtaacgcgtgagcaacctgcccttcagagggggataacgttctgaaaagaacgctaataccgcatgatgcatcctggggacatccccgggatgccaaaggagcaatccgctgaaggatgggctcgcgtccaattaggtagttggtgaggtaacggcccaccaagccgacgattggtagccgaactgagaggttgatcggccgcattgggactgagacacggcccagactcctacgggaggcagcagtgggggatattgcgcaatgggggaaaccctgacgcagcaacgccgcgtgaaggaagaaggtcttcggattgtaaacttttgtcttgtgggaagataatgacggtaccacaggaggaagctccgg

SEQ ID NO: 5976 - DNA, 490 bp, unidentified
  misc_feature 1..490: note = Ascusbbf_137045, encodes 16S rRNA
  source 1..490: mol_type = genomic DNA
agagtttgatcctggctcaggatgaacgctagcggcgggcctaatacatgcaagtcgaggggcagcggaggtagcaatacttgccggcgaccggcgcacgggtgcgtaacgcgtatgcaacctacccataacacgggaatagcccgaagaaattcggattaatactcgatagtatcacttgatggcatctgaaggtgattaaagatttatcggttatggatgggcatgcgtctgattagctagttggtgaggtaaaggctcaccaaggctacgatcagtaggggttctgagaggatgatcccccacaccggtactgagacacggaccggactcctacgggaggcagcagtaaggaatattggtcaatggacgcaagtctgaaccagccacgccgcgtgcaggatgacggccctatgggttgtaaactgcttttgtttgggaagaaaccccttttgcgaaagggactgacggtaccagacgaataagcacc

SEQ ID NO: 5977 - DNA, 490 bp, unidentified
  misc_feature 1..490: note = Ascusbbf_1621314, encodes 16S rRNA
  source 1..490: mol_type = genomic DNA
agagtttgatcatggctcagattgaacgctggcggcaggcctaacacatgcaagtcgaacggtagcacagagagcttgctctcgggtgacgagtggcggacgggtgagtaatgtctgggaaactgcctgatggagggggataactactggaaacggtagctaataccgcataacgtcgcaagaccaaagagggggaccttcgggcctcttgccatcagatgtgcccagatgggattagctagtaggcggggtaatggcccacctaggcgacgatccctagctggtctgagaggatgaccagccacactgaactgagacacggtccagactcctacgggaggcagcagtggggaatattgcacaatgggcgcaagcctgatgcagccatgccgcgtgtgtgaagaaggccttcgggttgtaaagcactttcagcggggaggaaggcagtacggttaataaccgtactgattgacgttacccgcagaagaag

SEQ ID NO: 5978 - DNA, 490 bp, unidentified
  misc_feature 1..490: note = Ascusbbf_104898, encodes 16S rRNA
  source 1..490: mol_type = genomic DNA
agagtttgatcatggctcaggatgaacgctagcgacaggcctaacacatgcaagtcgaggggtaacaggggcttcggcccgctgacgaccggcgcacgggtgagtaacgcgtatgcaacctacctgtaactgggggatagctccctgaaaggggaattaacaccgcataagaccacgctatcacatggtaaagtggtaaaatatttataggttacagatgggcatgcgtgacattagttagttggcggggtaacggcccaccaagactacgatgtctaggggttctgagaggaaggtcccccacactggtactgagacacggaccagactcctacgggaggcagcagtgaggaatattggtcaatggacgcaagtctgaaccagccatgtcgcgtgcaggaagactgccctatgggttgtaaactgcttttgtacgggaagaaaatcagctacgtgtagttgtttgccggtaccgtacgaataaggatcg

SEQ ID NO: 5979 - DNA, 490 bp, unidentified
  misc_feature 1..490: note = Ascusbbf_143721, encodes 16S rRNA
  source 1..490: mol_type = genomic DNA
agagtttgatcctggctcaggatcaacgctggcggcgtgcctaatgcatgcaagtcgaacggggtcgccttcgggcggctcacgtggcggacgggtgaggaacacgtgggcgatctgccccgaggcgggggatagccaccagaaatggtgggtaagaccgcataagctcgctgaactgcggttcagtgaggaaaacctcttcggaggtaccttgggaggagcctgcggcggattagctagttggtggggtaacggcttaccaaggcgatgatccgtagctggtctgagaggatggccagccacaggggaactgagacacggtccccactcctacgggaggcagcagcaaggaattttccgcaatgggcgaaagcctgacggagcaacgccgcgtgggggatgacgcttttcggagtgtaaaccccttttctcagggaagaaaaaaatgacggtacctgaggaataaggaccggctaactacgtgccagca

SEQ ID NO: 5980 - DNA, 490 bp, unidentified
  misc_feature 1..490: note = Ascusbbf_85972, encodes 16S rRNA
  source 1..490: mol_type = genomic DNA
agagtttgatcctggctcaggatgaacgctggcggtgtgcctaatacatgcaagtcgagcggggatcttcggatcctagcggcgaacgggtgagtaacacgttggtaatctaccttctagttggggatacccaggcgaaagcttggctaataccgtaatacgtattaagttgaaatacttaatataaaaggcccttcggggtcgctagtagatgagcctgcgtctgattagctagttggtgagataatagcccaccaaggcgaggatcagtagccgacctgagagggtgatcggccacaatggaactgagacacggtccatactcctacgggaggcagcagtagggagtcttcgacaatgggggaaaccctgatcgagcaacaccgcgtgaatgatgaaggtcttcggattgtaaagttcttttatttgggagaaattgtaagggtaggtaatgacctttacttgatagtaccatttgaataagcaacga

SEQ ID NO: 5981 - DNA, 490 bp, unidentified
  misc_feature 1..490: note = Ascusbbf_268429, encodes 16S rRNA
  source 1..490: mol_type = genomic DNA
agagtttgatcatggctcaggacgaacgctggcggcgtgcttaacacatgcaagttgaacggtctgacatggaagcttgctgaagtgtcgggtagtagcggacgggtgagtaatgcatgagaagctgccattgggagggggacaacagttggaaacggctgctaataccccatatgccgaaaggtgaaagggagcgatccgcccgatgaggtgctcatgtcctatcagctggttggtgaggtaacggctcaccaaggcgacgacgggtagccggcctgagagggtgaccggccacactggaactgagatacggtccagactcctacgggaggcagcagtggggaatattgggcaatgggggcaaccctgacccagcgacgccgcgtgagggaagacggccttcgggttgtaaacctcttttgtacgggaagaaggacgtgacggtaccgtacgaataagtcccggctaactacgtgccagcagccgcggt

SEQ ID NO: 5982 - DNA, 490 bp, unidentified
  misc_feature 1..490: note = Ascusbbf_225345, encodes 16S rRNA
  source 1..490: mol_type = genomic DNA
agagtttgatcatggctcaggatgaacgctagcgataggcctaacacatgcaagtcgaggggcagcacatgagtagcaatacgatggtggcgaccggcgcacgggtgagtaacacgtatgcaacctacctttaacaggggaataacccgttgaaaaacggactaatactccatgacacaggggtcccgcatgggaatatttgttaaagatttatcggttgaagatgggcatgcgttccattagcttgttggtgaggtaacggctcaccaaggctacgatggataggggaactgagaggtttatcccccacactggaactgagacacggtccagactcctacgggaggcagcagtgaggaatattggtcaatggaggcaactctgaaccagccaagtcgcgtgaaggatgaaggtcttatggattgtaaacttcttttgcaagggaataaagtgggggacgtgtcctcctttgcatgtaccttgcgaataa

SEQ ID NO: 5983 - DNA, 490 bp, unidentified
  misc_feature 1..490: note = Ascusbbf_257714, encodes 16S rRNA
  source 1..490: mol_type = genomic DNA
agagtttgatcatggctcaggacgaacgctggcggtgtgcttaacacatgcaagtggtgcgacgaaccagacttcggtctggggcaaagccgcgaacgggtgagtaacacgtgggtaatctaccccgatgaccgggacaacccgaggaaactcgggctaataccggatgtggtacgcagacataagtctgcttactaaaggtagcttcggcttccgcattgggaggggcccgcggcccattagcttgttggtggggtcaaggcctaccaaggcaacgatgggtagctggtctgagaggacgatcagccacactgggactgagacacggcccagactcctacgggaggcagcagtggggaatcttgcgcaatgcgcgaaagcgtgacgcagcaacaccgcgtgagggaagacggccttagggttgtaaacctctttcagatgggacgaaggtcatccggtgaatagccgagatgattgacggtaccgtcag

SEQ ID NO: 5984 - DNA, 490 bp, unidentified
  misc_feature 1..490: note = Ascusbbf_260477, encodes 16S rRNA
  source 1..490: mol_type = genomic DNA
agagtttgatcatggctcaggatgaacgctagcggcaggcttaacacatgcaagtcgaggggtagaaatagcttgctattttgagaccggcgcacgggtgcgtaacgcgtatgcaatctgccttgtactgggggatagcccggagaaatccggattaataccccatagtattttagagtggcatcactttattattaaagatttatcggtacaagatgagcatgcgtcccattagttagttggtgtggtaacggcacaccaagacgatgatgggtaggggtcctgagagggagatcccccacactggtactgagacacggaccagactcctacgggaggcagcagtgaggaatattggtcaatggacgcaagtctgaaccagccatgccgcgtgcaggatgacggtcctatggattgtaaactgcttttatatgggaagaaaccccttttcgtgaagagggctgacggtaccataagaataaggatcggc

SEQ ID NO: 5985 - DNA, 490 bp, unidentified
  misc_feature 1..490: note = Ascusbbf_1766429, encodes 16S rRNA
  source 1..490: mol_type = genomic DNA
agagtttgatcctggctcaggatgaacgctggcggcgcgcctaacacatgcaagtcgaacgagcgagagagagcttgctttctcgagcgagtggcgaacgggtgagtaacgcgtgaggaacctgcctcaaagagggggacaacagttggaaacgactgctaataccgcataagcccacggctcggcatcgagcagagggaaaaggagcaatccgctttgagatggcctcgcgtccgattagctagttggtgaggtaacggcccaccaaggcgacgatcggtagccggactgagaggttgaacggccacattgggactgagacacggcccagactcctacgggaggcagcagtggggaatattgcacaatgggggaaaccctgatgcagcgacgccgcgtggaggaagaaggtcttcggattgtaaactcctgttgttggggaagataatgacggtacccaacaaggaagtgacggctaactacgtgccag

SEQ ID NO: 5986 - DNA, 470 bp, unidentified
  misc_feature 1..470: note = Ascusbbf_145360, encodes 16S rRNA
  source 1..470: mol_type = genomic DNA
agagtttgatcctggctcagaacgaacgctggcggcaggcttaacacatgcaagtcgaacgagaccttcgggtctagtggcgcacgggtgagtaacgcgtgggaatctaccttggagtctgggataacagttggaaacgactgctaataccggatacgccctgtgggggaaaggtttactgctccaagatgagcccgcgtccaattaggtagttggtggggtaaaggcctaccaagccgacgattggtagctggtctgagaggatggccagccacactgggactgagacacggcccagactcctacgggaggcagcagtggggaatattggacaatgggggcaaccctgatccagccatgccgcgtgagtgatgaaggccttagggttgtaaagctctttcgccggtgacgatgatgacggtaaccggagaagaagccccggctaacttcgtgccagcagccgcggtaat

SEQ ID NO: 5987 - DNA, 490 bp, unidentified
  misc_feature 1..490: note = Ascusbbf_566978, encodes 16S rRNA
  source 1..490: mol_type = genomic DNA
agagtttgatcatggctcaggacgaacgctggcggcgtgcttaacacatgcaagtcgagcggtaaggcccttcggggtacacgagcggcgaacgggtgagtaacacgtgggcgacctgccctcagctctgggataagcctgggaaactgggtctaataccggataggacttggcctcgcatggggttgggtggaaagtttttcggctggggatgggcccgcggcctatcagcttgttggtggggtgatggcctaccaaggcgacgacgggtagccggcctgagagggcgaccggccacactgggactgagacacggcccagactcctacgggaggcagcagtggggaatattgcacaatgggcggaagcctgacgcagcgacgccgcgtgggggatgacggccttcgggttgtaaacctctttcgccatcgacgaagcctttgggtgacggtaggtggagaagaagcaccggccaactacgtgccagcag

SEQ ID NO: 5988 - DNA, 490 bp, unidentified
  misc_feature 1..490: note = Ascusbbf_1110058, encodes 16S rRNA
  source 1..490: mol_type = genomic DNA
agagtttgatcatggctcagaacgaacgctggcggcgcgtcttaagcatgcaagtcgagcgggaatgtggtgcttgcaccacaggagagcggcggactggtgagtaacgcgtggatgacgcacccccctgacggggacagcctgcagaaatgcagggtgataccggatacgatcttgggtattggaagcccgggaggaaagcacctgcgggtgcgcagggggagcggtccgcggcccatcagcttgttggcggggtaaaggcccaccaaggcgacgacgggtacccggcctgagagggcggacaggcacattgggactgagatacggcccagactcctacgggaggcagcagctaagaatattccgcaatggggggaaccctgacggagcgacgccgcgtggacgatgaaggccggaaggttgtaaagtcctttttggaccgaggaagagccggtggagggaatgccaccggggtgactgtaggtctgga

SEQ ID NO: 5989 - DNA, 490 bp, unidentified
  misc_feature 1..490: note = Ascusbbf_1000190, encodes 16S rRNA
  source 1..490: mol_type = genomic DNA
agagtttgatcctggctcaggacgaacgctggcggcgtgcttaacacatgcaagtcgagcggaaaggccctgattccttttggatgttgggtactcgagcggcgaacgggtgagtaacacgtgagtaatctgcccttcactttgggataagccttggaaacggggtctaataccggatatgacgcatccctgcatggggtgtgtgtggaaagccttcgggcggtgggggatgtgctcgcggcctatcagcttgttggtggggtaatggcctaccaaggctttgacgggtagccggcctgagagggtgaccggtcacactgggactgagacacggcccagactcctacgggaggcagcagtggggaatattggacaatgggcggaagcctgatccagcaacgccgcgtgggggatgaaggccttcgggttgtaaacctctttcagtaccgacgaagcttttgtgacggtaggtacagaagaagcaccggcc

SEQ ID NO: 5990 - DNA, 490 bp, unidentified
  misc_feature 1..490: note = Ascusbbf_257676, encodes 16S rRNA
  source 1..490: mol_type = genomic DNA
agagtttgatcatggctcagagtgaacgctagcggcgtggctcagacatgcaagtcgagcggtgaagtccttcgggatggatcagcggcaaacgggtgagtaacacgtgagcaacctaccctcaagtatgggatagcctgtcgaaagacggattaataccgtatgtggtcttttttcgcatgagagaagtactaaagtcggggaccttcgggcctgacgtttgaggatgggctcgcggcctatcagctagttggcggggtaacggcccaccaaggcaaagacgggtaactgttctgagaggatgatcagtcacactggaactgagacacggtccagacacctacgggtggcagcagtttcgaatcattggcaatgggcgcaagcctgaccatgcgacgccgcgtgggggatgaaggtcttcggatcgtaaacccctgtcatcaaggactaacctctgtatatctaatatatatacagactgaattaactt

SEQ ID NO: 5991 - DNA, 490 bp, unidentified
  misc_feature 1..490: note = Ascusbbf_559955, encodes 16S rRNA
  source 1..490: mol_type = genomic DNA
agagtttgatcctggctcagattgaacgctggcggcaggcctaacacatgcaagtcgagcgcgaaagttcttcgggatgagtaaagcggcggacgggtgagtaacgcgtgggaatctgcctggtaatgggggacaacatctcgaaagggatgctaataccgcatacgccctaagggggaaagtgggggatcttcggacctcacgttatcagatgagcccgcgtcggattagctagtaggtagggtaaaggcctacctaggcgacgatccgtaactggtctgagaggatgatcagtcacactggaactgagacacggtccagactcctacgggaggcagcagtggggaatattggacaatgggggcaaccctgatccagccatgccgcgtgtgtgaagaaggccttcgggttgtaaagcactttaagttgggaggaaggctatttggtgaatacccaagtagattgacgttaccaacagaataagcaccgg

SEQ ID NO: 5992 - DNA, 490 bp, unidentified
  misc_feature 1..490: note = Ascusbbf_641654, encodes 16S rRNA
  source 1..490: mol_type = genomic DNA
agagtttgatcctggctcagattgaacgctggcggcatgcctaacacatgcaagtcgaacggcagcgcgggcttcggcctggcggcgagtggcggacgggtgaggaatgcataggaatctgccctgatgtgggggataacgtagggaaacttacgctaataccgcatgagaccttacgcttggcggcgtatggtgaaagtgggggaccttcgggcctcacgcatttggatgagcctatgccggattagcttgttggtggggtaaaggcctaccaaggcgacgatccgtagctggtctgagaggatgatcagccacactgggactgagacacggcccagactcctacgggaggcagcagtggggaatattggacaatgggcgcaagcctgatccagcaatgccgcgtgtgtgaagaaggccttcgggttgtaaagcacttttgtccgggaagaaaaccttgggattaatactttcgaggaatgacggtacc

SEQ ID NO: 5993 - DNA, 490 bp, unidentified
  misc_feature 1..490: note = Ascusbbf_1566194, encodes 16S rRNA
  source 1..490: mol_type = genomic DNA
agagtttgatcctggctcaggacgaacgctggcggtgtgcttaacacatgcaagtcgagcggtaaggccctttcgggggtacacgagcggcgaacgggtgagtaacacgtgagtaacctgcccttcacttggggataactcccggaaacgggggctaataccggatgttcactgtctcgcgcatgcggggtggtggaaagttttttcggtgagggatgggctcgcggcctatcagcttgttggtggggtgatggcctaccaaggcttcgacgggtagccggcctgagagggtgaccggccacactgggactgagacacggcccagactcctacgggaggcagcagtggggaatattggacaatgggcgcaagcctgatccagcaacaccgcgtgagggatgacggccttcgggttgtaaacctctttcagttccgacgaagccttgacctgtggggttggggtgacggtagggacagaagaagcaccggc

SEQ ID NO: 5994 - DNA, 490 bp, unidentified
  misc_feature 1..490: note = Ascusbbf_422941, encodes 16S rRNA
  source 1..490: mol_type = genomic DNA
agagtttgatcctggctcaggatgaacgctggcggcgtgcctaacacatgcaagtcgagcggagtttattgaagaagtcttaggatggaaataataaacttagcggcggacgggtgagtaacacgtgagtaacctgcctttagctggggaataacactgggaaaccagtgctaataccgcataacatctagttgtggcatcacaattagatcaaaggaatttattccggcaaaagatggactcgcgtccgattagatagttggtagggtaatggcctaccaagtcaacgatcggtagccggactgagaggttgaccggccacattgggactgagacacggcccagactcctacgggaggcagcagtggggaatattgggcaatgggggaaaccctgacccagcaacgccgcgtgaaggaaaggtcttcggattgtaaacttctttgatcagggacgaagaaatgactgtacctgaagaacaagtcacggc

SEQ ID NO: 5995 - DNA, 490 bp, unidentified
  misc_feature 1..490: note = Ascusbbf_386203, encodes 16S rRNA
  source 1..490: mol_type = genomic DNA
agagtttgatcctggctcaggatgaacgctagcggcaggcctaacacatgcaagtcgaacggcagcggcacttcggtggccggcgagtggcggatgggtgagtaacgcgtatgcaacctacctttcacagtgggatagcccagagaaatttggattaataccgcatagtatgcagggccgtcatcggttttgcattaaacatttatgggtgagagatgggcatgcgttctattagttagttggagtggtaacggcaccccaagaccgcgatagataggggccctgagagggggatcccccacactggtactgagacacggaccagactcctacgggaggcagcagtgaggaatattggacaatgggcgcaagcctgatccagccatgccgcgtgcaggaagacggccctatgggttgtaaactgcttttatacgggaagaaaccccccgacgtgtcggggcttgacggtaccgtatgaataaggatcggc

SEQ ID NO: 5996 - DNA, 490 bp, unidentified
  misc_feature 1..490: note = Ascusbbf_479487, encodes 16S rRNA
  source 1..490: mol_type = genomic DNA
agagtttgatcctggctcaggacgaacgctggcggcgtgcctaatgcatgcaagtcgagcgacgcatgctggagacgtaagtctccggtatgacggagcggcgaacgggtgagtaacacgtgagcaacctgccccgaagaccgggatagcccagggaaacctggattaataccggataccctcggatgtcctcctggacgaccgaggaaatgcttttgtgcttcgggatgggctcgcggcctatcagcttgttggtggggtaacggcctaccaaggcgtcgacgggtagctggtctgagaggacgatcagccacactgggactgagacacggcccagactcctacgggaggcagcagcagggaatcttgcgcaatgggcgaaagcctgacgcagcaacgccgcgtgggggatgaaggccttcgggttgtaaacccctttcaggagggaagaaattgacggtacctccaaaagaagccccggccaactacg

SEQ ID NO: 5997 - DNA, 470 bp, unidentified
  misc_feature 1..470: note = Ascusbbf_1810241, encodes 16S rRNA
  source 1..470: mol_type = genomic DNA
agagtttgatcatggctcagattgaacgctggcggcatggttaaaacatgcaagtcgaacgatcccttcggggagagtggcgaaagggcgaggaatataatcgaatgtaccccaaggtggaggatagcttctggaaacggaagataatactccatgtgctctacggaggaaaggtttaccgccttgggagcggcgattatcctatcaggtagttggtgaggtaaaggctcaccaagccgaagacgggtagcgggtgtgagagcatgacccgccgcatcgggactgagacactgcccggactcctacgggaggctgcagtaacgaatcttccgcaatgggcgaaagcctgacggagcaatgccgcgtgtgggatgaagcatcttcgatgtgtaaaccactgtcaagatctaggaatactgaccagatctaaaggaagggccggctaattccgtgccagcagccgcggtaat

SEQ ID NO: 5998 - DNA, 490 bp, unidentified
  misc_feature 1..490: note = Ascusbbf_1723370, encodes 16S rRNA
  source 1..490: mol_type = genomic DNA
agagttgatcatggctcaggacgaacgctggcggcgggcttaacacatgcaagtcgcgggagagccggaccttcgggtccggggagaccggcggatgggtgagtaaagcgtaggtaatctaccgtaaggacggggataacatcgcgaaagcggtgctaataccggatgatgcagcggggccgcatggccacagttgttaaatctgccttagggcgggccttatgatgaacctgcgtgccattagttagttggtagggtaacggcctaccaagacgatgatggctagggggtctgagaggatgatcccccacactgggactgagacacggcccagactcctacgggaggcagcagtgaggaatcttgcgcaatgggggcaaccctgacgcagccacgccgcgtgctggaagacggccctatgggttgtaaacagcttttggtcgggaagaacctggggatttcgatccccactgacggtaccgattgaata

SEQ ID NO: 5999 - DNA, 490 bp, unidentified
  misc_feature 1..490: note = Ascusbbf_718517, encodes 16S rRNA
  source 1..490: mol_type = genomic DNA
agagtttgatcatggctcaggatgaacgctggcggcgtgcctaacacatgcaagtcgaacggaccttttattgttggagattcgtcaaagacgatttaaggttagtggcggacgggtgagtaacgcgtgggtaacctgcctcatagagggggataacagtttgaaaagactgctaataccgcataagcccacaggaccgcatggtccagggggaaaagattcatcgctatgagatggacccgcgtctgattagttagttggcggtgtaacggaccaccaagacgacgatcagtagccggactgagaggttgaacggccacattgggactgagacacggcccaaactcctacgggaggcagcagtggggaatattgcacaatgggggaaaccctgatgcagcgacgccgcgtgggtgaagaagtttttcggaatgtaaagccctatcagcagggaagaaaatgacggtacctgactaagaagccccggcta

SEQ ID NO: 6000 - DNA, 490 bp, unidentified
  misc_feature 1..490: note = Ascusbbf_1154198, encodes 16S rRNA
  source 1..490: mol_type = genomic DNA
agagtttgatcctggctcaggatgaacgctagcggcaggcctaatacatgcaagtcgaacgggatccaggggcaagcttgcttgcttctggtgagagtggcgtacgggtgcgtaacgcgtgagcaacctaccgctgtctgggggatagcccggagaaatccggattaataccgcataacatcagtttacagcattgtttactgatcaaacatttatgggacagcgatgggctcgcgtgacattagctagttggggtggtaacggcacaccaaggcgacgatgtctaggggatctgagaggatgaccccccacactgggactgagacacggcccagactcctacgggaggcagcagtaaggaatattggtcaatggaggcaactctgaaccagccatgccgcgtgcaggaagacggccctctgggttgtaaactgcttttgccggggaataaacccctctacgtgtagagggctgaatgtacccggcgaat

SEQ ID NO: 6001 - DNA, 490 bp, unidentified
  misc_feature 1..490: note = Ascusbbf_571452, encodes 16S rRNA
  source 1..490: mol_type = genomic DNA
agagtttgatcatggctcaggatgaacgctggcggcgtgcctaacacatgcaagtcgagcgaagttacttacaggaagccttcgggtggaatggatttaactcagcggcggacgggtgagtaacgcgtgggcaacctaccctgtacaggggaataacaatgggaaaccattgctaataccccataacacctttgaggggcatcccttaaaggtcaaagaatttcggtacaggatgggcccgcgtcgcattagctagttggtgaggtaatggctcaccaaggcgacgatgcgtagccggcctgagagggtgaacggccacactggaactgagacacggtccagactcctacgggaggcagcagtggggaatattgcacaatgggggaaaccctgatgcagcaacgccgcgtgagcgatgaaggctttcgggtcgtaaagctctgtcctaagggaagataatgacggtaccttaggaggaagccccggctaa

SEQ ID NO: 6002 - DNA, 490 bp, unidentified
  misc_feature 1..490: note = Ascusbbf_654877, encodes 16S rRNA
  source 1..490: mol_type = genomic DNA
agagtttgatcctggctcagattgaacgctggcggcatggttaaaacatgcaagtcgaacgcgaacggggcttcggcccctagtagagtggcgaaagggcgagtaacgtgtttctaacgtgccccaaggtcagggacagcccagggaaacctggattaatacctgatgaccccatgacgtcgtatggcgatatgggcaaaggcttgctgccttgggttcgggaaacatcctatcagcttgttggtaaggtaacggcttaccaaggcgaagacgggtagcgggtgtgagagcacggcccgccgcatcgggactgagacactgcccggactcctacgggaggctgcagtaacgaatattggacaatgcgcgaaagcgtgatccagcaatgccgcgtgcaggatgaagcccctcggggtgtaaactgctgtcaggagctaccaacacaatgaggagctccagaggaagagccggctaactctgtgccagcagc

SEQ ID NO: 6003 - DNA, 490 bp, unidentified
  misc_feature 1..490: note = Ascusbbf_964026, encodes 16S rRNA
  source 1..490: mol_type = genomic DNA
agagtttgatcatggctcaggatgaacgctggcggcgtgcttaacacatgcaagtcgagcggagctcaaatgcggatccccttcgggggtgaaacatctgagcttagcggcggacgggtgcgtaacgcgtgggtaatctgcccttgtcaccgggataacacatcgaaaggtgtgctaataccggatgaaatacagacccggcatcggggctgtatcaaagtcatgcggacaaggatgagcctgcgtctgattagcttgttggtggggtaaaagcctaccaaggcaacgatcagtagccgacctgagagggtgatcggccacactggaactgagacacggtccagactcctacgggaggcagcagtggggaatattgcacaatgggcgcaagcctgatgcagcaacgccgcgtgagtgatgaaggccttcgggtcgtaaaactctgtcctaagggaagataatgacggtaccttaggaggaagccccggct

SEQ ID NO: 6004 - DNA, 490 bp, unidentified
  misc_feature 1..490: note = Ascusbbf_1788606, encodes 16S rRNA
  source 1..490: mol_type = genomic DNA
agagtttgatcatggctcagattgaacgctggcggcatgcctaacacatgcaagtcgaacggcagcatggtccagcttgctggactgatggcgagtggcgaacgggtgagtaacgcgtaggaatataccttaaagagggggacaacctggggaaactcaggctaataccgcataagctctaaggagtaaagctggggaccttatggcctggcgctttaagattagcctgcgtccgattagcttgttggtggggtaaaggcctaccaaggcgacgatcggtagctggtctgagaggatggtcagccacactgggactgagacacggcccagactcctacgggaggcagcagtggggaatattggacaatgggggcaaccctgatccagcaatgccgcgtgtgtgaagaaggcctatgggttgtaaagcactttcagtggggaggaggatttagagattaagagtcactaaattggacgttacccacagaag

SEQ ID NO: 6005 - DNA, 490 bp, unidentified
  misc_feature 1..490: note = Ascusbbf_599426, encodes 16S rRNA
  source 1..490: mol_type = genomic DNA
agagtttgatcctggctcaggatgaacgctagctacaggcttaacacatgcaagtcgaggggcagcatggcggatgcttgcatctgccgatggcgaccggcgcacgggtgagtaacgcgtatccaacctgccccccaccgtggtataccccggcgaaagccggcctaatcccgcatgcactccgaggatgacatctgacttggaggaaaggtattttttccggtggcggatggggatgcgtctgattagcttgtcggcggggtaacggcccaccgaggcatcgatcagtaggggttctgagaggaaggtcccccacattggaactgagacacggtccaaactcctacgggaggcagcagtgaggaatattggtcaatgggtgcaagcctgaaccagccaagtagcgtgcaggacgacggccctatgggttgtaaactgcttttgtatggggataaagtgctccacgtgtggagttttgtaggtaccatac

SEQ ID NO: 6006 - DNA, 207 bp, unidentified
  misc_feature 1..207: note = Ascusbbf_1526195, encodes 16S rRNA
  source 1..207: mol_type = genomic DNA
agagttttatcctggctcaggatgaacgctagctacaggcttattggtcaatggacgcaagtctgaaccagccaagtagcgtgaaggacgacggccctacgggttgtaaacttcttttgtacgggaataaagtgaggcacgcgctgcctttttgcatgtaccgtacgaataagcatcggctaattccgtgccagcagccgcggtaat

SEQ ID NO: 6007 - DNA, 490 bp, unidentified
  misc_feature 1..490: note = Ascusbbf_443, encodes 16S rRNA
  source 1..490: mol_type = genomic DNA
agagtttgatcctggctcaggacgaacgctggcggtatgcttaatacatgcaagtcgaacggagctcagcggaagcttgcttctgcgaaagcttagtggcggacgggtgagtaacgcgtgagtaacctgccttaaagagggggataacacagagaaatttgtgctaataccgcataatgcagtacagccgcatgactgaactgccaaaggtcagccgctttaagatggactcgcgtccgattaggtagttggagaggtaacggctcaccaagccgacgatcggtagccggactgagaggtcgaacggccacattgggactgagacacggcccagactcctacgggaggcagcagtagggaatattgcgcaatgggggcaaccctgacgcagcaataccgcgtgaaggatgacggttttcggattgtaaacttcagcaagcagggaagaaaaaaatgacggtacctgaacaaaagccacggctaactacgt

SEQ ID NO: 6008 - DNA, 490 bp, unidentified
  misc_feature 1..490: note = Ascusbbf_14194, encodes 16S rRNA
  source 1..490: mol_type = genomic DNA
agagtttgatcctggctcaggatgaacgctagctacaggcttaacacatgcaagtcgaggggcatcaggtactgtgcttgcacagtatgctggcgaccggcgcacgggtgagtaacgcgtatccaaccttcccatgactccggttcagcccgccgaaaggcggattactcccggatggtttccgaagagggcctctgatttggaataaagatttatcggtcatggatggggatgcgtctgattaggcagcaggcggggtaacggcccacctggcctacgatcagtaggggttctgagaggaaggtcccccacactggaactgagacacggtccagactcctacgggaggcagcagtgaggaatattggtcaatggacgagagtctgaaccagccaagtagcgtgcaggatgacggccctatgggttgtaaactgcttttatatgaggataaaggacgtcacgtgtgatgttttgcaggtatcatatgaat

SEQ ID NO: 6009 - DNA, 206 bp, unidentified
  misc_feature 1..206: note = Ascusbbf_4332, encodes 16S rRNA
  source 1..206: mol_type = genomic DNA
agagtttgatcctggctcaggatgaacgctagctacaggcttattggtcaatgggcgagagcctgaaccagccaagtagcgtgcgggacgaaggccctatgggttgtaaaccgcttttacggggggataaagtgagtgacgtgtcattcattgcaggtaccccgcgaataaggaccggctaattccgtgccagcagccgcggtaat

SEQ ID NO: 6010 - DNA, 490 bp, unidentified
  misc_feature 1..490: note = Ascusbbf_62013, encodes 16S rRNA
  source 1..490: mol_type = genomic DNA
agagtttgatcatggctcagaacgaacgctggcggcgcgtcttaagcatgcaagtcgagcgggattaagggagcttgcttccttatgagagcggcggactggtgagtaacacgtgggtgatgcaccctcctgacggggacagcctgtggaaacacagggtaataccggatgagaccggttcattagaggggactggtgaaaggagctacggctccgcagggggagcggcccgcggcccatcagctggatggcggtgtaacggaccaccatggcagtgacgggtatccggcctgagagggtgagcggacacattgggactgagatacggcccagactcctacgggaggcagcagctaagaatattccgcaatggggggaaccctgacggagcgacgccgcgtggacgatgaaggccggaaggttgtaaagtccttttaatggcgaggaataagcgcaggagggaatgcctgcgtggtgacggtagccattg

SEQ ID NO: 6011 - DNA, 490 bp, unidentified
  misc_feature 1..490: note = Ascusbbf_41916, encodes 16S rRNA
  source 1..490: mol_type = genomic DNA
agagtttgatcatggctcaggacgaacgctggcggcgtgcctaacacatgcaagtcgaacgaagcactggggaaagagacttcggtcaattgaacctttgacttagtggcggacgggtgagtaacacgtgagcaacctgcctttcagagggggacaacagctggaaacggctgctaataccgcataaagtattcggggggcatcccttggataccaaagatttatcgctgaaagatgggctcgcgtctgattagatagttggtgaggtaacggctcaccaagtcgacgatcagtagccggactgagaggttgaacggccacattgggactgagatacggcccagactcctacgggaggcagcagtggggaatattgggcaatgggggcaaccctgacccagcaacgccgcgtgaaggaagaaggtcttcggattgtaaacttctttgacaagggacgataatgacggtaccttgaaaacaagccacggct

SEQ ID NO: 6012 - DNA, 490 bp, unidentified
  misc_feature 1..490: note = Ascusbbf_75318, encodes 16S rRNA
  source 1..490: mol_type = genomic DNA
agagtttgatcctggctcaggacgaacgctggcggcgtgcctaatacatgcaagtagaacgctgaagaaaggagcttgcttcttttggatgagttgcgaacgggtgagtaacgcgtaggtaacctgccttgtagcgggggataactattggaaacgatagctaataccgcataacagcttttgacacatgttagaagcttgaaagatgcaattgcatcactacgagatggacctgcgttgtattagctagtaggtagggtaacggcctacctaggcgacgatacatagccgacctgagagggtgatcggccacactgggactgagacacggcccagactcctacgggaggcagcagtagggaatcttcggcaatgggggcaaccctgaccgagcaacgccgcgtgagtgaagaaggttttcggatcgtaaagctctgttgtaagagaagaatgtgtgtgagagtggaaagttcacacagtgacggtaact

SEQ ID NO: 6013 - DNA, 490 bp, unidentified
  misc_feature 1..490: note = Ascusbbf_21750, encodes 16S rRNA
  source 1..490: mol_type = genomic DNA
agagtttgatcatggctcagaacgaacgctggcggtatgctttaaccatgcaagtcgaacgagaaagggtagcaatacctgagtaaagtggcaaacgggtgagtaacacacaggaatctacccagtagaggggaataagcactggaaacggtgtctaatactccatacgccggtatagcaatatatcgggaaagggctagtagcaatattagttcactattggatgagcctatgtcggattagctagttggtggggtaatggcctaccaaggcgatgatccgtagctgatctgagagggtgatcagccacactggaactgcgacacggtccagactcctacgggaggcagcaggtgggaatattggacaatggaggaaactctgatccagcaataccgcgtgaatgatgaaggccttcgggttgtaaagttcttttaatagggaagataatgacggtacctatagaataagcaccggcaaacttcgtgcc

SEQ ID NO: 6014 - DNA, 490 bp, unidentified
  misc_feature 1..490: note = Ascusbbf_471560, encodes 16S rRNA
  source 1..490: mol_type = genomic DNA
agagtttgatcctggctcagattgaacgctagcgggatgctttacacatgcaagtcgaacggcagcgcgaggtaagcttgcttaccttggcggcgagtggcgaacgggtgagtaatgtatcggaacgtgcccagtagcgggggataactactcgaaagagtagctaataccgcatacgccctacgggggaaagggggggatcgcaagacctctcactattggagcggccgatatcggattagctagttggtggggtaaaggctcaccaaggcgacgatccgtagctggtttgagaggacgaccagccacactgggactgagacacggcccagactcctacgggaggcagcagtggggaattttggacaatgggggaaaccctgatccagccatcccgcgtgtgcgatgaaggccttcgggttgtaaagcacttttggcagggaagaaaagccacgagttaataccttgtggtgctgacggtacctgcaga

SEQ ID NO: 6015 - DNA, 490 bp, unidentified
  misc_feature 1..490: note = Ascusbbf_1341556, encodes 16S rRNA
  source 1..490: mol_type = genomic DNA
agagtttgatcatggctcaggatgaacgctagctacaggcttaacacatgcaagtcgagtggcatcatgtatctggcttgccaggtatgatggcgaccggcgcacgggtgcgtaacgcgtgttcgacctgccctttactcgggaacagcccatcgaaagatggattaatgcccgatgttctccctatatcgcatggtattcggagcaaagatttatcggtagaggatgggaacgcgtccgattagcttgacggcggggtaacggcccaccgtggcgacgatcggtaggggttctgagaggaaggcccgcacaactggaactgagaaacggtccagacttctacgggaggcagcagtgagtagtattggtcaatggccgagaggctgaaccagccaagtagcgtgaaggatgactgccctatgggttgtaaacttcttttgtacgggaataacccggtccacgtgtggtccgctgcatgtaccgtacgaat

SEQ ID NO: 6016 - DNA, 490 bp, unidentified
  misc_feature 1..490: note = Ascusbbf_205887, encodes 16S rRNA
  source 1..490: mol_type = genomic DNA
agagtttgatcatggctcaggatgaacgctggcggcgtgcttaacacatgcaagtcgaacggggaatttttttagtaagagagcttgctcgattacagggaattcctagtggcggacgggtgagtaacgcgtgggcaacctgccctgtacagggggatagcagttagaaatgactgataaaaccgcataagcgcacggaatcgcatgattcagtgtgaaaaactccggtggtacaggatgggcccgcgtccgattagccagttggcggggtaacggcccaccaaagcgacgatcggtagccggcctgagagggcgaccggccacattgggactgagacacggcccaaactcctacgggaggcagcagtggggaatattgcacaatgggggaaaccctgatgcagcgacgccgcgtgaaggaagaagtatttcggtatgtaaacttctatcagcagggaagatgatgacggtacctgactaagaagccccg

SEQ ID NO: 6017 - DNA, 490 bp, unidentified
  misc_feature 1..490: note = Ascusbbf_1435172, encodes 16S rRNA
  source 1..490: mol_type = genomic DNA
agagtttgatcatggctcaggatgaacgctagcggcaggcttaacacatgcaagtcgaggggcagcgcgagtagcaatacttggcggcgaccggcgcaagggtgcgtaacgcgtgagcaacatgcccgtatcagggggataatccagggaaacttggtctaataccccatagtaattttgtaaggcatcttatggaatttaaagctttggtggatacggattggctcgcgtgacattagctggatggtaagataacggcttaccatggctatgatgtctaggggttctgagaggaaggtccccaacacgggaactgagaaacggtccagactcctacgggaggcagaagtgaggaatattggacaatggatggaaatctgatccagccatgccgcgtgcaggaagacggtcctatggattgtaaactgcttttgtatgggagcaataaggccttcgtgaaggctgatgagagtaccatacgaataagcac

SEQ ID NO: 6018 - DNA, 490 bp, unidentified
  misc_feature 1..490: note = Ascusbbf_1522789, encodes 16S rRNA
  source 1..490: mol_type = genomic DNA
agagtttgatcctggctcaggatgaacgttggcggtgtgcctaatacatgcaagtcgaacggagttaatagcaatattgacttagtggcgaacgggtgagtaacgcgttggtgatctgcctcaaagtgtggaataacgttccgaaaggaacgctaataccgcatgtgctctcgatttttagaaagttgagagtaaaggatttattcgctttgagaggagcctgcgtcctatcagctagttggtagggtaaaagcctactaaggctatgacgggtaggggacctgagagggtggccccccaaaatggaactgaaacacggtccatacacctacgggtggcagcagtagggaatattagaaatggacgaaagtctgatctagcgacaccgcgtgtgcgatgaaggccttcgggttgtaaagcactttttggaaggaataggaaggaaggtacttccagaataagtctcggctaactacgtgccagcagccgc

SEQ ID NO: 6019 - DNA, 490 bp, unidentified
  misc_feature 1..490: note = Ascusbbf_1279748, encodes 16S rRNA
  source 1..490: mol_type = genomic DNA
agagtttgatcctggctcagagtgaacgctggcggcaggcctaacacatgcaagtcgagcggcagcgcgggggcaaccctggcggcgagcggcggacgggtgaggaatgcgtcggaatctgcctctttgtgggggataacgtagggaaacttacgctaataccgcatacgacctacgggtgaaagcgggggaccttcgggcctcgcgcagagagatgagccgacgccggattagctagttggcggggtaaaggcccaccaaggcgacgatccgtagctggtctgagaggatgatcagccacactggaactgagacacggtccagactcctacgggaggcagcagtggggaatattggacaatgggcgcaagcctgatccagccatgccgcgtgtgtgaagaaggccttcgggttgtaaagcacttttgtccggaaagaaaggcattcgattaatactcgggtgttatgacggtaccggaagaataagcac

SEQ ID NO: 6020 - DNA, 490 bp, unidentified
  misc_feature 1..490: note = Ascusbbf_1840758, encodes 16S rRNA
  source 1..490: mol_type = genomic DNA
agagtttgatcctggctcaggatgaacgctagcggcaggcctaatacatgcaagtcgaacgagattccccagcttgctggggatgagagtggcgtacgggtgcgtaacgcgtgagcaacctaccgttgtctgggggatagcccggagaaatccggattaataccgcataacatcattgaacagcattgtttgatgatcaaacatttatgggacagcgatgggctcgcgtgacattagctagttggagtggtaacggcacaccaaggcgacgatgtctaggggatctgagaggatgaccccccacactgggactgagacacggcccagactcctacgggaggcagcagtaaggaatattggtcaatggaggcaactctgaaccagccatgccgcgtgcaggaagaatgccctctgggttgtaaactgcttttatacgggaataaaccccactacgtgtagtgggctgaatgtaccgtaagaataaggatcg

SEQ ID NO: 6021 - DNA, 490 bp, unidentified
  misc_feature 1..490: note = Ascusbbf_50553, encodes 16S rRNA
  source 1..490: mol_type = genomic DNA
agagtttgatcatggctcaggattaacgctggcggcgtgcctaacacatgcaagtcgagcgagaagcagtgaagagattcttcggatgaacagatctgtggacagcggcggacgggtgagtaacgcgtgggcaacctgcccctttccggaggatagccaagggaaactttgaataatactccataaagcaagagtatcgcatggtacatttgccaaagatttatcggagagggatgggcccgcgtctgattagccagttggtgaggcagcggctcaccaaagcgacgatcggtagccggcctgagagggtgaacggccacattggaactgagacacggtccagactcctacgggaggcagcagtggggaatattgcacaatgggcggaagcctgatgcagcaacgccgcgtgaaggaagaaggttttcggatcgtaaacttctgtccccggggaagaataaatgacggtacccgaggaggaagccccggc

SEQ ID NO: 6022 - DNA, 490 bp, unidentified
  misc_feature 1..490: note = Ascusbbf_14751, encodes 16S rRNA
  source 1..490: mol_type = genomic DNA
agagtttgatcatggctcaggatgaacgctggcggcgtgcataacacattcaagtcgaacggactgatttggtagcttgctaccgaagaaagttagtggcggacgggtgagtaacgcgtgagcaacctacctctgtgtgtgggataccgtctggaaacggacgttaataccgcatgatccatagagatcgcatgatatttatggcaaagatttattgcacagagatgggctcgcgtctgattaggcagttggtgaggtaacggcccaccaaacctacgatcagtagccggactgagaggttgaacggccacattggaactgagatacggtccagactcctacgggaggcagcagtggggaatattgggcaatgggcgaaagcctgacccagcgacgccgcgtgaaggaagacggtcttcggattgtaaacttcttttatatgggacgaaagatgacggtaccatatgaataagccacggctaactacgtg

SEQ ID NO: 6023 - DNA, 490 bp, unidentified
  misc_feature 1..490: note = Ascusbbf_193173, encodes 16S rRNA
  source 1..490: mol_type = genomic DNA
agagtttgatcctggctcaggacgaacgctggcggcgtgcctaacacatgcaagtcgagcggagtcagtaagaggaagttttcggatggaatcttattgatttagcggcggacgggtgagtaacgcgtgagcgaccaaccttgcacagggggataacggaccgaaaggttcactaataccgcatgagaccacggtgttgcatgacacaggggtcaaaggagcaatccggtgcaagacgggctcgcgtccgattaggtagttggaggggtaacggcccaccaagcctatgatcggtagccgacctgagagggtgatcggccacattggaactgagatacggtccaaactcctacgggaggcagcagtggggaatattgggcaatgggggaaaccctgacccagcaacgccgcgtgaaggaagaaggttttcggattgtaaacttctgtccttggtgaagagaagaagacggtagccaaggaggaagccccg

SEQ ID NO: 6024 - DNA, 489 bp, unidentified
  misc_feature 1..489: note = Ascusbbf_187731, encodes 16S rRNA
  source 1..489: mol_type = genomic DNA
agagtttgatcatggctcaggatgaacgctggcggcgtgcctaacacatgcaagtcgagcgatcttcttcggaagagagcggcggacgggtgagtaacgcgtgggtaacctgcctcatacacatggataacataccgaaaggtatgctaatacaagatgatataagagattcgcatggatttcttatcaaagctccggcggtatgagatggacccgcgtctgattagctagttggtaaggtaacggcttaccaaggcgacgatcagtagccgacctgagagggtgatcggccacattggaactgagacacggtccaaactcctacgggaggcagcagtggggaatattgcacaatgggcgaaagcctgatgcagcaacgccgcgtgagcgatgaaggccttcgggtcgtaaagctctgtcctcaaggaagataatgacggtacttgaggaggaagccccggctaactacgtgccagcagccgcggtaat

SEQ ID NO: 6025 - DNA, 490 bp, unidentified
  misc_feature 1..490: note = Ascusbbf_86755, encodes 16S rRNA
  source 1..490: mol_type = genomic DNA
agagtttgatcctggctcaggacgaacgctggcggcgtgcctaacacatgcaagtcgaacggggtccatgagagcttgctctcggaagacctagtggcgaacgggtgagtaacacgtgagaaacctgcctcggagtggggaataactcggggaaactcgagctaataccgcataccctcagatgatcgcatggtcgactgaggaaagaatttcgctctgagagggtctcgcggcctatcagctagttggtggggtaacggcctaccaaggcagcgacgggtagctggtttgagagaacgatcagccacactgggactgagacacggcccagactcctacgggaggcagcagtggggaatcttgcgcaatgggcgaaagcctgacgcagcaacgccgcgtgcgggatgacggccttcgtggttgtaaaccgctttcagcagggacgaaaatgacggtacctgcagaagaagccccggctaactacgtgcca

SEQ ID NO: 6026 - DNA, 490 bp, unidentified
  misc_feature 1..490: note = Ascusbbf_213514, encodes 16S rRNA
  source 1..490: mol_type = genomic DNA
agagtttgatcctggctcagaacgaacgctggcggcgcgtcttaagcatgcaagtcgaacggcaaggatggtagcttgctaccatccctagagtggcggactggtgagtaacacgtgggtgacctacccttgagatggggatagccattagaaatagtggataataccgaatacgctctacggactctggtttgtagaggaaacaggctacggcctggctcgaggatgggcccgcgtcccattagctagttggtgaggtaagagcccaccaaggcgacgatgggtatccggcctgagagggtgtacggacacattgggactgagatacggcccaaactcctacgggaggcagcagctaagaatattccgcaatggacgaaagtctgacggagcgacgccgcgtggatgacgaaggccgaaaggttgtaaaatccttttgctgatgaagaataagcgtggtagggaatgaccgcgtgatgacattagtcgg

SEQ ID NO: 6027 - DNA, 490 bp, unidentified
  misc_feature 1..490: note = Ascusbbf_93237, encodes 16S rRNA
  source 1..490: mol_type = genomic DNA
agagtttgatcctggctcaggatgaacgctagctacaggcttaacacatgcaagtcgaggggaaacgattagaggtgcttgcaccactaaggcgtcgaccggcgcacgggtgagtaacgcgtatccaacctgccccatggtaaggaataatccgtagaaatgcggtctaataccttatgtgctccgaagaggacatctgatttggagtaaagatttatcgccatgggatggggatgcgtctgattagattgttggcggggcaacggcccaccaagtcaccgatcagtaggggttctgagaggaaagtcccccacattggaactgagacacggtccaaactcctacgggaggcagcagtgaggaatattggtcaatggatgagaatctgaaccagccaagtagcgtgcaggacgacggccctatgggttgtaaactgcttttgtacggggataaaggagcttacgtgtaagtttttgcaggtaccgtacga

SEQ ID NO: 6028 - DNA, 490 bp, unidentified
  misc_feature 1..490: note = Ascusbbf_102503, encodes 16S rRNA
  source 1..490: mol_type = genomic DNA
agagtttgatcctggctcaggacgaacgctggcggcgtgcctaacacatgcaagtcgagcgaggtccattctgtggcaacacagaggaagacctagcggcgaacgggtgagtaacacgtgagaaacctgccccgaacactgggataaccaggggaaaccctggctaataccggataccctcgtctgaccgcatggtcggtcgaggaaagatttatcggtttgggagggtctcgtggcctatcagctagttggtggggtaatggcccaccaaggcatcgacgggtagctggtctgagaggacgatcagccacactgggactgagacacggcccagactcctacgggaggcagcagtggggaatattgcgcaatgggcgaaagcctgacgcagcaacgccgcgtgcgggatgaaggccttagggttgtaaaccgctttcggcagggacgaaattgacggtacctgcagaagaagccccggccaactacgtgc

SEQ ID NO: 6029 - DNA, 490 bp, unidentified
  misc_feature 1..490: note = Ascusbbf_347227, encodes 16S rRNA
  source 1..490: mol_type = genomic DNA
agagtttgatcatggctcaggatgaacgctagcgggaggcctaacacatgcaagccgagcgggatttagtagttagcttgctaactactgatgagagcggcgtacgggtgcggaacacgtgtgcaacctgcctttatctgggagatagcctttcgaaaggaagattaataccccataatatattgactggcatcatttgatattgaaaactccggtggataaagatgggcacgcgcaagattagatagttggtgaggtaacggctcaccaagtcgatgatctttagggggcctgagagggtgatcccccacactggtactgagacacggaccagactcctacgggaggcagcagtgaggaatattggacaatgggttagcgcctgatccagccatcccgcgtgaaggattaaggacctatggtttgtaaacttcttttgtacagggataaacctactctcgtgagagtagctgaaggtactgtacgaata

SEQ ID NO: 6030 - DNA, 490 bp, unidentified
  misc_feature 1..490: note = Ascusbbf_1607949, encodes 16S rRNA
  source 1..490: mol_type = genomic DNA
agagtttgatcatggctcaggatgaacgctgacagaatgcttaacacatgcaagtcaacttgaacttcggtttgggtggcggacgggtgagtaacgcgtaaagaacttgcctcacagctagggacaacatttggaaacgaatgctaatacctgatattattattttatggcatcataggataatgaaagctataagcgctgcgagagagctttgcgttccattagctagttggagaggtaacggctcaccaaggcgatgatgggtagccgacctgagagggtgaacggccacaaggggactgagacacggcccttactcctacgggaggcagcagtggggaatattggacaatggaccgagagtctgatccagcaattctgtgtgcacgatgaagtttttcggaatgtaaagtgctttcagttgggaagaaaagaatgacggtaccaacagaagaagtgacggctaaatacgtgccagcagccgcggtaa

SEQ ID NO: 6031 - DNA, 490 bp, unidentified
  misc_feature 1..490: note = Ascusbbf_278738, encodes 16S rRNA
  source 1..490: mol_type = genomic DNA
agagtttgatcctggctcagaatgaacgctggcggcatggattaggcatgcaagtcgaacgtgctcccttcggggagaaagtggcgaaagggtgagtaacacgtgagcaacctgcctccggatccggaataatccagggaaacttggtctaaaaccggatgaagacattgggccgcatggcctggtgttaaaatatttatagtccggagaggggctcgcggcccattagctagttggcggggtaatggcccaccaaggctacgacgggtaggtggtctgagaggatggtcacccacactgggactgagacactgcccagactcctacgggaggctgcagtcgagaatcttccgcaatgggcgcaagcctgacggagcgatgccgcgtgagggatgacggccttcgggttgtaaacctctgtcatccgggacgaacacaatgacggtaccggaaaaggaagccacggctaaccacgtgccagcagccgcgg

SEQ ID NO: 6032 - DNA, 490 bp, unidentified
  misc_feature 1..490: note = Ascusbbf_938032, encodes 16S rRNA
  source 1..490: mol_type = genomic DNA
agagtttgatcatggctcagattgaacgctggcggcatgctttacacatgcaagtcggacggcagcggggaagtgcttgcacttctgccggcgagtggcgaacgggtgagtaatgcatcggaacgtaccgagtagtgggggataactgtccgaaaggacggctaataccgcatacgctttgagaaggaaagcgggggaccgtaaggcctcgcgctattcgagcggccgatgtctgattagctagttggtggggtaaaggcctaccaaggcgacgatcagtagcgggtctgagaggatgatccgccacactgggactgagacacggcccagactcctacgggaggcagcagtggggaattttggacaatgggggcaaccctgatccagccatgccgcgtgtctgaagaaggccttcgggttgtaaaggacttttgtcagggaagaaagggtttgggctaatatcccgaacatatgacggtacctgaagaat

SEQ ID NO: 6033 - DNA, 490 bp, unidentified
  misc_feature 1..490: note = Ascusbbf_10085, encodes 16S rRNA
  source 1..490: mol_type = genomic DNA
agagtttgatcatggctcaggatgaacgctagctacaggcttaacacatgcaagtcgaggggcagcatgatcttagcttgctaagattgatggcgaccggcgcacgggtgagtaacgcgtatccaaccttccgcacagtagggaatagcccggcgaaagtcggattaatgccctatgttttcccttgatggcatctgattgggaacaaagatttatcgctgtgcgatggggatgcgtctgattaggtagtcggcggggtaacggcccaccgagccttcgatcagtaggggttctgagaggaaggtcccccacattggaactgagacacggtccaaactcctacgggaggcagcagtgaggaatattggtcaatggaggcaactctgaaccagccaagtagcgtgcaggatgacggccctatgggttgtaaactgcttttgccggggaataactgccattacgtgtaatggtttgcatgtacccggagaat

SEQ ID NO: 6034 - DNA, 486 bp, unidentified
  misc_feature 1..486: note = Ascusbbf_6275, encodes 16S rRNA
  source 1..486: mol_type = genomic DNA
agagtttgatcatggctcagaacgaacgctggcggcaggtcttaggcatgcaagtcgaacggatgacaagggagcttgcttccttgaagtcagtggcgcacgagtgagtaacgcgtgggaaactgcccttcactggggaataacgtttggaaacgaacgctaataccgcatacgcccgcaaggggaaagatttatcggtgatggatgtgcccgcgttggattagctagttggtggggtaatggcctaccaaggcgatgatccatagctggtctgagaggacgatcagccacgctggaactgagacacggtccagactcctacgggaggcagcagctaagaatattgggcaatggaggaaactctgacccagccatgccgcgtgaatgaagaaggccttcgggttgtaaagttcttttagtcatgaagatgatgacagtagtgacagaaaaagcaccggctaacttcgtgccagcagccgcggtaat

SEQ ID NO: 6035 - DNA, 490 bp, unidentified
  misc_feature 1..490: note = Ascusbbf_1432, encodes 16S rRNA
  source 1..490: mol_type = genomic DNA
agagtttgatcatggctcaggatgaacgctagcggcaggcttaacacatgcaagtcgaggggcagcggagagtagcaatactctgccggcgaccggcgaaagggtgcgtaacgcgtgagcaacttgcccgtatccgggacataagcggtggaaacgccgtctaatttcccataacaacgagggccgcatgacccatgtttgaaagatccgtcggatacggatgggctcgcgagacattagctagtcggcgtggtaacggcacaccgaggcgacgatgtctaggggttctgagaggaaggtcccccacactggaactgagacacggtccagactcctacgggaggcagcagtgaggaatattggtcaatgggcgcaagcctgaaccagccatgccgcgtgaaggaatgaggccctatgggtcgtaaacttcttttgtggtggagcaataaggtgcacgtgtgcatcgatgagagtacatcacgaataagca

SEQ ID NO: 6036 - DNA, 490 bp, unidentified
  misc_feature 1..490: note = Ascusbbf_50685, encodes 16S rRNA
  source 1..490: mol_type = genomic DNA
agagtttgatcctggctcaggatgaacgctggcggcgtgcctaacacatgcaagtcgagcgagaaatcaggtgttgaaacttcggtagatacatctggtggacagcggcggacgggtgagtaacgcgtgggaaacctgcccttatctgagggatagccgagagaaatttcgagtaatacctcataatgcatcgagaccgcatggccatgatgccaaagatttatcggataaggatggtcccgcgtctgattagctggttggtgaggtagcggctcaccaaggcgacgatcagtagccggcctgagagggtgaacggccacattggaactgagacacggtccagactcctacgggaggcagcagtggggaatattgcacaatgggcggaagcctgatgcagcaacgccgcgtgagggatgaaggctttcgagtcgtaaacctctgtccttggggaagaagaactgacggtacccttggaggaagccccggc

SEQ ID NO: 6037 - DNA, 490 bp, unidentified
  misc_feature 1..490: note = Ascusbbf_101230, encodes 16S rRNA
  source 1..490: mol_type = genomic DNA
agagtttgatcctggctcaggatgaacgctagcgataggcttaacacatgcaagtcgaggggcagcatggtcttagcttgctaaggctgatggcgaccggcgtaagggtgcgtaacgcgtatgtaacttgcctttgagagggggataacccggagaaatccggcctaataccgcgtattctcaagttgctgcatggcagtttgaggaaagatttattgctcagagataggcatgcgttccattaggtagttggtgaggtaacggctcaccaagccgacgatggataggggagctgagaggctgaccccccacactgggactgagacacggcccagactcctacgggaggcagcagtgaggaatattggtcaatggaggcaactctgaaccagccaagtcgcgtgaaggaagactgtcctatggattgtaaacttctttagtaggtgaatagagtcgggcacgtgtgcccgtaggcatgtaacctaagaat

SEQ ID NO: 6038 - DNA, 490 bp, unidentified
  misc_feature 1..490: note = Ascusbbf_372725, encodes 16S rRNA
  source 1..490: mol_type = genomic DNA
agagtttgatcctggctcaggatgaacgctggcggcgtgcctaatacatgcaagtcgaacgaggtggatgggagcttgctccttgatgcctagtggcgaacgggtgagtaacacgtaggtaacctgcctttaagcttgggatacccagaggaaactttggttaataccggataacaacagaggaggcatctcttttgcttgaaaggccctgcaaggggtcacttaaagatggacctgcggcgcattagctagttggtgagataacagcccaccaaggcaaggatgcgtagccgacctgagagggtgatcggccacattggaactgagacacggtccaaactcctacgggaggcagcagtaaggagtattcgtcaatgggggaaaccctgaacgagcaacgccgcgtgagtgatgacggccctatgggttgtaaagctctgttgtaggggacgaatgattagcttaggaaatgaagctaatttgacggtac

SEQ ID NO: 6039 - DNA, 490 bp, unidentified
  misc_feature 1..490: note = Ascusbbf_55939, encodes 16S rRNA
  source 1..490: mol_type = genomic DNA
agagtttgatcatggctcaggacgaacgctggcggcgtgcttaacacatgcaagtcgaacgatgaagcccagcttgctgggtggattagtggcgaacgggtgagtaacacgtgagtaacctgccctccactctgggataactccgggaaaccggtgctaatactggatatgactccaacctgcatgggtatggggtggaaagatttatcggtggtggatggactcgcggcctatcagcttgttggtggggtaatggcctaccaaggcgacgacgggtagccggcctgagagggtgaccggccacactgggactgagacacggcccagactcctacgggaggcagcagtggggaatattgcacaatgggcgaaagcctgatgcagcgacgccgcgtgcgggatgacggccttcgggttgtaaaccgctttcagctctgacgaagcttttgtgacggtaggagcagaagaagcaccggctaactacgtgcca

SEQ ID NO: 6040 - DNA, 490 bp, unidentified
  misc_feature 1..490: note = Ascusbbf_284173, encodes 16S rRNA
  source 1..490: mol_type = genomic DNA
agagtttgatcatggctcaggatgaacgctggcggcgtgcttaacacatgcaagtcgaacggagagctaatgattgaggattcgtccaaatgatttagtttcttagtggcggacgggtgagtaacgcgtgaggaacctgcctcggagtggggaataacacagtgaaaattgtgctaataccgcataatgcagttgagtcgcatggctctgactgccaaagatttatcgctctgagatggcctcgcgtctgattagatagttggcggggtaacggcccaccaagtcgacgatcagtagccggactgagaggttgaccggccacattgggactgagacacggcccagactcctacgggaggcagcagtggggaatattgggcaatgggcgcaagcctgacccagcaacgccgcgtgaaggaagaaggctttcgggttgtaaacttcttttgtcagggacgaataaatgacggtacttgacgaataagccacg

SEQ ID NO: 6041 - DNA, 490 bp, unidentified
  misc_feature 1..490: note = Ascusbbf_9908, encodes 16S rRNA
  source 1..490: mol_type = genomic DNA
agagtttgatcatggctcaggacgaacgctggcggcatgcctaacacatgcaagtcgaacggagtttaaggggcttgctccttaaacttagtggcggacgggtgagtaacgcgtgagcaacctgcctctcagtggggaataatgtactgaaaaggacactaataccgcatgacgtaccggagtcgcatggcactggtaccaaagatttatcgctgagagatgggctcgcgtccgattagctggttggtgaggtaacggctcaccaaggcgacgatcggtagccggactgagaggttgaacggccacattgggactgagacacggcccagactcctacgggaggcagcagtgggggatattgcgcaatgggggcaaccctgacgcagcaatgccgcgtgaaggatgaaggtcttcggattgtaaacttcttttgtcagggacgataatgacggtacctgacgaataagctccggctaactacgtgccagca

SEQ ID NO: 6042 - DNA, 490 bp, unidentified
  misc_feature 1..490: note = Ascusbbf_141516, encodes 16S rRNA
  source 1..490: mol_type = genomic DNA
agagtttgatcatggctcaggatgaacgctggcggcgcatttaagacatgcaagtcgaacgaaaatttatgcttaaagagttgattagtttactaagatacaatttattataaattttagtggcggactggtgagtaatacataggtaatctgccttttagtgggggataactaggagaaattctagctaataccgcgtaagaccacatctaggcatctagaagaggtcaaagaagtaattcgctaaaagatgagcctgtggctgattagttagttggtgaggtaagggcttaccaagacgatgatcagtagccgagctgagaggctggccggccacattgggactgagatacggcccagactcctacgggaggcagcagttgggaatattggacaatggaggaaactctgatccagtgacgccgcgtgaaggaagaaggtcttcggattgtaaacttattttatcagggaagaagaaagtgacagtacc

SEQ ID NO: 6043 - DNA, 486 bp, unidentified
  misc_feature 1..486: note = Ascusbbf_52573, encodes 16S rRNA
  source 1..486: mol_type = genomic DNA
agagtttgatcatggctcagaacgaacgctggcggcaggtcttaggcatgcaagtcgaacggacgaagcggaagcttgctttcgcctagttagtggcgcacgagtgagtaacgcgtgggaaactgcccatcactggggaataacgtttggaaacgaacgctaataccgcatacgccggaaacgggaaagatttatcggtgatggatgtgcccgcgttggattagcttgttggtggggtaatggcctaccaaggcaatgatccatagctggtctgagaggacgatcagccacgttggaactgagacacggtccaaactcctacgggaggcagcagctaagaatattgggcaatggaggaaactctgacccagccatgccgcgtgaatgaagaaggccttcgggttgtaaagttcttttagtcgtgaagatgatgacagtagcgacagaaaaagcaccggctaacttcgtgccagcagccgcggtaat

SEQ ID NO: 6044 - DNA, 490 bp, unidentified
  misc_feature 1..490: note = Ascusbbf_1513270, encodes 16S rRNA
  source 1..490: mol_type = genomic DNA
agatttgatcatggctcaggacgaacgctggcggcgtgcctaacacatgcaagtcgaacggacgagaggagcttgctcctcaagttagtggcggacgggtgagtaacacgtgagcaacctgcccttcggagggggacaacagctggaaacggctgctaataccgcatgatgtatcctggaggcatctccgggataccaaagattttatcgccgaaggatgggctcgcgtctgattagatagttggcggggtaacggcccaccaagtctgcgatcagtagccggactgagaggttgaacggccacattgggactgagatacggcccagactcctacgggaggcagcagtggggaatattgggcaatgggggcaaccctgacccagcaacgccgcgtgaaggaagaaggctttcgggttgtaaacttctttgacgagggacgatagtgacggtacctcgaaaacaagccacggctaactacgtgccagcagc

SEQ ID NO: 6045 - DNA, 490 bp, unidentified
  misc_feature 1..490: note = Ascusbbf_85260, encodes 16S rRNA
  source 1..490: mol_type = genomic DNA
agagtttgatcctggctcaggatgaacgctagctacaggcttaacacatgcaagtcgaggggtaacgcgaggtagcaatactttggcgacgaccggcgcacgggtgcgtaacgcgtatgcaacctacctgtaacagggggataacggagagaaatttccactaataccccatattgttggagattcgcatgtttctccaacgaaagcttcggtggttacggatgggcatgcgtgacattagctagttggtaaggtaacggcttaccaaggcgacgatgtctaggggagctgagaggcttatcccccacactggtactgagacacggaccagactcctacgggaggcagcagtgaggaatattggtcaatggacggaagtctgaaccagccatgccgcgtggaggaagaaggtcctatgggttgtaaactccttttgttcgagagtaataaggtccttgcgaggaccgatgagagtatcggacgaataagc

SEQ ID NO: 6046 - DNA, 490 bp, unidentified
  misc_feature 1..490: note = Ascusbbf_4601, encodes 16S rRNA
  source 1..490: mol_type = genomic DNA
agagtttgatcctggctcagattgaacgctggcggcaggcttaatacatgcaagtcgaacggtagcagcaggaaggcttgcctttctggctgacgagtggcggacgggtgagtaatacctgggaaactgcctacaagagggggacaacacctggaaacgggtgctaataccgcataagccccgaggggaaaaggatgggaaaccatgcgcttgtagatgtgcccaggagggattagctagttggggaggcaaaggctcaccaaggcgacgatctctagctggtctgagaggatgatcagccacattgggactgagacacggcccaaactcctacgggaggcagcagtagggaatattgcacaatggggggaaccctgatgcagccatgccgcgtgtgtgaagaaggccttcgggttgtaaagcactttcagcggggaggaaggctgaggctccaacagggcctgagtcggacgttacccgcagaagaagc

SEQ ID NO: 6047 - DNA, 490 bp, unidentified
  misc_feature 1..490: note = Ascusbbf_1638, encodes 16S rRNA
  source 1..490: mol_type = genomic DNA
agagtttgatcatggctcaggatgaacgctagcggcaggcttaacacatgcaagtcgaggggcagcgggttgtagcaatacaatgccggcgaccggcgaaagggtgagtaacgcgtgagcaacatgcccgatagtggaggatagtcgatggaaacgtcgcgtaatactccgtaacaacagagaccgcatgatctttgtttaatagatttattgctatcggattggctcgcgtaccattagctagttggcggggtaacggcccaccaaggcgacgatggttaggggttctgagaggaaggtcccccacattggaactgagacacggtccagactcctacgggaggcagcagtgaggaatattggacaatggccggaaggctgatccagccatgccgcgtgcgggaagacggccctatgggttgtaaaccgcttttgttggggagcaataagggtcacgtgtggcctgatgagagtacccagcgaataagca

SEQ ID NO: 6048 - DNA, 490 bp, unidentified
  misc_feature 1..490: note = Ascusbbf_1143, encodes 16S rRNA
  source 1..490: mol_type = genomic DNA
agagtttgatcatggctcaggacgaacgctggcggcgtgcctaacacatgcaagtcgagcgagaatttatcgaaggagaccttcgggtcgaatttgatgaaggaaagcggcggacgggtgagtaacgcgtgagtaacctgccttacagagagggataacgttccgaaaggggcgctaataccgcataacgtatgtttgccgcatgacagacataccaaagatttatcgctgtaagatggactcgcgtctgattagctggttggtggggtaacggctcaccaaggcgacgatcagtagccgaactgagaggttgatcggccacattgggactgagacacggcccagactcctacgggaggcagcagtgggggatattgcgcaatgggggcaaccctgacgcagcaacgccgcgtgaaggatgaaggtcttcggatcgtaaacttttgtctttggggacgataatgacggtacccaaggaggaagccacggc

SEQ ID NO: 6049 - DNA, 482 bp, unidentified
  misc_feature 1..482: note = Ascusbbf_213, encodes 16S rRNA
  source 1..482: mol_type = genomic DNA
agagtttgatcatggctcagaacgaacgctggcggcacgcttaacacatgcaagtcggacggagtatgggagcttgctcttatacttagtggcggacgggtgagtaacacgtgggaacatgtcctgtagtggtggatagctccgggaaactggaggtaatacagcataagctcgagagaggaaagagaaatcgctataggggtggcccgcggctgattaggtagttggtggggtaaaggcctaccaagccgaggatcagtagctggtctgagaggatggacagccacactgaaactgagatacggttcagactcctacgggaggcagcagtggggaatattggacaatgggggcaaccctgatccagcgatgccgcgtgagtgaagaaggtcttaggattgtaaagctcttttgacagggaagatgatgacggtacctgtagaataagcaccggctaactctgtgccagcagccgcggtaat

SEQ ID NO: 6050 - DNA, 490 bp, unidentified
  misc_feature 1..490: note = Ascusbbf_494215, encodes 16S rRNA
  source 1..490: mol_type = genomic DNA
agagtttgatcctggctcaggacgaacgctggcggcgtgcctaatacatgcaagtcgaacgctgcttaagaagaaacttcggttttttcttaagcggagtggcggacgggtgagtaacacgtggggaacctatccatcagcgggggataacacttggaaacaggtgctaataccgcatacggctttttttcacctgaaagaaagctcaaaggcgctttacagcgtcactgatggctggccccgcggtgcattagccagttggtgaggtaacggctcaccaaagcaacgatgcatagccgacctgagagggtgatcggccacactgggactgagacacggcccagactcctacgggaggcagcagtagggaatcttcggcaatggacgcaagtctgaccgagcaacgccgcgtgagtgaagaaggttttcggatcgtaaagctctgttgtcagcaaagaacaggagaaagaggcaatgctttttctatgac

SEQ ID NO: 6051 - DNA, 490 bp, unidentified
  misc_feature 1..490: note = Ascusbbf_408876, encodes 16S rRNA
  source 1..490: mol_type = genomic DNA
agagtttgatcatggctcaggatgaacgctggcggcgtgcctaacacatgcaagtcgaacgaggtattgcaatcgagatggaggagcttgctccgaagtctcactcgtgataccgagtggcggacgggtgagtaacgcgtggagaacctgccccgtacagggggataccaattagaaatgattgttaataccgcataagcgcacatgaccgcatggtcgagtgtgaaaagctccggcggtacgggagggctccgcgtctgattagccagttggcggggtaacggcccaccaaagcgatgatcagtagccgacctgagagggtgaccggccacattgggactgagacacggcccaaactcctacgggaggcagcagtgggggatattgcacaatgggggaaaccctgatgcagcgacgccgcgtgagtgaagaagtatttcggtatgtaaagctctatcagcagggaagaaaatgacggtacctgactaag

SEQ ID NO: 6052 - DNA, 490 bp, unidentified
  misc_feature 1..490: note = Ascusbbf_48167, encodes 16S rRNA
  source 1..490: mol_type = genomic DNA
agagtttgatcctggctcaggatgaacgctggcggcatgcctaagacatgcaagtcgaacgaagtggcccattgagtatggagtacttgtacaaaatatgatttggaatttccacttagtggcagacgggtgagtaacacgtaagtaacctaccttaaagactgggataacgtttggaaacgaacgctaataccggatgattcattactagataactagaaatgctaaaagaagcgtttgcttcactttaagatgggcttgcggcgtattaactagttggtggggtaatggcctaccaaggtgacgatgcgtagccgggctgagaggctaatcggccacattgggactgagacacggcccaaactcctacgggaggcagcagttaggaatattcgtcaatgggggaaaccctgaacgagcaatgccgcgtgagtgatgacggtcttatagattgtaaaactctgttgtaaaggaagaacccttactatag

SEQ ID NO: 6053 - DNA, 490 bp, unidentified
  misc_feature 1..490: note = Ascusbbf_20569, encodes 16S rRNA
  source 1..490: mol_type = genomic DNA
agagtttgatcatggctcagattgaacgctagcgggatgctttacacatgcaagtcgaacggcagcacgaggagcttgctccttggtggcgagtggcgaacgggtgagtaatatatcggaacatgcccagtagcgggggataactactcgaaagagtggctaataccgcatacgtcctacgggagaaagcaggggaccttcgggccttgcactattggagtggccgatatcggattagctagttggtggggtaaaggcctaccaaggcgacgatccgtagctggtttgagaggacgaccagccacactgggactgagacacggcccagactcctacgggaggcagcagtggggaattttggacaatgggggaaaccctgatccagccatcccgcgtgtgcgatgaaggccttcgggttgtaaagcacttttgtcaggaaagaaatcgcccgggataatacctcgggtggatgacggtacctgaagaataa

SEQ ID NO: 6054 - DNA, 490 bp, unidentified
  misc_feature 1..490: note = Ascusbbf_70496, encodes 16S rRNA
  source 1..490: mol_type = genomic DNA
agagtttgatcctggctcaggatgaacgctggcggcgtgcctaacacattcaagtcgaacggagatatacggaagcttgcttttgtatattttagtggcggacgggtgagtaatgcatgagcaacctgccttaaagagggggataacacagagaaatttgtgctaataccgcataagctgcgaaggaggcatctcccatgcagaaaaggagcaatccgctttaagatgggctcatgtctgattagatagttggtagggtaacggcctaccaagtctgcgatcagtagccggactgagaggttgaacggccacattggaactgagatacggtccagactcctacgggaggcagcagtggggaatattgggcaatgggcgaaagcctgacccagcaacgccgcgtgaaggaagaaggtcttcggattgtaaacttctttgacaggggacgaagcatgacggtaccctgaaaacaagccacgactaactacgt

SEQ ID NO: 6055 - DNA, 490 bp, unidentified
  misc_feature 1..490: note = Ascusbbf_57, encodes 16S rRNA
  source 1..490: mol_type = genomic DNA
agagtttgatcatggctcaggacgaacgctggcggcgtgcctaacacatgcaagtcgaacggagcgaaagcagcttgctgctggagcttagtggcggacgggtgagtaacacgtgagcaacctgcctttcagaggggaataatgtctggaaacggacactaataccgcataatatctttttactgcatggtagagagatcaaaggagcaatccgctgaaagatgggctcgcgtctgattagccagttggcggggtaacggcccaccaaagcgacgatcagtagccggactgagaggttgaacggccacattgggactgagacacggcccagactcctacgggaggcagcagtgggggatattgcacaatgggggaaaccctgatgcagcaacgccgcgtgcaggaagaaggtcttcggattgtaaactgttgtcctctgtgacgataatgacggtagcagaggaggaagccacggctaactacgtgccag

SEQ ID NO: 6056 - DNA, 490 bp, unidentified
  misc_feature 1..490: note = Ascusbbf_2466, encodes 16S rRNA
  source 1..490: mol_type = genomic DNA
agagtttgatcatggctcaggacgaacgctggcggcatgcctaacacatgcaagtcgaacggagcttaagaagcttgctttttaagcttagtggcggacgggtgagtaacgcgtgagcaacctgcctttcagtggggaataatactctgaaaagggtactaataccgcataatgtacagagatcgcatggtttatgtaccaaagatttatcgctgagagatgggctcgcgtccgattagctggttggtgaggtaacggctcaccaaggcgacgatcggtagccggactgagaggttgaacggccacattgggactgagacacggcccagactcctacgggaggcagcagtgggggatattgcgcaatgggggaaaccctgacgcagcaatgccgcgtggaggattgaaggtcttcggattgtaaactccttttgtcagggacgaaaaatgacggtacctgacgaataagctccggctaactacgtgccag

SEQ ID NO: 6057 - DNA, 490 bp, unidentified
  misc_feature 1..490: note = Ascusbbf_119324, encodes 16S rRNA
  source 1..490: mol_type = genomic DNA
agagtttgatcatggctcaggatgaacgctggcggcgtgcctaacacatgcaagtcgaacggggtacagacgctgcgagaggaagtgcttgcacggaatcaaacttgtctgtacttagtggcggacgggtgagtaacgcgtggaaaacctgcctcatacagggggataacaggaagaaattcctgctaataccgcatgagcgcacattaccgcatggtagagtgtgaaaagatttatcggtatgagatggttccgcgtctgattagccagttggcggggtaacggcccaccaaagcgacgatcagtagccggcctgagagggcggacggccacattgggactgagacacggcccagactcctacgggaggcagcagtgggggatattgcacaatgggggaaaccctgatgcagcgacgccgcgtgggtgaagaagttattcgtaatgtaaagccctatcagcagggaagataatgacggtacctgactaa

SEQ ID NO: 6058 - DNA, 490 bp, unidentified
  misc_feature 1..490: note = Ascusbbf_243311, encodes 16S rRNA
  source 1..490: mol_type = genomic DNA
agagtttgatcatggctcaggacgaacgctggcggcgtgcctaatacatgcaagtcgaacgcttctttttcaccgaacttcggttcatcgaaaaagaggagtggcgaacgggtgagtaacacgtgggtaacctgcccatcagaaggggataacacttggaaacaggtgctaataccgtataatgctttttctcgcatgagagcaagctgaaaggcgcttttgcgtcactgatggatggacccgcggtgcattagctagttggtgaggtaacggctcaccaaggccacgatgcatagccgacctgagagggtgatcggccacactgggactgagacacggcccagactcctacgggaggcagcagtagggaatcttcggcaatggacgaaagtctgaccgagcaacgccgcgtgagtgaagaaggttttcggatcgtaaaactctgttgttagagaagaacaaggatgagagtaaaatgttcatcccttga

SEQ ID NO: 6059 - DNA, 490 bp, unidentified
  misc_feature 1..490: note = Ascusbbf_3307, encodes 16S rRNA
  source 1..490: mol_type = genomic DNA
agagtttgatcatggctcaggatgaacgctggcggcgtgcctaacacatgcaagtcgaacgggaactctcaaatgaaggttcgctggattttgagaaattctagtggcggacgggtgagtaacgcgtgggtaacctgcccttaagaggggaataacaccgagaaatcggtgctaatacaccatatgcttacagtatcgcatgatacagtgaggaaatgaatttcgcttaaggatggacccgcgtttgattagccagttggcagggtaacggcctaccaaagcaacgatcaatagccggcctgagagggtgaacggccacattggaactgagacacggtccaaactcctacgggaggcagcagtggggagtattgcacaatgggcgaaagcctgatgcagcaacgccgcgtgagtgaagaagtatttcggtatgtaaagctctatcgatggggaataaaatgaaggtacccaagtaagaagccccggctaa

SEQ ID NO: 6060 - DNA, 490 bp, unidentified
  misc_feature 1..490: note = Ascusbbf_38595, encodes 16S rRNA
  source 1..490: mol_type = genomic DNA
agagtttgatcctggctcagaacgaacgctggcggcgcgtcttaagcatgcaagtcgaacggcaagattggtgcttgcaccgatcctagagtggcggactggtgagtaacgcgtgggtgacgtaccctatggatggggatagccggtagaaataccggataataccgaataagcttggctttttaatgtaagttaaggaaaggagctccggctccgccaaaggaacggcccgcgtactattagctagttggtgaggtaacggcccaccaaggcgacgatagttatccggcctaagagggtgaacggacacattgggactgagatacggcccagactcctacgggaggcagcagctaagaatattccgcaatggaggaaactctgacggagcgacgccgcgtggatgatgaaggtcggaagattgtaaaatccttttaagtgtgatgaataaagtttacaggaaatggtagacagatgaccgtagcacttg

SEQ ID NO: 6061 - DNA, 490 bp, unidentified
  misc_feature 1..490: note = Ascusbbf_324, encodes 16S rRNA
  source 1..490: mol_type = genomic DNA
agagtttgatcctggctcaggacgaacgctggcggcgtgcttcatacatgcaagtcgaacgataaggccccttcgggggtacataagtggcggacgggtgagtaatatgtagagaatctgccttcaagcgggggacaacagagggaaacttctgctaataccccatatgagcgtacctgcgatggtattcttgaaagctccggcgcttggagatgagtctgcatctgattagctagttgggggtgtaatggaccaccaaggcgacgatcagtagctggtttgagaggatgatcagccacaatgggactgagacacggcccatactcctacgggaggcagcagtagggaattttgcgcaatgggcgaaagcctgacgcagcaacgccgcgtgatcgtagaagcccttcggggtgtaaagatctgtcagtagggacgaacaatgactgtacctacagaggaagcaccggctaactccgtgccagcagccgcg

SEQ ID NO: 6062 - DNA, 490 bp, unidentified
  misc_feature 1..490: note = Ascusbbf_1065, encodes 16S rRNA
  source 1..490: mol_type = genomic DNA
agagtttgatcatggctcaggacgaacgctggcggcatgcctaacacatgcaagtcgaacggaactaaggggcttgccctttagtttagtggcggacgggtgagtaacgcgtgagcaacctgcctttcagtggggaataatatcctgaaaagggtactaataccgcataacgtaacgagatcgcatggttttgttaccaaagatttatcgctgagagatgggctcgcgtccgattagccagttggtggggtaacggcctaccaaagctacgatcggtagccggactgagaggttgaacggccacattgggactgagacacggcccagactcctacgggaggcagcagtgggggatattgcgcaatgggggaaaccctgacgcagcaatgccgcgtgaaggatgaaggtcttcggattgtaaacttcttttgtcagggacgaaaattgacggtacctgacgaataagctccggctaactacgtgccagcag

SEQ ID NO: 6063 - DNA, 490 bp, unidentified
  misc_feature 1..490: note = Ascusbbf_4224, encodes 16S rRNA
  source 1..490: mol_type = genomic DNA
agagtttgatcatggctcaggacgaacgctggcggcgtgcttcatacatgcaagtcgaacgagaagctcacttcggtgagtggaaagtggcggacgggtgagtaatatgtagagaatctgccctagagagagggacaacagttggaaacgactgctaatacctcatatgcgcgtagttgagatactattcgtgaaaactccggtgctctaggatgagtctgcatctgattagctagttggcggtgtaatggaccaccaaggcgacgatcagtagctggtttgagaggatgatcagccacaatgggactgagacacggcccatactcctacgggaggcagcagtagggaattttgcgcaatgggggaaaccctgacgcagcaacgccgcgtgaacgaataagcccttcggggtgtaaagttctgtcagcagggacgaaacttgacggtacctgcagaggaagcatcggctaactccgtgccagcagccgcg

SEQ ID NO: 6064 - DNA, 490 bp, unidentified
  misc_feature 1..490: note = Ascusbbf_2018, encodes 16S rRNA
  source 1..490: mol_type = genomic DNA
agagtttgatcatggctcaggacgaacgctggcggcgtgcctaacacatgcaagtcgagcgagaatcttacgacggattccttcgggatgaagacgtaagaggaaagcggcggacgggtgagtaacgcgtgagtaacctgccttcaggagggggacaacagctggaaacggctgctaataccgcatgacattgctttatcgcatggtagagtaatcaaagatttatcgcctgaagatggactcgcgtctgattagctagttggtggggtaaaggcctaccaaggcgacgatcagtagccgaactgagaggttgatcggccacattgggactgagacacggcccagactcctacgggaggcagcagtgggggatattgcgcaatgggggcaaccctgacgcagcaacgccgcgtgaaggaagaaggttttcggatcgtaaacttctttaagtgtggaagaagatgacggtacacacagaataagccacggc

SEQ ID NO: 6065 - DNA, 490 bp, unidentified
  misc_feature 1..490: note = Ascusbbf_16608, encodes 16S rRNA
  source 1..490: mol_type = genomic DNA
agagtttgatcatggctcagaacgaacgctggtggcgtgtcttatacatgcaagtcgagcggtgcagcaatgcatagcggcgaacgggtgagtaacgcgtaagcaatctgccccctgttcgggaatagccgtgccaacgcgcgggtaataccggatatcgtggctccccacatggggagttgacaaaagatttatcgacaggggatgagcttgcgtccgattagctagttggcggggcaacggcccaccaaggcgacgatcggtagccggcctgagagggtgatcggccacattgggactgagatacggcccagactcctacgggaggcagcagtagggaatattgcacaatgggggaaaccctgatgcagcaacgccacgtgtgggaagaagcatttcggtgtgtaaaccactgtcgtgagggaataaggcttgctttcgggcaagttgaatgtacctcgagaggaagcaccggcaaacttcgtgccag

SEQ ID NO: 6066 - DNA, 490 bp, unidentified
  misc_feature 1..490: note = Ascusbbf_18776, encodes 16S rRNA
  source 1..490: mol_type = genomic DNA
agagtttgatcctggctcaggacgaacgctggcggcatgcctaacacatgcaagtcgaacggagtttgaggagcttgctccttgaacttagtggcggacgggtgagtaacgcgtgagtaacctgcctttcagtggggaataatattctgaaaagagtactaataccgcataacatacagaagtcgcatggcttttgtatcaaagatttatcgctgagagatggactcgcgtccgattagccagttggcggggtaacggcccaccaaagcaacgatcggtagccggactgagaggttgaacggccacattgggactgagacacggcccagactcctacgggaggcagcagtgggggatattgtgcaatggggggaaccctgacacagcaatgccgcgtgaaggatgaaggtcttcggattgtaaacttcttttgtcaaggaagataatgacggtacttgacgaataagctccggctaactatgtgccagca

SEQ ID NO: 6067 - DNA, 490 bp, unidentified
  misc_feature 1..490: note = Ascusbbf_7654, encodes 16S rRNA
  source 1..490: mol_type = genomic DNA
agagtttgatcatggctcaggatgaacgctagcggcaggcttaatacatgcaagtcgaacggtaacatagagtagcaatactctgatgacgagtggcggatgggtgcgtaacgcgtatgtgacctacccatattcgggacaaaacatcgagaaattggtgctaatatcctatatgtctacgagctgcatggtttgtagatgaaagtcgcgagatgaatatggatgggcatgcgtgccattagctagttggtaaggtaacggcttaccaaggcgacgatggctaggggctctgagaggattaccccccacattggaactgagacacggtccaaactcctacgggaggcagcagtaaggaatattggtcaatgggcggaagcctgaaccagccatgccgcgtgcaggaagacggtcctatggattgtaaactgcttttatacaggagtaatagcaggtacgtgtacctgtttgcaagtactgtaggaataag

SEQ ID NO: 6068 - DNA, 490 bp, unidentified
  misc_feature 1..490: note = Ascusbbf_9793, encodes 16S rRNA
  source 1..490: mol_type = genomic DNA
agagtttgatcatggctcaggacgaacgctggcggcgtgcctaacacatgcaagtcgaacggagttattcgagatgaagttttcggatggaattttggataacttagtggcggacgggtgagtaacgcgtgagtaacctgcccataagagggggataacgttctgaaaagaacgctaataccgcatgacatatttggttcgcatgaaccgaatatcaaaggagcaatccgcttatggatggactcgcgtccgattagctagttggcgggataacagcccaccaaggcgacgatcggtagccggactgagaggttgaacggccacattgggactgagacacggcccagactcctacgggaggcagcagtgggggatattgcgcaatgggggaaaccctgacgcagcaacgccgcgtgaaggacgaaggtcttcggattgtaaacttcttttgttgaggacgaagaaagtgacggtactcaacgaataagct

SEQ ID NO: 6069 - DNA, 490 bp, unidentified
  misc_feature 1..490: note = Ascusbbf_592595, encodes 16S rRNA
  source 1..490: mol_type = genomic DNA
agagtttgatcctggctcagattgaacgctggcggcaggcttaacacatgcaagtcgaggggtaacatgattggagcttgctccgattgatgacgaccggcacacgggtgagtaacgcgtatccaacctgccccatgctcagggataaccttccgaaagggagcctaatacctgatgttgtgctttgatggcatcagacgagcacgaaagattcatcggcatgggatggggatgcgtctgattagcttgttggcggggtaacggcccaccaaggctacgatcagtaggggttctgagaggaaggtcccccacactggtactgagacacggaccagactcctacgggaggcagcagtgaggaatattggtcaatgggcgggagcctgaaccagccaagtagcgtgcaggaagacggccctacgggttgtaaactgcttttatgaggggataaagtgggctacgtgtagcttattgcaggtacctcatgaat

SEQ ID NO: 6070 - DNA, 490 bp, unidentified
  misc_feature 1..490: note = Ascusbbf_13385, encodes 16S rRNA
  source 1..490: mol_type = genomic DNA
agagtttgatcatggctcaggacgaacgctggcggcgtgcctaacacatgcaagtcgaacggagctgctatggaagaccttcgggtcggaagtttcagcttagtggcgaacgggtgagtaacgcgtgagcaacctgcctttcagagggggacaacggttggaaacgaccgctaataccgcatgaagcaatttgaccgcatgatcgaattgccaaagatttatcgctgaaagatgggctcgcgtctgattagatagttggtggggtaacggcctaccaagtcaacgatcagtagccggactgagaggttgaacggccacattgggactgagatacggcccagactcctacgggaggcagcagtggggaatattgggcaatgggggaaaccctgacccagcaacgccgcgtgaaggaagaaggctttcgggttgtaaacttcttttaccgaggacgaagaacgtgacggtactcggagaaaaagccacggct

SEQ ID NO: 6071 - DNA, 490 bp, unidentified
  misc_feature 1..490: note = Ascusbbf_50295, encodes 16S rRNA
  source 1..490: mol_type = genomic DNA
agagtttgatcctggctcaggatgaacgctagctacaggcttaacacatgcaagtcgaggggcatcaggacggcagcttgctgccgttgctggcgaccggcgcacgggtgcgtaacgcgtgtccaacctaccccgggctcagggacagcccatcgaaagatggattaatacctgatgatgtgtctgcgccgcctggcgcagtcacgaaagattcatcggcccgggatggggacgcgtccgattagctagacggcggggtaacggcccaccgtggcgacgatcggtaggggttctgagaggaaggtcccccacactggaactgagacacggtccagactcctacgggaggcagcagtgaggaatattggtcaatggtcgtaagactgaaccagccaagtagcgtgagggaagactgccctatgggttgtaaacctcttttgttcgggaataaccggtcccacgcgtggggccctgcatgtaccgttcgaat

SEQ ID NO: 6072 - DNA, 490 bp, unidentified
  misc_feature 1..490: note = Ascusbbf_16928, encodes 16S rRNA
  source 1..490: mol_type = genomic DNA
agagtttgatcctggctcaggatcaacgctggcggcgtgcctaatgcatgcaagtcgaacggggttcacttcggtggacttacgtggcggacgggtgaggagcacgtgggcaacctgccctttggtggaggataaccgctggaaacagtgggtaatactgcatgagacattctgacgagtgggttggaatgggaaagccgagaggcgccgaaggaggggcctgcgtccgattagctagacggtggggtaacggcctaccgtggcagtgatcggtagctggtttgagaggatgatcagccacacggggactgagacacggccccgactcctacgggaggcagcagcaaggaattttccgcaatgggcgaaagcctgacggagcaacgccgcgtgtgggatgacgcttttcggagtgtaaaccactgttcgtggggacgaagcactgacggtacccacggaggaaggcccggctaactacgtgccagcagcc

SEQ ID NO: 6073 - DNA, 488 bp, unidentified
  misc_feature 1..488: note = Ascusbbf_18672, encodes 16S rRNA
  source 1..488: mol_type = genomic DNA
agagtttgatcatggctcagaacgaacgctggcggcatggattaggcatgcaagtcgaacgaggcagcaatgccgagtggcggaagggtgaggaacgcgtgagtaatctgccctcaagttgggaataacagctggaaacggctgctaataccgaatgtggctgttgtaccgcatggtgtgacagttaaagatttattgcttgaggatgagctcgcgtcccattagttagttggcggggcaacggcccaccaagacgatgatgggtagctggtctgagaggatggtcagccacactgggactgagacactgcccagactcctacgggaggctgcagtcgagaatcttgggcaatgcgcgaaagcgtgacccagcaatgccgcgtgtgtgatgaaggtcttcggattgtaaagcactgtctcccgggacgaaagatgacggtaccggggaaggaagccacggctaactacgtgccagcagccgcggtaat

SEQ ID NO: 6074 - DNA, 490 bp, unidentified
  misc_feature 1..490: note = Ascusbbf_21588, encodes 16S rRNA
  source 1..490: mol_type = genomic DNA
agagtttgatcatggctcagagttaacgctggctgcgtgcataacacatgcaagtcgaacggggattattggtgtagcaatacattgataattctagtggcagacgggtgagtaatacataaggaatccacctgggagcggggaataactggccgaaaggttagctaataccccataatataaggagatagcattatctctttcttaaaggtttttcacttccagacgatcttatggtctatcagctagttggtagggtaacggcctaccaaggctacgacggatagccggcctgaaagggcgaccggccacaggggcactgagacacgggccccactcctacgggaggcagcagtggggaattttggacaatggacgaaagtctgatccagcaacgcagcgtgaaggacgaaggttctcggattgtaaacttcttttgcaggggaagaaaaaaatgacggtaccctgtgaataagccacggctaactac

SEQ ID NO: 6075 - DNA, 490 bp, unidentified
  misc_feature 1..490: note = Ascusbbf_51570, encodes 16S rRNA
  source 1..490: mol_type = genomic DNA
agagtttgatcctggctcaggatgaacgctagctacaggcttaacacatgcaagtcgaggggcagcggtagggaagcttgctttcctagccggcgaccggcgcacgggtgcgtaacgcgtatcgaacctggcccatacacggggatagtctcctgaaagggaggttaatacccggcggtcccattatgtcgcatgatgtggtgggtgaagattcatcggtatgggatggcggtgcgtaggattagctagtcggcggggtaacggcccaccgaggcgacgatccttaggggttctgagaggaaggtcccccacactggtactgagacacggaccagactcctacgggaggcagcagtgaggaatattggtcaatggccgagaggctgaaccagccaagtagcgtgcaggaagacggccctctgggttgtaaactgcttttacagcggaataaagtgtcctacgtgtaggattttgtatgtacgctgtgaat

SEQ ID NO: 6076 - DNA, 490 bp, unidentified
  misc_feature 1..490: note = Ascusbbf_76388, encodes 16S rRNA
  source 1..490: mol_type = genomic DNA
agagtttgatcatggctcagaacgaacgctggcggcaggcctaacacatgcaagtcgagcgtgaaaggggacttcggttcccgagtaaagcggcgcacgggtgagtaacacgtgaataatctgcccttgtgaccgggataacagatcgaaagaactgctaataccggataagcttccacatcaaccgggtgcgggggaaaagtgcgggaccttcgggccgcacgcatgaggatgagttcgcgtcccattagatagttggtgaggtaatggctcaccaagtcgacgatgggtagctggtctaagaggatgatcagccacactggaactgagacacggtccagactcctacgggaggcagcagtggggaatcttgcgcaatggaggaaactctgacgcagccatgccgcgtgagtgatgaaggccctcgggttgtaaagctctgtctaaggggacgaacggctctgtaaacaagagatgcagagattgacgg

SEQ ID NO: 6077 - DNA, 490 bp, unidentified
  misc_feature 1..490: note = Ascusbbf_79836, encodes 16S rRNA
  source 1..490: mol_type = genomic DNA
agagtttgatcatggctcaggacgaacgctggcggcgtgcttaacacatgcaagtcgaacgaggttaatttgaggaagtcttcggatggaatcggattaaccgagtggcggacgggtgagtaacgcgtgagcaacctgtcttctacagggggataacactccgaaaggagcgctaataccgcataggaccacagcatcacatggtgcaggggtgaaaggagtaatccggtagaaggtgggctcgcgtcccattagatagttggtgaggtaacggctcaccaagtcgacgatgggtagccgacctgagagggtgatcggccacattggaactgagatacggtccagactcctacgggaggcagcagtggggaatattgggcaatgggcgcaagcctgacccagcaacgccgcgtgagggaagaaggtcttcgggttgtaaacctctgtccttggtgaaaaggaaggatggtagccaaggaggaagccccgg

SEQ ID NO: 6078 - DNA, 490 bp, unidentified
  misc_feature 1..490: note = Ascusbbf_22541, encodes 16S rRNA
  source 1..490: mol_type = genomic DNA
agagtttgatcatggctcaggattaacgctggcggcatgcctaatacatgcaagtcgaacggagtaattgagtagcttgctacgagattacttagtggcggacgggtgagtaacgcgtgaacaatctgcccataagaggggtataacacttagaaataggtgctaataccgcataatactacgaggtggcatcattttgtagtcaaaggagcaatccgcttatggatgagtttgcgtatcattagctagttggtagggtaacggcctaccaaggccacgatggttagccggcctgagagggtgaacggccacattggaactgagatacggtccagactcctacgggaggcagcagtaaggaatattgggcaatgggcgaaagcctgacccagcaatgccgcgtgaaggatgaaggtcttcggattgtaaacttctaaaaacagggaaaaaaacaatgatggtacctgtagataagtcacggcaaactatg

SEQ ID NO: 6079 - DNA, 490 bp, unidentified
  misc_feature 1..490: note = Ascusbbf_61006, encodes 16S rRNA
  source 1..490: mol_type = genomic DNA
agagtttgatcatggctcaggatgaacgctggcggcaggcttaatacatgcaagtcgaacggtaaggcccgaggtggcaacactgagggtacacgagtggcgcacgggtgcgtaacgcgtatgcaatctgcccggcacagggacaaaacaccgggaaactggtgctaatattccatggtcaccggagggggcatcccttttggtgtaaagattcatcggtgccggatgagcatgcgtattattaggtagttggtggggtaacggcccaccaagccgacgatgattaggggtcctgagagggttaacccccacactggaactgagacacggtccagactcctacgggaggcagcagtagggaatattgggcaatggaggcaactctgacccagccatgccgcgtgaaggaagacggccctatgggttgtaaacttcttttgccgcagagtaagcccggtcacgcgtggtcggttgagagtatgcggcgaat

SEQ ID NO: 6080 - DNA, 490 bp, unidentified
  misc_feature 1..490: note = Ascusbbf_783800, encodes 16S rRNA
  source 1..490: mol_type = genomic DNA
agagtttgatcctggctcaggacgaacgctggcggcgtgcctaacacatgcaagtcgaacgagaatttattaattgatttcttcggaatgattttgataaaggaaagtggaggacgggcgagtaacgcgtgaataacctgcccataagagggggataatccatggaaacgtggactaataccgcatattgaagttttatcgcatggtgagactttgaaagattttatcgcttatggatggattcgcgtcagattagctagttggtgaggtaacggctcaccaaggcgacgatctgtagccgaactgagaggttgatcggccgcattgggactgagacacggcccagactcctacgggaggcagcagtggggaatattgcgcaatgggggcaaccctgacgcagcaacgccgcgtgcaggaagaaggtcttcggattgtaaactgttgtcgcaagggaagaagaaaatgacggtacctgactaagaagccc

SEQ ID NO: 6081 - DNA, 490 bp, unidentified
  misc_feature 1..490: note = Ascusbbf_210563, encodes 16S rRNA
  source 1..490: mol_type = genomic DNA
agagtttgatcctggctcaggatgaacgctggcggcatgcctaagacatgcaagtcgaacgaggtggcccattgaaggatgcgtgcttgcacaaatttggatttggattaccacctagtggcagacgggtgagtaacacgtgggtgacctacctttaagctggggataacagttggaaacgattgctaataccgaataatgtataactgtcatggttatactgaaaggagcctttaaagcttcacttagagatgggcctgcggcgtattaactagttggtggggtaacggcctaccaaggtgacgatgcgtagccgaactgagaggttgatcggccacactgggactgagacacggcccagactcctacgggagacagcagttagggatattcgtcaatgggggaaaccctgaacgagcaatgccgcgtgagtgatgaaggtctttggattgtaaaactctgttgtatggaaaaaacggctaggttagga

SEQ ID NO: 6082 - DNA, 490 bp, unidentified
  misc_feature 1..490: note = Ascusbbf_1870650, encodes 16S rRNA
  source 1..490: mol_type = genomic DNA
agagtttgatcctggctcaggatgaacgctggcggcgtgcttaacacatgcaagtcgaacgaagcacacctgcggaagttttcggatggaagcgggtatgacttagtggcggacgggtgagtaacgcgtgggcaacctgccgtatgcagggggacaacagctggaaacggctgctaataccgcataagcgcacggtaccgcatggtgcagtgtgaaaagatttatcggcatacgatgggcccgcgttggattaggcagttggcgaggtaacggcccaccaaaccgacgatccatagccgacctgagagggtgaccggccacattgggactgagacacggcccaaactcctacgggaggcagcagtggggaatattgcacaatgggggaaaccctgatgcagcgacgccgcgtgagtgaagaagtatttcggtatgtaaagctctatcagcagggaagaagatgacggtacctgcacaagaagccccggct

SEQ ID NO: 6083 - DNA, 490 bp, unidentified
  misc_feature 1..490: note = Ascusbbf_52519, encodes 16S rRNA
  source 1..490: mol_type = genomic DNA
agagtttgatcatggctcagagtgaacgctggcggcgtggctaagacatgcaagtcgagcgagaaggtgccttcgggtaccggaaagcggcaaacgggtgcgtaacacgtaagtaacctgcccttaagacgggaacagcttgatgaaaattaagataatgcccgatatccgcttctttcgcatgagagaggtcggaaaggtttgtgatgacgcttaaggaggggcttgcggcctatcagcttgttggcggtgtgaaagaccaccaaggcaaagacgggtagccggtctgagaggatggacggccacattggaactgagatacggtccaaacacctacgggtggcagcagtttcgaatcattcacaatgggcgaaagcctgatggtgcgacgccgcgtggaggatgaaggtcttcggattgtaaactcctgtcgtcagggagcaaaaagtcggtgaagaatcgaccttgagttaacttgaagaggaagcag

SEQ ID NO: 6084 - DNA, 490 bp, unidentified
  misc_feature 1..490: note = Ascusbbf_15917, encodes 16S rRNA
  source 1..490: mol_type = genomic DNA
agagtttgatcatggctcaggacgaacgctggcggcgtgcctaacacatgcaagtcgaacggactgattcgcttcggtgatgaaagtcagtggcggacgggtgagtaacgcgtgagtaacctgcctttcagagggggataacgttttgaaaagaacgctaataccgcataacgcaaagttgtcgcatggcagttttgccaaaggagcaatccgctgagagatggactcgcgtccgattagatagttggcggggtaacggcccaccaagtcgacgatcggtagccggactgagaggttgatcggccacattgggactgagacacggcccagactcctacgggaggcagcagtgagggatattgcacaatgggcgaaagcctgatgcagcaacgccgcgtgagggatgacggtcttcggattgtaaacctctgtcttcagtgaagaaacatgacattagctgaggaggaagccacggctaactacgtgccag

SEQ ID NO: 6085 - DNA, 490 bp, unidentified
  misc_feature 1..490: note = Ascusbbf_102031, encodes 16S rRNA
  source 1..490: mol_type = genomic DNA
agagtttgatcatggctcaggatgaacgctggcggcaggcttaatacatgcaagtcgaacggtaaggccgagcgtagcaatacgtgaggtacacgagtggcgcacgggtgcgtaacgcgtatgcaacctgcccccaaccgggacaaaacagctggaaacggctgctaatatcccatggtcactcgaggtggcatcaccatgagtgtaaagattcattggttggggatgggcatgcgtattattaggtagttggcggggtaacggcccaccaagccgacgatgattaggggttctgagaggattaacccccacactggaactgagacacggtccagactcctacgggaggcagcagtagggaatattgggcaatggaggcaactctgacccagccatgccgcgtgaaggaagacggccctatgggttgtaaacttcttttgccgcagagtaaacgcggggacgtgtccccgtttgagagtatgcggcgaat

SEQ ID NO: 6086 - DNA, 490 bp, unidentified
  misc_feature 1..490: note = Ascusbbf_71511, encodes 16S rRNA
  source 1..490: mol_type = genomic DNA
agagtttgatcatggctcagaacgaacgctggcggcgcgtcttaagcatgcaagtcgagcggtaagatagtagcttgctattatcctagagcggcggactggtgagtaacgcgtgggtgacgtaccctttggacggggatagcctgtggaaacacagggtaataccggatacggtcgcatatgtcagaggtatgcgaggaaaggttcttttgaaccgccgaaggagcggcccgcgtgctattagttagttggcggggtaacggcccaccaagacgacgatagctacccggcctaagagggtgaacgggcacattgggactgagatacggcccagactcctacgggaggcagcagctaagaatattccgcaatggacgaaagtctgacggagcgacgccgcgtggatgatgaaggccggaaggttgtaaaatccttttggaagcgaggaataattaaagtgagagaaacgctttgaggtgacggtagcttc

SEQ ID NO: 6087 - DNA, 490 bp, unidentified
  misc_feature 1..490: note = Ascusbbf_195990, encodes 16S rRNA
  source 1..490: mol_type = genomic DNA
agagtttgatcctggctcaggacgaacgctggcggcgtgcttaacacatgcaagtcgagcggagatgtgatcacagagggcttcggtccaaagcgatcatatttcagcggcggacgggtgagtaacgcgtgaatgatctgtctcttacagggggataacacttggaaacaggtgctaataccgcataagaccacactgctgcatggcagaggggtaaaaggagcgatccggtaagaggtgagttcgcgtccgattagctggttggtgaggtaacggcccaccaaggcgacgatcggtagccgacctgagagggtgatcggccacattggaactgagagacggtccaaactcctacgggaggcagcagtgggaatattgggcaatgggcgaaagcctgacccagcaacgccgcgtgagtgaagaaggttttcggattgtaaagctctgtccttggggacgaaggaagtgacggtacccgaggaggaagccc

SEQ ID NO: 6088 - DNA, 490 bp, unidentified
  misc_feature 1..490: note = Ascusbbf_140516, encodes 16S rRNA
  source 1..490: mol_type = genomic DNA
agagtttgatcatggctcaggacgaacgctggcggcgtgcttaacacatgcaagtcgaacgaggatatatcgcggaagtcttcggacggaagggacatattcgagtggcggacgggtgagtaacgcgtgagcaacctgtcttacacagggggataacactccgaaaggagcgctaataccgcataagaccacgatatcgcatggtattgaggtaaaaggaggaatccggtgtaaggtgggctcgcgtcccattagatagttggcagggtaaaggcctaccaagtcgacgatgggtagccgacctgagagggtgatcggccacattggaactgagatacggtccagactcctacgggaggcagcagtggggaatattgggcaatgggcgaaagcctgacccagcaacgccgcgtgagggatgaaggtcttcgggttgtaaacctctgtcctaagtgaaaaggaaggatggtagcttaggaggaagctccgg

SEQ ID NO: 6089 - DNA, 490 bp, unidentified
  misc_feature 1..490: note = Ascusbbf_727601, encodes 16S rRNA
  source 1..490: mol_type = genomic DNA
agagtttgatcatggctcaggatgaacgctggcggcgtgcctaacacatgcaagtcgaacggggttaagcagaaattttcggatggaagcttaacttagtggcggacgggtgagtaacgcgtggataacctgcctcacacagggggatagcagctggaaacggctggtaataccgcataagaccacggcatcgcatgatgcagcggtaaaagatttatcggtgtgagatggatccgcgtctgattagccagttggcggggtaacggcccaccaaggcgacgatcagtagccggcctgagagggtgaacggccacattgggactgagacacggcccaaactcctacgggaggcagcagtggggaatattgcacaatgggcgcaagcctgatgcagcaacgccgcgtgagtgaagaagtatttcggtatgtaaagctctatcggcagggaagaaaggcccattaagggagatgacggtacctgactaagaag

SEQ ID NO: 6090 - DNA, 490 bp, unidentified
  misc_feature 1..490: note = Ascusbbf_56797, encodes 16S rRNA
  source 1..490: mol_type = genomic DNA
agagtttgatcatggctcaggatgaacgctagcggcaggcttaacacatgcaagtcgaggggcagcgggtccagcaatggatgccggcgaccggcgaaagggtgagtaacgcgtgagcaacatgcccgacactgggggatagtcattggaaacgatgcgtaataccccgtaacacaagggaccgcatgatcctttgttgaaagattcattggtgtcggattggctcgcgtgccattaggtagacggcggggtaacggcccaccgtgccgacgatggctaggggttctgagaggaaggtcccccacattggaactgagacacggtccagactcctacgggaggcagcagtgaggaatattggacaatggccggaaggctgatccagccatgccgcgtgcgggatgacggccctatgggttgtaaaccgcttttgccggggagcaataaggcccacgcgtgggccgacgagagtacccggcgaataagcatc

SEQ ID NO: 6091 - DNA, 490 bp, unidentified
  misc_feature 1..490: note = Ascusbbf_94410, encodes 16S rRNA
  source 1..490: mol_type = genomic DNA
agagtttgatcctggctcaggatgaacgctggcggcgtgcttaacacatgcaagtcgaacggagctttttttgaaggagacttcggtcaacggaagctaaagcttagtggcggacgggtgagtaacgcgtgagtaacctgcctttcagagggggataacatccggaaacggatgctaataccgcataaaacagcagcaccgcatgatgcaactgtcaaagattttatcgctgaaagatggactcgcgtccgattaggtagttggtgaggtaacggcccaccaagccgacgatcggtagccggactgagaggttgaacggccacattgggactgagacacggcccagactcctacgggaggcagcagtggggaatattgcacaatgggcgcaagcctgatgcagcaacgccgcgtgagggaagacggttttcggattgtaaacctctgttcttagtgacgaagaagtgacggtagctaaggagcaagccac

SEQ ID NO: 6092 - DNA, 490 bp, unidentified
  misc_feature 1..490: note = Ascusbbf_139627, encodes 16S rRNA
  source 1..490: mol_type = genomic DNA
agagtttgatcatggctcaggatgaacgctggcggcgtgcctaatacatgcaagtcgaacgagagtgcttgcactcgagtggcgaacgggtgagtaacacgtaggtaacctgccttacagtttgggatacccgagggaaaccttggctaataccgaataattcttttggaggcatctccgaaagctaaaaggggcctttaaagcctcgctgaaagatggacctgcggcgcattagctagttggtgagataacagcccaccaaggcgaggatgcgtagccgacctaagagggtgaacggccacactggaactgagacacggtccagactcctacgggaggcagcagtagggagttttcggcaatgggggaaaccctgaccgagcaacgccgcgtgaacgatgaaggtcttcggattgtaaagttctgttataagggaagaatgatagcttgaggaaatgctagttatttgacggtaccttattagaaagcc

SEQ ID NO: 6093 - DNA, 470 bp, unidentified
  misc_feature 1..470: note = Ascusbbf_53234, encodes 16S rRNA
  source 1..470: mol_type = genomic DNA
agagtttgatcctggctcagaacgaacgctggcggaatgcctaacacatgcaagtcgaacgagaccttcgggtctagtggcgcacgggtgagtaacgcgtgggaatctgccttggggtacggaataactcagggaaacttgagctaataccgtatgatgtcgagagaccaaagatttatcgccctgagaggagcccgcgtcggattagcttgttggtggggtaacggcctaccaaggcgacgatccgtagctggtctgagaggatgatcagccacactgggactgagacacggcccagactcctacgggaggcagcagtggggaatattggacaatgggcgcaagcctgatccagcaattccgcgtgagcgaagaaggccttcgggttgtaaagctctttcggcggggacgataatgacggtacccgcagaagaagccccggctaactccgtgccagcagccgcggtaat

SEQ ID NO: 6094 - DNA, 490 bp, unidentified
  misc_feature 1..490: note = Ascusbbf_324435, encodes 16S rRNA
  source 1..490: mol_type = genomic DNA
agagtttgatcatggctcaggatgaacgctggcggcgtgcctaacacatgcaagtcgaacggggatatgtcggaatgagacttcggttgaaggaagacacatcttagtggcggacgggtgagtaacgcgtggagaacctgcctcatactgggggataccagtgagaaatcactgctaaaaccgcataagcgcacggtaccgcatggtacagtgtgaaaaactccggtggtatgggatggctccgcgttggattagccagttggcggggtaacggcccaccaaagcgacgatccatagccggcctgagagggtggacggccacattgggactgagacacggcccagactcctacgggaggcagcagtggggaatattgcacaatggggggaaccctgatgcagcgacgccgcgtgaaggaagaagtatttcggtatgtaaacttctatcgacagggaagatgatgacggtacctgagtaagaagccccggc

SEQ ID NO: 6095 - DNA, 490 bp, unidentified
  misc_feature 1..490: note = Ascusbbf_249930, encodes 16S rRNA
  source 1..490: mol_type = genomic DNA
agagtttgatcatggctcaggacgaacgctggcggcgtgcctaatacatgcaagtggaacgcaacttttcatccgtttcttcggaaacatctgagaagttgagtcgcgaacgggtgagtaacgcgtaggtaacctgcctgatagcgggggataactattggaaacgatagctaataccgcataagagctttagtggcatcattggagcttaaaaggagcaactgcttcactatcagatggacctgcgttgtattagctagttggtggggtaaaggcctaccaaggcaacgatacatagccgacctgagagggtgatcggccacactgggactgagacacggcccagactcctacgggaggcagcagtagggaatcttcggcaatggggggaaccctgaccgagcaacgccgcgtgagtgaagaaggttttcggatcgtaaagctctgttgtaagagaagaacgtgtgagagagtggaaagttctcacagt

SEQ ID NO: 6096 - DNA, 490 bp, unidentified
  misc_feature 1..490: note = Ascusbbf_174834, encodes 16S rRNA
  source 1..490: mol_type = genomic DNA
agagtttgatcctggctcaggatgaacgctagctacaggcttaacacatgcaagtcgaggggcagcatgatttgtgcttgcacagattgatggcgaccggcgcacgggtgagtaacgcgtatccaacctgccccatggtcggggacagcccggcgaaagtcggattaacccccgatgttgtccgaagaaggcatctgatttggacgaaaggtgacgccatgggatggggatgcgtaggattaggcaggcggcggggcgacggcccaccgcgccgacgatccttaggggttctgagaggaaggtcccccacactggtactgagacacggaccagactcctacgggaggcagcagtgaggaatattggtcaatgggcggaagcctgaaccagccaagtagcgtgcaggaggacggccctacgggttgtaaactgcttttatgcggggataaaggagggcacgcgtgcccttttgcaggtaccgcatgaataa

SEQ ID NO: 6097 - DNA, 490 bp, unidentified
  misc_feature 1..490: note = Ascusbbf_289009, encodes 16S rRNA
  source 1..490: mol_type = genomic DNA
agagtttgatcatggctcaggatgaacgctggcggcgtgcataacacattcaagtcgaacgaagcatacggaatgaagttttcggatggaatgaagtatgacttagtggcggacgggtgagtaacgcgtgagcaaccttcctgcctgtgagggataacacagggaaacttgtgctaataccgcatgaagcataattatcgcatggtagatatgccaaagatatattgcaggcagatgggctcgcgtctgattagatagttggcagggtaacggcctaccaagtcgacgatcagtagccggactgagaggttgaacggccacattggaactgagagacggtccagactcctacgggaggcagcagtggggaatattgggcaatgggcgaaagcctgacccagcgacgccgcgtgagggaagaaggtcttcggattgtaaacctctttcagcaaggaagaagaaagtgacggtacttgcagaagaagccacg

SEQ ID NO: 6098 - DNA, 358 bp, unidentified
  misc_feature 1..358: note = Ascusbbf_689583, encodes 16S rRNA
  source 1..358: mol_type = genomic DNA
agagtttgatcctggctcaggatgaacgctagctacaggcctaacacatgcaagtcgaggggcagcatggagcttgcttgcaagctctgatggcgaccggcaaatgggtgagtcacgcgtgtccaacctgccccgcgcccggggatagcccttggaaatgaggattaagacccgatacgtgcgttgtccgcatggacgtcgcatgaaaccaggcacgggatggggacgcgtcggattagcttgacggcggggcaacggcccaccgtggcgacgatccgcaggggttctgagaggaaggtcccccacactggcactgagacacgggccagactcctacgggagccagcagccgcggtat

SEQ ID NO: 6099 - DNA, 490 bp, unidentified
  misc_feature 1..490: note = Ascusbbf_204435, encodes 16S rRNA
  source 1..490: mol_type = genomic DNA
agagtttgatcctggctcaggataaacgctggcggcgcacataagacatgcaagtcgaacgaacttaatcttttagtttactattagaagcggttagtggcggactggtgagtaacgcgtaagcaatctgcctatcagaggggaacaacagtgagaaatcactgctaataccgcatatgctgtgagtacggcatcgtacaaacaggaaaggagcaatccgctgatagatgagcttgcgtctgattaacttgttggtgaggtaacggcccaccaaggtgatgatcagtagccggactgagaggttaaacggccacattgggactgagatacggcccagactcctacgggaggcagcagtcgggaatattgcgcaatggaggaaactctgacgcagtgacgccgcgtgcaggatgaaggttttcggattgtaaactgctttagatagggaagaaaaaaatgacggtacctatagaataagctccggctaact

SEQ ID NO: 6100 - DNA, 490 bp, unidentified
  misc_feature 1..490: note = Ascusbbf_66361, encodes 16S rRNA
  source 1..490: mol_type = genomic DNA
agagtttgatcatggctcaggatgaacgctggcggcgtgcctaatacatgcaagtcgagcgagaatctctgacatgacacttcggttgattgaaggggaggacagcggcggacgggtgagtaacgcgtaggcaacctgcccccggcagagggatagccattggaaacgatgattaaaacctcataacgcttttatgacacatgtcatgaaagccaaagatttatcggctggggatgggcctgcgtctgattaactagttggtgaggtaacggctcaccaaggtgacgatcagtagccgacctgagagggtgatcggccacattggaactgagacacggtccaaacttctacggaaggcagcagtagggaattttgcacaatgggggaaaccctgatgcagcaacgccgcgtgaaggatgaaggccttcgggttgtaaacttcttttctcggggaagaagatctgacggtacctgaggaacaagccccggc

SEQ ID NO: 6101 - DNA, 490 bp, unidentified
  misc_feature 1..490: note = Ascusbbf_109626, encodes 16S rRNA
  source 1..490: mol_type = genomic DNA
agagtttgatcatggctcaggacgaacgctggcggcgtgcttaacacatgcaagtcgaacggaaaggccccttcgggggtactcgagtggcgaacgggtgagtaacacgtgggtgatctgccctgcactttgggataagcctgggaaactgggtctaataccgaataggaccacgcgcctcatggtgtgtggtggaaagcttttgcggtgtgggatgggcccgcggcctatcagcttgttggtggggtaatggcctaccaaggcgacgacgggtagccggcctgagagggtgtccggccacactgggactgagatacggcccagactcctacgggaggcagcagtggggaatattgcacaatgggcgcaagcctgatgcagcgacgccgcgtgggggatgacggccttcgggttgtaaacctctttcagtatcggcgaagctccagagttttctttggggtgacggtaggtacagaagaagcaccggcca

SEQ ID NO: 6102 - DNA, 490 bp, unidentified
  misc_feature 1..490: note = Ascusbbf_105285, encodes 16S rRNA
  source 1..490: mol_type = genomic DNA
agagtttgatcatggctcaggatgaacgctggcggcgtgcctaatacatgcaagtcgaacgagggtgcttgcaccctagtggcgaacgggtgagtaacacgtaggtaacctgccctttagcttgggatacccagaggaaactttggctaataccggataacaacagatgaggcatctcaactgtttgaaaggccctttcgggtcactaaaggatggacctgcggcgcattagctagttggtgagataacagcccaccaaggcgaggatgcgtagccgaactgagaggttgatcggccacatggaaactgagacacggttccaactcctacgggaggcagcagtaaggagttttcggcaatgggggaaaccctgaccgagcaacgccgcgtgagtgatgacggccctatgggttgtaaagctcttttattagagacgaatggcgggattaggaaatgaatcccgtttgacggtatcttttgaataagccac

SEQ ID NO: 6103 - DNA, 490 bp, unidentified
  misc_feature 1..490: note = Ascusbbf_485682, encodes 16S rRNA
  source 1..490: mol_type = genomic DNA
agagtttgatcatggctcaggacgaacgctggcggcgtgcctaacacatgcaagtggagcgacgaaccggggcttgccccggggcagagccgcgaacgggtgagtaacacgtgggttacctgccccgatgaccgggacaacccgtcgaaagacgggctaataccggatgtgccccttgggggaaaggaagcttcggcctccgcatcgggatgggcccgcggcgcattagctagttggtgaggtaatggcttaccaaggcgacgatgcgtagctggtctgagaggacgatcagccacactgggactgagacacggcccagactcctacgggaggcagcagtggggaatcttgcacaatgcgcgaaagcgtgatgcagcaacgccgcgtgcgggaagaaggccttagggttgtaaaccgctttcagttgggacgaagcttcgtgagttaatagctctttgaagtgacggtaccttcagaagaagcgccggct

SEQ ID NO: 6104 - DNA, 490 bp, unidentified
  misc_feature 1..490: note = Ascusbbf_136220, encodes 16S rRNA
  source 1..490: mol_type = genomic DNA
agagtttgatcatggctcaggatgaacgctagctacaggcttaacacatgcaagtcgaggggcagcatgacgagagcttgctcttgttgatggcgaccggcgcacgggtgcgtaacgcgtatccaacctgccgtttacccggggacagccttgcgaaagtaagattaatacccgatgttgtgcggaatccgcatggtttttgcaccaaaggttcattccggtaagcgatggggatgcgtacgattagctagtcggcggggtgacggcccaccgaggcgacgatcgttaggggttctgagaggatggccccccacactggtactgagacacggaccagactcctacgggaggcagcagtgaggaatattggtcaatgggcgcgagcctgaaccagccaagtagcgtgcaggaggactgccttacaggttgtaaactgcttttatgcgggggtaaagtttggcacgtgtgccattttgcaagtaccgcatga

SEQ ID NO: 6105 - DNA, 490 bp, unidentified
  misc_feature 1..490: note = Ascusbbf_102404, encodes 16S rRNA
  source 1..490: mol_type = genomic DNA
agagtttgatcatggctcaggacgaacgctggcggcacgcttaacacatgcaagtcgaacggagtttatcattaagcttgcttagagataaacttagtggcggacgggtgagtaacacgtgagcaatctgcctttcagagggggatagcagttggaaacgactgataataccgcataacataacgaagccgcatgactttgttatcaaagattttatcgctgaaagatgagctcgcgtctgattagctagttggtgaggtaacggctcaccaaggcgacgatcagtagccggactgagaggttgaacggccacattgggactgagacacggcccagactcctacgggaggcagcagtggggaatattgcacaatggaggaaactctgatgcagcgatgccgcgtgagggaagaaggttttcggattgtaaacctctgtcttaggggacgagaaaggacggtaccctaggaggaagctccggctaactacg

SEQ ID NO: 6106 - DNA, 488 bp, unidentified
  misc_feature 1..488: note = Ascusbbf_132971, encodes 16S rRNA
  source 1..488: mol_type = genomic DNA
agagtttgatcatggctcaggattaacgctggcggcgtgcctaatacatgcaagtcggatggtagcaataccatggcgaacgggtgagtaacacgtaggtaacctgtcattaagacgagaataaccattggaaacgatggataatgctggataggatatttaagggcatcctagaatatttaaagatttatcacttaatgaggggcctgcggcgcattagctagttggaaaggtaaaagcttaccaaggcgatgatgcgtagccggactgagaggttgaacggccacaatggaactgagaacggtccatactcctacgggaggcagcagtagggaattttcggcaatgggcggaagcctgaccgagcaacgccgcgtgatcgatgaagtatttcggtatgtaaagatcttttattagggaagaaaagacagattgacggtacctaatgaataagctccggctaactacgtgccagcagccgcggtaat

SEQ ID NO: 6107 - DNA, 490 bp, unidentified
  misc_feature 1..490: note = Ascusbbf_154354, encodes 16S rRNA
  source 1..490: mol_type = genomic DNA
agagtttgatcctggctcaggatgaacgctagcggcaggcctaacacatgcaagtcgaggggtatttggagcttgctccaaagagaccggcgcacgggtgcgtaacgcgtatgcaatctgccttgtactgagggatagcccggagaaatccggattaatacctcatgtgatatatagatagccttatttatatattaaagatttatcggtacaagatgagcatgcgtcccattagctagttggtatggtaacggcataccaaggcaatgatgggtaggggtcctgagagggagatcccccacactggtactgagacacggaccagactcctacgggaggcagcagtgaggaatattggtcaatggacggaagtctgaaccagccatgccgcgtgcaggacgacgcatctatggtgtgtaaactgcttttatacgggaagaaacctctctacgcgtagagacttgacggtaccgtaagaataaggatcggc

SEQ ID NO: 6108 - DNA, 490 bp, unidentified
  misc_feature 1..490: note = Ascusbbf_182999, encodes 16S rRNA
  source 1..490: mol_type = genomic DNA
agagtttgatcatggctcaggacgaacgctggcggcgtgcctaacacatgcaagtcgagcgaagcaatttggaagggagacttcggtcgaacggaaggattgactgagcggcggacgggtgagtaacgcgtgagcaacctggcctttacagggggataacagttggaaacgactgctaataccgcataagaccacgatacggcatcgtaaagaggtcaaagatttatcggtaaaggatgggctcgcgtcccattagcttgttggcggggtaacggcccaccaaggcaacgatgggtagccgacctgagagggtgatcggccacattggaactgagacacggtccaaactcctacgggaggcagcagtggggaatattgggcaatgggcgaaagcctgacccagcaacgccgcgtgaaggaagaaggtcttcggattgtaaacttttgttgtcagtgaagaggaaggacagtagctgacgaggaagccccg

SEQ ID NO: 6109 - DNA, 490 bp, unidentified
  misc_feature 1..490: note = Ascusbbf_483690, encodes 16S rRNA
  source 1..490: mol_type = genomic DNA
agagtttgatcatggctcagaacgaacgctggcggcgcgtcttaagcatgcaagtcgagcgtgattgaatagcttgctattcatgaaagcggcggactggtgagtaacgcgtgggtgacgtaccctttggatggggatagctcctagaaataggagataataccgaataagctgcatgttgtcagaggacatgcaggaaaggaacatatgttccgccgaaggagcggcccgcgagctattagctagttggtgaggtaacggcccaccaaggcgacgatagctacccggcctaagagggtgaacgggcacattgggactgagatacggcccagactcctacgggaggcagcagctaagaatattccgcaatggacgaaagtctgacggagcgacgccgcgtggacgaggaaggccggaaggttgtaaagtccttttatatgtggagaataagcaggggagtggaaagcccctgtggtgactgtagcatatg

SEQ ID NO: 6110 - DNA, 490 bp, unidentified
  misc_feature 1..490: note = Ascusbbf_143387, encodes 16S rRNA
  source 1..490: mol_type = genomic DNA
agagtttgatcctggctcaggatgaacgctggcggcgcgcctaacacatgcaagtcgaacgatgaaaatatcttcggatattggattagtggcgaacgggtgagtaacgcgtgggcaacctaccctcaactcagggatagcaaagggaaacttttggtaatacctgataacctcaaaataagacatctttttttgagcaaagatttatcggttgaggatgggcccgcgtcccatcagctagatggcggggttaaagcccaccatggcaattacgggtagccggactgagaggtcgatcggccacattgggactgagacacggcccagactcctacgggaggcagcagtggggaatattgcgcaatgggggaaaccctgacgcagcgacgccgcgtgcgggatggaggccttcgggctgtgaaccgctttcggtggggaggatacaagaccgtacccacataagaagccccggctaactacgtgccagcag

SEQ ID NO: 6111 - DNA, 490 bp, unidentified
  misc_feature 1..490: note = Ascusbbf_307259, encodes 16S rRNA
  source 1..490: mol_type = genomic DNA
agagtttgatcatggctcaggatgaacgctggcggcgtgcttaacacatgcaagtcgaacgaggcttgtcatcggaagttttcggatggaagaaggcaagaccgagtggcggacgggtgagtaacgcgtggggaacctgccccattccgggggataccagttggaaacgactgttaataccgcataagcgcacggcatcgcatgatgcagtgtgaaaaaccacggtggaatgggatggccccgcgtctgattagccagttggcagggtaacggcctaccaaagcgacgatcagtagccggcctgagagggcgaccggccacattgggactgagacacggcccaaactcctacgggaggcagcagtggggaatattgcacaatgggggaaaccctgatgcagcgacgccgcgtgagtgaagaagtatttcggtatgtaaagctctatcagcagggaagaagatgacggtacctgcacaagaagccccggct

SEQ ID NO: 6112 - DNA, 490 bp, unidentified
  misc_feature 1..490: note = Ascusbbf_439900, encodes 16S rRNA
  source 1..490: mol_type = genomic DNA
agagtttgatcatggctcaggacgaacgctggcggcgtgcctaacacatgcaagtcgaacgaagcatcttgcccgacaaagaggagagcttgctcaaatcggagtcaattaagatgacttagtggcggacgggtgagtaacgcgtgggtaacctgcctcacacagggggataacagttagaaatgactgctaataccgcataagcgcacactatcgcatgatagagtgtgaaaaactctggtggtgtgagatggacccgcgtctgattagccggttggcagggtaacggcctaccaaagcaacgatcagtagccggcctgagagggtgaacggccacattgggactgagacacggcccaaactcctacgggaggcagcagtgggggatattgcacaatgggggaaaccctgatgcagcgacgccgcgtgagtgatgaagtatctcggtatgtaaagctctatcagcagggaagaaaatgacggtacctga

SEQ ID NO: 6113 - DNA, 490 bp, unidentified
  misc_feature 1..490: note = Ascusbbf_913692, encodes 16S rRNA
  source 1..490: mol_type = genomic DNA
agagtttgatcatggctcaggatgaacgctggcggcgtgcttaacacatgcaagtcgaacgggcttaagactgaagcttgctttggtcttaagttagtggcggacgggtgagtaacgcgtgggtaacctaccctgtgcagggggatagcagctggaaacggctgataaaaccgcataacacggtagcaccgcatggtgcagccgtcaaatatttataggcacaggatgggcccgcgtctgattagctagttggcggggcaacggcccaccaaggcgacgatcagtagccggcctgagagggtgaacggccacattgggactgagacacggcccaaactcctacgggaggcagcagtggggaatattggacaatgggggaaaccctgatccagcgacgccgcgtgagtgaagaagtatttcggtatgtaaagctctatcagcagggaagatgatgacggtacctgactaagaagcaccggctaaatacgtg

SEQ ID NO: 6114 - DNA, 490 bp, unidentified
  misc_feature 1..490: note = Ascusbbf_1185816, encodes 16S rRNA
  source 1..490: mol_type = genomic DNA
agagtttgatcatggctcaggatgagcgctggcggcgtgcctaatacatgcgagtcgaacgagggtgcttgcaccctagtggcgaacgggtgagtaacacgtaggtaacctgccctttagtttgggatacccagaggaaactttggctaataccgggtaacaacagacgaggcatctcgactgtttgaaaggccctttcaagggtcgcttaaggatggacctgcggcgcattagctagttggtgagataacagcccaccaaggcgaggatgcgtatccgatctgagaggatgaccggacacattggaactgagacacggtccaaactcctacgggaggcagcagtaaggagttttcggcaatgggggaaaccctgaccgagcaacgccgcgtgagtgatgacggccctatgggttgtaaagctcttttataagggacgaatgatctgcttaggaaatgaggcggatttgacggtaccttttgaataagcc

SEQ ID NO: 6115 - DNA, 159 bp, unidentified
  misc_feature 1..159: note = Ascusbbf_149490, encodes 16S rRNA
  source 1..159: mol_type = genomic DNA
agagtttgatcctggctcagcagccgcggtaatgccagcagccgcggtaatgccagcagccgcggtaatgccagcagccgcggtaatgccagcagccgcggtaatgccagcagccgcggtaatgccagcagccgcggtaatgccagcagccgcggtaat

SEQ ID NO: 6116 - DNA, 490 bp, unidentified
  misc_feature 1..490: note = Ascusbbf_138483, encodes 16S rRNA
  source 1..490: mol_type = genomic DNA
agagtttgatcatggctcaggatgaacgctggcggcgtgcctaacacattcaagtcgaacggtgaagggacttcggtcccggatcagtggcggacgggtgagtaacgcgtgagcaacctgcctctgactgggggataacagccggaaacggctgctaataccgcataacgtgcgaccttcgcatgaaggacgcaccaaagatttatcggtcagagatgggctcgcgtctgattagatagttggtgaggtaacggcttaccaagtctgcgatcagtagccggactgagaggttgaacggccacattggaactgagatacggtccagactcctacgggaggcagcagtggggaatattgggcaatgggcgcaagcctgacccagcgacgtcgcgtgaaggaagaaggccctcgggttgtaaacttcagtcaacagggaagaataaatgacggtacctgtggaggaagccacggctaactacgtgccagcagc

SEQ ID NO: 6117 - DNA, 490 bp, unidentified
  misc_feature 1..490: note = Ascusbbf_240938, encodes 16S rRNA
  source 1..490: mol_type = genomic DNA
agagtttgatcctggctcaggacgaacgctggcggcgtgctttaaacatgcaagtcgaacggagattgattgggggcttgcccttgattgatcttagtggcggacgggtgagtaacgcgtgagcaatctgcctatcacagggggacaacagttggaaacgactgctaataccgcatgaggctacaaccaggcatctggaaggagtaaaaggagttaaatctggtgatagaggagcttgcgtctcattagctagttggtgaggtaacggcccaccaaggcgacgatgagtagccgatctgagaggatgaccggccacactggaactgagaaacggtccagactcctacgggaggcagcagttaggaatattgggcaatggagggaactctgacccagcaacgccgcgtgaaggaagaaggttttcggattgtaaacttctgatctaggggaaaaagaaagtgatggtaccctaggagaaagccacggctaa

SEQ ID NO: 6118 - DNA, 490 bp, unidentified
  misc_feature 1..490: note = Ascusbbf_235794, encodes 16S rRNA
  source 1..490: mol_type = genomic DNA
agagtttgatcctggctcaggatgaacgctggcggcgtgcttaacacatgcaagtcgaacgaatttctttcggaacgaagcttcggccaagggaagagagaagtgagtggcggacgggtgagtaacgcgtgggtaacctgcctcacattgggggataccagtcggaaacgactgctaaaaccgcataagaccacggtatcgcatgatactgaggccaaaactccggtgatgtgagatggacccgcgtctgattagccagttggcggggtaacggcccaccaaagcgacgatcagtagccgacctgagagggtgatcggccacattgggactgagacacggcccaaactcctacgggaggcagcagtggggaatattgcacaatgggggaaaccctgatgcagcgacgccgcgtgagtgatgaagtatttcggtacgtaaagctctatcagcaggaacgatcatgacggtacctgactaagaagcaccggc

SEQ ID NO: 6119 - DNA, 490 bp, unidentified
  misc_feature 1..490: note = Ascusbbf_433933, encodes 16S rRNA
  source 1..490: mol_type = genomic DNA
agagtttgatcctggctcaggatgaacgctggcggcgtgcctaacacatgcaagtcgagcgagaagtgagtcagctgatgcttcggttgacgcagactcatggacagcggcggacgggtgagtaacgcgtgggcaacctgcccctttccggaggatagccaagggaaactttgaataatactccatgatgcgttcggatcacatggtctgaatgccaaagatttatcggagagggatgggcccgcgtctgattagccagttggtgaggtagcggctcaccaaagcgacgatcggtagccggcctgagagggtgaacggccacattggaactgagacacggtccagactcctacgggaggcagcagtggggagtattgcacaatgggcggaagcctgatgcagcaacgccgcgtgaaggaagaaggttttcggatcgtaaacttctgtccctggggaagaaacaaatgacggtacccaaggaggaagcccc

SEQ ID NO: 6120 - DNA, 490 bp, unidentified
  misc_feature 1..490: note = Ascusbbf_246657, encodes 16S rRNA
  source 1..490: mol_type = genomic DNA
agagtttgatcatggctcaggataaacgctggcggcatgcctaatacatgcaagtcaaacgggaagtagcaatacttctagtggcgaacgggtgagtaacacgtgggcaacctgccttgaagacgaggataacagttggaaacgactgataatactggatagtatacattaccgcatggttttgtatttaaagatgcgtttgcatcacttcaagaggggcctgcggagcattagctagttggtgaggtaacggcccaccaaggcgacgatgcttagctgcgctgagaggcgaaacagccacattgggactgagagacggcccaaactcctacgggaggcagcagtagggaattttcggcaatgggggaaaccctgaccgagcaatgccgcgtgaatgatgacggtcttcggactgtaaagttctgttgtgagggaagaactatacgattaggaaatgagtcgtatttgacggtacctcactagaaagccc

SEQ ID NO: 6121 - DNA, 490 bp, unidentified
  misc_feature 1..490: note = Ascusbbf_726938, encodes 16S rRNA
  source 1..490: mol_type = genomic DNA
agagtttgatcatggctcagaacgaacgctggtagcgtggattaggcatgcaagtcgaacgggatccatgaagtagcaatacggattggtgagagtggcggaagggcgaggaacacgtgggcaacctgtctttgaggtggggaaaacctcgggaaactgaggctaataccgaatgtggcgcggaagggcatccttcctgcgctaaagggggcgaaagctccccctcttcgaggggctcgcgcaccatcagctagttggcggggtaacggcccaccaaggctcacggttagctggtctgagaggatggccagccgcactgggactgagatactgcccagactcctacgggaggctgcagtcgaggatcattcgcaatgggcgaaagcctgacgatgcgacgctgcgtggaggatgaaggccttcgggttgtaaactcctgtcatgagggaaaaggagaccctgcccaatacgcaggggatttgatggtacc

SEQ ID NO: 6122 - DNA, 490 bp, unidentified
  misc_feature 1..490: note = Ascusbbf_1080819, encodes 16S rRNA
  source 1..490: mol_type = genomic DNA
agagtttgatcctggctcaggatgaacgctggcggcgtgcttaacacatgcaagtcgaacggaacttagtcaatcgaagcagagggtgcttgcacccaaagcttcgcccgattaagtttagtggcggacgggtgagtaacgcgtgagcaaccaaccttttgcagtgggacaacaattagaaatgattgctaataccgcataagaccacactaccgcatggtagagtgagaaaagctccggcggcagaagacgggctcgcgttcgattagctggatggtggggtaacggcctaccatggcgacgatcgatagccggactgagaggtcgaccggccacattgggactgagacacggcccagactcctacgggaggcagcagtggggaatattgcacaatgggggaaaccctgatgcagcgacgccgcgtgggtgatgaagtatttcggtatgtaaagcccttttagcagggaagaaaatgacggtacctgca

SEQ ID NO: 6123 - DNA, 490 bp, unidentified
  misc_feature 1..490: note = Ascusbbf_238853, encodes 16S rRNA
  source 1..490: mol_type = genomic DNA
agagtttgatcatggctcaggatgaacgctggcggcgtgcctaacacatgcaagtcgaacgattaacccgccttcgggcggtcatagagtggcgaacgggtgagtaacacgtgaccaacctgccccccgcaccgggacaaccgctggaaacggcggctaataccgggtactccgggaaccgcgcatgcggcgcccgggagagcccaggcggcgggggatggggtcgcggcccatcaggtagtaggcggggtgacggcccacctagcccgcgacgggtagccgggttgagagaccgaccggccacattgggactgagatacggcccagactcctacgggaggcagcagtggggaattttgcgcaatgggggcaaccctgacgcagcaacgccgcgtgcgggatgacggccttcgggttgtaaaccgctttcagcagggaagacatcgacggtacctgcagaagaagccccggctaaatacgtgccagcagc

SEQ ID NO: 6124 - DNA, 490 bp, unidentified
  misc_feature 1..490: note = Ascusbbf_395341, encodes 16S rRNA
  source 1..490: mol_type = genomic DNA
agagtttgatcctggctcaggatgaacgctggcggcgtgcataacacattcaagtcgaacggactcaggggcttcggccccgaaagtcagtggcggacgggtgagtaacgcgtgagcaacctgcctccggaagagggataacagttggaaacgactgctaataccgcataacactgcgagtacgcatgtacatgcagtcaaaggagcaatccgaccggagatgggctcgcgtccgattagatagttggtgaggtaacggcccaccaagtctgcgatcggtagccggactgagaggttgaacggccacattggaactgagatacggtccagactcctacgggaggcagcagtggggaatattgggcaatgggcgaaagcctgacccagcgacgccgcgtgaaggaagaagatcttcggattgtaaactttagttatcagggaagaaaacaatgacggtacctgaagagaaagccacggctaactacgtgcc

SEQ ID NO: 6125 - DNA, 490 bp, unidentified
  misc_feature 1..490: note = Ascusbbf_382560, encodes 16S rRNA
  source 1..490: mol_type = genomic DNA
agagtttgatcatggctcaggattaacgctggcggcgtgcctaatacatgcaagtcgtacgggtgattctagcttgctagatgatccagtggcgaacgggtgagtaatacataaacaacctacctataaggactgggataacgcttggaaacgagtgctaataccggataggtaacgggagggcatcctcctgttattaaaggattactacacaaatagatgggtttatggtgcattagcttgttggtgaggtaacggctcaccaaggcgatgatgcatagccggcctgagagggtgaacggccacattgggactgagacacggcccagactcctacgggaggcagcagtagggaattttcggcaatgggcgcaagcctgaccgagcaacgccgcgtgagtgatgacggccttcgggttgtaaagctctgttgtaagggaagaataacggggagtgaatctccgcatgacggtaccttaccagaaagcca

SEQ ID NO: 6126 - DNA, 490 bp, unidentified
  misc_feature 1..490: note = Ascusbbf_1594729, encodes 16S rRNA
  source 1..490: mol_type = genomic DNA
agagtttgatcatggctcaggacgaacgctggcggcgtgcttaaaacatgcaagtcgaacggacgagaggttgtacttgtacgacttcaagttagtggcggacgggtgagtaacgcgtgagcaatctacctatcacagggggataacaactggaaacgggtgctaataccgcatatgaccacaacctaggcatcaggaaggggtgaaaggagcaatccggtgatagatgagcttgcgtctcattagctagttggcgagggtaacggcccaccaaggcgacgatgagtagccgatctgagaggatgaacggccacattggaactgagagacggtccaaactcctacgggaggcagcagttaggaatattgggcaatggaggaaactctgacccagcaacgccgcgtgaaggaagaaggttttcggattgtaaacttctgatctgtggaaaaaagatagtgatggtaccacaggagcaagccacggctaact

SEQ ID NO: 6127 - DNA, 490 bp, unidentified
  misc_feature 1..490: note = Ascusbbf_451085, encodes 16S rRNA
  source 1..490: mol_type = genomic DNA
agagtttgatcatggctcaggacgaacgctggcggcgtgcctaacacatgcaagtcgaacggagtattgcgctgaaattgagagtagcttgctacaggatatttcttgtaatacttagtggcggacgggtgagtaacgcgtgaggaacctgcccttcagagggggacaacagttggaaacgactgctaataccgcataacgtaccgagaggacatcctcttgataccaaaggagcaatccgctgaaggatggcctcgcgtccgattagatagttggcggggtaacggcccaccaagtcgacgatcggtagccggactgagaggttgaacggccacattgggactgagacacggcccagactcctacgggaggcagcagtgggggatattgcacaatggaggaaactctgatgcagcaacgccgcgtgagggaagaaggttttcggattgtaaacctctgttttcagtgaagaaagaaatgacggtagctg

SEQ ID NO: 6128 - DNA, 490 bp, unidentified
  misc_feature 1..490: note = Ascusbbf_1778213, encodes 16S rRNA
  source 1..490: mol_type = genomic DNA
agagtttgatcctggctcaggatgaacgctggcggcgtgcataacacatgcgagtcgaacggagtgctgatgaaacctagtgatttagcacttagtggcggacgggtgagtaacgcgtgggtaacctacctggtattgggggacaacagttagaaatgactgctaataccgcataagtcattttgagggcatcctcgaaatgggaaaggagcaatccgatagcagatggacccgcgtctgattagctagttggtgaggtaacggcctaccaaggcgacgatcagtagccgaactgagaggttgaccggccacattgggactgagacacggcccaaactcctacgggaggcagcagtggggaatattgcacaatgggggaaaccctgatgcagcaacgccgcgtgagtgaagaagtatttcggtatgtaaagctctatcgatggggaagaaaatgacggtacccaagtaagaagccccggctaactacgtg

SEQ ID NO: 6129 - DNA, 490 bp, unidentified
  misc_feature 1..490: note = Ascusbbf_735010, encodes 16S rRNA
  source 1..490: mol_type = genomic DNA
agagtttgatcatggctcaggatgaacgctggcggcgtgcctaacacatgcaagtcgaacgaggctctgatccccgatgattcgtctgaagggaaaggatgtccgagtggcggatgggtgagtaacgcgtggagaacctgccccctgctgggggataacaactggaaacggttgacaataccgcataagcgcttcttatcgcatgatttgaagcggaaagatttatcggcaggggatggctccgcgtcggattagccagttggcggggtaacggcccaccaaagcgatgatccgtagccggcctgagagggcgaccggccacattgggactgagacacggcccagactcctacgggaggcagcagtgggggatattgcacaatggggggaaccctgatgcagcgacgccgcgtggaggaagaagtatttcggtatgtaaactcctatcagcagggaagaaactgacagtacctgactaagaagccccggc

SEQ ID NO: 6130 - DNA, 490 bp, unidentified
  misc_feature 1..490: note = Ascusbbf_1834541, encodes 16S rRNA
  source 1..490: mol_type = genomic DNA
agagtttgatcatggctcagaacgaacgctggcggcgcgttttaagcatgcaagtcgagcggcagtagcaatacgagagcggcggacgggtgagtaacacgtgggtaatctgccccctggtcggggatagcctgtggaaacacaggataataccggatgcgacggcagccgcggaggcggcagccgggaaaggggccaaggccccgccgggggatgagcccgcgtcccattagcttgatggtgaggtaaaggcccaccatggcgatgatgggtagccggcctgagagggtgaacggccacattggaactgagacacggtccagactcctacgggaggcagcagctaagaatcttccacaatggacgaaagtctgatggagcgacgccgcgtgagcgatgaaggccgtgaggttgtaaagctcttttccggagggggaataagcggggcagggaatggccccgcgatgacgtgaatccgggaataagcccc

SEQ ID NO: 6131 - DNA, 490 bp, unidentified
  misc_feature 1..490: note = Ascusbbf_30248, encodes 16S rRNA
  source 1..490: mol_type = genomic DNA
agagtttgatcctggctcaggatgaacgctagcggcaggcttaacacatgcaagtcgaggggcagcgcgtgtagcaatacatggcggcgaccggcgaaagggtgagtaacgcgtgagcaacgtgcccgtatgtgggggatagtcgatggaaacgtcgcgtaataccccgtaacacaaattcccgcatgaggatttgttgaaagatttattgcatacggatcggctcgcgtgccattaggtagacggcggggtaacggcccaccgtgccgacgatggctaggggttctgagaggaaggtcccccacattggaactgagacacggtccagactcctacgggaggcagcagtgaggaatattggacaatggccggaaggctgatccagccatgccgcgtgcgggaagacggccctatgggttgtaaaccgcttttgcgagggagcaataagtgcaacgtgttgcgcgatgagagtacctcgcgaataagcatc

SEQ ID NO: 6132 - DNA, 490 bp, unidentified
  misc_feature 1..490: note = Ascusbbf_30209, encodes 16S rRNA
  source 1..490: mol_type = genomic DNA
agagtttgatcatggctcaggatgaacgctggcggcgtgcctaatacatgcaagtcgaacgaggtggaagggagcttgctccttgataccgagtggcgaacgggtgagtaacacgtaggtaacctgcccttcagtttgggatacccagaggaaactttggctaataccggataacaacaaccgaggcatctcggatgcttgaaaggggcttcacagcctcgctgatagatggacctgcggcgcattagctagttggtgagataacagcccaccaaggcgaggatgcgtagccgaactgagaggttgatcggccacattggaactgagacacggtccagactcctacgggaggcagcagtaaggagttttcggcaatgggggaaaccctgaccgagcaacgccgcgtgagtgatgacggccctatgggttgtaaagctctgttatagaggacgaatgaggatcataggaaatgatggtcctttgacggtac

SEQ ID NO: 6133 - DNA, 361 bp, unidentified
  misc_feature 1..361: note = Ascusbbf_1167937, encodes 16S rRNA
  source 1..361: mol_type = genomic DNA
agagtttgatcatggctcagaacgaacgctggcggcgcgtcttaagcatgcaagtcgggcgggattggggggcttgccccccatgagagcggcggactggcgaggaacgcgtgggcgacgcgccctccggagggggacagcccgtggaaacacggggtaataccccatgacatgggaggcttggaggccttccatcaaaggagcttcggctccgccgggggagcggcccgcgacccatcagcttgttggcggtgcaagggaccaccaaggctgcgacgggtatccggcctgagagggcgaacggacgcattgggactgagatacggcccagactcctacgggagccagcagccgcggtaat

SEQ ID NO: 6134 - DNA, 490 bp, unidentified
  misc_feature 1..490: note = Ascusbbf_129073, encodes 16S rRNA
  source 1..490: mol_type = genomic DNA
agagtttgatcatggctcagaacgaacgctggtagcgtggattaggcatgcaagtcgaacgggatccgggagatagcaatatttcccggtgagagtggcggaagggcgaggaacacgtgaacaacctgtccatcaggtggggaaaaccgttggaaacgacggctaataccgaatgtggcgtcatggcacatgccgtgaacgctaaagggggcccgcaagggctctccctgaccgaagggttcgcgcaccatcagcttgttggcggggtaacggcccaccaaggcttacggttagctggtctgagaggatgaccagccgcactgggactgagatactgcccagactcctacgggaggctgcagtcgaggatcatttgcaatgggcgaaagcctgacaatgcgacgctgcgtggaggatgaaggccttcgggttgtaaactcctgtcataagggaaaaggagatgatacccaatacgtatcaaatttgatgg

SEQ ID NO: 6135 - DNA, 490 bp, unidentified
  misc_feature 1..490: note = Ascusbbf_5789, encodes 16S rRNA
  source 1..490: mol_type = genomic DNA
agagtttgatcatggctcaggatgaacgctggcggcgcgcttaacacatgcaagtcgaacggaatgattggcttcggtcatgaattcagtggcggacgggtgagtaacacgtggataacttgccttttagtgggggatagctgagagaaatctcaattaataccgcataaagtaatttattcgcatgaatagattaataaagatgaaaatcgctaaaagataggtctgcgtctgattagctagttggggtggtaatggcacaccaaggcgacgatcagtaaccggtttgagagaatgaacggtcacattgggactgagatacggcccagactcctacgggaggcagcagtggggaatattgcgcaatggaggaaactctgacgcagcgacgccgtgtgaaggatgaaggccttcgggttgtaaacttttatcgattgtgaaaagaatggatggtagcaaagtaagaagctccggctaattacgtgccagc

SEQ ID NO: 6136 - DNA, 490 bp, unidentified
  misc_feature 1..490: note = Ascusbbf_13198, encodes 16S rRNA
  source 1..490: mol_type = genomic DNA
agagtttgatcctggctcaggatgaacgctggcggcgtgcttaacacatgcaagtcgaacggaaacgtattgaaacctagtgatatacgttttagtggcggacgggtgagtaacgcgtgggtaacctgccgtattctgggggacaacagttggaaacgactgctaataccgcataagaccacagagtcgcatgactcaggggtaaaaactccggtggaatacgatggacccgcgtctgattagctagttggtgaggtaacggcccaccaaggcgacgatcagtagccggcctgagagggtgaacggccacattgggactgagacacggcccaaactcctacgggaggcagcagtggggaatattgcacaatgggcgaaagcctgatgcagcgacgccgcgtgagtgaagaagtatttcggtatgtaaagctctatcagcagggaagaaaatgacggtacctgactaagaagccccggctaactacgtgcc

SEQ ID NO: 6137 - DNA, 487 bp, unidentified
  misc_feature 1..487: note = Ascusbbf_377870, encodes 16S rRNA
  source 1..487: mol_type = genomic DNA
agagtttgatcatggctcagaacgaacgctggcggcaggcttaacacatgcaagttaaacgggatttgatggtagcttgctatcattgatgagagtagcgcactggtgagtaacacgtgggaacgtacattttagtgggggacaacatctggaaacggatgctaataccgcataagccctgagggggaaagatttatcgctaagatatcggcccgcggctaattaggtagttggtggggtaaaggcctaccaagcctacgatctatagctggtctgagaggacgatcagccacattggaactgagacacggtccagactcctacgggaggcagcagtgaggaatattgggcaatggaggcaactctgacccagccatgccgcgtgagtgagaaggttttcgaattgtaaagctctttcgggtgtgaagatgatgacggtaacaccagaagaagccccggcaaactacgtgccagcagccgcggtaat

SEQ ID NO: 6138 - DNA, 490 bp, unidentified
  misc_feature 1..490: note = Ascusbbf_106481, encodes 16S rRNA
  source 1..490: mol_type = genomic DNA
agagtttgatcatggctcagattgaacgctggcggcaggcttaacacatgcaagtcgaacgatgaaatctagcttgctagatggattagtggcgaacgggtgagtaatgcttaggaatctgcctattagtgggggataaccatccgaaaggatggctaataccgcatacgtcttacgagagaaagggggcttttagctctcgctaatagatgagcctaagtcggattagctagttggtggggtaaaggcctaccaaggcgacgatctgtagctggtctgagaggatgatcagccacactgggactgagacacggcccagactcctacgggaggcagcagtggggaatattggacaatgggcgaaagcctgatccagccatgccgcgtgtgtgaagaaggccttttggttgtaaagcactttaagtggggaggaaaagcttgtggttaatacccattagccctgacgttacccacagaataagcaccggct

SEQ ID NO: 6139 - DNA, 490 bp, unidentified
  misc_feature 1..490: note = Ascusbbf_287681, encodes 16S rRNA
  source 1..490: mol_type = genomic DNA
agagtttgatcctggctcaggatgaacgctagctacaggcttaacacatgcaagtcgaggggcagcatgggatcagcttgctgatcccgatggcgaccggcgcacgggtgagtaacgcgtatccaaccttccccctactcagggatagcccggtgaaaaccggattaacacctgatagtttcactagatggcatctgacggtgaataaagctttgcggtagaggatggggatgcgtctgattagcttgttggtggggtaacggcccaccaaggctacgatcagtaggggttctgagaggaaggtcccccacattggaactgagacacggtccaaactcctacgggaggcagcagtgaggaatattggtcaatgggcgagagcctgaaccagccaagtagcgtgcaggaagacggccctatgggttgtaaactgcttttgtacgggaataaagtcattcacgtgtggatgtttgcatgtaccgtaagaata

SEQ ID NO: 6140 - DNA, 490 bp, unidentified
  misc_feature 1..490: note = Ascusbbf_288707, encodes 16S rRNA
  source 1..490: mol_type = genomic DNA
agagtttgatcatggctcaggatgaacgctggcggcgtgcctaatacatgcaagtcgaacgggaatcttcggattccagtggcgaacgggtgaggaatacataggtaacctgcccctccgagggggacaacagacggaaacatctgctaagaccgcatagccacagggaaggcatcttccctgtgccaaatgtcctttcggggacagcggggggatggacctatgccgcattagctggttggcggggcaacggcccaccaaggcgacgatgcgtagccggcctgagagggcggacggccacactgggactgagacacggcccagactcctacgggaggcagcagtagggaattttcggcaatgggggaaaccctgaccgagcaacgccgcgtgaacgatgaaggccttcgggtcgtaaagttctgttgcgaaggaagaacgccggtgtcaggaaatgggcgccgggtgacggtacttcgcatagaaagcc

SEQ ID NO: 6141 - DNA, 490 bp, unidentified
  misc_feature 1..490: note = Ascusbbf_276, encodes 16S rRNA
  source 1..490: mol_type = genomic DNA
agagtttgatcatggctcaggacgaacgctggcggcgtgcctaacacatgcaagtcgaacggagtgaaagtagcttgctactggaacttagtggcggacgggtgagtaacacgtgagtaacctgcctttcagaggggaataatgtctggaaacggacactaataccgcataacatattttgatcgcatgatcgggatatcaaaggagcaatccgctgaaagatggactcgcgtctgattagccagttggcggggtaacggcccaccaaagcgacgatcagtagccggactgagaggttgaacggccacattgggactgagacacggcccagactcctacgggaggcagcagtgggggatattgcacaatgggcgcaagcctgatgcagcaacgccgcgtgcaggaagacggtcttcggattgtaaactgttgtcctctgtgacgataatgacggtagcagaggaggaagccacggctaactacgtgccag

SEQ ID NO: 6142 - DNA, 490 bp, unidentified
  misc_feature 1..490: note = Ascusbbf_23054, encodes 16S rRNA
  source 1..490: mol_type = genomic DNA
agagtttgatcatggctcagattgaacgctggcggcatgctttacacatgcaagtcgaacggtaacagcacttcggtggctgacgagtggcgaacgggtgagtaatacatcggaacgtgcctagtagtgggggataactactcgaaagagtagctaataccgcatgagatctaaggatgaaagcaggggaccttcgggccttgcgctactagagcggctgatggcagattaggtagttggtgggataaaagcttaccaagccgacgatctgtagctggtctgagaggacgaccagccacactgggactgagacacggcccagactcctacgggaggcagcagtggggaattttggacaatgggcgcaagcctgatccagcaatgccgcgtgcaggatgaaggccttcgggttgtaaactgcttttgtacggaacgaaaagccctcttctaatacaggagggtcatgacggtaccgtaagaataagcaccg

SEQ ID NO: 6143 - DNA, 490 bp, unidentified
  misc_feature 1..490: note = Ascusbbf_58340, encodes 16S rRNA
  source 1..490: mol_type = genomic DNA
agagtttgatcatggctcaggatgaacgctggcggcgtgcttaacacatgcaagtcgaacggagatatatatttgaagttttcggatggaagatatatatcttagtggcggacgggtgagtaacgcgtaaacaatctgccttagagagggggataacagatagaaatatctgctaataccgcataagaccacggttggcatcaaccaggggtaaaaggagcaatccgctttaagatgagtttgcgtactattagctagttggtgaggtaacggcccaccaaggcgacgatggttagccggcctgagagggtgaacggccacattggaactgagatacggtccagactcctacgggaggcagcagtgaggaatattgggcaatgggcgaaagcctgacccagcaacgccgcgtgaaggaagaaggttttaggattgtaaacttctgttgttagggaaaaagaaagtgatggtacctaacgaggaagctacg

SEQ ID NO: 6144 - DNA, 490 bp, unidentified
  misc_feature 1..490: note = Ascusbbf_53044, encodes 16S rRNA
  source 1..490: mol_type = genomic DNA
agagtttgatcatggctcaggatgaacgctagctacaggcttaacacatgcaagtcgaggggcagcgcggagtcagcttgctgactttggcggcgaccggcgaatgggtgagtaacgcgtatccaacctggcctatgctcatggatagcccttagaaatgaggattaatacatgatggtctcccttgatcgcctgagattgggagtaaaggcttgccggcataggatggggatgcgttccattagatcgttggcggggtaacggcccaccaagtctatgatggataggggttctgagaggaaggtcccccacattggtactgagacacggaccaaactcctacgggaggcagcagtgaggaatattggtcaatgggcggaagcctgaaccagccaagtagcgtgaaggatgacggccctacgggttgtaaacttctttttccggggaataaccgccgctacgtgtagcggtctgcatgtacccggtgaat

SEQ ID NO: 6145 - DNA, 490 bp, unidentified
  misc_feature 1..490: note = Ascusbbf_3064, encodes 16S rRNA
  source 1..490: mol_type = genomic DNA
agagtttgatcatggctcaggatgaacgctggcggcgtgcttaacacatgcaagtcgaacggagcttaagaaggaagcttgctttcattttaagcttagtggcggacgggtgagtaacgcgtgagcaacctgcccttcagtggggaataacaccgagaaatcggtgctaataccgcataatgtcggaggaccgcatgatcttccgaccaaaggatttattcgctgaaggatgggctcgcgtccgattaggcagttggcggggtaacggcccaccaaaccaacgatcggtagccgaactgagaggttgatcggccacattgggactgagacacggcccagactcctacgggaggcagcagtggggaatattgggcaatgggcgaaagcctgacccagcaacgccgcgtgaaggatgaaggtcttcggattgtaaacttctttgattggggaagaataaatgacctacccaaagaacaagtcacggctaact

SEQ ID NO: 6146 - DNA, 490 bp, unidentified
  misc_feature 1..490: note = Ascusbbf_11881, encodes 16S rRNA
  source 1..490: mol_type = genomic DNA
agagtttgatcatggctcaggatgaacgctggcggcgtgcctaacacattcaagtcgaacgaactgtagaaatacagtgagtggcggacgggtgagtaacgcgtaagcaatctgcctttgtgtgtggaataacaaccggaaacagttgctaataccgcataacgcataggagtcgcatggctcttatgccaaagatttatcgcacgaagatgagcttgcgtccgattagatagttggcggggtaacggcccaccaagtctacgatcggtagccggactgagaggttgaacggccacattggaactgagatacggtccagactcctacgggaggcagcagtggggaatattgggcaatggacgaaagtctgacccagcgacgccgcgtgagggaagaaggtcttcggattgtaaaccttagtcaacagggacgaagcaagtgacggtacctgtggaggaagccacggctaactacgtgccagcagccgcgg

SEQ ID NO: 6147 - DNA, 490 bp, unidentified
  misc_feature 1..490: note = Ascusbbf_42308, encodes 16S rRNA
  source 1..490: mol_type = genomic DNA
agagtttgatcctggctcaggatgaacgctggcggcgtgcctaacacatgcaagtcgaacggacgctttgaggagagtcttcggatgattcttaaagttgttagtggcggacgggtgagtaacgcgtggggaacctgcctttgtccgggggatagcagctggaaacggctggtaataccgcataagaccacgaagccgcatggctttgcggtaaaagatttatcggacagagatggacccgcgtctgattagccagttggcagggtaacggcctaccaaagcaacgatcagtagccggcctgagagggcggacggccacattgggactgagacacggcccagactcctacgggaggcagcagtgggggatattgcacaatggaggaaactctgatgcagcgacgccgcgtgagtgatgaagtatttcggtatgtaaagctctatcagcagggaagaaaggccccgaaaggggagatgacggtacctgagt

SEQ ID NO: 6148 - DNA, 490 bp, unidentified
  misc_feature 1..490: note = Ascusbbf_1372607, encodes 16S rRNA
  source 1..490: mol_type = genomic DNA
agagtttgatcctggctcaggatgaacgctagctacaggcttaacacatgcaagtcgcggggcagcgcggagtgtagcaatacattctggcggcgaccggcggatgggtgagtaacgcgtatccaacctggccctatctcgggtacagcccctcgaaagagggattaatccccgatgttccctgggatccgcatgttttccagggcaaaggcatttgtcggatagggatggggatgcgttccattaggcagtcggcggggtaacggcccaccgagcctacgatggagaggggttctgagaggaagccccccacactggggaatgggagacggcccagactcttacgggaggcagcagtgaggaatattggtcaatggcggtaacgctgaaccagccaagtagcgtgagggattacggccctatgggttttaaacctcttttgttagggagcaaccggtggcacttgtgccattctgcgagtacctttcga

SEQ ID NO: 6149 - DNA, 490 bp, unidentified
  misc_feature 1..490: note = Ascusbbf_243548, encodes 16S rRNA
  source 1..490: mol_type = genomic DNA
agagtttgatcctggctcaggataaacgctggcggcgcacataagacatgcaagtcgaacggaagccgttttaaattaattgattggatatgagaacttgttcaatttgaagagattttaatttaaaacatatgactttagtggcggactggtgagtaacgcgtaagcaatctgcctatcagaggggaataacagcgagaaatcgttgctaataccgcatatgcttaagtatcgcatgatacaataaggaaaggagtaatccgctgatagatgggcttgcgtctgattagatagttggtggggtaatggcctaccaagtcgatgatcagtagccggactgagaggttgaacggccacattgggactgagatacggcccagactcctacgggaggcagcagtcgggaatattgcgcaatggaggaaactctgacgcagtgacgccgcgtgcaggaagaaggttttcggattgtaaactgctttagacaggg

SEQ ID NO: 6150 - DNA, 490 bp, unidentified
  misc_feature 1..490: note = Ascusbbf_99944, encodes 16S rRNA
  source 1..490: mol_type = genomic DNA
agagtttgatcctggctcaggatgaacgctagcggcaggcctaacacatgcaagtcgaggggcagcgggattgaagcttgcttcagttgccggcgaccggcgcacgggtgcgtaacgcgtatgcaacctacccataacagggggataacactgagaaatcggtactaatatcccataacatcaagaggggcatcccttttggttgaaaactccggtggttatggatgggcatgcgttgtattagctagttggtgaggtaacggctcaccaaggcgacgatacatagggggactgagaggttaaccccccacattggtactgagacacggaccaaactcctacgggaggcagcagtgaggaatattggtcaatggacgcaagtctgaaccagccatgccgcgtgcaggatgacggctctatgagttgtaaactgcttttgtacgagggtaaacccggatacgtgtatccggctgaaagtatcgtacgaata

SEQ ID NO: 6151 - DNA, 490 bp, unidentified
  misc_feature 1..490: note = Ascusbbf_977, encodes 16S rRNA
  source 1..490: mol_type = genomic DNA
agagtttgatcatggctcaggacgaacgctggcggcgtgcttaacacatgcaagtcgaacggagtggaacgctgaattgatgtcagcttgctgatggattttcttgtttcacttagtggcggacgggtgagtaacgcgtgagtaacctgcctctgagtggggaataacgccctgaaaagagcgctaataccgcataatatacaggagccgcatgactcttgtatcaaagatttatcgctgagagatggactcgcgtccgattagcttgttggtggggtaacggcccaccaaggcgacgatcggtagccggactgagaggttgaacggccacattgggactgagacacggcccagactcctacgggaggcagcagtgggggatattgcgcaatgggggaaaccctgacgcagcaacgccgcgtggaggatgacggttttcggattgtaaactccttttataagggacgaattaagacggtaccttatgaat

SEQ ID NO: 6152 - DNA, 490 bp, unidentified
  misc_feature 1..490: note = Ascusbbf_672, encodes 16S rRNA
  source 1..490: mol_type = genomic DNA
agagtttgatcctggctcaggacgaacgctggcggcgtgcttcatacatgcaagtcgaacgagaaattagagcttgctctaatggaaagtggcggacgggtgagtaatatgtaggaaatctgccctagagagggggacaacagagggaaacttctgctaataccccatatgagcgtacttgagatagtattcttgaaaactccggtgctctgggatgagcctgcatctgattagctagttggtggtgtaatggactaccaaggcgacgatcagtagctggtttgagaggatgatcagccacaatgggactgagacacggcccatactcctacgggaggcagcagtagggaattttgcgcaatgggcgaaagcctgacgcagcaacgccgcgtgaatgttaaacccttcggggtgtaaagttctgtcagtggggacgaacaaatgacggtacccacagaggaagcaccggctaactccgtgccagcagccg

SEQ ID NO: 6153 - DNA, 490 bp, unidentified
  misc_feature 1..490: note = Ascusbbf_29817, encodes 16S rRNA
  source 1..490: mol_type = genomic DNA
agagtttgatcatggctcaggacgaacgctggcggcgtgcttaacacatgcaagtcgaacggaactactatggaaaatcttcggatcggaagttttagtttagtggcgaacgggtgagtaacgcgtgaggaacctgcctttcagagggggacaacagttggaaacgactgctaataccgcataacatgtttttttcgcatgaagggaacatcaaagattatatcgctgaaagatggcctcgcgtctgattagatagttggtggggtaacggcccaccaagtcgacgatcagtagccggactgagaggttgaacggccacattgggactgagatacggcccagactcctacgggaggcagcagtggggaatattgggcaatgggcgcaagcctgacccagcaacgccgcgtgaaggaagaaggctttcgggttgtaaacttcttttaccagggacgaaggatgtgacggtacctggagaaaaagccacggc

SEQ ID NO: 6154 - DNA, 490 bp, unidentified
  misc_feature 1..490: note = Ascusbbf_76811, encodes 16S rRNA
  source 1..490: mol_type = genomic DNA
agagtttgatcctggctcaggatgaacgctggcggcgtgcttaacacatgcaagtcgagcgagaaatcgggaaatgaagcttcggtagatttgaacgatggaaagcggcggacgggtgagtaacacgtgggaaacctgccttttgcagagggacagccgagggaaacttcgattaatacctcataacgcatcatcgtcgcatggcggagatgccaaagatttatcggcaagagatggtcccgcgtctgattagctggttggtgaggtagcggctcaccaaggcgacgatcagtagccggcctgagagggtgaacggtcacattggaactgagacacggtccagactcctacgggaggcagcagtggggaatattgcacaatgggcgcaagcctgatgcagcaacgccgcgtgaaggatgaaggccttcgggtcgtaaacttctgtccaaagggaagaacaaatgacggtacctttggaggaagccccggc

SEQ ID NO: 6155 - DNA, 490 bp, unidentified
  misc_feature 1..490: note = Ascusbbf_9769, encodes 16S rRNA
  source 1..490: mol_type = genomic DNA
agagtttgatcatggctcaggacgaacgctggcggcacgcctaacacatgcaagtcgaacggacgatgaggagcttgctcctcaaagttagtggcggacgggtgagtaacacgtgagcaacctgcctttgagagggggatagcttctggaaacggatggtaataccccataacatatgtttgccgcatgacagacatatcaaaagaatttcgctcgaagatgggctcgcgtctgattagatagttggtgaggtaacggctcaccaagtcaacgatcagtagccggactgagaggttgaacggccacattgggactgagacacggcccagactcctacgggaggcagcagtggggaatattgcacaatgggggaaaccctgatgcagcgatgccgcgtggaggaagaaggttttcggattgtaaactccttttatgagggacgataatgacggtacctcaagaaaaagctccggctaactacgtgccagca

SEQ ID NO: 6156 - DNA, 490 bp, unidentified
  misc_feature 1..490: note = Ascusbbf_134690, encodes 16S rRNA
  source 1..490: mol_type = genomic DNA
agagtttgatcctggctcaggacgaacgctggcggcgtgcttaacacatgcaagtcgaacgagggtatttagggagcttgctccttggatagccgagtggcgaacgggtgagtaacgcgtgagcaacctgtctcacacagggggataacgcaccgaaaggtgtgctaataccgcataagaccacagggggacatcctccaggggtcaaaggaggaatccggtgtgaggtgggctcgcgtctgattagatagttggtgaggtaacggctcaccaagtcaacgatcagtagccgacctgagagggtgatcggccacattgggactgagacacggcccagactcctacgggaggcagcagtggggaatattgggcaatgggcgcaagcctgacccagcaacgccgcgtgagggaagaaggttttcggattgtaaacctctgtcctgtatgaagagaagaagacggtagtacaggaggaagccccggctaacta

SEQ ID NO: 6157 - DNA, 490 bp, unidentified
  misc_feature 1..490: note = Ascusbbf_1098, encodes 16S rRNA
  source 1..490: mol_type = genomic DNA
agagtttgatcatggctcaggatgaacgctagcggcaggcttaacacatgcaagtcgaggggcagcgtggagtagcaatactctgacggcgaccggcgaaagggtgagtaacgcgtgagcaacatgcccggtagtggagaatagtcgatggaaacgtcgcgtaatactccgtaacacaggtgaccgcatgattatctgttaatagatttatcgctaccggattggctcgcgtaccattagctagttggcggggtaacggcccaccaaggcgacgatggttaggggttctgagaggaaggtcccccacattggaactgagacacggtccagactcctacgggaggcagcagtgaggaatattggacaatggccgagaggctgatccagccatgccgcgtgcgggaagacggccctatgggttgtaaaccgcttttgttggggagcaataaggtccacgtgtggatcgatgagagtacccagcgaataagca

SEQ ID NO: 6158 - DNA, 490 bp, unidentified
  misc_feature 1..490: note = Ascusbbf_69128, encodes 16S rRNA
  source 1..490: mol_type = genomic DNA
agagtttgatcatggctcaggatgaacgctggcggcgtgcttaacacatgcaagtcgaacggagatgtatttaggaagttttcggatggaatgaatgcatcttagtggcggacgggtgagtaacgcgtaaacaatctgccttagagagggggacaacagatagaaatatctgctaataccgcataagaccacgggtgggcatccaccaggggtaaaaggagaaatccgctttaagatgagtttgcgtactattagctagttggtggggtaatggcctaccaaggcgacgatggttagccggcctgagagggtgaacggccacattggaactgagaaacggtccagactcctacgggaggcagcagtgaggaatattgggcaatggaggaaactctgacccagcaacgccgcgtggaggaagaaggtcttcggattgtaaacttctgttatgggggaaaaagaaagtgatggtaccccatgagaaagctac

SEQ ID NO: 6159 - DNA, 490 bp, unidentified
  misc_feature 1..490: note = Ascusbbf_421120, encodes 16S rRNA
  source 1..490: mol_type = genomic DNA
agagtttgatcctggctcaggatgaacgctagcggcaggcttaacacatgcaagtcgaggggcagcgcgttgtagcaatacgatggcggcgaccggcgaaagggtgagtaacgcgtgagcgacgtgcccgtcacagggggacaagggctggaaacggcttctgataccccataggaatgtatgcttcatggtgtatgtttgaaagatttatcggtgacggatcggctcgcgtccgattagctagttggtggggtaacggcccaccaaggcgacgatcggtaggggttctgagaggaaggtcccccacattggaactgagacacggtccagactcctacgggaggcagcagtgaggaatattggacaatggccggaaggctgatccagccatgccgcgtgcgggatgacggccctatgggttgtaaaccgcttttgtgtgggagcaataatcactacgtgtagtgagatgagagtaccatacgaataagca

SEQ ID NO: 6160 - DNA, 490 bp, unidentified
  misc_feature 1..490: note = Ascusbbf_111216, encodes 16S rRNA
  source 1..490: mol_type = genomic DNA
agagtttgatcctggctcaggatgaacgctggcggcgtgcctaacacatgcaagtcgagcgagaagtctatgatcgaaacttcggttgattgattagatggaaagcggcggacgggtgagtaacgcgtaggcaacctgcccctggctgagggacagcctcgggaaaccgggattaatacctcataatacgaagggaagacatcttaccttcgtcaaagatttatcggctggggatgggcctgcgtctgattagttagttggtggggtaacggcctaccaaggcgacgatcagtagccgacctgagagggtgatcggccacattggaactgagacacggtccaaactcctacgggaggcagcagtggggaatattgcacaatgggcgaaagcctgatgcagcaacgccgcgtgaaggatgaaggcccttgggtcgtaaacttctgttctaagggaagataatgacggtaccttaggagcaagtcccggcta

SEQ ID NO: 6161 - DNA, 490 bp, unidentified
  misc_feature 1..490: note = Ascusbbf_8119, encodes 16S rRNA
  source 1..490: mol_type = genomic DNA
agagtttgatcatggctcaggacgaacgctggcggcgtgcctaacacatgcaagtcgagcggggatgatggaagagcttgctcggaaatcatcctagcggcggacgggtgagtaacgcgtgagcaacctgtcccagacagggggataccagatggaaacatctgctaataccgcataagaccacggggtcgcatggctctggggtaaaaggaggaatccggtttggggtgggctcgcgtccgattagctggttggtgaggtaacggcccaccaaggcgacgatcggtagccgacctgagagggtgatcggccacattggaactgagacacggtccaaactcctacgggaggcagcagtggggaatattgggcaatgggcgaaagcctgacccagcaacgccgcgtgagggaagaaggttttcggattgtaaacctctgtcctaagtgacgaaggaagtgacggtagcttaggaggaagccccggctaact

SEQ ID NO: 6162 - DNA, 490 bp, unidentified
  misc_feature 1..490: note = Ascusbbf_210346, encodes 16S rRNA
  source 1..490: mol_type = genomic DNA
agagtttgatcatggctcagattgaacgctggcggcaggcttaacacatgcaagtcgaacggtagcggggagaaagcttgctttctctgccgacgagtggcggacgggtgagtaatgcttgggaatctggcttatggagggggataactactggaaacggtagctaataccgcgtaatgtctgcggactaaagggtgggactttcgggccacctgccataagatgagcccaagtgggattaggtagttggtgaggtaatggctcaccaagcccgcgatctctagctggtctgagaggatgaccagccacactggaactgagacacggtccagactcctacgggaggcagcagtggggaatattgcacaatggggggaaccctgatgcagccatgccgcgtgaatgaagaaggccttcgggttgtaaagttctttcggtagcgaggaaggcggttagtttaatagactaatcgattgacgttaactacaga

SEQ ID NO: 6163 - DNA, 490 bp, unidentified
  misc_feature 1..490: note = Ascusbbf_174156, encodes 16S rRNA
  source 1..490: mol_type = genomic DNA
agagtttgatcctggctcaggatgaacgctagcggcaggcctaatacatgcaagtcggacgggatccatcggtagcttgctatcaatggtgagagtggcgcacgggtgcgtaacgcgtgagcaacctacctccatcagggggatagcctctcgaaagagagattaacaccgcataacataatgttccggcatcgggatattattaaatatttataggatggagatgggctcgcgtgacattagctagttggtagggtaacggcttaccaaggcgacgatgtctaggggctctgagaggagaatcccccacactggtactgagacacggaccagactcctacgggaggcagcagtaaggaatattggtcaatgggcggaagcctgaaccagccatgccgcgtgcaggatgactgccctatgggttgtaaactgcttttgtccgggaataaacctccttacgagtagggagctgaatgtaccggaagaataa

SEQ ID NO: 6164 - DNA, 490 bp, unidentified
  misc_feature 1..490: note = Ascusbbf_180714, encodes 16S rRNA
  source 1..490: mol_type = genomic DNA
agagtttgatcatggctcaggacgaacgctggcggcgtgcctaatacatgcaagtcgagcgaacagaaaaggagcttgctcctttgacgttagcggcggacgggtgagtaacacgtgggcaacctaccctatagtttgggataactccgggaaaccggggctaataccgaataatctcttttgcttcatggtgaaagactgaaagacggtttcggctgtcgctataggatgggcccgcggcgcattagctagttggtgaggtaacggctcaccaaggcgacgatgcgtagccgacctgagagggtgatcggccacactgggactgagacacggcccagactcctacgggaggcagcagtagggaatcttccacaatgggcgaaagcctgatggagcaacgccgcgtgagtgaagaaggttttcggatcgtaaaactctgttgtaagggaagaacaagtacagtagtaactggctgtaccttgacggtacc

SEQ ID NO: 6165 - DNA, 490 bp, unidentified
  misc_feature 1..490: note = Ascusbbf_28385, encodes 16S rRNA
  source 1..490: mol_type = genomic DNA
agagtttgatcatggctcaggatgaacgctggcggcgtgcttaacacatgcaagtcgaacggagcttagaaggaagcttgctttcatttaagcttagtggcggacgggtgagtaacgcgtgagcaacctgccctcgagtggggaataacatcgagaaatcggtgctaataccgcataatgtcgagagaccgcatgatctttcgaccaaaggatttattcgcttgaggatgggctcgcgtccgattagttagttggtgaggtaacggcccaccaagacttcgatcggtagccgaactgagaggttgatcggccacattgggactgagacacggcccagactcctacgggaggcagcagtggggaatattgggcaatgggcgaaagcctgacccagcaacgccgcgtgaaggatgaaggtcttcggattgtaaacttctttgattggggaagaataaaatgacctacccaaagaacaagccacggctaacta

SEQ ID NO: 6166 - DNA, 490 bp, unidentified
  misc_feature 1..490: note = Ascusbbf_14082, encodes 16S rRNA
  source 1..490: mol_type = genomic DNA
agagtttgatcctggctcaggacgaacgctggcggcgtgcttcatacatgcaagtcgaacgagaagttatcttcggataatggacagtggcggacgggtgagtaatgtgtagagaatctgccctatagagggggatagcagttggaaacgactattaataccccatatgcgcgtagttgcgatactattcgtgaaagatttatcgctataggatgagtctgcatctgattagctagttgggggtgtaatggaccaccaaggcgacgatcagtagctggtttgagaggatgatcagccacaatgggactgagacacggcccatactcctacgggaggcagcagtagggaattttgcgcaatgggcgaaagcctgacgcagcaacgccgcgtgatcgcagacgcttttcggagtgtaaagatctgtcagtggggacgaacaatgactgtacccacagaggaagcaccggctaactccgtgccagcagccgcg

SEQ ID NO: 6167 - DNA, 490 bp, unidentified
  misc_feature 1..490: note = Ascusbbf_1423680, encodes 16S rRNA
  source 1..490: mol_type = genomic DNA
agagtttgatcatggctcagaacgaacgctggtagcgtggattaggcatgcaagccgaacgggatcaccgatatagtaatattgaggtgtgagagtggcggattggggaggaacacgtgagcaacctgcctttgagtcggggaaaaccgttggaaacgacggctaataccggatgtggcgcccggtgacatcatcggagcgctaaagggggccgcaaggctctcgctcgtagaggggctcgcgcaccatcagcttgttggcggggtaacggcccaccaaggcctacggttagctggtctgggaggatgaccagccccactgggactgagatactgcccagactcctacgggaggctgcagtcgaggatcatttgcaatgggcgaaagcctgacaatgcgacgctgcgtggaggatgaaggccttcgggttgtaaactcctgtcatgggggaacaggcgaggatacctaatacgtttcttagttgagtgta

SEQ ID NO: 6168 - DNA, 490 bp, unidentified
  misc_feature 1..490: note = Ascusbbf_440105, encodes 16S rRNA
  source 1..490: mol_type = genomic DNA
agagtttgatcctggctcagattgaacgctggcggcaggcctaatacatgcaagtcgaacgaggatagcaatatccgagtggcgaacgggtgagtaacacgtgagcaacctgccttacacaacgggatacctactggaaacagtagttaatacggtataagaccacagtaccgcatgatacagtggtaaaagatttatcggtgtaagatgggctcgcggcgcattagctagttggagaggtaacggctcaccaaggcgacgatgcgtagccgacctgagagggtgatcggccacattgggactgagatacggcccagactcctacgggaggcagcagtggggaatattgggcaatggaggaaactcttacccagcaatgccgcgtgagtgaagaaggtcgtaagattgtaaagctctttagtcagggaaaaagatagtgattgatctgaagaataagctccggctaactacgtgccagcagccgcggtaa

SEQ ID NO: 6169 - DNA, 490 bp, unidentified
  misc_feature 1..490: note = Ascusbbf_29367, encodes 16S rRNA
  source 1..490: mol_type = genomic DNA
agagtttgatcatggctcaggacgaacgctggcggcgtgcctaatacatgcaagtcgagcggagctttcgcggcggaagccttcgggtggaagctgcgaaagcttagcggcggacgggtgagtaacacgtgggcaacctgcccgaaagaccgggataacatccggaaacggatgctaataccggataagcggacctttcgcatgaagggttcgggaaagacggggcaacctgtcactttcggatgggcccgcggcgcattagctggttggcggggtaacggcccaccaaggcgacgatgcgtagccgacctgagagggtgaacggccacactgggactgagacacggcccagactcctacgggaggcagcagtagggaatcttccgcaatggacgaaagtctgacggagcaacgccgcgtgagtgaggaaggtcttcggatcgtaaagctctgttgccagggaagaatcccctggggagtcactgccccg

SEQ ID NO: 6170 - DNA, 490 bp, unidentified
  misc_feature 1..490: note = Ascusbbf_22227, encodes 16S rRNA
  source 1..490: mol_type = genomic DNA
agagtttgatcatggctcaggatgaacgctggcggcgtgcttaacacatgcaagtcgaacgaagcatttggtttgatttcttcggattgaaaaccttatgacttagtggcggacgggtgagtaacgcgtgggcaatctgccccataccgggggacaacagttggaaacgactgctaataccgcataagcgcacggagccgcatggccctgtgtgaaaaactccggtggtatgggatgagcccgcgttggattaggtagttggtgaggtaacggcccaccaagccgacgatccatagccgacctgagagggtgaccggccacattgggactgagacacggcccaaactcctacgggaggcagcagtggggaatattgcacaatgggggaaaccctgatgcagcgacgccgcgtgagtgaagaagtatttcggtatgtaaagctctatcagcagggaagaagatgacggtacctgcacaagaagccccggct

SEQ ID NO: 6171 - DNA, 490 bp, unidentified
  misc_feature 1..490: note = Ascusbbf_701287, encodes 16S rRNA
  source 1..490: mol_type = genomic DNA
agagtttgatcctggctcaggacgaacgctggcggtatgcctaacacatgcaagtcgaacgtgtgtgtagagagcttgctctttatttcactagtggcggacgggtgagtaacgcgtgagtaatctgccttgaagtggggaataacatttggaaacaaatgctaataccgcgtaatatactttcttcgcatgaagtttgtatcatagcttttcgcttcaagatgagctcgcgtccgattagtttgttggcgaggtaaatgctcaccaagactacgatcggtagccgggttgagagactgaacggccacattgggactgagacacggcccagactcctacgggaggcagcagtggggaatattgcacaatgggggaaaccctgatgcagcaataccgcgtgagggatgaaggctctagggttgtaaacctctgtccaaagggacgaattttgacggtacctttgtaggaagctccggctaactacgtgcca

SEQ ID NO: 6172 - DNA, 490 bp, unidentified
  misc_feature 1..490: note = Ascusbbf_78878, encodes 16S rRNA
  source 1..490: mol_type = genomic DNA
agagtttgatcatggctcaggattaacgctggcggcgtgcctaacacatgcaagtcgagcgagaagcagtgaagggagtcttcggacaaacggaactgtggacagcggcggacgggtgagtaacgcgtgggcaacctgcccctttccggaggatagccaagggaaactttgaataatactccataaagcagagatgtcgcatggcaattctgccaaagatttatcggagagggatgggcccgcgtctgattagccagttggtgaggcagcggctcaccaaagcgacgatcggtagccggcctgagagggtgaacggccacattggaactgagacacggtccagactcctacgggaggcagcagtggggaatattgcacaatgggcggaagcctgatgcagcaacgccgcgtgaaggaagaaggttttcggatcgtaaacttctgtccctggggaagaaagaaatgacggtacccaaggaggaagccccgg

SEQ ID NO: 6173 - DNA, 490 bp, unidentified
  misc_feature 1..490: note = Ascusbbf_203782, encodes 16S rRNA
  source 1..490: mol_type = genomic DNA
agagtttgatcctggctcagaatgaacgttggcggcgtggattaggcatgcaagtcgagcggcaaggtttttattttcggatataaaccctagagcggcggaagggataggacaatatagatacgcgcctcttagctcaggatagcgtctggaaacgggcgataatactgaatgaggtctccggaccaaaggtgagattccgctaggagatcggtctatagcctattagttagttggtagggtaacggcctaccaagacgatgatgggtacggggcgtgagagcgcgaccccgatcactgggactgagacactgcccagacgcctacgggcggctgcagtcgagaatcttcggcaatggacgcaagtctgaccgagcgacgccgcgtgtatgacgaaggccttcgggttgtaaagtactgtcgattgggcggaagttagagggggttctccctttcttttgacctatcatttgaggaaggacgggctaag

SEQ ID NO: 6174 - DNA, 490 bp, unidentified
  misc_feature 1..490: note = Ascusbbf_2278, encodes 16S rRNA
  source 1..490: mol_type = genomic DNA
agagtttgatcatggctcaggatgaacgctagcggcaggcttaacacatgcaagtcgaggggcagcgggtgtagcaatacatgccggcgaccggcgaaagggtgagtaacgcgtgagcaacgtgcccgtatgtgggggatagtcgatggaaacgtcgcgtaataccccgtaacacatttggccgcatggccttatgttgaaagattgattgcatacggatcggctcgcgtgccattaggtagacggcggggtaacggcccaccgtgccgacgatggctaggggttctgagaggaaggtcccccacattggaactgagacacggtccagactcctacgggaggcagcagtgaggaatattggacaatggccggaaggctgatccagccatgccgcgtgcgggaagacggccctatgggttgtaaaccgcttttgcgagggagcaataagggcaacgagttgtccgatgagagtacctcgcgaataagcatc

SEQ ID NO: 6175 - DNA, 490 bp, unidentified
  misc_feature 1..490: note = Ascusbbf_12358, encodes 16S rRNA
  source 1..490: mol_type = genomic DNA
agagtttgatcatggctcaggatgaacgctggcggcgtgcctaacacatgcaagtcgaacgaagcatactccttcgggggtatgactgagtggcggacgggtgagtaacgcgtgggtaacctgccctctacagggggacaacagttagaaatgactgctaataccgcatgagcgcacagggaggcatcttcccgtgtgaaaaactatcggtggtagaggatgggcccgcgtctgattagctagttggcggggtaatagcccaccaaggcgacgatcagtagccggtctgagaggatgaacggccacattggaactgagacacggtccaaactcctacgggaggcagcagtgagggatattgcacaatgggggaaaccctgatgcagcaacgccgcgtgagtgaagaagtatttcggtatgtaaagctctatcagcagggaagataatgacggtacctgactaagaagctccggctaaatacgtgccagca

SEQ ID NO: 6176 - DNA, 490 bp, unidentified
  misc_feature 1..490: note = Ascusbbf_11105, encodes 16S rRNA
  source 1..490: mol_type = genomic DNA
agagtttgatcatggctcaggatgaacgctggcggcgtgcttaatacatgcaagtcgaacgaagcacctctcccgaagattgaagctgcttgcagctgattgattcaattgaggtgactgagtggcggacgggtgagtaacgcgtgggtaacctgcctcatacagggggataacagttggaaacgactgctaataccgcataagcgcacagtatcgcatgatacagtgtgaaaaactccggtggtatgagatggacccgcgtctgattagctagttggaggggtaacggcccaccaaggcgacgatcagtagccgacttgagagagtgatcggccacattgggactgagacacggcccaaactcctacgggaggcagcagtagggaatattgcacaatgggggaaaccctgatgcagcgacgccgcgtgaaggatgaagtatttcggtatgtaaacttctatcagcaaggaagaaaatgacggtacttga

SEQ ID NO: 6177 - DNA, 490 bp, unidentified
  misc_feature 1..490: note = Ascusbbf_19198, encodes 16S rRNA
  source 1..490: mol_type = genomic DNA
agagtttgatcatggctcaggatgaacgctagcgacaggcttaacacatgcaagtcgaggggcagcacaggtagcaataccgggtggcgaccggcgcacgggtgagtaacgcgtatgcaacttacctatcagagggggataacccggcgaaagtcggactaataccgcatgaagcaggggccccgcatggggatatttgctaaagattcatcgctgatagataggcatgcgttccattaggcagttggcggggtaacggcccaccaaaccgacgatggataggggttctgagaggaaggtcccccacattggtactgagacacggaccaaactcctacgggaggcagcagtgaggaatattggtcaatgggcgtaagcctgaaccagccaagtcgcgtgagggatgaaggttctatggatcgtaaacctcttttataagggaataaagtgtgggacgtgtcctattttgtatgtaccttatgaataagga

SEQ ID NO: 6178 - DNA, 490 bp, unidentified
  misc_feature 1..490: note = Ascusbbf_11905, encodes 16S rRNA
  source 1..490: mol_type = genomic DNA
agagtttgatcctggctcaggatgaacgctggcggcgtgcttaacacatgcaagtcgaacgaagccaaaaggaagcttgctttctttgaagcttagtggcggacgggtgagtaacgcgtgagtaacctgcccttcagtggggaataacacagagaaatctgtgctaataccgcataacgtcttcttgccgcatgacaggaagaccaaaggatttattcgctgaaggatggactcgcgtccgattagctagttggtgaggtaacggcccaccaaggcgacgatcggtagccgaactgagaggttgatcggccacattgggactgagacacggcccagactcctacgggaggcagcagtggggaatattgggcaatgggcgaaagcctgacccagcaacgccgcgtgaaggaagacggtcttcggattgtaaacttctttgattggggaagaaacaaatgacctacccaaagaacaagtcacggctaactac

SEQ ID NO: 6179 - DNA, 490 bp, unidentified
  misc_feature 1..490: note = Ascusbbf_30239, encodes 16S rRNA
  source 1..490: mol_type = genomic DNA
agagtttgatcatggctcaggatgaacgctggcggcatgcctaagacatgcaagtcgaacgaagtggcccaacaataatggagtgcttgcacaaaatttgcgatggattttccacttagtggcagacgggtgagtaacacgtaagtaatctacctttaagactgggataacgtttggaaacggacgctaataccggataattcacacttagataactaggggtgctaaaaggagcttcggctttacttgaagatgagcttgcggcgtattaactagttggtgaggtaatggctcaccaaggtaacgatgcgtagccgagctgagaggctaatcggccacattgggactgagacacggcccaaactcctacgggaggcagcagttaggaatattcgtcaatgggggaaaccctgaacgagcaatgccgcgtgagtgatgacggtcttatagattgtaaaactctgttgtaaaggaagaacccttattatag

SEQ ID NO: 6180 - DNA, 490 bp, unidentified
  misc_feature 1..490: note = Ascusbbf_142243, encodes 16S rRNA
  source 1..490: mol_type = genomic DNA
agagtttgatcctggctcaggacgaacgctggcggcgtgcttaacacatgcaagtcgaacggtaaggcccttcggggtacacgagtggcgaacgggtgagtaacacgtgagtaacctgccccggactctgggataagcattcgaaagggtgtctaatactggataggactcctgcctgcatgggtgggggtggaaagattttttggttcgggatgggctcgcggcctatcagcttgttggtggggtgatggcctaccaaggcgtcgacgggtagccggcctgagagggcgaccggccacactgggactgagatacggcccagactcctacgggaggcagcagtggggaatattgcgcaatgggcggaagcctgacgcagcaacgccgcgtgcgggatgacggccttcgggttgtaaaccgctttcacccatgacgaagatttttttgacggtagtgggagaagaagcaccggccaactacgtgccagcag

SEQ ID NO: 6181 - DNA, 490 bp, unidentified
  misc_feature 1..490: note = Ascusbbf_263970, encodes 16S rRNA
  source 1..490: mol_type = genomic DNA
agagtttgatcctggctcaggacgaacgctggcggcgtgcctaatacatgcaagtcgagcggacttgtttggagcttgcttcagacaggttagcggcggacgggtgagtaacacgtaggcaacctgcctctcagactgggataacatagggaaacttatgctaataccggataggttttcggatcgcatgatccgaaaagaaaaggcggcttttcgctgtcactgggagatgggcctgcggcgcattagctagttggtggggtaacggcccaccaaggcgacgatgcgtagccgacctgagagggtgaccggccacactgggactgagacacggcccagactcctacgggaggcagcagtagggaattttccacaatggacgaaagtctgatggagcaacgccgcgtgaacgatgaaggtcttcggattgtaaagttctgttgtcagggacgaacaagtaccgtttgaacaaggcggtaccttgacggta

SEQ ID NO: 6182 - DNA, 490 bp, unidentified
  misc_feature 1..490: note = Ascusbbf_21453, encodes 16S rRNA
  source 1..490: mol_type = genomic DNA
agagtttgatcatggctcaggatgaacgctggcggcgtgcctaacacatgcaagtcgagcgggaatcgcctgattgaaacttcggtcgaatgaaggcgaggatagcggcggacgggtgagtaacgcgtaggtaacctgccccttacacagggatagcctcgggaaactgggattaatacctgataatgcggtttgttcacatggacagaccgccaaagatttatcggtgagggatggacctgcgtctgattagcttgttggtgaggtaacggcccaccaaggcaacgatcagtagccgacctgagagggtaatcggccacattggaactgagacacggtccaaactcctacgggaggcagcagtggggaatattgcacaatgggcgcaagcctgatgcagcaacgccgcgtgagcgaagaaggtcttcggatcgtaaagctctgtcctcaggaacgaagaagtgacggtacctgaggaggaagccccggc

SEQ ID NO: 6183 - DNA, 490 bp, unidentified
  misc_feature 1..490: note = Ascusbbf_12101, encodes 16S rRNA
  source 1..490: mol_type = genomic DNA
agagtttgatcatggctcagaacgaacgctggtggcgtgtcttatacatgcaagtcgagcggtccgcaaggatagcggcgaacgggtgagtaacgcgtaagcaatctgccccgcatattgggatagccgtgccaacgcgcggataataccgaataacgtggccccggacatccggggttgacgaaagattcatcgatgcgggatgagcttgcgtccgattagctagttggcggggcaacggcccaccaaggcgacgatcggtagccggcctgagagggtgatcggccacattgggactgagatacggcccagactcctacgggaggcagcagtagggaatattgcacaatgggggaaaccctgatgcagcaacgccacgtgtgggaagaagcatttcggtgtgtaaaccactgtcgtgagggaataatacgcggtttcggccgcgggggaatgtacctcgagaggaagcaccggcaaacttcgtgccagc

SEQ ID NO: 6184 - DNA, 490 bp, unidentified
  misc_feature 1..490: note = Ascusbbf_75702, encodes 16S rRNA
  source 1..490: mol_type = genomic DNA
agagtttgatcctggctcaggacgaacgctggcggcgtgcctaacacatgcaagtcgaacgaggtccatgcagtggcaacactgcggaagacctagtggcgaacgggtgagtaacacgtgagaaacctgccccgaagaccgggataactctccgaaaggggagctaataccggatacccccatctgaccgcatggtcggatgaggaaatggattccgcttcgggagggtctcgcggcctatcagctagttggtgaggtaacggctcaccaaggcatcgacgggtagctggtctgagaggacgatcagccacactgggactgagacacggcccagactcctacgggaggcagcagtggggaatcttgcgcaatgggcgaaagcctgacgcagcaacgccgcgtgggggatgaaggctctcgggttgtaaacccctttcagcagggacgaaattgacggtacctgcagaagaagccccggctaactacgtgc

SEQ ID NO: 6185 - DNA, 490 bp, unidentified
  misc_feature 1..490: note = Ascusbbf_234, encodes 16S rRNA
  source 1..490: mol_type = genomic DNA
agagtttgatcatggctcagaacgaacgctggcggcgcgttttaagcatgcaagtcgagcggtagtagcaatacgagagcggcggacgggtgagtaacacgtgggtaatctgcccttcggtcgggaatagcctgtggaaacacaggataataccggatgcgatggtcttcacacaagtggaggtcaggaaaggagccaaggctccgccggaggatgagcccgcgtcccattagctagatggtgaggtaaaggcccaccatggcgatgatgggtagccggcctgagagggtgaacggccacattggaactgagacacggtccagactcctacgggaggcagcagctaagaatcttccacaatggacgaaagtctgatggagcgacgccgcgtgggcgatgaaggccgtgaggttgtaaagcccttttcttgagggggaataatgcgggcagggaatggcctgcagatgacgtgaatcaaggaataagcccc

SEQ ID NO: 6186 - DNA, 490 bp, unidentified
  misc_feature 1..490: note = Ascusbbf_77644, encodes 16S rRNA
  source 1..490: mol_type = genomic DNA
agagtttgatcctggctcaggatgaacgctggcggcgtgcctaacacatgcaagtcgaacgaagcactgcggatagaggcttcggccaattgaagctttgacttagtggcggacgggtgagtaacacgtgagcaacctgcccttcagtgggggacaacagctggaaacggctgctaataccgcataatgtatatgggaggcatctccggtataccaaagatttattgctgaaggatgggctcgcgtctgattagatagttggtgaggtaacggctcaccaagtcgacgatcagtagccggactgagaggttgaacggccacattgggactgagatacggcccagactcctacgggaggcagcagtggggaatattgggcaatgggggaaaccctgacccagcaacgccgcgtggaggaagaaggtcttcggattgtaaactcctttgacgagggacgataatgacggtacctcgaaaacaagccacggct

SEQ ID NO: 6187 - DNA, 490 bp, unidentified
  misc_feature 1..490: note = Ascusbbf_161051, encodes 16S rRNA
  source 1..490: mol_type = genomic DNA
agagtttgatcatggctcagaacgaacgctggcggcgcgtcttaagcatgcaagtcgagcggtaacttaccttcgggtaagctagagcggcggactggtgagtaacacgtgggtgacataccctccggatcgggatagctcctagaaataggagataataccgggtacgaccactacggtcagagcgtagtgaggaaaggtgcgttttgcaccgccggaggagtggcccgcggcccattagctagttggtgaggtaacggcccaccaaggcgacgatgggtatccggcctaagagggtggacggacacattgggactgagatacggcccagactcctacgggaggcagcagctaagaatattccgcaatggacgaaagtctgacggagcgacgccgcgtgaacgatgaaggccgaaaggttgtaaagttcttttgaatctgacgaataaggtgtggaggaaatgccatactggtgacggtaggatttgaa

SEQ ID NO: 6188 - DNA, 490 bp, unidentified
  misc_feature 1..490: note = Ascusbbf_510673, encodes 16S rRNA
  source 1..490: mol_type = genomic DNA
agagtttgatcctggctcaggatgaacgctagctacaggcttaacacatgcaagtcgcggggcagcgcggcggtgcttcggcactgctggcggcgaccggcgcacgggtgagtaacgcgtatccaacctgccccttaccacgggatagccctccgaaagggggattaataccgtatgtggccacgagacggcatccgaccgtggctaaaggctcagcggtaagggatggggatgcgtctgattaggtagtcggcggggtaacggcccaccgagccttcgatcagtaggggttctgagaggaaggtcccccacattggaactgagacacggtccaaactcctacgggaggcagcagtgaggaatattggtcaatgggcgcgagcctgaaccagccaagtagcgtgagggatgacggccctacgggttgtaaacctcttttacgcggggataaaccgcgccacgcgtggcgcgttgcaggtaccgcgtgaat

SEQ ID NO: 6189 - DNA, 487 bp, unidentified
  misc_feature 1..487: note = Ascusbbf_11735, encodes 16S rRNA
  source 1..487: mol_type = genomic DNA
agagtttgatcctggctcagaacgaacgctggcggcaggcttaacacatgcaagttgaacgggatttgtatggtgcttgcactagacaatgagagtagcgcactggtgagtaacacgtgggaacatgccctgaagtgggggacaacagttggaaacgactgctaataccgcataatccctgagggggaaagatttatcgctttaggattggcccgcggaagattaggtagtaggtggggtaaaggcctacctagccgacgatctatagctggtctgagaggacgatcagccacattggaactgagacacggtccagactcctacgggaggcagcagtgaggaatattgggcaatggagggaactctgacccagccatgccgcgtgagtgagaaggtcttcggattgtaaagctctttcggatgggacgatgatgacggtaccatctaaagaagccccggcaaacttcgtgccagcagccgcggtaat

SEQ ID NO: 6190 - DNA, 490 bp, unidentified
  misc_feature 1..490: note = Ascusbbf_24085, encodes 16S rRNA
  source 1..490: mol_type = genomic DNA
agagtttgatcatggctcaggatgaacgctggcggcgtgcttaatacatgcaagtcgaacgaagttttctcgccgaagcttgcttcattgagaaaacttagtggcggacgggtgagtaacgcgtgggtaacctgccttacacagggggataacagttagaaatgactgctaataccgcataagcgcacagaatcgcatgattcagtgtgaaaagatttatcggtgtaagatggacccgcgtctgattagctagttggtgaggtaacggcccaccaaggcgacgatcagtagccggcctgagagggtgaacggccacattgggactgagacacggcccaaactcctacgggaggcagcagtagggaatattggacaatgggggaaaccctgatccagcgacgccgcgtgagtgaagaagtatttcggtacgtaaagctctatcagcagggaagaaaatgacggtacctgactaagaagcaccggctaaata

SEQ ID NO: 6191 - DNA, 355 bp, unidentified
  misc_feature 1..355: note = Ascusbbf_507703, encodes 16S rRNA
  source 1..355: mol_type = genomic DNA
agagtttgatcctggctcagaacgaacgctggcggcgcgttttaagcatgcaagtcgagcggcaaggacttcggtccccagagcggcggacgggtgagtaacacgtggataatctgccctgcagtccggaataccccatggaaacatgggctaatgccggatgcgagatggaggcgatggccttcatgggaaagctcccacgggagcgctgcaggatgagtccgcggcccattagcttgatggcggggtaaaggcccaccatggcgacgatgggtagccggcctgagagggtggacggccacattggaactgagacacggtccagactcctacgggagccagcagccgcggtaat

SEQ ID NO: 6192 - DNA, 490 bp, unidentified
  misc_feature 1..490: note = Ascusbbf_7866, encodes 16S rRNA
  source 1..490: mol_type = genomic DNA
agagtttgatcatggctcaggatgaacgctagcggcaggcttaacacatgcaagtcgaggggcagcgcgttgtagcaatacgatggcggcgaccggcgaaagggtgagtaacgcgtgagcaacgtgcccgtatgtgggggatagtcgatggaaacgtcgcgtaataccccgtaacacaagggaccgcatgatctcttgttgaaagatttattgcatacggatcggctcgcgtgccattaggtagacggcggggtaacggcccaccgtgccgacgatggctaggggttctgagaggaaggtcccccacattggaactgagacacggtccagactcctacgggaggcagcagtgaggaatattggacaatggccggaaggctgatccagccatgccgcgtgcgggaggacggccctatgggttgtaaaccgcttttgcgagggagcaataagggtaacgtgttgcccgatgagagtacctcgcgaataagca

SEQ ID NO: 6193 - DNA, 490 bp, unidentified
  misc_feature 1..490: note = Ascusbbf_386598, encodes 16S rRNA
  source 1..490: mol_type = genomic DNA
agagtttgatcatggctcagaacgaacgctggcggcgcgtcttaagcatgcaagtcgagcgggattgtccagcttgctggacatgagagcggcggactggcgaggagcgcgtgggcgacgcgccccccggacgggaacagcccgtggaaacacggggtaatgccggatggcatgcagggcttggaggccctgcatcaaaggggcttcggccccgccgggggagcggcccgcgtcccatcagcttgttggcggtgcaagggaccaccaaggctacgacgggtgtccggcctgagagggcgatcggacgcattgggactgagatacggcccagactcctacgggaggcagcagctaagaatattccgcaatgggcgaaagcctgacggagcgacgccgcgtgcacgatggaggccggaaggttgtaaagtgcttttgggagggaggaagaagtccgggaggaaacgcccgggcggcgacggtacctcgcgaa

SEQ ID NO: 6194 - DNA, 490 bp, unidentified
  misc_feature 1..490: note = Ascusbbf_195984, encodes 16S rRNA
  source 1..490: mol_type = genomic DNA
agagtttgatcatggctcaggacgaacgctggcggcgcgcctaacacatgcaagtcgaacggactttacggaaacagaagcttcggcagaagaagaaataaagttagtggcgaacgggtgagtaacacgtgaggaaccaacccttaagagggggataacacttagaaataggtgctaataccgcataagaccacactccggcatcggagaggggtcaaaggagcaatccgcttaaggacggcctcgcgtccgattaggtagttggcggggcaacggcccaccaagccgacgatcggtagccggactgagaggttgaacggccacattgggactgagacacggcccagactcctacgggaggcagcagtggggaatattgggcaatgggggaaaccctgacccagcgacgccgcgtgagggaagaaggtcttcggattgtaaacctctgtcttcggggacgatagtgactgtacccgaggaggaagccacg

SEQ ID NO: 6195 - DNA, 490 bp, unidentified
  misc_feature 1..490: note = Ascusbbf_3409, encodes 16S rRNA
  source 1..490: mol_type = genomic DNA
agagtttgatcatggctcaggatgaacgctagctacaggcttaacacatgcaagtcgcggggcagcattggcgtggcaacacgccagatggcgaccggcgcacgggtgcgtaacgcgtatccaacctggccttcactcgggtatagccctgcgaaagtaggattaatccccgatgtcgtcaagcaggtgcatattttcttgacgaaaggtttaccggtgagggatggggatgcgttccattagctagttggcggggcaacggcccaccaaggcaacgatggataggggttctgagaggaaggtcccccacactggaactgagacacggtccagactcctacgggaggcagcagtgaggaatattggtcaatgggcgagagcctgaaccagccaagtagcgtgaaggatgacagcccttcgggttttaaacttcttttgcgggagattaaccgccatcactagtgatggtctgcagcaatcccgcgaataa

SEQ ID NO: 6196 - DNA, 490 bp, unidentified
  misc_feature 1..490: note = Ascusbbf_6474, encodes 16S rRNA
  source 1..490: mol_type = genomic DNA
agagtttgatcatggctcaggacgaacgctggcggcgtgcctaacacatgcaagtcgagcggagatttcgggggagcttgctccaccgggatttcagcggcggacgggtgagtaacgcgtgagcaacctgccttcaacagggggataacgcatcgaaagatgtgctaataccgcatgagaccacaacatcacatggtgaaggggtcaaaggagcaatccggttgaagatgggctcgcgtccgattagctggttggtgagacaacagcccaccaaggcgacgatcggtagccgacctgagagggtgatcggccacattggaactgagatacggtccagactcctacgggaggcagcagtgggaatattgggcaatgggcgaaagcctgacccagcaacgccgcgtgagggaagaagggtttcggctcgtaaacctctgtcctgtgggacgaaggaagtgacggtaccacaggaggaagccccggctaacta

SEQ ID NO: 6197 - DNA, 488 bp, unidentified
  misc_feature 1..488: note = Ascusbbf_6257, encodes 16S rRNA
  source 1..488: mol_type = genomic DNA
agagtttgatcatggctcagaacgaacgctggcggcatggattaggcatgcaagtcgaacgaggtagcaataccgagtggcggaagggtgaggaacacgtgagtaatctgcccccaagttgggaataacagttggaaacgattgctaataccgaatgtggctgtttttctgcatggaagaacagttaaagatttatcgcttggggatgagctcgcgtcccattagttagttggtgaggtaacggcccaccaagacgatgatgggtagctggtctgagaggatggtcagccacactgggactgagacactgcccagactcctacgggaggctgcagtcgagaatcttgggcaatgcgcgaaagcgtgacccagcaatgccgcgtgtatgatgaaggtcttcggattgtaaaatactgtctcccgggacgaaagatgacggtaccggggaaggaagccacggctaactacgtgccagcagccgcggtaat

SEQ ID NO: 6198 - DNA, 490 bp, unidentified
  misc_feature 1..490: note = Ascusbbf_10088, encodes 16S rRNA
  source 1..490: mol_type = genomic DNA
agagtttgatcctggctcaggacgaacgctggcggcgtgcttaacacatgcaagtcgaacggagttagacgctggtttgatgctagcttgctagtggatttccttgtttaacttagtggcggacgggtgagtaacgcgtgagtaacctgcctctcagtggggaataacgccctgaaaagagcgctaataccgcataacgtattctgaccgcatgatcgggataccaaagatttatcgctgagagatggactcgcgtccgattagctagttggtgaggtaacggcccaccaaggcgacgatcggtagccggactgagaggttgaacggccacattgggactgagacacggcccagactcctacgggaggcagcagtgggggatattgcgcaatgggggaaaccctgacgcagcaacgccgcgtggaggatgacggttttcggattgtaaactccttttataagggacgaattaagacggtaccttatgaat

SEQ ID NO: 6199 - DNA, 490 bp, unidentified
  misc_feature 1..490: note = Ascusbbf_17142, encodes 16S rRNA
  source 1..490: mol_type = genomic DNA
agagtttgatcatggctcagaacgaacgctggcggcatggattaggcatgcaagtcgaacgggcgcagcaatgcgtcagtggcgaaagggtgaggaacacgtgagtaacttgcccccaagttcggaatagctttgggaaactgaagataataccggatgtggttgttctgctgcatggtggagcaactaaaggtttactgcttggggataggctcgcgtcccattagctagttggtgaggcaacggctcaccaaggcgacgatgggtagctggtctgagaggatggtcagccacactgggactgagacactgcccagactcctacgggaggctgcagtcgagaatcttccgcaatgcgcgaaagcgtgacggagcaatgccgcgtgccggatgaaggtcttcggattgtaaacggctgtcgaccgggacgaatgaatgacggtaccggtagaggaagccacggctaactacgtgccagcagccgcggtaa

SEQ ID NO: 6200 - DNA, 490 bp, unidentified
  misc_feature 1..490: note = Ascusbbf_343268, encodes 16S rRNA
  source 1..490: mol_type = genomic DNA
agagtttgatcatggctcaggatgaacgctggcggcaggcttaatacatgcaagtcgaacggtaaggccgagtgcagcaatgcacgaggtacacgagtggcgcacgggtgcgtaacgcgtatgcaacctgcccccaaccgggacaaaacagctggaaacggctgctaatatcccatggtcaccggaagtggcatcacctttggtgtaaagattcattggttggggatgggcatgcgtattattaggtagttggcggggtaacggcccaccaagccgacgatgattaggggttctgagaggaaagacccccaaactggaactgggacacggtccagactcctacgggaggcagcagtagggaatattgggcaatggaggcaactctgacccagccatgccgcgtgaaggaataaggccctatgggtcgtaaacttcttttaccgcagagtaaacccggggacgcgtccccggttgagagtatgcggggaat

SEQ ID NO: 6201 - DNA, 490 bp, unidentified
  misc_feature 1..490: note = Ascusbbf_17106, encodes 16S rRNA
  source 1..490: mol_type = genomic DNA
agagtttgatcatggctcaggatgaacgctagcggcaggcctaacacatgcaagtcgaggggtaacaggcggtagcaatactgtgctgacgaccggcgcacgggtgcgtaacgcgtatgcaacctgcccgtaacagggggataaatcagggaaacttgacctaataccccatattgccaatccaccgcatgatgggttggcgaaagtttcgatggttacggatgggcatgcgtgacattagctagttggtaaggtaacggcttaccaaggcgacgatgtctaggggagctgagaggctaatcccccacactggtactgagacacggaccagactcctacgggaggcagcagtgaggaatattggtcaatggtgggaacactgaaccagccatgccgcgtgagggaggaaggccctatgggttgtaaacctcttttgcacgggagtaataaggctcatgcgtgggccgatgagagtaccgtgcgaataagc

SEQ ID NO: 6202 - DNA, 490 bp, unidentified
  misc_feature 1..490: note = Ascusbbf_76842, encodes 16S rRNA
  source 1..490: mol_type = genomic DNA
agagtttgatcctggctcaggatgaacgctagctacaggcttaacacatgcaagtcgaggggcatcatggcggtagcttgctactgctgatggcgaccggcgcacgggtgcgtaacgcgtatccaaccttcccgcgagtcagggacagcccggcgaaagtcggattaatacctgatgttctccttagatggcatcagacgaggagtaaagattaatcgcttgcggatggggatgcgtaggattagcttgccggcggggtaacggcccaccggggcgacgatccttaggggttctgagaggaaggtcccccacactggtactgagacacggaccagactcctacgggaggcagcagtgaggaatattggtcaatgggcgtaagcctgaaccagccaagtagcgtgcaggacgacggccctacgggttgtaaactgcttttatgcggggataaagtgcagcacgtgtgctgtattgcaggtaccgcatgaat

SEQ ID NO: 6203 - DNA, 490 bp, unidentified
  misc_feature 1..490: note = Ascusbbf_40656, encodes 16S rRNA
  source 1..490: mol_type = genomic DNA
agagtttgatcctggctcagattgaacgctggcggcatgctttacacatgcaagtcggacggcagcatcaagaagcttgcttcttggatggcgagtggcgaacgggtgagtaatgcatcggaatgtaccgagtaatgggggataactaatcgaaagattagctaataccgcatacgacctgagggtgaaagcaggggatcttcggaccttgcgttattcgagcagccgatgtcggattaggtagttggtggggtaaaggcctaccaagccgacgatccgtagcgggtctgagaggatgatccgccacattgggactgagacacggcccaaactcctacgggaggcagcagtggggaattttggacaatgggggcaaccctgatccagccatgccgcgtgtctgaagaaggccttcgggttgtaaaggacttttgtacgggaagaaaagggaagtgataataccactttctgctgacggtaccgtaagaat

SEQ ID NO: 6204 - DNA, 490 bp, unidentified
  misc_feature 1..490: note = Ascusbbf_41575, encodes 16S rRNA
  source 1..490: mol_type = genomic DNA
agagtttgatcctggctcaggataaacgctggcggcgtgcgtaacacatgcaagttgagcgacgacgtttctgaagtggagacatggaagggcgagcggagcagcggacgggtgagtacaacatgagaagctgtcctgaagtgggggacaacgtctggaaacggacgctaataccccataggccgagaggttaaagccgcaaggcgctttaggaggtgctcgtgtcctatcagctagttggtgaggtaagggctcaccaaggcgacgacgggtagccggcctgagagggtgtacggccacactgggactgagatacggcccagactcctacgggaggcagcagtggggaatattgggcaatgggaggaatcctgacccagcgacgccgcgtgaacgaagacggccttagggttgtaaagttcttttatgtgggaagaaggaagtgacggtaccacatgaataagccccggctaactacgtgccagcagcc

SEQ ID NO: 6205 - DNA, 490 bp, unidentified
  misc_feature 1..490: note = Ascusbbf_17228, encodes 16S rRNA
  source 1..490: mol_type = genomic DNA
agagtttgatcctggctcaggatgaacgctggcggcgtgcttaacacatgcaagtcgaacggagatatatttaagaagttttcggatggaatagatatatcttagtggcggactggtgagtaacgcgtaaacaatctgccttagagagggggacaacagatagaaatatctgctaataccgcataagaccacagacaggcatctgtcaggggtaaaaggagaaatccgctttaagatgagtttgcgtactattagctagttggtgaggtaacggcccaccaaggcgacgatggttagccggcctgagagggtgaacggccacattggaactgagatacggtccagactcctacgggaggcagcagtgaggaatattgggcaatggagggaactctgacccagcaacgccgcgtgaaggaagaaggttttcggattgtaaacttctgttataggggaaaaagaaagtgatggtaccctatgagaaagctac

SEQ ID NO: 6206 - DNA, 468 bp, unidentified
  misc_feature 1..468: note = Ascusbbf_15640, encodes 16S rRNA
  source 1..468: mol_type = genomic DNA
agagtttgatcatggctcagaacgaacgctggcggcatgcctaacacatgcaagtcgaacggctcttcggagcagtggcgcacgggtgagtaacgcgtgggaacctaccctgaggttcggaataacggctggaaacggccgctaataccggatgtgtcctgaggggcaaaggcttgccgccttgggaggggcccgcgtccgattagcttgttggtgaggtaacggctcaccaaggcgacgatcggtagctggtctgagaggatgatcagccacactgggactgagacacggcccagactcctacgggaggcagcagtggggaatattggacaatgggcgaaagcctgatccagcaatgccgcgtgtgtgatgaaggccctagggttgtaaagcactttcgccgatgacgatgatgacggtagtcggataagaagccccggctaactccgtgccagcagccgcggtaat

SEQ ID NO: 6207 - DNA, 471 bp, unidentified
  misc_feature 1..471: note = Ascusbbf_16936, encodes 16S rRNA
  source 1..471: mol_type = genomic DNA
agagtttgatcatggctcagaacgaacgctggcggcaggcctaacacatgcaagtcgaacggttccttcggggacagtggcggacgggtgagtaacgcgtgggaacgtgccttccagttcggaataacccagggaaacttgggctaataccggatacgtcctttgggagaaagattttatcgctggaagatcggcccgcgtctgattagctggttggtggggtaacggcctaccaaggcgacgatcagtagctggtctgagaggatgatcagccacactgggactgagacacggcccagactcctacgggaggcagcagtggggaatattggacaatgggcgcaagcctgatccagccatgccgcgtgagtgatgacggccttagggttgtaaagctctttcggcggggacgataatgacggtacccgcagaagaagccccggctaacttcgtgccagcagccgcggtaat

SEQ ID NO: 6208 - DNA, 490 bp, unidentified
  misc_feature 1..490: note = Ascusbbf_33917, encodes 16S rRNA
  source 1..490: mol_type = genomic DNA
agagtttgatcctggctcaggatgaacgctagctacaggcttaacacatgcaagtcgaggggcagcatgaaggaagcttgcttcctttgatggcgaccggcgcacgggtgagtaacgcgtatccaacctgccacatactcggggatagcccggtgaaaaccgaattaagacccgatggcatcctttgaggacatctgacgaggattaaaggcaacggtatgtgatggggatgcgtccgattagcttgttggcggggtaacggcccaccaaggcgacgatcggtaggggttctgagaggaaggtcccccacattggtactgagacacggaccaaactcctacgggaggcagcagtgaggaatattggtcaatgggcggaagcctgaaccagccaagtagcgtgcaggatgacggccctatgggttgtaaactgcttttgtcagggaacaaagtgaggcacgtgtgcctttttgcgtgtacctgtcgaataa

SEQ ID NO: 6209 - DNA, 490 bp, unidentified
  misc_feature 1..490: note = Ascusbbf_41139, encodes 16S rRNA
  source 1..490: mol_type = genomic DNA
agagtttgatcatggctcaggatgaacgctggcggcgcgcttaacacatgcaagtcgaacgagatgagtggcttcggtcatgagtctagtggcggacgggtgagtaacgcgtggacaacttgccttatagtgggggatagccgaaagaaatttcgattaataccgcataatacaatttggttgcatgatcagattgggaaaggctttggtcgctaaaagaaaggtccgcgtctgattagctagttggtgtggtaatggcataccaaggcaacgatcagtagctggtttgagagaatgaacagccacattgggactgagatacggcccagactcctacgggaggcagcagtggggaatattgcgcaatggaggaaactctgacgcagcgacgccgtgtaaaggatgaaggccttcgggttgtaaacttatatcgattgtgaaaagcaaggatggtagcaaagtaagaagctccggctaactacgtgccagc

SEQ ID NO: 6210 - DNA, 490 bp, unidentified
  misc_feature 1..490: note = Ascusbbf_140607, encodes 16S rRNA
  source 1..490: mol_type = genomic DNA
agagtttgatcctggctcaggatgaacgctggcggcgtgcctaacacatgcaagtcgagcgggaagcctctgattgaaacttcggtagatagaagaggtggatagcggcggacgggtgagtaacgcgtaggtaagctgccccacgcacagggatagcccggggaaacctggattaatacctgataacgcagaggagtcacatggctcttctgccaaagatttatcggcatgggatgcacctgcgtctgattagccagttggtgaggtaacggcccaccaaagcaacgatcagtagccgacctgagagggtaatcggccacattggaactgagacacggtccaaactcctacgggaggcagcagtggggaatattgcacaatgggcgcaagcctgatgcagcaacgccgcgtgagcgatgaaggtcttcggattgtaaagctctgtccttgaggacgaaaaatgacggtactcttggaggaagccccggct

SEQ ID NO: 6211 - DNA, 490 bp, unidentified
  misc_feature 1..490: note = Ascusbbf_229170, encodes 16S rRNA
  source 1..490: mol_type = genomic DNA
agagtttgatcctggctcagaacgaacgctggcggcgcgtcttaagcatgcaagtcgagcggcaaggtgcctccgggcatcctagagcggcggactggtgagtaacgcgtggatgacgcacccttgcgacggggatagcctgtggaaacacagggtaataccggataagctcagtatcgttggagggtactgaggaaaggagctattgctccgcgcgaggagcggtccgcgtcccatcagctggttggcggggtaaaggcccaccaaggcaatgacgggtacccggcctgagagggcgatcgggcacattgggactgagatacggcccagactcctacgggaggcagcagctaagaatattccgcaatgcgcgaaagcgtgacggagcgacgccgcgtggacgatgaaggccggaaggttgcagagtcctttggcgcccgaggaaacggcgggggagcggaaagcccccgaactgactgtagggcgagaa

SEQ ID NO: 6212 - DNA, 490 bp, unidentified
  misc_feature 1..490: note = Ascusbbf_975431, encodes 16S rRNA
  source 1..490: mol_type = genomic DNA
agagtttgatcatggctcaggacgaacgctggcggcgtgcttaacacatgcaagtcgaacgaagcttgacgaatgatttcttcggaatgaattctgatatgactgagtggcggacgggtgagtaacgcgtgagtaacctgcctcttggagggggatagtgtttggaaacgaacagtaataccgcataagtgcagagaaggcatcttttttgtaccaaagatttatcgccaagagatggactcgcgtctgattagatagttggtggggtaacggcccaccaagtcgacgatcagtagccggactgagaggttgaacggccacattgggactgagacacggcccagactcctacgggaggcagcagtggggaatattgcacaatgggggaaaccctgatgcagcaacgccgcgtggaggaagacggttttcggattgtaaactcctgttcttagggaagaagaaagtgacggtacctaaggagcaagccacg

SEQ ID NO: 6213 - DNA, 490 bp, unidentified
  misc_feature 1..490: note = Ascusbbf_32608, encodes 16S rRNA
  source 1..490: mol_type = genomic DNA
agagtttgatcatggctcaggatgaacgctggcggcgtgcctaacacatgcaagtcgaacgggaaccttgcaacggagacttcggtcaaagatgcaagaattctagtggcggacgggtgagtaacgcgtgggtaacctgcccttaagaggcgaataacagtgagaaatcactgctaatacgccatatgcttacggaatcgcatgattttgtgaggaaaagaatttcgcttaaggatggacccgcgtttgattagccagttggcagggtaacggcctaccaaagcaacgatcaatagccggcctgagagggtgaacggccacattggaactgagacacggtccaaactcctacgggaggcagcagtggggagtattgcacaatgggcgaaagcctgatgcagcaacgccgcgtgagtgaagaagtatttcggtatgtaaagctctatcgatggggaataagatgaaggtacccaagtaagaagccccggct

SEQ ID NO: 6214 - DNA, 490 bp, unidentified
  misc_feature 1..490: note = Ascusbbf_101943, encodes 16S rRNA
  source 1..490: mol_type = genomic DNA
agagtttgatcatggctcaggatgaacgctggcggcatgcctaagacatgcaagtcgaacgagacgaccttaggaaaactgagtgcttgcacgaagttggatcaagatcatcgtctagtggcagacgggtgagtaacacgtgggtaacctaccttcaagttggggataacagttggaaacgattgctaataccgaataaggtacttgtactgaaagaagcctttaaagcttcacttaaagatgggcctgcggcgtattaactagttggtgaggtaatggctcaccaaggtaacgatgcgtagccgaactgagaggttgaacggccacactgggactgagacacggcccagactcctacgggagacagcagttaggaatattcgtcaatgggggaaaccctgaacgagcaatgccgcgtgagtgatgaaggccctatgggttgtaaagctctgttgtatgggaagaacgtctatattaggaaatgaatatg

SEQ ID NO: 6215 - DNA, 490 bp, unidentified
  misc_feature 1..490: note = Ascusbbf_31925, encodes 16S rRNA
  source 1..490: mol_type = genomic DNA
agagtttgatcctggctcaggatgaacgctagctacaggcttaacacatgcaagtcgaggggcagcggggaggaagcttgctttctccgccggcgaccggcgaatgggtgagtaacgcgtatccaacctggcctatgctctgggatagcccttagaaatgaggattaatacgagatagtctcctttgatcgcctgagattaggagtaaagacttgtcggcataggatggggatgcgttccattagatagttggcggggtaacggcccaccaagtcgatgatggataggggttctgagaggaaggtcccccacactggtactgagacacggaccagactcctacgggaggcagcagtgaggaatattggtcaatgggcgagagcctgaaccagccaagtagcgtgaaggatgacggccctatgggttgtaaacttcttttgtcggggaataacaagcgccacgtgtggcgccctgcatgtacccggtgaat

SEQ ID NO: 6216 - DNA, 490 bp, unidentified
  misc_feature 1..490: note = Ascusbbf_49311, encodes 16S rRNA
  source 1..490: mol_type = genomic DNA
agagtttgatcctggctcaggacgaacgctggcggcacgcctaacacatgcaagtcgaacggtgaatttggtgcttgcactgaattcatagtggcggacgggtgagtaacacgtgagcaacctgccttcaagagagggatagcttctggaaacggatggtaataccttataaaatatatttgtcgcatggcatatatatcaaagatttattgcttgaagatgggctcgcgtctgattagatagttggtgaggtaacggctcaccaagtcgacgatcagtagccggactgagaggttgaacggccacattgggactgagacacggcccagactcctacgggaggcagcagtgagggatattgcacaatgggggaaaccctgatgcagcgatgccgcgtggaggaagaaggttttcggattgtaaactccttttatcagggacgataatgacggtacctgaagaaaaagctccggctaactacgtgccagca

SEQ ID NO: 6217 - DNA, 490 bp, unidentified
  misc_feature 1..490: note = Ascusbbf_50895, encodes 16S rRNA
  source 1..490: mol_type = genomic DNA
agagtttgatcctggctcaggatgaacgctagcggaacgcctaacacatgcaagtcgaacggattctgcgttgtagcaatacatagtagaattagtggcaaacgagcgagtaacgcgtgcctaacctgcccttaagatgggaacaactacggagacgtagctaaatcccaatatgctcacgatggtgaaatgccgatgcgaggaaagatttatcgcttaaggaggggggcgcgtcctatcaggtagttggttgaggtaacggctcaccaagcctatgacaggtagctggtctgagatgatgtccagccgcgatgggactgagatacggcccatactcctacgggaggcagcagtggggaatcttgcacaatggacgaaagtctgatgcagcgatcccgcgtgaaggatgaagcattacggtgtgtaaacttcttttttggtggaagacgaatgacggtacaccaagaataagagacggctaactacgtgc

SEQ ID NO: 6218 - DNA, 490 bp, unidentified
  misc_feature 1..490: note = Ascusbbf_354361, encodes 16S rRNA
  source 1..490: mol_type = genomic DNA
agagtttgatcatggctcaggatgaacgctggcggcgtgcctaacacatgcaagtcgaacggagtacagacgctgtgcggagaagtgcttgcacggaaccaaacttgtttgtacttagtggcggacgggtgagtaacgcgtggagaacctgcctcacacagggggataacagggagaaattcctgctaataccgcataagcgcacgacatggcatcatgaagtgtgaaaagatttatcggtgtgagatggctccgcgtctgattagtcagttggcggggtaacggcccaccaaagcgacgatcagtagccggcctgagagggcggacggccacattgggactgagacacggcccagactcctacgggaggcagcagtgggggatattgcacaatggggggaaccctgatgcagcgacgccgcgtgggtgaagaagtatttcggtatgtaaagccctatcagcagggaagataatgacggtacctgactaa

SEQ ID NO: 6219 - DNA, 490 bp, unidentified
  misc_feature 1..490: note = Ascusbbf_357925, encodes 16S rRNA
  source 1..490: mol_type = genomic DNA
agagtttgatcctggctcaggatgaacgctagcgacaggcctaacacatgcaagtcgaggggcagcatggagtagcaatactctgatggcgaccggcgcacgggtgcgtaacaggtgtgcaatctgtccatagtcgggggatagcccggcgaaagccgaattaatactccatgtgtcacgaagccgcatgactttgtgatgaaacgtaaggactatggatgagcacgcttctgattaggtagttggtgaggtaacggcccaccaagccgacgatcagtaggggttctgagaggaaggtcccccacattggaactgagacacggtccaaactcctacgggaggcagcagtgaggaatattggtcaatggacggaagtctgaaccagccaagtcgcgtgaaggatgaaggttctatggattgtaaacttcttttgtctgagggtaaagtcggggacgtgtccccgttggcaagtatcagacgaataagcatc

SEQ ID NO: 6220 - DNA, 490 bp, unidentified
  misc_feature 1..490: note = Ascusbbf_62037, encodes 16S rRNA
  source 1..490: mol_type = genomic DNA
agagtttgatcctggctcaggacgaacgctggcggcacgcttaacacatgcaagtcgaacgaacggagatagcttgctatcaaagttagtggcggacgggtgagtaacacgtgagcaatctgcctctaagtggggaataacgactggaaacggtcggtaataccgcataacatagctgagccgcatgacttagctatcaaagatttatcgcttagagatgagctcgcgtctgattagctagttggtgaggtaacggcccaccaaggcgacgatcagtagccggactgagaggttgaacggccacattgggactgagacacggcccagactcctacgggaggcagcagtggggaatattgcacaatgggcgcaagcctgatgcagcgatgccgcgtgagggaagaaggttttcggattgtaaacctctgttgacagggacgataatgacggtacctgttcagaaagctccggctaactacgtgccagcagc

SEQ ID NO: 6221 - DNA, 490 bp, unidentified
  misc_feature 1..490: note = Ascusbbf_97348, encodes 16S rRNA
  source 1..490: mol_type = genomic DNA
agagtttgatcatggctcaggatgaacgctggcggcgtgcctaacacatgcaagtcgaacggggatagagagaagttttcggacagacctttatcttagtggcggacgggtgagtaacgcgtggataacctgcctttttctgggggatagcagttggaaacgactgataataccgcataagctccgattcccgcatgggagccggaggaaagatttatcgggagaagatggatccgcgtctgattagccagttggcggggtaacggcccaccaaagcgacgatcagtagccggcctgagagggtgaacggccacattgggactgagacacggcccaaactcctacgggaggcagcagtggggaatattgcacaatgggcgcaagcctgatgcagcgacgccgcgtgagtgaagaagtatttcggtatgtaaagctctatcggcagggaagaaaggcccgaaagggagatgacggtacctgactaagaagc

SEQ ID NO: 6222 - DNA, 490 bp, unidentified
  misc_feature 1..490: note = Ascusbbf_60697, encodes 16S rRNA
  source 1..490: mol_type = genomic DNA
agagtttgatcatggctcaggataaacgctagcggcaggcctaacacatgcaagtcgagcggcagcggggtgtagcaatacattgccggcgagcggcggacgggtgagtaacgcgtatgcaacctgcccaccacacggagatagccgaccgaaaggacgattaaactccgatggcaccttctgggggcatccccgaaaggttaaatattcataggtggtggatgggcatgcgtggcattagttagttggcggggcaacggcccaccaagacggtgatgcctatgggttctaaaaggaagatcccacacatcggtactgagacacggaccgaactcctacgggaggcagcagtgaggaatattggacaatgggggcaaccctgatccagccaaaccgcgtgggggaaggaggtcgttaagatcgtaaaccccttttatatgggagcaatccgccgtatgtatatggcgttgagagtaccatttgaataagc

SEQ ID NO: 6223 - DNA, 490 bp, unidentified
  misc_feature 1..490: note = Ascusbbf_105248, encodes 16S rRNA
  source 1..490: mol_type = genomic DNA
agagtttgatcctggctcaggacgaacgctggcggcacgcttaacacatgcaagtcgaacggtgaaggtagcttgctaccggaacagtggcggacgggtgagtaacacgtgagcaatctgcctttaagtggggaataacgattggaaacgatcggtaataccgcataatatacatgagtcgcatgacatatgtatcaaagatttatcgcttaaagatgagctcgcgtctgattagctagttggtgcggtaacggcgtaccaaggcgacgatcagtagccggactgagaggttgaacggccacattgggactgagacacggcccagactcctacgggaggcagcagtggggaatattgcacaatggaggaaactctgatgcagcgatgccgcgtgagggaagaaggttttcggattgtaaacctctgttgacagggacgataatgacggtacctgttcagaaagctccggctaactacgtgccagcagccg

SEQ ID NO: 6224 - DNA, 490 bp, unidentified
  misc_feature 1..490: note = Ascusbbf_241805, encodes 16S rRNA
  source 1..490: mol_type = genomic DNA
agagtttgatcctggctcaggatgaacgctagcggcaggcttaacacatgcaagtcgaggggcagcggggtgtagcaatacaccgccggcgaccggcgcacgggtgcgtaacgcgtatgcaacctgcccgtaacagggggataacggggagaaatccccactaataccccgtatagcggaggggccgcatggtctttccgcgaaagcttcggcggttacggatgggcatgcgtggcattaggtagttggcggggcaacggcccaccaagcctacgatgcctaggggagctgagaggcttatcccccacactggtactgagacacggaccagactcctacgggaggcagcagtgaggaatattggtcaatggacggaagtctgaaccagccatgccgcgtgcgggaagacggccctatgggttgtaaaccgcttttccccgggagtaataagggccgtgcgcggcccgatgagagtaccgggggaataagc

SEQ ID NO: 6225 - DNA, 490 bp, unidentified
  misc_feature 1..490: note = Ascusbbf_378911, encodes 16S rRNA
  source 1..490: mol_type = genomic DNA
agagtttgatcctggctcagattgaacgctggcggcaggcctaacacatgcaagtcggacggtagcacaggggagcttgctccccgggtgacgagtggcggacgggtgagtaatgtctgggaaactgcccggtggagggggataactactggaaacggtagctaataccgcataacgtcttcggaccaaagtgggggatcttcggacctcacgccaccggatgtgcccagatgggattagctagtaggtggggtaacggctcacctaggcgacgatccctagctggtctgagaggatgaccagccacactggaactgagacacggtccagactcctacgggaggcagcagtggggaatattgcacaatgggcgcaagcctgatgcagccatgccgcgtgtatgaagaaggccttcgggttgtaaagtactttcagcggggaggaaggcggtgaggttaataacctcgccgattgacgttacccgcagaag

SEQ ID NO: 6226 - DNA, 490 bp, unidentified
  misc_feature 1..490: note = Ascusbbf_78625, encodes 16S rRNA
  source 1..490: mol_type = genomic DNA
agagtttgatcatggctcaggacgaacgctggcggcgtgcttaacacatgcaagtcgaacgaagctctcacgcttgagttttcggacaagagggtgagatgacttagtggcggactggtgagtaacgcgtgagcaacctgccctccggtgggggacaacagttggaaacgactgctaataccgcataatgtacagagaccgcatgatctttgtaccaaagctttatgtgccggaggatgggctcgcgtctgattagatagttggcggggtaacggcccaccaagtcgacgatcagtagccggactgagaggttgaacggccacattgggactgagatacggcccagactcctacgggaggcagcagtggggaatattgggcaatggacgaaagtctgacccagcaacgccgcgtgaaggaagaaggccttcgggttgtaaacttcttttgtcaaggacgataatgacggtacttgacgaataagccacgg

SEQ ID NO: 6227 - DNA, 490 bp, unidentified
  misc_feature 1..490: note = Ascusbbf_723530, encodes 16S rRNA
  source 1..490: mol_type = genomic DNA
agagtttgatcatggctcaggatgaacgctggcggcgtgcataacacattcaagtcgaacggactttcattgatagcttgctatcgatgaaagttagtggcggacgggtgagtaacgcgtgagcaacctgcctatgtgagggggacaacagttggaaacgactgctaataccgcataaagtatattgagggcatcctcgatataccaaagagattcgcacatagatgggctcgcgtccgattagatagttggtgaggtaacggcccaccaagtcgacgatcggtagccggactgagaggttgaacggccacattggaactgagagacggtccagactcctacgggaggcagcagtggggaatattgggcaatgggcgaaagcctgacccagcgacgccgcgtgagtgaagaaggtcttcggattgtaaagcttagttatcggggaagaaggaagtgacggtacccgaagagaaagccacggctaactacg

SEQ ID NO: 6228 - DNA, 490 bp, unidentified
  misc_feature 1..490: note = Ascusbbf_346473, encodes 16S rRNA
  source 1..490: mol_type = genomic DNA
agagtttgatcatggctcaggacgaacgctggcggcgtgcttaacacatgcaagtcgaacggagttaagcgctggattgatggtagcttgctaccggatttccttgtttaacttagtggcggacgggtgagtaacgcgtgagtaacctgccccggagtggggaataacgttctgaaaagaacgctaataccgcataacacatacagatcgcatggtcggtatgtcaaagatttatcgctctgggatggactcgcgtccgattagctagttggcggggtaacggcccaccaaggcgacgatcggtagccggactgagaggttgaacggccacattgggactgagacacggcccagactcctacgggaggcagcagtgggggatattgcgcaatgggggaaaccctgacgcagcaacgccgcgtggaggatgacggttttcggattgtaaactccttttatgggggacgaactaagacggtaccccatgaat

SEQ ID NO: 6229 - DNA, 490 bp, unidentified
  misc_feature 1..490: note = Ascusbbf_382838, encodes 16S rRNA
  source 1..490: mol_type = genomic DNA
agagtttgatcctggctcagaatgaacgttggcggcatggattaggcatgcaagtcgagcgagaacttcaagatagagacttcggtcaaagtcttgaagggacagcggcgaaagggtgagtaacgcgtagttacctgcctgagggtccagaatagcttcgggaaactgaaggtaatgctggataatatctccggatcaaaggtgagattccgccctcagaggggactgcgtcctactagcttgttggtggggtaatggcctaccaaggctacgatgggtagcgggcgtgagagcgtggcccgtcacactgggactgagacactgcccagacacctacgggtggctgcagtcgagaatcttcggcaatgcgcgaaagcgtgaccgagcaatgccgcgtgcgggatgacggccttcgggttgtaaaccgcgaaagtaaggaggaaggctctgtgaagagcagagtttgaccaatttacagtaaggacgggct

SEQ ID NO: 6230 - DNA, 490 bp, unidentified
  misc_feature 1..490: note = Ascusbbf_391956, encodes 16S rRNA
  source 1..490: mol_type = genomic DNA
agagtttgatcatggctcaggatgaacgctggcggcgtgcctaatacatgcaagtcgaacgagatagcaatatcgagtggcgaacgggtgagtaacacgtaggtaacctgccttacagtttgggataccctggcgaaagctaggctaataccgaataattggattggaggcatctccgatctctaaaaggggcccttaaagcctcgctgaatgatggacctgcggcgcattagctagttggtgagataacagcccaccaaggcgaggatgcgtagccgacctgagagggtgaacggccacactggaactgagacacggtccagactcctacgggaggcagcagtagggagttttcggcaatgggggcaaccctgaccgagcaacgccgcgtgaatgatgaaggtcttcggattgtaaagttctgttataagggaaaaatgatatggtgaggaaatgctccatatttgatggtaccttattagaaagccac

SEQ ID NO: 6231 - DNA, 490 bp, unidentified
  misc_feature 1..490: note = Ascusbbf_149438, encodes 16S rRNA
  source 1..490: mol_type = genomic DNA
agagtttgatcatggctcagaacgaacgctggtggcgtgccttatacatgcaagtcgagcgaggacgcagcaatgcgagccgagcggcgaacgggtgagtaacgcgtgagcaacctgccccggagtccggaatagcccttccaacggaggattaatgccggatgacgaggagcaccgagtggtgctttttccaaagcctaggcgcttcgggaggggctcgcgtccgattagctagttggcggggcagcggcccaccaaggcgacgatcggtagccggcctgagagggcgaacggccacaatgggactgagatacggcccatactcctacgggaggcagcagtagggaatattgcgcaatggggggaaccctgacgcagcaacgccacgtgtgggacgacgcctttcggggtgtaaaccactgtcagcggggactagcccgcggagcaatccgcgccgaatgtacccgcagaggaagcaccggcaaacttc

SEQ ID NO: 6232 - DNA, 354 bp, unidentified
  misc_feature 1..354: note = Ascusbbf_1732332, encodes 16S rRNA
  source 1..354: mol_type = genomic DNA
agagtttgatcatggctcaggacgaacgctggcggcgtgcctaatacatgcaagtcgagcgagccccttcgggggctagcggcggacgggtgagtaacacgtaggcaacctgcctctcagaccgggataacatagggaaacttatgctaataccggataggtttttggatcgcatgatcggaaaagaaaagatggcttcggctatcactgggagatgggcctgcggcgcattagctagttggtggggtaacggcccaccaaggcgacgatgcgtagccgacctgagagggtgaccggccacactgggactgagacacggcccagactcctacgggagccagcagccgcggtaat

SEQ ID NO: 6233 - DNA, 490 bp, unidentified
  misc_feature 1..490: note = Ascusbbf_197010, encodes 16S rRNA
  source 1..490: mol_type = genomic DNA
agagtttgatcctggctcaggatgaacgctagcggcaggcttaacacatgcaagtcgaggggcagcgcgaggtagcaataccttggcggcgaccggcgaaagggtgagtaacgcgtgagcaacgtgcccgatactgggggatagtcattggaaacgatgtgtaataccccgtaacacaatggtccgcatgggctgttgttgagagatttatcgttatcggatcggctcgcgtaccattagctagttggtagggtaacggcctaccaaggcgacgatggttaggggttctgagaggaaggtcccccacattggaactgagacacggtccagactcctacgggaggcagcagtgaggaatattggtcaatggccgagaggctgaaccagccatgccgcgtgcgggaggacggccctatgggttgtaaaccgcttttgttggggagcaataaggtggacgtgtccgccgacgagagtacccagcgaataagca

SEQ ID NO: 6234 - DNA, 490 bp, unidentified
  misc_feature 1..490: note = Ascusbbf_190515, encodes 16S rRNA
  source 1..490: mol_type = genomic DNA
agagtttgatcatggctcaggatgaacgctggcggcgtgcttaacacatgcaagtcgaacggactttactgaaaagagggcttgcccgatggaaggtaaagttagtggcggacgggtgagtaacgcgtgggcaacctgccttacacagggggacaacagttggaaacgactgctaataccgcataagccggtagtgccgcatggcacatccggaaaagattcatcggtgtaagatgggcccgcgttggattagttagttggcggggtaacggcccaccaagaccgcgatccatagccgacctgagagggtgatcggccacattgggactgagacacggcccaaactcctacgggaggcagcagtggggaatattgcgcaatgggggaaaccctgacgcagcaacgccgcgtgagtgaagaagtatttcggtatgtaaagctctatcagcagggaagaagatgacggtacctgcagaagaagtcccggcta

SEQ ID NO: 6235 - DNA, 490 bp, unidentified
  misc_feature 1..490: note = Ascusbbf_1079146, encodes 16S rRNA
  source 1..490: mol_type = genomic DNA
agagtttgatcatggctcaggacgaacgctggcggcacgcttaacacatgcaagtcgaacggtgacggtttcaagcttgcttgaaactcgatcagtggcggacgggtgagtaacacgtgagcaatctgcctttaagtggggaataacgattggaaacggtcggtaataccgcataaaatagctgaaccgcatgatttggctatcaaagatttatcgcttaaagatgagctcgcgtctgattagctagttggtgaggtaacggcccaccaaggcgacgatcagtagccggactgagaggttgaacggccacattgggactgagacacggcccagactcctacgggaggcagcagtggggaatattgcacaatgggcgcaagcctgatgcagcgatgccgcgtgagggaagaaggttttcggattgtaaacctctgttgacagggacgataatgacggtacctgttcagaaagctccggctaactacgtgcc

SEQ ID NO: 6236 - DNA, 490 bp, unidentified
  misc_feature 1..490: note = Ascusbbf_1263310, encodes 16S rRNA
  source 1..490: mol_type = genomic DNA
agagtttgatcctggctcaggatgaacgctggcggcgtgtttaacacatgcaagtcgagcgagaagcttctcagcagattcttcggatgatgcagagttgcggaagcggcggacgggtgagtaacgcgtaggcaacctgccccctgcagagggatagcctcgggaaaccgggattaaaacctcataacgcgcgaccgggacatcccggacgcgccaaagatttatcggcaggggatgggcctgcgtctgattagttagttggtggggtaacggcctaccaaggcgacgatcagtagccgacctgagagggtgatcggccacattggaactgagacacggtccaaactcctacgggaggcagcagtggaggatcttgcacaatgggcgcaagcctgatgcagcaacgccgcgtgaaggatgaaggcccttgggtcgtaaacttctgttctaagggaagataatgacggtaccttaggagcaagtcccggct

SEQ ID NO: 6237 - DNA, 490 bp, unidentified
  misc_feature 1..490: note = Ascusbbf_184531, encodes 16S rRNA
  source 1..490: mol_type = genomic DNA
agagtttgatcatggctcaggatgaacgctagcggcaggcttaacacatgcaagtcgaggggcagcgcgcgggtagcaatacctgtggcggcgaccggcgcaagggtgcgtaacgcgtgagcaacatgcccgtgtcagggggataagcgatggaaacgtcgtctaataccgcataacaacaggaaggacatcctttttgtttgaaagatacgtcggacacggattggctcgcgagacattagctagacggcggggtaacggcccaccgtggcgacgatgtctaggggttctgagaggaaggtcccccacactggaactgagacacggtccagactcctacgggaggcagcagtgaggaatattggacaatggtcggaagactgatccagccatgccgcgtgaaggcagacggtcctatggattgtaaacttcttttgtacgggagcaataaggatcacgtgtggtccgatgagagtaccgtacgaataag

SEQ ID NO: 6238 - DNA, 490 bp, unidentified
  misc_feature 1..490: note = Ascusbbf_657443, encodes 16S rRNA
  source 1..490: mol_type = genomic DNA
agagtttgatcctggctcaggatgaacgctagcgacaggcttaacacatgcaagtcgaggggcagcgcggcgtgagcaatcatgctggcggcgaccggcgcactggtgagtaacacgtatgcaacctgccccctgccggggaataacccagggaaacctggcctaatgccgcataacactggcggggacatccccgccggttgaaagctccggcggcaggggatgggcatgcgccgcattagcttgttggtggggcgacggcccaccaaggcgacgatgcgtaggggttctgagaggaaggtcccccacactggtactgagacacggaccagactcctacgggaggcagcagtgaggaatattggtcaatgggcgcgagcctgaaccagccaagtcgcgtgagggacgacggccctacgggttgtaaacctcttttgccggggagcaaccgcccgcacgcgtgcgggtctgagcgtacccggagaaaaag

SEQ ID NO: 6239 - DNA, 490 bp, unidentified
  misc_feature 1..490: note = Ascusbbf_717945, encodes 16S rRNA
  source 1..490: mol_type = genomic DNA
agagtttgatcatggctcaggacgaacgctggcggcgtgcttaacacatgcaagtcgagcggggataacggaactgaagcctagcgaagaactgttatttcagcggcggacgggtgagtaacgcgtgagcaatctgtcccagacagggggataacacttggaaacaggtgctaataccgcataagaccacgatgtcacatgacattgaggtaaaaggagcaatccggtttggggtgagctcgcgtccgattagctagttggcgaggtaacggcccaccaaggcgacgatcggtagccgacctgagagggtgatcggccacattggaactgagacacggtccaaactcctacgggaggcagcagtgggaatattgggcaatgggcgaaagcctgacccagcaacgccgcgtgagggaagacggttttcggattgtaaacctctgtcctcagggacgaaggaagtgacggtacctgaggaggaagccccggc

SEQ ID NO: 6240 - DNA, 490 bp, unidentified
  misc_feature 1..490: note = Ascusbbf_411305, encodes 16S rRNA
  source 1..490: mol_type = genomic DNA
agagtttgatcatggctcaggacgaacgctggcggcgtgcctaatacatgcaagtcgagcggagctagtgttttcttcggaaaacacgatgcttagcggcggacgggtgagtaacacgtaggtaacctgcccataagaccgggataacattcggaaacggatgctaataccggatacgcgattctctcgcatgagggagttgggaaaggcggagcaatctgtcacttatggatggacctgcggcgcattagctagttggtgaggtaacggctcaccaaggcgacgatgcgtagccgacctgagagggtgatcggccacactgggactgagacacggcccagactcctacgggaggcagcagtagggaatcttccgcaatggacgaaagtctgacggagcaacgccgcgtgagtgatgaaggttttcggatcgtaaagctctgttgccagggaagaacgctagagagagtaactgctctttaggtgacggt

SEQ ID NO: 6241 - DNA, 490 bp, unidentified
  misc_feature 1..490: note = Ascusbbf_709203, encodes 16S rRNA
  source 1..490: mol_type = genomic DNA
agagtttgatcatggctcaggatgaacgctggcggcgtgcctaacacatgcaagtcgagcggagatgtacgccggaggaggtttcggccgaattcatgtacatcttagcggcggatgggtgaggaacgcgtgggcaacctgcccttcacagggggataacagctggaaacggctgttaataccgcatatgctcacagcaccgcatggtgcagggaggaaagcgatcagtggtgaaggatggacccgcgtcggattagccagttggtggggtaacggcctaccaaagcgatgatccgtagccggcctgagagggcgaccggccacattgggactgagacacggcccaaactcctacgggaggcagcagtgggggatattgcacaatggggggaaccctgatgcagcgacgccgcgtgaaggaagaagtgcttcggcatgtaaactttctttcagcagggaagaagatgacggtacctgcagaagaagcccc

SEQ ID NO: 6242 - DNA, 490 bp, unidentified
  misc_feature 1..490: note = Ascusbbf_213018, encodes 16S rRNA
  source 1..490: mol_type = genomic DNA
agagtttgatcatggctcaggacgaacgctggcggcacgcttaacacatgcaagtcgaacggtgaaagtacttcggtactggatcagtggcggacgggtgagtaacacgtgagcaatctgcctttaagaggggaataacgactggaaacggtcggtaataccgcataacatatcgaagccgcatgactttgatatcaaagatttatcgcttaaagatgagctcgcgtctgattagctagttggtgaggtaacggcccaccaaggcgacgatcagtagccggactgagaggttgaacggccacattgggactgagacacggcccagactcctacgggaggcagcagtggggaatattgcacaatgggcgcaagcctgatgcagcgatgccgcgtgagggaagaaggttttcggattgtaaacctctgttgacagggacgataatgacggtacctgttcagaaagctccggctaactacgtgccagcagccg

SEQ ID NO: 6243 - DNA, 490 bp, unidentified
  misc_feature 1..490: note = Ascusbbf_122661, encodes 16S rRNA
  source 1..490: mol_type = genomic DNA
agagtttgatcatggctcaggacgaacgctggcggcgtgcttaacacatgcaagtcgagcggaaaggccccttcgggggtactcgagcggcgaacgggtgagtaacacgtgagcaacctgcccctgactctgggataagcctgggaaaccgggtctaataccggatacgaccattgcgggcatccgttggtggtggaaagttttttcggtcggggatgggctcgcggcctatcagcttgttggtggggtgacggcctaccaaggcgacgacgggtaaccggcctgagagggcgaccggtcacactgggactgagacacggcccagactcctacgggaggcagcagtggggaatattgcgcaatgggcggaagcctgacgcagcgacgccgcgtgggggatgacggccttcgggttgtaaacctctttcagcggggacgaagccctttggggtgacggtacctgcagaagaagcgccggctaactacgtgc

SEQ ID NO: 6244 - DNA, 490 bp, unidentified
  misc_feature 1..490: note = Ascusbbf_1875326, encodes 16S rRNA
  source 1..490: mol_type = genomic DNA
agagtttgatcatggctcaggattaacgctggcggcatgcctaagacatgcaagtcgaacggagtgccccattgaagtcagatgaagcggaagagcttgctcggaagtggatgaagacggaagtggattttgcactcagtggcgaacgggtgagtaacacgtgggttacctgcctctaagatggggacaacagttggaaacgactgctaataccgaatgtgatagagatattaaaggagcctttaaagcttcgcttagagatgggcctgcggcgtattagctagttggtggggcaatggcctaccaaggcaacgatgcgtagccggactgagaggttgaacggccacactgggactgagacacggcccagactcctacgggagacagcagttaggaatattcggcaatgggggaaaccctgaccgagcaatgccgcgtgtgagaagaaggtcctctggattgtaaatcacttttattgagaaagaaatgt

SEQ ID NO: 6245 - DNA, 490 bp, unidentified
  misc_feature 1..490: note = Ascusbbf_246663, encodes 16S rRNA
  source 1..490: mol_type = genomic DNA
agagtttgatcatggctcaggatgaacgctagcggcaggcttaacacatgcaagtcgaggggcagcgcgggtagcaatatctggcggcgaccggcgaaagggtgagtaacgcgtgagcaacgtgcccgtctgagggggatagtcattggaaacgatgcgtaataccccgtaacaacagtcaccgcatggtgggtgtttgaaagatttattgcagacggatcggctcgcgtaccattagctagttggcggggtaacggcccaccaaggcaacgatggttaggggttctgagaggaaggtcccccacattggaactgagacacggtccagactcctacgggaggcagcagtgaggaatattggacaatggccgggaggctgatccagccatgccgcgtgcgggaagacggccctatgggttgtaaaccgcttttgtcggggagcaataagtagtacgcgtactacgatgagagtacctggcgaataagcatc

SEQ ID NO: 6246 - DNA, 490 bp, unidentified
  misc_feature 1..490: note = Ascusbbf_1150037, encodes 16S rRNA
  source 1..490: mol_type = genomic DNA
agagtttgatcctggctcaggacgaacgctggcggcgtgcctaacacatgcaagtcgaacggttctagagactagactgtgggtgcctacataaaggagaagagagaggcatttagagtctagtatctaggatagtggcggacgggtgagtaacgcgtgagtaacctgccttagagagggggataacgttcggaaacggacgctaataccgcataacatcagaagatcgcatggttttcggatcaaaggagcaatccgctttaagatggactcgcgtccgattagctagttggtggggtaaaggcctaccaaggcaacgatcggtagccggactgagaggttgaacggccacattgggactgagacacggcccagactcctacgggaggcagcagtgggggatattgcacaatgggggaaaccctgatgcagcaacgccgcgtgagggaagaaggttttcggattgtaaacctctgtcgtaggtgaagaa

SEQ ID NO: 6247 - DNA, 490 bp, unidentified
  misc_feature 1..490: note = Ascusbbf_221789, encodes 16S rRNA
  source 1..490: mol_type = genomic DNA
agagtttgatcctggctcagaacgaacgctggcggtatgcttaacacatgcaagtcgcacgagaaagttcttcggaatgagtaaagtggcgtacgggtgagtaatatataggaatctacccagtaatgaggaataagcactggaaacggtgtctaataccacatactaccgatttatcgggaaaggtttaatcttcgggttaaactgttattggatgagcctatatctgattagctagttggtggggtaaaggcctaccaaggcgatgatcagtagctgatctgagagggtgatcagccacattgggactgcgacacggcccaaactcctacgggaggcagcagtggggaatattggacaatgggcgaaagcctgatccagcaataccgcgtgaacgacgaaggccttcgggttgtaaagttcttttagtaggaaagataatgacggtacctacagaaaaagcaccggctaacttcgtgccagcagccgc

SEQ ID NO: 6248 - DNA, 490 bp, unidentified
  misc_feature 1..490: note = Ascusbbf_294338, encodes 16S rRNA
  source 1..490: mol_type = genomic DNA
agagtttgatcctggctcaggatgaacgctggcggcgtgcttaacacatgcaagtcgaacggttaaggcaccttcgggtgcgcatagagtggcgaacgggtgagtaacacgtgaccaacctgccccccgcaccgggacaaccgccggaaacggcggctaataccggatgctccgggttccccgcatggggtccccgggaaagcccaggcggcgggggatggggtcgcggcccatcaggtagttggcggggtgacggcccaccaagcttacgacgggtagccgggctgagaggccgaccggccacattgggactgagatacggcccagactcctacgggaggcagcagtggggaattttgcgcaatgggggcaaccctgacgcagcaacgccgcgtgcgggatggaggccttcgggttgtaaaccgctttcagcagggaagaagccagacggtacctgcagaagaagccccggctaaatacgtgccagcag

SEQ ID NO: 6249 - DNA, 490 bp, unidentified
  misc_feature 1..490: note = Ascusbbf_151945, encodes 16S rRNA
  source 1..490: mol_type = genomic DNA
agagtttgatcatggctcaggacgaacgctggcggtgtgcttaatacatgcaagtcgagcggaagaaaggggcttgctcctttctttagcggcggacgggtgagtaacgcgcgagcaacctgcctatatcaacggaataacacatagaaatgtgtgctaatgccgtataagaccacagtaaggcatcttacagcggtaaaagatttatcggatatagatgggctcacgtaccattagatagttggtagtgtaacggactaccaagtcgacgatggttagccgacctgagagggtgatcggccacattggaactgagatacggtccagactcctacgggaggcagcagtagggaatattgggcaatggaggcaactctgacccagcaacaccgcgtgaatgatgaaggtcttcggattgtaaagttctgtgatgggggacgaaaaaactgacggtaccccaatagcaagccacggctaactacgtgccagc

SEQ ID NO: 6250 - DNA, 490 bp, unidentified
  misc_feature 1..490: note = Ascusbbf_738230, encodes 16S rRNA
  source 1..490: mol_type = genomic DNA
agagtttgatcatggctcaggacgaacgctggcggcgtgcttaacacatgcaagtcgagcggggataacggaactgagaacttcggttggatgatctgttattctagcggcggacgggtgagtaacgcgtgagcaatctgtcccagacagggggataacacttggaaacaggtgctaataccgcataagaccacggagcgacatcgctttgaggtaaaaggagtaatccggtttggggtgagctcgcgtccgattagctagttggcgaggtaacggcccaccaaggcgacgatcggtagccgacctgagagggtgatcggccacattggaactgagacacggtccaaactcctacgggaggcagcagtgggaatattgggcaatgggcgaaagcctgacccagcaacgccgcgtgagggaagaaggttttcggattgtaaacctctgtcctcagggacgaaggaagtgacggtacctgaggaggaagccc

SEQ ID NO: 6251 - DNA, 490 bp, unidentified
  misc_feature 1..490: note = Ascusbbf_419191, encodes 16S rRNA
  source 1..490: mol_type = genomic DNA
agagtttgatcatggctcaggacgaacgctggcggcgtgcctaacacatgcaagtcgaacgaagctgcgatgaaggaggcttcggccaatggattcgtagacttagtggcggacgggtgagtaatgcgtgagcaacctgcccttcagagggggacaacagttggaaacgactgctaataccgcatgacatctacggaaggcatcttgtgtagatcaaagatttatcgctgaaggatgggctcacgtctgattagctagttggtgaggtaacggctcaccaaggctgcgatcagtagccggactgagaggttgaacggccacattgggactgagatacggcccagactcctacgggaggcagcagtggggaatattgggcaatgggcgcaagcctgacccagcaacgccgcgtgaaggaagaaggctttcgggttgtaaacttcttttatgaggaacgaaggacgtgacggtacctcatgaataagccacg

SEQ ID NO: 6252 - DNA, 490 bp, unidentified
  misc_feature 1..490: note = Ascusbbf_730938, encodes 16S rRNA
  source 1..490: mol_type = genomic DNA
agagtttgatcatggctcaggatgaacgctggcggcgtgcctaacacatgcaagtcgagcgggagtatgtggagcagagattcgtcaaagcaagacatacgagagcggcggacgggtgagtaacgcgtaggtaacctaccttaagctgagggataacccagggaaacccgggataataccacataatgcgggggagtcacatggtcccctcgccaaagatttatcggcataagatggacctgcgtctgattagccagttggtggggtaacggcctaccaaagcaacgatcagtagccgacctgagagggtgatcggccacattggaactgagacacggtccaaactcctacgggaggcagcagtggggaatattgcacaatgggcgcaagcctgatgcagcaacgccgcgtgagcgaagaaggtcttcggatcgtaaagctctgtcctaagggacgaagaagtgacggtaccttaggaggaagccccggc

SEQ ID NO: 6253 - DNA, 490 bp, unidentified
  misc_feature 1..490: note = Ascusbbf_151670, encodes 16S rRNA
  source 1..490: mol_type = genomic DNA
agagtttgatcctggctcaggacgaacgctggcggcgtgcttaacacatgcaagtcgagcggaaaggcctttcggggtactcgagcggcgaacgggtgagtaacacgtgagtgacctgcccttcactttgggataagccctggaaacggggtctaataccgaatattcatcactggctgcatggctggtggtggaaagcttttgcggtgaaggatgggctcgcggactatcagcttgttggtggggtgatggcctaccaaggctttgacggttagccggcctgagagggtgtccggccacactgggactgagacacggcccagactcctacgggaggcagcagtggggaatattgcgcaatgggcgaaagcctgacgcagcgacgccgcgtgagggatgacggccttcgggttgtaaacctctttcggtagggacgaagcgaaagtgacggtacctgcagaagaagcaccggccaactacgtgccagcag

SEQ ID NO: 6254 - DNA, 360 bp, unidentified
  misc_feature 1..360: note = Ascusbbf_332212, encodes 16S rRNA
  source 1..360: mol_type = genomic DNA
agagtttgatcatggctcaggatgaacgctagcggcaggcttaacacatgcaagtcgaggggcagcgcggggtagcaatactctggcggcgaccggcgaaagggtgagtaacgcgtgagcaacgtgcccgtatgtgggggatagtcgatggaaacgtcgcgtaataccccgtaacacaaatcttcgcatggggatttgttgaaagattcattgcatacggatcggctcgcgtgccattaggtagacggcggggtaacggcccaccgtgccgacgatggctaggggttctgagaggaaggtcccccacattggaactgagacacggtccagactcctacgggagccagcagccgcggtaat

SEQ ID NO: 6255 - DNA, 490 bp, unidentified
  misc_feature 1..490: note = Ascusbbf_1566992, encodes 16S rRNA
  source 1..490: mol_type = genomic DNA
agagtttgatcatggctcagaacgaacgctggtagcgtggattaggcatgcaagtcgaacgggatccggaaggcagcaatgtcggccggtgagagtggcggaagggcgaggaacacgtgggcaacctgtccttgaggtggggaaaaccgctggaaacggcggctaataccgaatgtggcgccgggaggcatcttccgagcgccaaagggggcgaaagctccccctcatcgaggggctcgcgcaccatcagcttgttggcggggtaacggcccaccaaggcttacggttagctggtctgagaggatggccagccgcactgggactgagatactgcccagactcctacgggaggctgcagtcgaggatcattcgcaatgggcgaaagcctgacgatgcgacgctgcgtggaggatgaaggccttcgggttgtaaactcctgtcatgagggaaaaggagaacctgcccaatacgcaggggatttgatggtacc

SEQ ID NO: 6256 - DNA, 490 bp, unidentified
  misc_feature 1..490: note = Ascusbbf_438876, encodes 16S rRNA
  source 1..490: mol_type = genomic DNA
agagtttgatcctggctcaggatgaacgctggcggcgtgcctaatacatgcaagtcgagcgagaaatcttttaaagattcttcggatgaattaaaaggcggaaagcggcggacgggtgagtaacgcgtaggcaacctgccctttgcacagggatagccactggaaacggtgattaatacctgataatgcagttctgtagcatttcagaactgccaaagatttatcggcagaggatgggcctgcgtctgattagctggttggtgaggtaacggcccaccaaggcgacgatcagtagccgacctgagagggtgatcggccacattggaactgagacacggtccaaactcctacgggaggcagcagtagggaatcttgcacaatgggcgcaagcctgatgcagcaacgccgcgtgagcgatgaaggcccttcgggtcgtaaagctctgtcctaggggaagaaacaaatgacggtacccttggaggaagccccg

SEQ ID NO: 6257 - DNA, 490 bp, unidentified
  misc_feature 1..490: note = Ascusbbf_314242, encodes 16S rRNA
  source 1..490: mol_type = genomic DNA
agagtttgatcatggctcaggatgaacgctggcggcgtgcctaacacatgcaagtcgagcgagaagagaatgacctattcttcggatgaagccattctcggacagcggcggacgggtgagtaacacgtaggaaacctgccctttactgggggatagccgagggaaacttcgagtaataccccataacgcgttatgatcgcatgatcgaaacgccaaagatttatcggtaagggatggtcctgcgtccgattagccagttggtgaggtagcggctcaccaaagcgacgatcggtagccggcctgagagggcggacggccacattggaactgagacacggtccagactcctacgggaggcagcagtggggaatattgcacaatggaggaaactctgatgcagcaacgccgcgtgagcgaagaaggtcttcggatcgtaaagctctgtccttggggaagaaacaaatgacggtacccttggaggaagccccgg

SEQ ID NO: 6258 - DNA, 490 bp, unidentified
  misc_feature 1..490: note = Ascusbbf_1725526, encodes 16S rRNA
  source 1..490: mol_type = genomic DNA
agagtttgatcctggctcagaatgaacgttggcggcatggattaggcatgcaagtcgagcgagaagagtcatttgcttgcatttgactcggaaagcggcgtaagggtgagtaacgcgtagttacctacctccgggtccggaatagctgcgggaaactgcaggtaatgccggataacatctcaggatcaaaggtgagattccgcccggagaggggactgcgtcctactagcttgttggtggggtaatggcctaccaaggcttcgatgggtagcgggcgtgagagcgtggcccgtcacactgggactgagacactgcccagacacctacgggtggctgcagtcgagaatcttcggcaatgggcgaaagcctgaccgagcaatgccgcgtgcgggatgaaggccctcgggttgtaaaccgcgaaagtaaggaggaaggacctgcgaagagcaggttttgaccgatctacagtaaggacgggctaagttcgtgc

SEQ ID NO: 6259 - DNA, 490 bp, unidentified
  misc_feature 1..490: note = Ascusbbf_1725709, encodes 16S rRNA
  source 1..490: mol_type = genomic DNA
agagtttgatcctggctcaggattaacgctggcggcgtgcataacacattcaagtcgaacggacggaagagcttcggttcttacgtcagtggcggacgggtgagtaacgcgtgagcaatctgccctttacagcgggataacacagagaaatttgtgctaatacggcataacatatcggagtcgcatggcattggtatcaaagatttatcggtaaaggatgagctcgcgtccgattagatagttggtgacggtaacggcgcaccaagtcgacgatcggtagccggactgagaggtcgaacggccacattgggactgagacacggcccagactcctacgggaggcagcagtggggaatattggacaatgggggaaaccctgatccagcgacgccgcgtgaaggaagaaggccttcaggttgtaaacttcagttagcagggaagaaagcaatgacggtacctgcagggaaagccacggctaactacgtgccag

SEQ ID NO: 6260 - DNA, 490 bp, unidentified
  misc_feature 1..490: note = Ascusbbf_769782, encodes 16S rRNA
  source 1..490: mol_type = genomic DNA
agagtttgatcatggctcaggatgaacgctggcggcatgcctaagacatgcaagtcaagcggagtgacccattgaagttggagtgcttgcacaaagacggatttggattttcactcagcggcagacgggtgagtaacgcgtgggtaatctacctcaaagactgggataacttctggaaacggatgctaataccggatgattcatatttagataactagatatgctaaaaggagcttttgcttcactttgagatgagcttgcgttgtattagctagttggtggggtaatggcctaccaaggcaacgatgcatatccgagctgagaggctgatcggacacattgggactgagacacggcccagactcctacgggagacagcagttaggaatattcgtcaatgggggaaaccctgaacgagcaatgccgcgtgaatgacaatcctctggattgtaaagttctgttgtaaaggaagaaaccttactataggtaa

SEQ ID NO: 6261 - DNA, 490 bp, unidentified
  misc_feature 1..490: note = Ascusbbf_1712151, encodes 16S rRNA
  source 1..490: mol_type = genomic DNA
agagtttgatcatggctcaggatgaacgctggcggcgcgcataacacatgcaagtcgaacggagtgtgattgaaacctagtgatatcacacttagtggcggacgggtgagtaaagcgtgggtaacctgcctgatattgggggacaacagttagaaatgactgctaataccgcataagtcattgaggaggcatctctttaatgggaaaggaaatatccgataccagatggacccgcgtctgattagctagttggtgaggtaacggcccaccaaggcgacgatcagtagccgaactgagaggttgaccggccacattgggactgaggcacggcccaaactcctacgggaggcagcagtggggaatattgcacaatggggggaaccctgatgcagcgacgccgcgtgagtgatgaagtatttcggtatgtaaagctctatcgatggggaagaaaatgacggtacccaagtaagaagccccggctaactacgtg

SEQ ID NO: 6262 - DNA, 490 bp, unidentified
  misc_feature 1..490: note = Ascusbbf_302905, encodes 16S rRNA
  source 1..490: mol_type = genomic DNA
agagtttgatcatggctcaggatgaacgctagctacaggcttaacacatgcaagtcgaacggagcttagcggaagcttgcttctgcgaaagcttagtggcggacgggtgagtaacgcgtgagtaacctgccttaaagagggggataacacagagaaatttgtgctaataccgcataatgtagcgaagccgcatgactttgctaccaaaggtcagccgctttaagatggactcgcgtccgattaggtagttggtgaggtaacggcccaccaagccgacgatcggtagccggactgagaggtcgaacggccacattgggactgagacacggcccagactcctacgggaggcagcagtagggaatattgcgcaatgggggcaaccctgacgcagcaataccgcgtgaaggatgacggttttcggattgtaaacttcagcaagcagggaagaaaaaaatgacggtacctgaacaaaagccacggctaactacgt

SEQ ID NO: 6263 - DNA, 490 bp, unidentified
  misc_feature 1..490: note = Ascusbbf_3663, encodes 16S rRNA
  source 1..490: mol_type = genomic DNA
agagtttgatcctggctcaggataaacgctggcggcgcacataagacatgcaagtcgaacggaagtcgttataaaatgaattgaagaattctctgattgaagttttataacaatggctttagtggcggactggtgagtaatgtataagtaacctgcctattagaggggaacaacagttggaaacgactgctaataccgcatatgccataggaaccgcatggttctggtgggaaaggagcaatccgctgatagatggacttatatctgattagttagttggtagggtaacggcctaccaagacgacgatcagtagccggactgagaggttaaacggccacattgggactgagatacggcccagactcctacgggaggcagcagtcgggaatattgcgcaatggaggaaactctgacgcagtgacgccgcgtgcaggaagaaggttttcggattgtaaactgctttagacagggaagaaaaaagacagtacc

SEQ ID NO: 6264 - DNA, 490 bp, unidentified
  misc_feature 1..490: note = Ascusbbf_34526, encodes 16S rRNA
  source 1..490: mol_type = genomic DNA
agagtttgatcatggctcaggatgaacgctggcggcgtgcgtaacacatgcaagttgagcgacgacgcatctgaagtggcaacatggaaggtgcgagcggagcagcggacgggtgagtataacatgagaagctgtcctctggtggggggcaacgtctagaaatggacgctaataccccataggccgaaaggttaaagcagcaatgtgccagaggaggtgctcgtgccctatcagctagttggtgaggtaatggctcaccaaggcgacgacgggtagccggcctgagagggtgtccggccacactgggactgagatacggcccagactcctacgggaggcagcagtggggaatattgggcaatgggagaaatcctgacccagcgacgccgcgtgaacgaagaaggccttcgggtcgtaaagttcttttatgcgggaagaagaaagtgacggtaccgcatgaataagccccggctaactacgtgccagcagc

SEQ ID NO: 6265 - DNA, 490 bp, unidentified
  misc_feature 1..490: note = Ascusbbf_16867, encodes 16S rRNA
  source 1..490: mol_type = genomic DNA
agagtttgatcctggctcaggataaacgctggcggcgcacataagacatgcaagtcgaacgaacttaatagaaatgtttacatttttaagcggttagtggcggactggtgagtaacatgtaagcaatctgcctatcagaggggaataacagtgagaaatcattgctaataccgcatatgccatagaaatcgcatgattttagtgggaaaggagcaatccgctgatagatgagcttgcacctgattagctagttggtggggtaaaggcctaccaaggcgacgatcagtagccggactgagaggttgaacggccacattgggactgagatacggcccagactcctacgggaggcagcagtcgggaatattgcgcaatggaggaaactctgacgcagtgacgccgcgtatgggaagaaggttttcggattgtaaaccattttagacagggaagaaaaaagacagtacctgtagaataagctccggctaactac

SEQ ID NO: 6266 - DNA, 490 bp, unidentified
  misc_feature 1..490: note = Ascusbbf_129482, encodes 16S rRNA
  source 1..490: mol_type = genomic DNA
agagtttgatcatggctcaggatgaacgctagcggcaggcctaacacatgcaagtcgaggggtaaaggcagcttgctgctttgagaccggcgcacgggtgcgtaacgcgtatgcaatctaccttatactaagggatagcccggagaaatccggattaataccttatggtttttatgaatagcattatttatagaataaagatttatcggtataagatgagcatgcgtcccattagttagttggtgtggtaacggcacaccaagacgatgatgggtaggggtcctgagagggagatcccccacactggtactgagacacggaccagactcctacgggaggcagcagtgaggaatattggtcaatggaggcaactctgaaccagccatgccgcgtgcaggatgacggtcctatggattgtaaactgcttttgtacgggaagaaaaagagctacgtgtagtttattgacggtaccgtaagaataaggatcggc

SEQ ID NO: 6267 - DNA, 490 bp, unidentified
  misc_feature 1..490: note = Ascusbbf_235447, encodes 16S rRNA
  source 1..490: mol_type = genomic DNA
agagtttgatcatggctcaggacgaacgctggcggcgtgcctaacacatgcaagtcgagcgaagcttttaaagtgaattctttcgggatgaaactttaattgtcttagcggcggacgggtgagtaacgcgtgagaaacctgcctttcacaaagggatagcctcgggaaactgggattaataccttatgatacttaactaccgcatggtagagaagtcaaagcgtaaagcggtgaaagatggtctcgcgtcccattagttagttggtgaggtaacggctcaccaagactacgatgggtagccggcctgagagggtgaacggccacactggaactgagacacggtccagactcctacgggaggcagcagtggggaatattgcacaatggaggaaactctgatgcagcgacgccgcgtgaacgatgaaggctttcgggtcgtaaagttctgtcctaggggacgataatgacggtaccctaggaggaagccccg

SEQ ID NO: 6268 - DNA, 490 bp, unidentified
  misc_feature 1..490: note = Ascusbbf_1023866, encodes 16S rRNA
  source 1..490: mol_type = genomic DNA
agagtttgatcatggctcaggacgaacgctggcggcacgcctaacacatgcaagtcgaacggagaaaatagcttcggttgttttcttagtggcggacgggtgagtaacacgtgaggaacctgcctctgagagtgggatagcttctggaaacggatggtaataccgcataacatagcgaaaccgcatgattttgctatcaaagtatttcgctcagggatggcctcgcgtctgattagatagttggtgaggtaacggctcaccaagtcgacgatcagtagccggactgagaggttgaacggccacattgggactgagacacggcccagactcctacgggaggcagcagtgggggatattgcacaatgggggaaaccctgatgcagcgatgccgcgtggaggaagaaggttttcggattgtaaactcctgtcgtaagggaagaggaaggactgtaccttacaagaaagctccggctaactacgtgccagcagc

SEQ ID NO: 6269 - DNA, 490 bp, unidentified
  misc_feature 1..490: note = Ascusbbf_377989, encodes 16S rRNA
  source 1..490: mol_type = genomic DNA
agagtttgatcctggctcaggatgaacgctagcgataggcttaacacatgcaagtcgaggggcagcagggacttcggtctgctggcgaccggcgcacgggtgcgtaacgcgtatgcaacttgcctcacacagggggataacccgttgaaagacggactaataccgcatacacttattggatggcatcatttgataaggaaagatttattggtgtgagataggcatgcgtcccattagctagttggtgaggtaacggctcaccaaggcgacgatgggtaggggaactgagaggttgaacccccacactggtactgagacacggaccagactcctacgggaggcagcagtgaggaatattggtcaatgggcgagagcctgaaccagccaagtcgcgtgaaggatgacggtcttatggattgtaaacttcttttatacgggaataatttgcgtcacgtgtggcgtattgaatgtaccgtatgaataagcatcg

SEQ ID NO: 6270 - DNA, 486 bp, unidentified
  misc_feature 1..486: note = Ascusbbf_454121, encodes 16S rRNA
  source 1..486: mol_type = genomic DNA
agagtttgatcctggctcagaatgaacgttggcagcgtggattaggcatgcaagtcgagcgacaaggtccttcgggactggaggagcggcaaacggggtagtaaggcatcggaacgtaccctcttgtccgggatagctgcgggaaactgcaagtaataccggataatctcttcggagcaaaggtccgccgcgggaggagcggccgatgtgatatcaggtagttggcggggtaacggcccaccaagccatcgacgtctagggggtgtgagagcatggcccccaccactgggactgagacactgcccagacacctacgggtggctgcagtcgagaatcttcggcaatgggcgaaagcctgaccgagcaacgctgcgtgcgggatgacggcccttgggttgtaaaccgctgtcagaggggatgaaagcgaaagcttgacagagcctcagaggaagcgcgggctaagttcgtgccagcagccgcggtaat

SEQ ID NO: 6271 - DNA, 490 bp, unidentified
  misc_feature 1..490: note = Ascusbbf_1283184, encodes 16S rRNA
  source 1..490: mol_type = genomic DNA
agagtttgatcctggctcaggacgaacgctggcggcgtgcttaacacatgcaagtcgaacggggatgctttggcggaatttttcgaaaggaagcggaagtattctagtggcgaacgggtgagtaacgcgtgaacaacctgccctggagtgggggataacatttggaaacagatgctaataccgcatgagaccacagcccggcatcggggaggggtcaaagaataatcgctctgggaggggttcgcgtcccattaggtagttggtgagataacagcccaccaagccgacgatgggtagccgagctgagaggctgaacggccacactggaactgagacacggtccagactcctacgggaggcagcagtggggaatattgggcaatgggcgcaagcctgacccagcaacgccgcgtgagggaagaaggttttcggattgtaaacctctgtcgcaagggacgaaggagtgacggtaccttgtgaggaagccccg

SEQ ID NO: 6272 - DNA, 490 bp, unidentified
  misc_feature 1..490: note = Ascusbbf_1705112, encodes 16S rRNA
  source 1..490: mol_type = genomic DNA
agagtttgatcctggctcaggatgaacgctagctacaggcttaacacatgcaagtcggggggaaacggagacgggagcttgctcttgtcagacgtcgaccggcggatgggtgcgtaacgcgtatccaacctgcccgtgtcccggggatagcccatggaaacgtggattaacacccgatggtccgtactttccgcatggcgggtacggtaaacgcgagggacatggatggggatgcgtaccattaggcagcaggcggggtaacggcccacctggcccgcgatggttaggggttctgagaggaaggccccccacactgggactgagacacggcccagactcctacgggaggcagcagtgaggaatattggtcaatgggcgagagcctgaaccagccaagtagcgtgcaggatgacggccctacgggttgtaaactgcttttatgcggggataaagagtgccacgtgtggcacgttgcaggtaccgcatgaat

SEQ ID NO: 6273 - DNA, 490 bp, unidentified
  misc_feature 1..490: note = Ascusbbf_1855213, encodes 16S rRNA
  source 1..490: mol_type = genomic DNA
agagtttgatcatggctcaggacgaacgctggcggcgtgcctaatacatgcaagtcgagcggggtggagggtcgcaagacccaaagcctagcggcggacgggtgagtaacacgtaggcaacctgcctgtaagaccgggataacttcgggaaaccgaagctaataccggataactcttaagaccgcatggtcttaagctaaaaggacgcgatccacttacagatgggcctgcggcgcattagctagttggtgaggtaacggctcaccaaggcgacgatgcgtagccgacctgagagggtgaccggccacactgggactgagacacggcccagactcctacgggaggcagcagtagggaatcttctgcaatggacgaaagtctgacagagcaatgccgcgtgagtgaagaaggtcttcggattgtaaaactctgttgtcagggaagaacacccgggagaggatcccggcttgacggtacctgacgagaaagc

SEQ ID NO: 6274 - DNA, 483 bp, unidentified
  misc_feature 1..483: note = Ascusbbf_1082151, encodes 16S rRNA
  source 1..483: mol_type = genomic DNA
agagtttgatcatggctcaggatgaacgctagcgagacgcttaacacatgcaagtcgaatgctgatttatcagcatggcagacgggtgagtaacacgtgcttaatttgccccggagtgggggacaacatcggaaacggtgataatcccgcatacgttccataaaatgaaaatatatggaagaaaggtttatcgctctgggaggagggcgcggctgactagttagttggtgaggtaatggctcaccaagacgatgatcagtagctggtctgagaggacgaacagccacaatgggactgagacaaggcccatacccctacggggggcagcagtggggaatcttgcgcaatggacgaaagtctgacgcagcgatctcgcgtgaaggatgaagctttgcggagtgtaaacttcttttctgggagaaaacgactgatggtatctcaggaataagggacggctaactacgtgccagcagccgcggtaat

SEQ ID NO: 6275 - DNA, 490 bp, unidentified
  misc_feature 1..490: note = Ascusbbf_1152603, encodes 16S rRNA
  source 1..490: mol_type = genomic DNA
agagtttgatcatggctcaggatgaacgctagctacaggcttaacacatgcaagtcgaggggtaacgacagcgaaagcttgcttttgctgggcgacgaccggcgcacgggtgagtaacgcgtatccaacctgcccataactaagggataatccgtagaaatgcggtctaataccttatgtgttccgacgaggacatctgaattggaataaagatttatcggttatggatggggatgcgtctgattagattgttggcggggcaacggcccaccaagtctacgatcagtggagactctgagaggaagatcccccacattggaactgaaacacagtccaaactcctacaaaaaacaacagtgaggaatattaatcaatgggcgaaagcctgaaccagccaagtagcgtgcaggaagacggccctatgggttgtaaactgcttttgtatggggataaagtgctccacgtgtggagttttgtaggtaccatacga

SEQ ID NO: 6276 - DNA, 490 bp, unidentified
  misc_feature 1..490: note = Ascusbbf_29453, encodes 16S rRNA
  source 1..490: mol_type = genomic DNA
agagtttgatcatggctcaggatgaacgctggcggcgtgcctaacacatgcaagtcgagcgggaatcatctgattgaaacttcggtagatagaggatgaggatagcggcggacgggtgagtaacgcgtaggtaacctgccccttacacagggatagcctcgggaaactgggattaatacctgataatgcggtgaagtcacatggctttaccgccaaagatttatcggtgagggatggacctgcgtctgattagctggttggtgaggtaacggcccaccaaggcaacgatcagtagccgacctgagagggtaatcggccacattggaactgagacacggtccaaactcctacgggaggcagcagtggggaatattgcacaatgggcgcaagcctgatgcagcaacgccgcgtgagcgaagaaggtcttcggatcgtaaagctctgtcctcaggaacgaagaagtgacggtacctgaggaggaagccccggc

SEQ ID NO: 6277 - DNA, 490 bp, unidentified
  misc_feature 1..490: note = Ascusbbf_108828, encodes 16S rRNA
  source 1..490: mol_type = genomic DNA
agagtttgatcatggctcaggacgaacgctggcggcgtgcttaatacatgcaagtcgaacggagatattccgccgttcaaggtttcggctgagaacatgggatatcttagtggcgaacgggtgagtaacgcgtgaacaacctgactcaaagagggggataacaacgggaaactgttgctaataccgcataagaccacgccctcgcatgggggaggggtaaaagatttatcgctttgagaggggttcgcgtcccattaggtagttggaggggtaacggcccaccaagccgacgatgggtagccgagctgagaggctgatcggccacactggaactgagacacggtccagactcctacgggaggcagcagtagggaatattgggcaatgggcgcaagcctgacccagcaacgccgcgtgagggaagaaggttttcggattgtaaacctctgtcctatgtgacgaaggaagtgacggtagcataggaggaagc

SEQ ID NO: 6278 - DNA, 490 bp, unidentified
  misc_feature 1..490: note = Ascusbbf_48301, encodes 16S rRNA
  source 1..490: mol_type = genomic DNA
agagtttgatcatggctcaggatgaacgctagcggcaggcttaacacatgcaagtcgaggggcagcgcggagtagcaatactttggcggcgaccggcgaaagggtgagtaacgcgtgagcaacatgcccgcatctgggggatagtcgatggaaacgtcgcgtaataccccgtaacaacagttcccgcatgaggattgtttaagagatttattgaatgcggattggctcgcgtgccattagatagttggtgaggtaacggcccaccaagtcgacgatggctaggggttctgagaggaaggtcccccacattggaactgagacacggtccagactcctacgggaggcagcagtgaggaatattggacaatggccgagaggctgatccagccatgccgcgtgcgggatgaaggccctatgggtcgtaaaccgcttttgtcggggagcaataaggtgtacgtgtacaccgatgagagtacctggcgaataagca

SEQ ID NO: 6279 - DNA, 490 bp, unidentified
  misc_feature 1..490: note = Ascusbbf_148531, encodes 16S rRNA
  source 1..490: mol_type = genomic DNA
agagtttgatcatggctcaggatgaatgctggcggcgtgcctaatacatgcaagtcgagcggtaacagggtttcaccgtttccttgacacacctagcgcattatcgtaggtggtgagacttcgagggaacagtgaaactgctgacgagcggcggacggctgagtaacgcgtgggaacgtaccccaaactgagggataacgcaccgaaaggtgtgctaataccgcatatgatcttcggattaaagctttcgggcggtttgggaatggcctgcgtacgattagatagttggtagggtaacggcctaccaagtcgacgatcgttagatggtttgagaagatgatcatccagactgggactgagacacggcccagactcctacgggaggcagcagtagggaatctttcacaatgggcgaaagcctgatggagcaacgccgcgtgcaggatgacggccttcgggttgtaaactgcttttataagcgagaaatatg

SEQ ID NO: 6280 - DNA, 490 bp, unidentified
  misc_feature 1..490: note = Ascusbbf_294310, encodes 16S rRNA
  source 1..490: mol_type = genomic DNA
agagtttgatcctggctcaggatgaacgctagcgacaggcttaacacatgcaagtcgaggggcagcggaggtaaaggcttgcctttacctgccggcgaccggcgcacgggtgagtaacacgtatgcaacctggccgtcacaggaggataaccgggagaaattccgcctaatactccataacactttcggaggacatcctccggaagtcaaagggattcgttccggtgacggatgggcatgcggcgcattagctagtcggcggggtaacggcccaccgaggcgacgatgcgtaggggttctgagaggaaggtcccccacattggaactgagacacggtccaaactcctacgggaggcagcagtgaggaatattggtcaatgggcggaagcctgaaccagccaagtcgcgtgagggaataaggccctaagggtcgtaaacctcttttgccggggagcaatggtcctcttgcgaggggacagggagagtaccc

SEQ ID NO: 6281 - DNA, 490 bp, unidentified
  misc_feature 1..490: note = Ascusbbf_1714782, encodes 16S rRNA
  source 1..490: mol_type = genomic DNA
agagtttgatcatggctcaggatgaacgctggcggcgtgcttaacacatgcaagtcgaacggagtgctcttgaaagaggattcgtccaattgatagagttacttagtggcggacgggtgagtaacgcgtgaggaacctgccttggagtggggaataacacagagaaatctgtgctaataccgcataatgcatttgggtcgcatgactcggaatgccaaagatttgtcgctctgagatggcctcgcgtctgattagctagttggaggggtaacggcccaccaaggcaacgatcagtagccggactgagaggttggccggccacattgggactgagacacggcccagactcctacgggaggcagcagtggggaatattgggcaatgggcgcaagcctgacccagcaacgccgcgtgaaggaagaaggctttcgggttgtaaacttcttttatcagggacgaacaaatgacggtacctgatgaataagccacg

SEQ ID NO: 6282 - DNA, 490 bp, unidentified
  misc_feature 1..490: note = Ascusbbf_149069, encodes 16S rRNA
  source 1..490: mol_type = genomic DNA
agagtttgatcatggctcaggatgaacgctggcggcgtgcttaacacatgcaagtcgaacgaagcactcaggagcgacttcggtcaatcctgtttgacttagtggcggacgggtgagtaacgcgtgaggaacctgccttgcagtggggaataacagttggaaacgactgctaataccgcataatgcagagagatcgcatggtctttctgccaaagatttatcgctgtgagatggcctcgcgtctgattagctagttggtgaggtaacggcccaccaaggcgacgatcagtagccggactgagaggttgatcggccacattgggactgagacacggcccagactcctacgggaggcagcagtggggaatattgggcaatgggcgcaagcctgacccagcaacgccgcgtgaaggaagaaggctttcgggttgtaaacttcttttattagggacgataatgacggtacctattgaataagctccggctaact

SEQ ID NO: 6283 - DNA, 490 bp, unidentified
  misc_feature 1..490: note = Ascusbbf_338415, encodes 16S rRNA
  source 1..490: mol_type = genomic DNA
agagtttgatcctggctcaggatgaacgctagcgacaggcttaacacatgcaagtcgtggggcagcgggggtgaaggcttgccttcacctgccggcgaccggcgcacgggtgagtaacacgtatgcaacctggccgtgacaggaggataaccggtagaaatgccgcctaatactccataacactttgcggggacatccccgtgaggtcaaaggaagcgattccggtcacggatgggcatgcggcgcattagctagtcggcggggtaacggcccaccgaggcgacgatgcgtaggggttctgagaggaaggtcccccacattggaactgagacacggtccaaactcctacgggaggcagcagtgaggaatattggtcaatgggcgaaagcctgaaccagccaagtcgcgtgagggaataaggccctatgggtcgtaaacctcttttgccggggagcaagatcggggacgtgtcccagattggagagtaccc

SEQ ID NO: 6284 - DNA, 490 bp, unidentified
  misc_feature 1..490: note = Ascusbbf_683365, encodes 16S rRNA
  source 1..490: mol_type = genomic DNA
agagtttgatcctggctcaggatgaacgctagctacaggcttaacacatgcaagtcgaggggaaacggaagggaaagcttgctttccctagacgtcgaccggcggatgggtgcgtaacgcgtatccaacctgcccgtgtcccggggatagcccatggaaacgtggattaacacccgatggtcctgcgcttccgcatggcggcgcaggtaaacgttagggacatggatggggatgcgtaccattaggcagcaggcggggtaacggcccacctggcccgcgatggttaggggttctgagaggaaggccccccacactgggactgagacacggcccagactcctacgggaggcagcagtgaggaatattggtcaatgggcgagagcctgaaccagccaagtagcgtgcaggatgacggccctacgggttgtaaactgcttttatgcggggataaagagtgccacgtgtggcacgttgcaggtaccgcatgaat

SEQ ID NO: 6285 - DNA, 490 bp, unidentified
  misc_feature 1..490: note = Ascusbbf_591702, encodes 16S rRNA
  source 1..490: mol_type = genomic DNA
agagtttgatcctggctcaggatgaacgctagctacaggcttaacacatgcaagtcgaggggcagcattatcttagcttgctaagatagatggcgaccggcgcacgggtgagtaacacgtatccaaccttccggttactcggggataggctttcgaaagaaagattaatacccgatgttgcgtatctttctcctgaaagatacgccaaaggattccggtaaccgatggggatgcgttccattaggcagttggcggggtaacggcccaccaaaccttcgatggataggggttctgagaggaaggtcccccacattggaactgagacacggtccaaactcctacgggaggcagcagtgaggaatattggtcaatggacgcaagtctgaaccagccaagtagcgtgaaggatgactgccctctgggttgtaaacttcttttatacgggaataacatgaggtacgcgtaccttattgcatgtaccgttatgaat

SEQ ID NO: 6286 - DNA, 490 bp, unidentified
  misc_feature 1..490: note = Ascusbbf_741269, encodes 16S rRNA
  source 1..490: mol_type = genomic DNA
agagtttgatcctggctcaggatgaacgctggcggcgtgcctaatacatgcaagtcgaacgagttctgattattgaagggtgcttgcatcttgatttaattttgaacgagtggcggacgggtgagtaacacgtgggtaacctgcccttaagtgggggataacatttggaaacagatgctaataccgcataaatccaagaaccgcatggttcttggctgaaagatggcgtaagctatcgcttttggatggacccgcggcgtattagctagttggtgaggtaacggctcaccaaggcaatgatacgtagccgaactgagaggttgatcggccacattgggactgagacacggcccaaactcctacgggaggcagcagtagggaatcttccacaatggacgcaagtctgatggagcaacgccgcgtgagtgaagaaggctttcgggtcgtaaaactctgttgttggagaagaatggtcggcagagtaactgtt

SEQ ID NO: 6287 - DNA, 490 bp, unidentified
  misc_feature 1..490: note = Ascusbbf_1324292, encodes 16S rRNA
  source 1..490: mol_type = genomic DNA
agagtttgatcatggctcaggatgaacgctagcgacaggcctaacacatgcaagtcgaggggcaacggggagctgagcttgctcagttctgccggcgaccggcgcacgggtgagtaacgcgtatgcaaccttcccttttcagggggataacccggagaaatccggcctaatatcccatggttcctttctgaggcatcttaggaagggtaaaggagcgatccggaaaaggatgggcatgcgtgacattagctagttggcggagtaacggcccaccaaggcgacgatgtctaggggttctgaggggaaggacccccacactggtactgagacacggaccagactcctacgggaggcagcagtgaggaatattggtcaatgggcgatagcctgaaccagccaagtcgcgtgagggaagacggccctatgggttgtaaacctcttttgtcagggaacaatgaccggtacgtgtaccgggagagagtgtacctga

SEQ ID NO: 6288 - DNA, 490 bp, unidentified
  misc_feature 1..490: note = Ascusbbf_1502622, encodes 16S rRNA
  source 1..490: mol_type = genomic DNA
agagtttgatcctggctcaggacgaacgctggcggcgcgcctaacacatgcaagtcgaacggagataatggaggagcttgctccactgttatcttagtggcggacgggtgagtaacacgtgggcaacctgcctttcagagggggataacgtttggaaacgaacgctaatacctcataacatcataatgtggcatcatattgtgatcaaaggagcaatccgctgaaagatgggctcgcgtccgattagatagttggtgaggtaacggcccaccaagtcgacgatcggtagccggactgagaggttgaacggccacattgggactgagacacggcccagactcctacgggaggcagcagtggggaatattgcacaatgggggaaaccctgatgcagcgacgccgcgtgagggaagaaggttttcggattgtaaacctctgtctttggtgacgataatgacggtagccaaagaggaagctacggctaactacg

SEQ ID NO: 6289 - DNA, 490 bp, unidentified
  misc_feature 1..490: note = Ascusbbf_1494899, encodes 16S rRNA
  source 1..490: mol_type = genomic DNA
agagtttgatcctggctcaggacgaacactggcggcgtgcctaatacatgcaagtcgagcgaagtgaagagagcttgctcttggaacttagcggcaaacgggtgagtaacacgtgggcaacctgcctgacagactgggataacttcaggaaactggagctaataccggataggatcgcgaaccgcatggaacgcgatggaaagtctgaacgacactgtcagatgggcccgcggcgcattagctagttggtagggtaatggcctaccaaggcaacgatgcgtagccgacctgagagggtgaccggccacactgggactgagacacggcccagactcctacgggaggcagcagtagggaatcttccacaatgggcgaaagcctgatggagcaacgccgcgtgagtgatgaaggttttcggatcgtaaaactctgttgttagggaagaacacccgggagaggatcccggtttgacggtacctaacgaggaagc

SEQ ID NO: 6290 - DNA, 490 bp, unidentified
  misc_feature 1..490: note = Ascusbbf_1186955, encodes 16S rRNA
  source 1..490: mol_type = genomic DNA
agagtttgatcatggctcaggacgaacgctggcggcgtgcttcaaacatgcaagtcgaacggagtgaagttgaaagcttgcttttaactttacttagtggcggactggtgagtaacgcgtgagtaatctgcctatcacagggggataacagttggaaacgactgctaataccgcataagaccacatgatggcatcatcgaggggtcaaagggttactggtgatagatgagcttgcgtatcattagctagttggtgagggtaatggcccaccaaggcgacgatgattagccgatctgagaggatgaccggccacactggaactgagatacggtccagactcctacgggaggcagcagttaggaatattgggcaatggaggaaactctgacccagcaacgccgcgtgaaggaagaaggttttcggactgtaaacttctgatctaggggaaaaagaaagtgatggtaccctaggagaaagccacggctaacta

SEQ ID NO: 6291 - DNA, 490 bp, unidentified
  misc_feature 1..490: note = Ascusbbf_34177, encodes 16S rRNA
  source 1..490: mol_type = genomic DNA
agagtttgatcctggctcaggacgaacgctggcggcgtgcctaacacatgcaagtcgaacggagttttttaagatgaagttttcggatggaattttagaaaacttagtggcggacgggtgagtaacgcgtgagtaacctgccgatgagagggggataacgttctgaaaagaacgctaataccgcatgacatatcgaagccgcatgactttgatatcaaaggagtgatccgctcatcgatggactcgcgtccgattagctggttggcggggtaacggcccaccaaggcgacgatcggtagccggactgagaggttgaacggccacattgggactgagacacggcccagactcctacgggaggcagcagtgggggatattgcgcaatgggggaaaccctgacgcagcaacgccgcgtgaaggatgaaggtcttcggattgtaaacttcttttgttaaggacgaagaaagtgacggtacttaacgaataagct

SEQ ID NO: 6292 - DNA, 490 bp, unidentified
  misc_feature 1..490: note = Ascusbbf_84901, encodes 16S rRNA
  source 1..490: mol_type = genomic DNA
agagtttgatcctggctcaggatgaacgctggcggcatgcctaagacatgcaagtcgaacgaagtggcccattgaagttggagtgcttgcacaaagacggatttggattcccacttagtggcagacgggtgagtaacacgtgggtaatctaccctagagactgggacaacagttggaaacgactgctaataccggataattcatatttagataactagatatgctaaaaggagcctttaaagcttcactctaggatgagcttgcggcgcattagctagttggtggggtaatggcctaccaaggcaacgatgcgtatccgggctgagaggctaaacggacacattgggactgagacacggcccaaactcctacgggagacagcagttaggaatattcgtcaatgggggaaaccctgaacgagcaatgccgcgtgagtgatgacggtcttatagattgtaaaactctgttgtaagagacgaaaccacagtat

SEQ ID NO: 6293 - DNA, 490 bp, unidentified
  misc_feature 1..490: note = Ascusbbf_258391, encodes 16S rRNA
  source 1..490: mol_type = genomic DNA
agagtttgatcctggctcagaacgaacgctggtagcgtggattaggcatgcaagtcgaacgggatcggccgattagcaataaccggccgtgagagtggcggattggggaggaacacgtgagcaacctgtccttgagttggggaaaaccgttggaaacgacggctaataccggatgtagcgcccggcgacatcgccggagcgccaaagggggccaaaagctcccgctcaccgaggggctcgcgcatcatcagcttgttggcggggtaacggcccaccaaggcttacgattagctggtctgagaggatgaccagccccactgggactgagatactgcccagactcctacgggaggctgcagtcgaggatcatttgcaatgggcgaaagcctgacaatgcgacgctgcgtggaggatgaaggccttcgggttgtaaactcctgtcataagggaaaaggcgagggtacccaatacgtaccttagttgattgtac

SEQ ID NO: 6294 - DNA, 490 bp, unidentified
  misc_feature 1..490: note = Ascusbbf_4239, encodes 16S rRNA
  source 1..490: mol_type = genomic DNA
agagtttgatcatggctcaggacgaacgctggcggcatgcttaacacatgcaagtcgaacgggcataattgtttatagcaatatacgtgattatgtcagtggcgaacgggtgagtaacgcgtgagcaacctgccttgtacactgggataacagatggaaacgtctgctaataccggataagaccacagtggggcatcccacaggggccaaagccgagacggtacaagatgggctcgcgtcctattaggtagttggtgagataacagcccaccaagccgatgataggtagccgacttgagagagtgatcggccacaatggaactgagacacggtccatactcctccgggaggcagcagtggggaatattgggcaatgggcgaaagccttacccagcaatgccgcgtgaaagatgaaggtcttcggattgtaaatttcttttattggtgacgaacaaaatgacggtagccgatgaataagccccggctaact

SEQ ID NO: 6295 - DNA, 490 bp, unidentified
  misc_feature 1..490: note = Ascusbbf_13594, encodes 16S rRNA
  source 1..490: mol_type = genomic DNA
agagtttgatcatggctcaggatgaacgctagcggcaggcctaacacatgcaagtcgaggggcagcagggcgtagcaatacgctgctggcgaccggcgcacgggtgcgtaacgcgtatgcaacctacccataacagggggataacggagtgaaaattccactaataccccgtattgacacttggtcgcatggccgggtgtcgaaagccttcgggtggttatggatgggcatgcgtggcattaggtagttggcggggcaacggcccaccaagcccacgatgcctaggggagctgagaggctaatcccccacactggtactgagacacggaccagactcctacgggaggcagcagtgaggaatattggtcaatggagggaactctgaaccagccatgccgcgtgagggaggaaggccctatgggttgtaaacctcttttgccccggggcaataaggctcatgcgtgagccgatgagagtacggggcgaataa

SEQ ID NO: 6296 - DNA, 490 bp, unidentified
  misc_feature 1..490: note = Ascusbbf_54225, encodes 16S rRNA
  source 1..490: mol_type = genomic DNA
agagtttgatcctggctcaggatgaacgctagctacaggcttaacacatgcaagtcgaggggcagcatgggcttagcttgctaagcccgatggcgaccggcgcacgggtgagtaacacgtatccaacctgccgattactccggtacagcctttcgaaagaaagattaatcccggatggcatggcgattccgcatggtttctccattaaaggtttttccggtaatcgatggggatgcgttccattaggcagttggcggggtaacggcccaccaaacctacgatggataggggttctgagaggaaggtcccccacattggaactgagacacggtccaaactcctacgggaggcagcagtgaggaatattggtcaatgggcggaagcctgaaccagccaagtagcgtgaaggatgactgccctatgggttgtaaacttcttttataagggaataattgcgggtacgcgtacctgtttgcatgtaccttatgaa

SEQ ID NO: 6297 - DNA, 490 bp, unidentified
  misc_feature 1..490: note = Ascusbbf_406625, encodes 16S rRNA
  source 1..490: mol_type = genomic DNA
agagtttgatcctggctcagaacgaacgctggcggcgcgtcttaagcatgcaagtcgagcggcaaggaaggagcttgcttcttccctagagcggcggactggtgagtaacgcgtgggtgacgtaccctccggacggggacagcctgtggaaacacaggataataccggatacggtgcatgttgtcagaggacatgcaggaaaggttcttttgaaccgccggaggagcggcccgcgtgccattagctagttggtggggtaacggctcaccaaggcagtgatggctacccggcctaagagggtggacgggcacattgggactgagatacggcccagactcctacgggaggcagcagctaagaatattccgcaatgggggaaaccctgacggagcgacgccgcgtggacgatgaaggccggaaggttgtaaagtccttttatgactgaagaataaggagaatgagagaaacgttttctggtgacggtaggtca

SEQ ID NO: 6298 - DNA, 490 bp, unidentified
  misc_feature 1..490: note = Ascusbbf_279243, encodes 16S rRNA
  source 1..490: mol_type = genomic DNA
agagtttgatcatggctcaggacgaacgctggcggcgcgcttaacacatgcaagtcgaacggagcttgaacgagcgtcttcggacaattgttcaaacttagtggcggacgggtgagtaacgcgtgagcaaccggtcctgaagagggggacaacattgagaaatcaatgctaataccgcgtaagaccacgctgtggcatcacagaggggtcaaaggagagatccgcttcagggagggctcgcgtcccattaggtagttggtgacggtaacggcgcaccaagccgacgatgggtagccgtgctgagaggcagaacggccacactggaactgagacacggtccagactcctacgggaggcagcagtggggaatcttgggcaatggggggaaccctgacccagcgacgccgcgtggaggaagaaggtcttcggattgtaaacttctgtgacaggggacgaaggaagtgacggtaccctgtaaggaagccccggc

SEQ ID NO: 6299 - DNA, 490 bp, unidentified
  misc_feature 1..490: note = Ascusbbf_87823, encodes 16S rRNA
  source 1..490: mol_type = genomic DNA
agagtttgatcatggctcaggacgaacgctggcggcgtgcctaacacatgcaagtcgagcggggatagattggatgagagcttcggcaggattctgatttattctagcggcggacgggtgagtaacgcgtgaacgatctgtcccagacagggggataacacttggaaacaggtgctaataccgcataagaccacgtagctgcatggctatgaggtaaaaggagcgatccggtttggggtgagttcgcgtctgattagctagttggtgaggtaacggcccaccaaggcgacgatcagtagccgacctgagagggtgatcggccacattggaactgagacacggtccaaactcctacgggaggcagcagtgggaatattgggcaatgggcgaaagcctgacccagcaacgccgcgtgagggaagaaggttttcggattgtaaacctctgtccttggtgacgaaggaagtgacggtagccaaggaggaagccc

SEQ ID NO: 6300 - DNA, 490 bp, unidentified
  misc_feature 1..490: note = Ascusbbf_2193, encodes 16S rRNA
  source 1..490: mol_type = genomic DNA
agagtttgatcatggctcaggatgaacgctggcggcgtgcctaatacatgcaagtcgaacggcagtagcaatactgtagtggcgaacgggtgagtaacacgttggtgacctgccccaaagatgggaatatcacctggaaacgggtggcaaaaccgaataagcttatactgcttagaaaggtataagtaaaagtgcaaactactttgggaggggcctgcggcccatcagttagttggtgagggtaacggcccaccaagacgaagacgggtaggggacctgagagggtggtcccccacaatggaactgaaacacggtccatacacctgcgggtggcagcagtagggaatattgcttaatgggcgaaagcctgaagcagcaacgccgcgtggacgaaggaggccttcgggtcgtaaagtccttttatgtgtgaagaggaaggacggtagcacatgaataagtctcggctaactacgtgccagcagccgcggta

SEQ ID NO: 6301 - DNA, 490 bp, unidentified
  misc_feature 1..490: note = Ascusbbf_1231, encodes 16S rRNA
  source 1..490: mol_type = genomic DNA
agagtttgatcatggctcaggatgaacgctagcggcaggcttaacacatgcaagtcgaggggcagcgtggagtagcaatactctgacggcgaccggcgaaagggtgagtaacgcgtgagcaacatgcccgatactggaggatagtcgatggaaacgtcgcgtaatactccgtaacataggggaccgcatgattctctattaatagatttatcggtatcggattggctcgcgtaccattagctagttggcggggtaacggcccaccaaggcgacgatggttaggggttctgagaggaaggtcccccacattggaactgagacacggtccagactcctacgggaggcagcagtgaggaatattggacaatggccgagaggctgatccagccatgccgcgtgcgggaggacggccctatgggttgtaaaccgcttttgttggggagcaataagggtcacgtgtgacctgatgagagtacccagcgaataagca

SEQ ID NO: 6302 - DNA, 490 bp, unidentified
  misc_feature 1..490: note = Ascusbbf_384227, encodes 16S rRNA
  source 1..490: mol_type = genomic DNA
agagtttgatcctggctcaggatgaacgctggcggcatgcctaagacatgcaagtcgaacgaagtggcccaacaataacggagtgcttgcacgaagtttgcgatggattttccacttagtggcagacgggtgagtaacacgtaagtaatctacctttaagactgggataacgtttggaaacggacgctaataccggatgattcacgtttaggtaactagatgtgctaaaaggagcttcggcttcacttaaagatgagcttgcggcgtattaactagttggtgaggtaacggctcaccaaggtgacgatgcgtagccgagctgagaggctaatcggccacattgggactgagacacggcccaaactccgacgggaggcagcagttaggaatattcgtcaatgggggaaaccctgaacgagcaatgccgcgtgagtgatgacggtcttatagattgtaaaactctgttgtaaaggaagaacccttattatag

SEQ ID NO: 6303 - DNA, 490 bp, unidentified
  misc_feature 1..490: note = Ascusbbf_118551, encodes 16S rRNA
  source 1..490: mol_type = genomic DNA
agagtttgatcctggctcaggatgaacgctggcggcgtgcctaacacatgcaagtcgaacgaagcatttcgcccgacaaagaggagtgcttgcacaaatcggagtcaattggaatgacttagtggcggacgggtgagtaacgcgtgggtaacctgccttatacagggggataacagttagaaatgactgctaataccgcataagcgcacaggatcgcatgatccggtgtgaaaagccgagacggtataagatggacccgcgtctgattagccagttggcagggtaacggcctaccaaagcaacgatcagtagccggcctgagagggtgaacggccacattgggactgagacacggcccaaactcctacgggaggcagcagtgggggatattgcacaatgggggaaaccctgatgcagcgacgccgcgtgagcgattgaagtatttcggtatgtaaagctctatcagcagggaagaaaatgacggtacctg

SEQ ID NO: 6304 - DNA, 490 bp, unidentified
  misc_feature 1..490: note = Ascusbbf_123062, encodes 16S rRNA
  source 1..490: mol_type = genomic DNA
agagtttgatcctggctcaggatgaacgctggcggcgtgcctaacacatgcaagtcgaacggagctattttggaaagtccttcgggactggaatctatagcttagtggcggacgggtgagtaacgcgtgagcaatctgcccttaggtgggggataacagccggaaacgactgctaataccgcataatgcagagagatggcatcttctttctgccaaagatttattgcctttggatgagctcgcgtctgattagctagttggtgaggtaacggcccaccaaggcgacgatcagtagccggactgagaggttgaacggccacattgggactgagacacggcccagactcctacgggaggcagcagtggggaatattgcgcaatgggggcaaccctgacgcagcaacgccgcgtgattgaagaaggccttcgggttgtaaagatctttaatcagggacgaattttgacggtacctgaagaataagctccggct

SEQ ID NO: 6305 - DNA, 488 bp, unidentified
  misc_feature 1..488: note = Ascusbbf_63270, encodes 16S rRNA
  source 1..488: mol_type = genomic DNA
agagtttgatcctggctcagggctaacgctggcggcgcgcctaacacatgcaagtcgaacgaacccttcggggttagtggcagacgggtgagtaacgcgtgagtaacgtgccttctttctggggataccgtttggaaacgaacgttaataccgaatgtgcttattttgcggcatcgtagagtaagtaaactgttagggagagaagagcgactcgcgttctatcagctagatggtggggtaacggcctaccatggctacgacggataactggtctgagaggatgatcagtcacactggaactgagacacggtccagactcctacgggaggcagcagtgaggaatcttgcacaatgggcgaaagcctgatgcagcgacgccgcgtgagggacgaaggccttcgggttgtaaacctctgtcagtagggaagaagaatgacggtacctactgaggaagcttcggctaactacgtgccagcagccgcggtaat

SEQ ID NO: 6306 - DNA, 490 bp, unidentified
  misc_feature 1..490: note = Ascusbbf_166172, encodes 16S rRNA
  source 1..490: mol_type = genomic DNA
agagtttgatcatggctcaggatgaacgctggcggcgtgcctaacacatgcaagtcgaacggttaagccggcttcggccgggcatacagtggcgaacgggtgagtaacacgtgaccaacctgccccctcctccgggacagcctcgggaaaccgggattaataccggatactccgcgcgcggcgcatgccgcgcgcgggaaagcccaagcgggaggggatggggtcgcggcccatcaggtagtgggcggggcagcggcccgcccagccgacgacgggtagccgggttgagagaccgaccggccacattgggactgagatacggcccagactcctacgggaggcagcagtggggaatattgcgcaatgggggcaaccctgacgcagcaacgccgcgtgcgggaagaaggcgtccgcgtcgtaaaccgctttcagcagggaagacatcgacggtacctgcagaagaagccccggctaactacgtgccagcagc

SEQ ID NO: 6307 - DNA, 490 bp, unidentified
  misc_feature 1..490: note = Ascusbbf_360553, encodes 16S rRNA
  source 1..490: mol_type = genomic DNA
agagtttgatcctggctcaggataaacgctggcggcgcacataagacatgcaagtcgaacggaagtcgtattaattgaagtggattgaagatttattggattgaagcagattttaatacaatggctttagtggcggactggtgagtaacacgtaagcaatctacctattagaggggaataacaatgagaaatcattgctaataccgcataagcttgtatgaccgcatggtcaagcaagaaaaggagtaatccgctaatagatgagcttgcggctgattagctagttggttaggtaacggctgaccaaggcaacgatcagtagccgggctgagaggctctgcggccacattgggactgagatacggcccagactcctacgggaggcagcagtcgggaatattgcgcaatggaggaaactctgacgcagtgacgccgcgtataggaagaaggttttaggattgtaaactattttagacagggaagaaaaatg

SEQ ID NO: 6308 - DNA, 490 bp, unidentified
  misc_feature 1..490: note = Ascusbbf_22995, encodes 16S rRNA
  source 1..490: mol_type = genomic DNA
agagtttgatcctggctcaggatgaacgctagcggcaggcttaacacatgcaagtcgaggggcagcgcgaggtagcaatactttggcggcgaccggcggaagggtgcgtaacgcgtgagcaacatgcccgtatgagggggataagcgatggaaacgtcgtctaataccccgtaacacaggagatcgcatgatcatctgttgaaagatttatcgcatacggattggctcgcgtgacattagctagtcggcggggtaacggcccaccgaggcgacgatgtctaggggttctgagaggaaggtcccccacactggaactgagacacggtccagactcctacgggaggcagcagtgaggaatattggtcaatgggcggaagcctgaaccagccatgccgcgtgaaggaataaggccctatgggtcgtaaacttcttttgacggggagcaataagggtcacgtgtggcccgatgagagtactcgtcgaataagca

SEQ ID NO: 6309 - DNA, 490 bp, unidentified
  misc_feature 1..490: note = Ascusbbf_93131, encodes 16S rRNA
  source 1..490: mol_type = genomic DNA
agagtttgatcatggctcaggacgaacgctggcggcgtgcctaacacatgcaagtcgaacggagtaagaatttcggtttttacttagtggcgaacgggtgagtaacgcgtgaacaacctgccttcctgagggggataacacctggaaacaagtgctaataccgcataagaccacagagccgcatggcccaggggtcaaaggagtgatccgcaggaagaggggttcgcgtcccattagctagttggcggggcaacggcccaccaaggcgacgatgggtagccgagctgagaggctgatcggccacactggaactgagacacggtccagactcctacgggaggcagcagtggggaatattgggcaatgggcgcaagcctgacccagcaacgccgcgtgagggaagaaggtcttcggattgtaaacctctgtcctatgtgacgaaggaagtgacggtagcataggaggaagccccggctaactacgtgccagc

SEQ ID NO: 6310 - DNA, 490 bp, unidentified
  misc_feature 1..490: note = Ascusbbf_61473, encodes 16S rRNA
  source 1..490: mol_type = genomic DNA
agagtttgatcctggctcaggataaacgctggcggcgcacataagacatgcaagtcgaacggaagccgttgtaatgatatcgaagtggactgagaacttgttcaaagaaaattgaagttgacttacaacaatgactttagtggcggactggtgagtaacgcgtgagcaacctgcctatcagaggggaacaacagttagaaatgactgctaataccgcatatgccttagtatcacatggtacaaaagggaaaagagtaatctgctgatagatgggctcgcgtctgattagatagttggtggggtaacggcctaccaagtcgacgatcagtagccggactgagaggttgaacggccacattgggactgagatacggcccagactcctacgggaggcagcagtcgggaatattgcgcaatggaggaaactctgacgcagtgacgccgcgtgcaggaagaaggttttcggattgtaaactgctttagacaggga

SEQ ID NO: 6311 - DNA, 490 bp, unidentified
  misc_feature 1..490: note = Ascusbbf_9876, encodes 16S rRNA
  source 1..490: mol_type = genomic DNA
agagtttgatcatggctcagaacgaacgctggtggcgtgtcttatacatgcaagtcgagcggcatagcaatatgtagcggcgaacgggtgagtaacgcgtaagcaatctgccccatatcaggaaatacccgtgccaacgcgcggttaatgtccaggagagtggccctccgcatggagggttgactagagattcatcggtatgggatgagcttgcgtccgattagctagttggcggggcaacggcccaccaaggcgacgatcggtagccggcctgagagggtgatcggccacattgggactgagatacggcccagactcctacgggaggcagcagtagggaatattgcacaatggggggaaccctgatgcagcaacgccacgtgtgggaagaagcatttcggtgtgtaaaccactgtcatgagggaataaggcccttattcgtaagggattgaatgtaccttgagaggaagcaccggcaaacttcgtgcca

SEQ ID NO: 6312 - DNA, 490 bp, unidentified
  misc_feature 1..490: note = Ascusbbf_26781, encodes 16S rRNA
  source 1..490: mol_type = genomic DNA
agagtttgatcctggctcagagttaacgctggcatcgtgcataacacatgcaagtcgaacgggacttacttgagtagcaatacttgagtaagtttagtggcagacgggtgagtaatacataaggaacgtacctctgagtggagaataacagtccgaaaggattgctaatactccataacataactttgtggcatcacttagttatcaaagatttatcgcttggagagcgtcttatggtctatcagcttgttggcagtgtaacggactaccaaggcgacgacggatagccggcctgaaagggcgaccggccacaagggcactgagacacgggccctactcctacgggaggcagcagtggggaattttggacaatgggcgcaagcctgatccagcaacgatgcgtggaggatgaaggttctcggattgtaaactccttttgagggggacgaaaaaaatgacggtacccctcgaataagccacggctaactac

SEQ ID NO: 6313 - DNA, 490 bp, unidentified
  misc_feature 1..490: note = Ascusbbf_32717, encodes 16S rRNA
  source 1..490: mol_type = genomic DNA
agagtttgatcctggctcaggacgaacgctggcggcgtgcctaatgcatgcaagtcgagcgacgcctcttgaaacgtaagtttcgagagtgacggagcggcgaacgggtgagtaacacgtgagcaacctgccccaaagaccgggatagccaggggaaaccctgattaataccggatgatctcgtagaaccacatggttcatcgagcaaatgcttttgcgctttgggatgggctcgcggcctatcagctagttggtgaggtaacagctcaccaaggcgacgacgggtagctggtctgagaggacgatcagccacactgggactgagacacggcccagactcctacgggaggcagcagcagggaatcttgcacaatgggcgaaagcctgatgcagcaacgccgcgtgagggatgaaggctctcgggttgtaaacctctttcaggagggaagaaattgacggtacctccagaagaagctccggctaactacgt

SEQ ID NO: 6314 - DNA, 490 bp, unidentified
  misc_feature 1..490: note = Ascusbbf_2214, encodes 16S rRNA
  source 1..490: mol_type = genomic DNA
agagtttgatcatggctcaggatgaacgctagcggcaggcttaacacatgcaagtcgaggggcagcgcgaggtagcaatactttggcggcgaccggcgaaagggtgagtaacgcgtgagcaacatgcccgatagtggaggatagtcgatggaaacgtcgtgtaatactccgtaacaacagttcccgcatgagaattgtttaatagatttatcgctatcggattggctcgcgtcccattaggcagttggcggggtaacggcccaccaaaccgacgatgggtaggggttctgagaggaaggtcccccacattggaactgagacacggtccagactcctacgggaggcagcagtgaggaatattggacaatggccgagaggctgatccagccatgccgcgtgcgggaagacggccctatgggttgtaaaccgcttttgttggagagcaataagagttacgtgtaacttgatgagagtatccagcgaataagca

SEQ ID NO: 6315 - DNA, 490 bp, unidentified
  misc_feature 1..490: note = Ascusbbf_1726049, encodes 16S rRNA
  source 1..490: mol_type = genomic DNA
agagtttgatcatggctcagaacgaacgctggcggcatggattaggcatgcaagtcgagcgaggcagcaatgcctagcggcgaacgggtgagtaacgcgtaagcaatctgccccatatcaggaaatacccgtgccaacgcgcggttaatgtccaggagggtggccttccgcatgggaggttgaccagagatttatcggtatgggatgagcttgcgtccgattagctagttggcggggcaacggcccaccaaggcgacgatcggtagccggcctgagagggtgatcggccacattgggactgagatacggcccagactcctacgggaggcagcagtagggaatattgcacaatgggggaaaccctgatgcagcaacgccacgtgtgggaagaagcatttcggtgtgtaaaccactgtcgtgagggaataaggctagctttcgggctagttgaatgtacctcgaaaggaaacaccggcaaacttcgtgccag

SEQ ID NO: 6316 - DNA, 490 bp, unidentified
  misc_feature 1..490: note = Ascusbbf_38420, encodes 16S rRNA
  source 1..490: mol_type = genomic DNA
agagtttgatcatggctcaggacgaacgctggcggcgtgcctaatacatgcaagtcgagcggaccgaagggagcttgctcctttaggttagcggcggacgggtgagtaacacgtgggcaacctgccctgcagactgggataacttcgggaaaccggagctaataccggataacaccgaaaaccgcatggttttcggttgaaaggcggcttttagctgtcactgcaggatgggcccgcggcgcattagctagttggtgaggtaacggctcaccaaggcgacgatgcgtagccgacctgagagggtgaccggccacactgggactgagacacggcccagactcctacgggaggcagcagtagggaatcttccgcaatggacgaaagtctgacggagcaacgccgcgtgagcgaagaaggtcttcggatcgtaaagctctgttgtcagggaagaacaagtaccgttcgaacagggcggtaccttgacggtacc

SEQ ID NO: 6317 - DNA, 490 bp, unidentified
  misc_feature 1..490: note = Ascusbbf_36095, encodes 16S rRNA
  source 1..490: mol_type = genomic DNA
agagtttgatcctggctcaggatgaacgctggcggcgtgcctaacacatgcaagtcgaacggactgctataaacggagattcgtcaaagattgtagtaagttagtggcggacgggtgagtaacgcgtgggtaacctgcctcatagagggggataacgattggaaacgatcgctaataccgcataagcccacagtaccgcatggtacagagggaaaagatttcatcgctatgagatggacccgcgtcagattagctggttggtggtgtaacggaccaccaaggcaacgatctgtagccggactgagaggttgaacggccacattgggactgagacacggcccaaactcctacgggaggcagcagtggggaatattgcacaatgggggaaaccctgatgcagcgacgccgcgtgggtgaagaagtttttcggaatgtaaagccctatcagcagggaagataatgacggtacctgactaagaagccccggcta

SEQ ID NO: 6318 - DNA, 468 bp, unidentified
  misc_feature 1..468: note = Ascusbbf_26504, encodes 16S rRNA
  source 1..468: mol_type = genomic DNA
agagtttgatcctggctcagagcgaacgctggcggcaggcctaacacatgcaagtcgagcgcccagcaatgggagcggcagacgggatagtaacacgtgggaacgtacctttcagttcggaacaaccaagggaaactttggctaataccgaatacgcccgtaaggggaaagatttatcgctgaaagatcggcccgcgtctgattagctagttggtgaggtaatggctcaccaaggcgacgatcagtagctggtctgagaggatgatcagcatcactgggactgagacacggcccagactcctacgggaggcagcagtggggaatattggacaatgggcgcaagcctgatccagccatgccgcgtgagtgatgaaggccttagggttgtaaagctctttcgtcagggaagataatgacggtacctgaagaagaagccccggctaacttcgtgccagcagccgcggtaat

SEQ ID NO: 6319 - DNA, 490 bp, unidentified
  misc_feature 1..490: note = Ascusbbf_108990, encodes 16S rRNA
  source 1..490: mol_type = genomic DNA
agagtttgatcatggctcaggacgaacgctggcggcgcgcctaacacatgcaagtcgaacggaggtattgagacggaagcttcggcggaagacttaatactttagtggcgaacgggtgagtaacacgtgaggaacctgcctttaagagggggataacacttagaaataggtgctaataccgcataagaccacagagcggcatcgctcaggggtcaaaggaggaatccgcttaaagatggcctcgcgtccgattaggtagtaggcggggcaacggcccacctagcctgcgatcggtagccggactgagaggttgaacggccacattgggactgagacacggcccagactcctacgggaggcagcagtggggaatattgggcaatgggggaaaccctgacccagcgacgccgcgtgagggaagaaggttttcggattgtaaacctctgtcttcggggacgatagtgacggtacccgaggaggaagccacggc

SEQ ID NO: 6320 - DNA, 490 bp, unidentified
  misc_feature 1..490: note = Ascusbbf_367189, encodes 16S rRNA
  source 1..490: mol_type = genomic DNA
agagtttgatcctggctcaggatgaacgctggcggcgtgtttaacacatgcaagtcgagcgagaaactcatgacagatacttcggttgatggattgagcggaaagcggcggacgggtgagtaacgcgtaggcaacctgccccatgcagagggatagcctcgggaaaccgggattaaaacctcataatgcggagaagagacatctctttcccgccaaagatttatcggcatgggatgggcctgcgtctgattagttagttggtggggtaacggcctaccaaggcgacgatcagtagccgacctgagagggtgatcggccacattggaactgagacacggtccaaactcctacgggaggcagcagtggagaatcttgcacaatgggcgaaagcctgatgcagcaacgccgcgtgaaggatgaaggcccttgggtcgtaaacttctgttctaagggaagatagtgacggtaccttaggagcaagtcccggcta

SEQ ID NO: 6321 - DNA, 490 bp, unidentified
  misc_feature 1..490: note = Ascusbbf_8218, encodes 16S rRNA
  source 1..490: mol_type = genomic DNA
agagtttgatcatggctcaggacgaacgctggcggcgtgcctaacacatgcaagtcgaacggagttattttgaatgaagatttcggttggattttagaatgacttagtggcggacgggtgagtaacgcgtgagtaacctgccgatgagagggggataacgttctgaaaaggacgctaataccgcataacgtatttgagccgcatgacttaaataccaaaggagcaatccgctcattgatggactcgcgtccgattagctagttggcggggtaacagcccaccaaggcgacgatcggtagccggactgagaggttgaacggccacattgggactgagacacggcccagactcctacgggaggcagcagtgggggatattgcgcaatgggggaaaccctgacgcagcaacgccgcgtgaaggacgaaggtcttcggattgtaaacttcttttgttaaggacgaagaaagtgacggtacttaacgaataagct

SEQ ID NO: 6322 - DNA, 490 bp, unidentified
  misc_feature 1..490: note = Ascusbbf_142685, encodes 16S rRNA
  source 1..490: mol_type = genomic DNA
agagtttgatcatggctcaggacgaacgctggcggcgtgcctaatacatgcaagtcggacgaaccaggaagggaacttgttcctttccttggttagtggcagacgggtgagtaacacgtggagaacctacctttcagcgggggataaccattggaaacgatgactaataccgcataggactttgagtcacctgacttaaagaggaaagacggcttcggctgtcactgaaagatggctccgcggtgcattagctagatggtaaggtaacggcttaccatggccatgatgcatagccgacctgagagggtgatcggccacattgggactgagacacggcccaaactcctacgggaggcagcagtagggaatcttccgcaatggacgcaagtctgacggagcaacgccgcgtgtgtgaagaaggtcttcggatcgtaaagcactgttgttagagaagaacacccggtagagtaactgttaccggcatgacggt

SEQ ID NO: 6323 - DNA, 490 bp, unidentified
  misc_feature 1..490: note = Ascusbbf_197522, encodes 16S rRNA
  source 1..490: mol_type = genomic DNA
agagtttgatcatggctcagaatgaacgctggcggcatggattaggcatgcaagtcgaacggggcgcagcaatgcgtccagtggcgaaagggtgaggaacacgtgaagaacctgcccccggatccggaacaagcgctggaaacggcgtctgatacgggatgtggcggggagccgcatggcttccctgctaaagattcatcgtccggggagggcttcgcgtcccattagctggttggcggggtaacggcccaccaaggctgcgacgggtaggtggtctgagaggatggtcacccacactgggactgagacactgcccagactcctacgggaggctgcagtcgagaatcttccgcaatgggggcaaccctgacggagcgatgccgcgtgagggaagtaggccttcgggtcgtgaacctctgtcacccgggacgaatcaagcgacggtaccgggagaggaagccatggctaactacgtgccagcagccgcggt

SEQ ID NO: 6324 - DNA, 490 bp, unidentified
  misc_feature 1..490: note = Ascusbbf_127662, encodes 16S rRNA
  source 1..490: mol_type = genomic DNA
agagtttgatcctggctcagattgaacgctggcggaacgctttacacatgcaagtcgaacggtaacgcggagagaagcttgcttctctccggcgacgagtggcgaacgggtgagtaatacatcggaacgtgtccgctcgtgggggacaaccagccgaaaggttggctaataccgcatgagttctacggaagaaagagggggacccgcaagggcctctcgcgagcggagcggccgatgactgattagccggttggtgaggtaacggctcaccaaagcaacgatcagtagctggtctgagaggacgaccagccacactgggactgagacacggcccagactcctacgggaggcagcagtggggaattttggacaatgggcgcaagcctgatccagctattccgcgtgtgggatgaaggccctcgggttgtaaaccacttttgtagagaacgaaaagacaccttttaaaaaagggtgttgctgacggtactct

SEQ ID NO: 6325 - DNA, 490 bp, unidentified
  misc_feature 1..490: note = Ascusbbf_110447, encodes 16S rRNA
  source 1..490: mol_type = genomic DNA
agagtttgatcatggctcaggatgaacgctggcggcgtgcctaatacatgcaagtcgagcgagaaatgtccgattgaaacttcggtagatttcggacatggaaagcggcggacgggtgagtaacgcgtaggcaacctgccccttgcacagggatagccactggaaacggtgattaatacctgataatgcattcctatcgcctgttagggatgccaaagatttattggcaagggatgggcctgcgtctgattagcttgttggtggggtaacggctcaccaaggcgacgatcagtagccgacctgagagggtgatcggccacattggaactgagacacggtccaaactcctacgggaggcagcagtagggaatcttgcacaatgggcgaaagcctgatgcagcaacgccgcgtgagcgatgaaggcccttgggtcgtaaagctctgtcctatgggaagaaacaaatgacggtaccattggaggaagccccgg

SEQ ID NO: 6326 - DNA, 490 bp, unidentified
  misc_feature 1..490: note = Ascusbbf_47738, encodes 16S rRNA
  source 1..490: mol_type = genomic DNA
agagtttgatcctggctcaggacgaacgctggcggcgtgcttaacacatgcaagtcgaacgaggtttagggaagagcttgctcggaactaaaccgagtggcggacgggtgagtaacgcgtgaggaacctgtctcacacagggggataacgcatcgaaagatgtgctaataccgcataagaccacggtgtcgcatggcacaggggtcaaaggagcaatccggtatgaggtggactcgcgtctgattagatagttggtgaggtaacggcccaccaagtcaacgatcagtagccgacctgagagggtgatcggccacattgggactgagacacggcccagactcctacgggaggcagcagtggggaatattgggcaatgggcgaaagcctgacccagcaacgccgcgtgaaggaagaaggttttcggatcgtaaacttctgtcctacatgaagagaagtagacggtagtgtaggaggaagccccggctaacta

SEQ ID NO: 6327 - DNA, 490 bp, unidentified
  misc_feature 1..490: note = Ascusbbf_8146, encodes 16S rRNA
  source 1..490: mol_type = genomic DNA
agagtttgatcctggctcaggagaaacgctggcggcgcacataagacatgcaagtcgaacggaacttagtcgaatgtttacatgagacgaaagtttagtggcggacgggtgagtaacacgtgagcaacctgcctttaagagggggataacattgagaaatcagtgctaataccgcataacgcatttctaccgcatgatagaaatagccaaaggagaaatccgcttagagatgggctcgcggctgattagttagttggtggggtaatggcctaccaagacgatgatcagtagccgagctgagaggcacaacggccacattgggactgagacacggcccagactcctacgggaggcagcagtcgggaatattgcacaatgggggaaaccctgatgcagtgacgccgcgtataggaagaaggtctttggattgtaaactattgtcgacagggaagaaaaaaatgacagtacctgtggaggaagccccggcaaa

SEQ ID NO: 6328 - DNA, 490 bp, unidentified
  misc_feature 1..490: note = Ascusbbf_6022, encodes 16S rRNA
  source 1..490: mol_type = genomic DNA
agagtttgatcatggctcaggacaaacgctggcggcgtgcctaacacatgcaagtcgaacggacccttcggggttagtggcagacgggtgagtaacacgtaggtaatgtaccttcttgctggggatacctacccgaaagggtggttaataccgaatggtctcatgctgcggcatcgcggtatgagtaaagtgttcagcgcgagaggatcagcctgcgggccatcagcttgttggtggggtaacggcctaccaaggcatcgacggttagccggtctgagaggatgatcggccacactggaactgagacacggtccagactcctacgggaggcagcagtgaggaatattgcgcaatgggcggaagcctgacgcagcgacgccgcgtgagggatgaaggttttcggatcgtaaacctctgttaagcagggaagagaacggacggtacctgctgaggaagcatcggcttactacgtgccagcagccgcggtaat

SEQ ID NO: 6329 - DNA, 490 bp, unidentified
  misc_feature 1..490: note = Ascusbbf_100994, encodes 16S rRNA
  source 1..490: mol_type = genomic DNA
agagtttgatcctggctcagaacgaacgctggcggcatggattaggcatgcaagtcgaacggtgcagcaatgcatagtggcgcaagggtgaggaacgcgtgagtaacctgccctcaagttgggaacagcttctggaaacggaaattaataccgaatgtgaccattggaaggcatcttctgttggttaaaggccgcaaggtcgcttgaggaggggctcgcgtcccattatgctagttggtgaggtaaaggctcaccaaggcgaagatgggtagctggtctgagaggacgatcagccacactgggactgagaactgcccagactcctacgggaggctgcagtcgagaattttgggcaatggacgaaagtctgacccagcaatgccgcgtgcgggatgaaggtcttcggattgtaaaccgctgtcaagtgggacgaaacaaatgacggtaccgctgaaggaagtcacggctaactacgtgccagcagccgcgg

SEQ ID NO: 6330 - DNA, 490 bp, unidentified
  misc_feature 1..490: note = Ascusbbf_107170, encodes 16S rRNA
  source 1..490: mol_type = genomic DNA
agagtttgatcctggctcaggacgaacgctggcggcgtgcctaacacatgcaagtcgaacgagaagtcttgaaatgatcccttcggggtgaatggatagatggacagtggcggacgggcgagtaacgcgtgagtaacctgcccataagagagggatagccgatggaaacgtcgagtaatacctcatattgtaattaattcgcatggattgattatgaaagatttatcgcttatggatggactcgcgtctgattagatagttggtggggtaacggctcaccaagtcgacgatcagtagccgaactgagaggttgatcggccgcattgggactgagacacggcccagactcctacgggaggcagcagtggggaatattgcgcaatggggggaaccctgacgcagcaacgccgcgtgcaggaagaaggtcttcggattgtaaactgttgtcgcaagggaagaaggaagtgacggtaccttgtgagaaagtcac

SEQ ID NO: 6331 - DNA, 490 bp, unidentified
  misc_feature 1..490: note = Ascusbbf_325421, encodes 16S rRNA
  source 1..490: mol_type = genomic DNA
agagtttgatcctggctcaggatgaacgctagcgggaggcctaacacatgcaagccgagcgggatttatttattagcttgctaatgaataatgagagcggcgtacgggtgcggaacacgtgtgtaacctgcccttatcaaggggatagcccagagaaatttggattaataccctataacacaagtagtggcatcactatttgttaaaaactgaggtggataaggatgggcacgcgcaagattagctagttggtgaggtaacggctcaccaaggcgacgatctttagggggcctgagagggtgatcccccacactgggactgagacacggcccagactcctacgggaggcagcagtgaggaatattggacaatgggtggaagcctgatccagccatcccgcgtgaaggacgactgccctatgggttgtaaacttcttttgtatagggataaacctactctcgtgagggtagctgaaggtactatacgaata

SEQ ID NO: 6332 - DNA, 470 bp, unidentified
  misc_feature 1..470: note = Ascusbbf_1540758, encodes 16S rRNA
  source 1..470: mol_type = genomic DNA
agagtttgatcctggctcagaacgaacgctggcggcaggcttaacacatgcaagtcgagcgggcccttcgaggtcagcggcagacgggtgagtaacgcgtgggaatctacccaactctacggaacaacagttggaaacgactgctaataccgtacacgcccttcgggggaaagatttatcggagttggatgagcccgcgttggattagctagttggtggggtaaaggcctaccaaggcgacgatccatagctggtctgagaggatgatcagccacattgggactgagacacggcccaaactcctacgggaggcagcagtggggaatattggacaatgggcgcaagcctgatccagccatgccgcgtgaatgatgaaggccttagggttgtaaagttctttcaccggagaagataatgacggtatccggagaagaagccccggctaacttcgtgccagcagccgcggtaat

SEQ ID NO: 6333 - DNA, 490 bp, unidentified
  misc_feature 1..490: note = Ascusbbf_841, encodes 16S rRNA
  source 1..490: mol_type = genomic DNA
agagtttgatcatggctcaggatgaacgctagcggcaggcttaacacatgcaagtcgaggggcagcgtggagtagcaatactctgacggcgaccggcgaaagggtgagtaacgcgtgagcaacatgcccggtatcgggggatagtcgatggaaacgtcgcgtaataccccgtaacaacagaggccgcatgacctttgtttaagagatttatcgctaccggattggctcgcgtcccattaggcagttggcggggtaacggcccaccaaaccgacgatgggtaggggttctgagaggaaggtcccccacattggaactgagacacggtccagactcctacgggaggcagcagtgaggaatattggacaatggccgagaggctgatccagccatgccgcgtgcgggaagacggccctatgggttgtaaaccgcttttgttggagagcaataagttctacgtgtagagcgatgagagtatccagcgaataagca

SEQ ID NO: 6334 - DNA, 490 bp, unidentified
  misc_feature 1..490: note = Ascusbbf_9686, encodes 16S rRNA
  source 1..490: mol_type = genomic DNA
agagtttgatcctggctcaggacgaacgctggcggcatgcctaacacatgcaagtcgaacggacggaagtagcaatactgaagttagtggcgaacgggtgagtaacacgtgagcaacctgccctatacactgggatagcagttggaaacgactgataataccggataagaccacgctgtcgcatggcagaggggtcaaagcgatttagcggtataggatgggctcgcgtccaattagctagttggtgaggtaacggcccaccaaggcgacgattggtagccgacttgagagagtgatcggccacactggaactgagacacggtccagactcctacgggaggcagcagtggggaatattgggcaatggaggaaactcttacccagcaatgccgcgtgagggatggaggtcctatggattgtaaacctctttgattagggacaaagaaagtgatggtacctaaagaacaagccccggctaactatgtgccag

SEQ ID NO: 6335 - DNA, 490 bp, unidentified
  misc_feature 1..490: note = Ascusbbf_19646, encodes 16S rRNA
  source 1..490: mol_type = genomic DNA
agagtttgatcatggctcaggacgaacgctggcggcatgcttaacacatgcaagtcgaacgggcgtatttggttatagcgatataattggatacgtttagtggcgaacgggtgagtaacgcgtgagcaacctgccttgtacaccgggataacagaccgaaaggactgctaataccggatgagaccacagaggggcatccctcaggggtcaaagtgatttagcggtacaagatgggctcgcgtcctattaggtagttggtgagataacagcccaccaagccgatgataggtagccgacttgagagagtgatcggccacaatggaactgagacacggtccatactcctacgggaggcagcagtggggaatattgggcaatgggcgaaagccttacccagcaatgccgcgtgaatgatgaaggtcttcggattgtaaatttcttttattggtgacgaacaaaatgacggtagccgatgaataagccccggcta

SEQ ID NO: 6336 - DNA, 490 bp, unidentified
  misc_feature 1..490: note = Ascusbbf_16407, encodes 16S rRNA
  source 1..490: mol_type = genomic DNA
agagtttgatcatggctcaggatgaacgctagcggcaggcttaacacatgcaagtcgaggggcagcgggtgtagcaatacatgccggcgaccggcgaaagggtgagtaacgcgtgagcaacgtgcccgtatgtgggggatagtcgatggaaacgtcgcgtaataccccgtaacacatggtctcgcatgggactgtgttgaaagatttattgcatacggatcggctcgcgtgccattaggtagacggcggggtaacggcccaccgtgccgacgatggctaggggttctgagaggaaggtcccccacattggaactgagacacggtccagactcctacgggaggcagcagtgaggaatattggacaatggccggaaggctgatccagccatgccgcgtgcgggaagacggccctatgggttgtaaaccgcttttgcgagggagcaataagagccacgtgtgactcgatgagagtacctcgcgaataagcatc

SEQ ID NO: 6337 - DNA, 490 bp, unidentified
  misc_feature 1..490: note = Ascusbbf_202577, encodes 16S rRNA
  source 1..490: mol_type = genomic DNA
agagtttgatcctggctcaggacgaacgctggcggcgtgcctaatacatgcaagtcgtacgcacagaagctggaaacttgtttccagtggacgtgagtggcgcacgggtgagtaacacgtgggaaacctacccttcagcgggggataaccgtcggaaacgatggctaataccgcataggtctttgagtcacctgacttaaagaggaaagacggcttcggctgtcactgaaggatggtcctgcggtgcattagctagttggtaaggtaacggcttaccaaggcgatgatgcatagccgacctgggagggtgatcggccacattgggactgagacacggcccaaactcctacgggaggcagcagtagggaatcttccgcaatggacgaaagtctgacggagcaacgccgcgtgtgtgaagaaggtcttcggatcgtaaagcactgttattagagaagaacaaccggtagagtaactgttaccggcttgacgg

SEQ ID NO: 6338 - DNA, 490 bp, unidentified
  misc_feature 1..490: note = Ascusbbf_39084, encodes 16S rRNA
  source 1..490: mol_type = genomic DNA
agagtttgatcatggctcagaacgaacgctggcggcgcgtcttaagcatgcaagtcggacggcaagatgccttcgggcatcctagagtggcgaacgggtgagtaacacgtaagtgatctgccccgcagttggggatagcctgtggaaacacagggtaataccggatgagatgtcaatgattgaactatgacatgaaagtggctacggccacgctgtgggatgagcttgcggctcattagctagttgggggtgtaacggaccaccaaggcgacgatgagtagccggcctgagagggtgaacggccacattgggactgagacacggcccagactcctacgggaggcagcagctaagaatattccgcaatgggggaaaccctgacggagcgacgccgcgtgaacgatgaaggcagagatgttgtaaagttcttttatcactggagaataaccggggcagggaatggctccgggatgacgtcaggtgatgaata

SEQ ID NO: 6339 - DNA, 490 bp, unidentified
  misc_feature 1..490: note = Ascusbbf_226008, encodes 16S rRNA
  source 1..490: mol_type = genomic DNA
agagtttgatcatggctcaggatgaacgctagctacaggcttaacacatgcaagtcgaggggcatcgggaagttagcttgctaactttgccggcgaccggcgcacgggtgagtaacgcgtatccaacctaccctgcagtcagggatagcccggcgaaagtcggattaatacctgatgcagtcagaagagggcatctgattttgacgaaagatttcatcgctgcgggatggggatgcgtaggattaggcaggcggcggggcaacggcccaccgcgccgacgatccttaggggttctgagaggaaggtcccccacactggtactgagacacggaccagactcctacgggaggcagcagtgaggaatattggtcaatgggcggtagcctgaaccagccaagtagcgtgcaggacgacggccctacgggttgtaaactgcttttatgcggggataaagtgcgcgacgtgtcgcgttttgtaggtaccgcatgaa

SEQ ID NO: 6340 - DNA, 490 bp, unidentified
  misc_feature 1..490: note = Ascusbbf_10878, encodes 16S rRNA
  source 1..490: mol_type = genomic DNA
agagtttgatcctggctcaggatgaacgctggcggcgtgcttaacacatgcaagtcgaacgagggttaccggttgaaattttcgaatggaaacgggtaatacctagtggcggacgggtgagtaacgcgtggggaacctgccccattccgggggataccagttggaaacgactgttaataccgcataagcgcacagtactgcatggtacggtgtgaaaaaccacggtggaatgggatggccccgcgtctgattagccagttggcagggtaacggcctaccaaagcgacgatcagtagccggcctgagagggcgaccggccacattgggactgagacacggcccaaactcctacgggaggcagcagtggggaatattgcacaatggggggaaccctgatgcagcgacgccgcgtgagtgaagaagtatttcggtatgtaaagctctatcagcagggaagaagatgacggtacctgcacaagaagccccggct

SEQ ID NO: 6341 - DNA, 490 bp, unidentified
  misc_feature 1..490: note = Ascusbbf_29980, encodes 16S rRNA
  source 1..490: mol_type = genomic DNA
agagtttgatcatggctcaggatgaacgctggcggcgtgcttaacacatgcaagtcgaacgaagccaaaaggaagcttgctttctttgaagcttagtggcggacgggtgagtaacgcgtgaggaacctgcccttcagtggggaataacagccggaaacgactgctaataccgcataacgtcatcggaccgcatgatctggtgaccaaaggatttattcgctgaaggatggcctcgcgtccgattaggcagttggtgaggtaacggcccaccaaacctacgatcggtagccgaactgagaggttgatcggccacattgggactgagacacggcccagactcctacgggaggcagcagtggggaatattgggcaatgggcgaaagcctgacccagcaacgccgcgtgaaggatgacggtcttcggattgtaaacttctttgattggggaagaacaaaatgacctacccaaagaacaagtcacggctaactac

SEQ ID NO: 6342 - DNA, 490 bp, unidentified
  misc_feature 1..490: note = Ascusbbf_279149, encodes 16S rRNA
  source 1..490: mol_type = genomic DNA
agagtttgatcatggctcagaacgaacgctggcagcgtggattaggcatgcaagtcgaacgggatccggaaggtagcaatatcggccggtgagagtggcggaagggcgaggaacacgtgggcaacctgtctctgaggtggggaaaaccgctggaaacggcggctaataccgaatgtagcgcccgctcgcatgagcggagcgccaaagggggcgaaagctccccctctccgaggggcccgcgcaccatcagcttgttggcggggtaacggcccaccaaggctcacggttagctggtctgagaggatggccagccgcactgggactgagatactgcccagactcctacgggaggctgcagtcgaggatcatttgcaatgggcgaaagcctgacaatgcgacgctgcgtggaggatgaaggccctcgggttgtaaactcctgtcatgggggaaaaggaaaccctgcccaatacgcagggaatttgatggtacc

SEQ ID NO: 6343 - DNA, 490 bp, unidentified
  misc_feature 1..490: note = Ascusbbf_41338, encodes 16S rRNA
  source 1..490: mol_type = genomic DNA
agagtttgatcatggctcaggacgaacgctggcggcgtgcttcatacatgcaagtcgaacgataaggtctcttcggagatacataagtggcggacgggtgagtaatgtgtagagaatctgccctggagtgggggacaacagttggaaacgactgctaataccgcatatgagcgtacctgcaatggtattcttgaaaactacggtgctccaggatgagtctgcatctgattagctagttgggggtgtaatggaccaccaaggcgacgatcagtagctggtttgagaggatgatcagccacaatgggactgagacacggcccatactcctacgggaggcagcagtagggaattttgcgcaatgggcgaaagcctgacgcagcaacgccgcgtgattgaataagcccttcggggtgtaaagatctgtcagtagggacgaaacttgacggtacctacagaggaagcatcggctaactccgtgccagcagccgcg

SEQ ID NO: 6344 - DNA, 490 bp, unidentified
  misc_feature 1..490: note = Ascusbbf_2802, encodes 16S rRNA
  source 1..490: mol_type = genomic DNA
agagtttgatcctggctcaggacaaacgctggcggcgtgcttaacacatgcaagtcgaacggagtacccgagaaagaagcttcggcagattgatcggaatacttagtggcggacgggtgagtaacacgtgagtaacctgcccttgagtgggggataacactccgaaaggagtgctaataccgcataacatggatatgttgcatggcaaatccatcaaagatttattgctcagggatgggctcgcgcccgattaggtagttggtgaggtaaaggctcaccaagccgacgatcggtagccggactgagaggttgaacggccacattgggactgagacacggcccagactcctacgggaggcagcagtggggaatattgcacaatgggggaaaccctgatgcagcgacgccgcgtgaaggaagaaggtcttcggattgtaaacttttgtcttcggggacgaaaagaatgacggtacccggggaggaagccacg

SEQ ID NO: 6345 - DNA, 490 bp, unidentified
  misc_feature 1..490: note = Ascusbbf_363159, encodes 16S rRNA
  source 1..490: mol_type = genomic DNA
agatttgatcatggctcaggatgaacgctggcggcgtgcttaatacatgcaagtcgaacggggattatttcattgaagcttcggcagatctggtttaatcctagtggcggacgggtgagtaacgcgtgggtaacctgccttatacagggggataacagtcagaaatggctgctaataccgcataagcgcacagggccgcatggcccagtgtgaaaaactgaggtggtataagatggacccgcgttggattagccagttggcagggtaacggcctaccaaagcaacgatccatagccggcctgagagggtgaacggccacattgggactgagacacggcccagactcctacgggaggcagcagtggggaatattgcataatgggggaaaccctgatgcagcgacgccgcgtgaaggaagaagtatctcggtatgtaaacttctatcagcagggaagaaaatgacggtacctgactaagaagccccagctaa

SEQ ID NO: 6346 - DNA, 490 bp, unidentified
  misc_feature 1..490: note = Ascusbbf_4665, encodes 16S rRNA
  source 1..490: mol_type = genomic DNA
agagtttgatcctggctcaggatgaacgctggcggcatgcctaacacatgcaagtcgaacggagttattagacggaagccttcgggtggaagattaataacttagtggcggacgggtgagtaacgcgtgagtaacctgcctctcagagggggataacgttctgaaaagaacgctaataccgcatataatcaagaaaccgcatgattttttgatgaaaggagcaatccgctgagagatggactcgcgtctgattagctagatggtggggtaacggcctaccatggcgacgatcagtagccggactgagaggttgaacggccacattgggactgagacacggcccagactcctacgggaggcagcagtgggggatattgcgcaatgggggaaaccctgacgcagcaatgccgcgtgaaggaagaaggttttcggattgtaaacttcttttgttaaggacgaagaatgacggtacttaacgaataagctccgg

SEQ ID NO: 6347 - DNA, 488 bp, unidentified
  misc_feature 1..488: note = Ascusbbf_5611, encodes 16S rRNA
  source 1..488: mol_type = genomic DNA
agagtttgatcctggctcagaacgaacgctggcggcaggcttaacacatgcaagttgagcgggattggttagtagcttgctactgatcatgagagcagcgcactggtgagtaacacgtgggaacatgcctttaggtgggggacaacagttggaaacgactgctaataccgcatacgcccttagggggaaagatttatcgcctagagattggcccgcggaagattaggtagtaggtggggtaacggcctacctagccgacgatctatagctggtctgagaggacgatcagccacattggaactgagacacggtccagactcctacgggaggcagcagtgaggaatattgggcaatggagggaactctgacccagccatgccgcgtgagtgaagaaggttttcggattgtaaagctctttcgggtgagaagatgatgacggtatcaccagaagaagcaccggctaacttcgtgccagcagccgcggtaat

SEQ ID NO: 6348 - DNA, 490 bp, unidentified
  misc_feature 1..490: note = Ascusbbf_3888, encodes 16S rRNA
  source 1..490: mol_type = genomic DNA
agagtttgatcatggctcaggatgaacgctggcggcgcgcctaacacatgcaagtcgaacgaaatgagtagcttcggttacgagtttagtggcggacgggtgagtaacgcgtggataatttgcctttcagtgggggatagctgagagaaatctcaattaataccgcataacataatttgttcgcatgagtgagttattaaagatgcaaatcgctggaagagaagtctgcgtctgattagcttgttggggtggtaacggcacaccaaggcgatgatcagtaaccggtttgagagagtgaacggtcacattgggactgagatacggcccagactcctacgggaggcagcagtggggaatattgcgcaatggaggaaactctgacgcagcgacgccgtgtgaaggatgaaggccttcgggttgtaaacttttatcgattgtgaaaagcaaggatggtagcaaagtaagaagctccggctaactacgtgccagc

SEQ ID NO: 6349 - DNA, 490 bp, unidentified
  misc_feature 1..490: note = Ascusbbf_64696, encodes 16S rRNA
  source 1..490: mol_type = genomic DNA
agagtttgatcctggctcaggatgaacgccggcggtgtgcctaatacatgcaagtcgagcgcactggcccaactgatatgacgtgcttgcactgatttgacgatggatcaccagtgagcggcggacgggtgagtaacacgtgggcaacctgccctggagcgggggataacatttggaaacagatgctaataccgcataataatcaaaaccacatggttttgatttcaaagatggtttcggctatcactccaggatgggcccgcggtgcattagcttgttggtaaggtaacggcttaccaaggccatgatgcatagccgagttgagagactgatcggccacaatggaactgagacacggtccatactcctacgggaggcagcagtagggaatcttccacaatgggcgcaagcctgatggagcaacaccgcgtgagtgaagaagggtttcggctcgtaaaactctgttgttgaagaagaacgtgcgtgagag

SEQ ID NO: 6350 - DNA, 490 bp, unidentified
  misc_feature 1..490: note = Ascusbbf_18758, encodes 16S rRNA
  source 1..490: mol_type = genomic DNA
agagtttgatcatggctcagattgaacgctggcggcaggcctaacacatgcaagtcgagcggtaacaggggaagcttgcttctcgctgacgagcggcggacgggtgagtaatgtatggggatctgcccgatagagggggataactactggaaacggtggctaataccgcataatctcttaggagcaaagcaggggaccttcgggccttgcgctgtcggatgaacccatatgggattagctagtaggtaaggtaatggcttacctaggcgacgatccctagctggtctgagaggatgatcagccacactgggactgagacacggcccagactcctacgggaggcagcagtggggaatattgcacaatgggcgcaagcctgatgcagccatgccgcgtgtatgaagaaggccctagggttgtaaagtactttcagtcgggaggaaggcgttgatgttaataccatcaacgattgacgttaccgacagaagaa

SEQ ID NO: 6351 - DNA, 490 bp, unidentified
  misc_feature 1..490: note = Ascusbbf_20515, encodes 16S rRNA
  source 1..490: mol_type = genomic DNA
agagtttgatcctggctcaggatgaacgctagctacaggcttaacacatgcaagtcgaggggcagcatgaggccagcttgctggtcttgatggcgaccggcgcacgggtgcgtaacacgtatccaaccttcccagcgctcagggatagccttccgaaaggaagattaacacctgatggtctcgcggcggggcatcccgttgcgagtaaagtattacggcgttggatggggatgcgtccgattaggtagcaggcggggtaacggcccacctggcctacgatcggtaggggttctgagaggaaggtcccccacactggaactgagacacggtccagactcctacgggaggcagcagtgaggaatattggtcaatgggcggaagcctgaaccagccaagtagcgtgagggacgacggccctacgggttgtaaacctcttttgtttgggaataaagtgcgggacgcgtcccgctttgcatgtaccatgcgaata

SEQ ID NO: 6352 - DNA, 490 bp, unidentified
  misc_feature 1..490: note = Ascusbbf_13034, encodes 16S rRNA
  source 1..490: mol_type = genomic DNA
agagtttgatcctggctcaggatgaatgctggcggcatgcctaatacatgcaagtcgagcggcagcgagggtctcatcctgttcttgaagctttcgagaatagaatgagatctgtcggcgagcggcggacggctgagtaacgcgtgggaacggaccccaaactgagggataactagtcgaaagattagctaataccgcatgtgatcttcggattaaagtcttcggacggtttgggactggcctgcgtacgattagatagttggtgaggtaatggctcaccaagtcgacgatcgttagatggtttgagaggatgatcatccagactgggactgagacacggcccagactcctacgggaggcagcagtagggaatctttcacaatgggcgaaagcctgatggagcaatgccgcgtgcaggacgaaggccttcgggttgtaaactgcttttataagcgaggaatatgacggtaacttatgaataaggatcggc

SEQ ID NO: 6353 - DNA, 490 bp, unidentified
  misc_feature 1..490: note = Ascusbbf_18478, encodes 16S rRNA
  source 1..490: mol_type = genomic DNA
agagtttgatcctggctcaggacgaacgctggcggcgtgcttcatacatgcaagtcgaacgagaatcagaagcttgcttctgaggaaagtggcggacgggtgagtaatatgtagagaatctgccctttagcgggggacaacagttggaaacgactgctaataccccatatgagcgtatctgagatgatattcttgaaaactccggtgctagaggatgagtctgcatctgattagctagttggcggtgtaatggaccaccaaggcgacgatcagtagctggtttgagaggatgatcagccacaatgggactgagacacggcccatactcctacgggaggcagcagtagggaattttgcgcaatgggcgaaagcctgacgcagcaacgccgcgtgaccgatgaagcccttcggggtgtaaaggtctgtcagtggggacgaaacttgacggtacccacagaggaagcatcggctaactccgtgccagcagccg

SEQ ID NO: 6354 - DNA, 490 bp, unidentified
  misc_feature 1..490: note = Ascusbbf_63596, encodes 16S rRNA
  source 1..490: mol_type = genomic DNA
agagtttgatcatggctcagaacgaacgctggcggcgtgcttaacacatgcaagtcgaacgagaaaggggcttcggccctgagtagagtggcgcacgggtgagtaacacgtgaataatctacctgaggatctgggataacattccgaaaggagtgctaataccggataagcccacgacttcttcggaaggtgcgggaaaaggtgggacttgttcctactgtcttcagatgagttcgcggcccattagctagttggtgaggtaaaggctcaccaaggcgacgatgggtagctggtctgagaggatgatcagccacactggaactgagacacggtccagactcctacgggaggcagcagtggggaattttgcgcaatgggcgaaagcctgacgcagcaacgccgcgtgagtgatgaaggctttcgagtcgtaaagctctgtcagaggggaagaacaaccttaagttgaataagcttaaggtctgacggtacc

SEQ ID NO: 6355 - DNA, 488 bp, unidentified
  misc_feature 1..488: note = Ascusbbf_67306, encodes 16S rRNA
  source 1..488: mol_type = genomic DNA
agagtttgatcctggctcagaacgaacgctggcggcaggcttaacacatgcaagttgaacgggattttgagatagcttgctattttgaatgagagtggcgcacgggtgagtaatacgtgggaacatacctactagttcggaacaactgatggaaacgtcagctaataccggataagccctgagggggaaagattcatcgctagtagaatggcccgcggcagattaggcagttggtggggtaaaggcctaccaaacctacgatctgtagctggtctgagaggacgatcagccacattgggactgagacacggcccagactcctacgggaggcagcagtgaggaatattgggcaatgggggaaaccctgacccagccatgccgcgtgagtgaagaaggttttcggattgtaaagctctttcgggagagaagatgatgacggtatctccagaagaagccccggcaaacttcgtgccagcagccgcggtaat

SEQ ID NO: 6356 - DNA, 490 bp, unidentified
  misc_feature 1..490: note = Ascusbbf_320014, encodes 16S rRNA
  source 1..490: mol_type = genomic DNA
agagtttgatcctggctcagaacgaacgctggcggcatggattaggcatgcaagtcgaacgggagcagtaatgctccagtggcgcaagggtgaggaacgcgtgagtgacttacccgcaagtttggaacagctcctggaaacgggaattaataccggatgtggtcgatgagctgcatggcttaccgattaaagcagtaatgcgcttgcggatgggctcgcgtcccattagctagttggtgaggtaacggcccaccaaggccatgatgggtagctggtctgagaggacgaccagccacactgggactgagaactgcccagactcctacgggaggctgcagtcgagaattttgggcaatggacgaaagtctgacccagcaatgccgcgtgcgggatgaaggtcttcggattgtaaaccgctgtttggagggacgaaaattgacggtacttccagagaaagccacggctaactacgtgccagcagccgcggtaa

SEQ ID NO: 6357 - DNA, 490 bp, unidentified
  misc_feature 1..490: note = Ascusbbf_19979, encodes 16S rRNA
  source 1..490: mol_type = genomic DNA
agagtttgatcatggctcaggacgaacgctggcggtatgcctaacacatgcaagtcgaacgaaaaacgagggcttgctctcgtttttagtggcgcacgggtgagtaacgcgtgagtaatctgccttaaagtgggggacaacatttggaaacgaatgctaataccgcgtaatatacagttttcgcatgaattttgtattatagatttatcgctttaagatgagctcgcgtccgattagcttgttggcgaggtaaatgctcaccaaggcgacgatcggtagccgggttgagagactggtcggccacattggaactgagacacggtccagactcctacgggaggcagcagtggggaatattgcacaatgggggaaaccctgatgcagcaataccgcgtgagggacgaaggctctagggttgtaaacctctgtttaaagggatgaatttctgacagtacctttagaggaagctccggctaactacgtgccagca

SEQ ID NO: 6358 - DNA, 490 bp, unidentified
  misc_feature 1..490: note = Ascusbbf_56917, encodes 16S rRNA
  source 1..490: mol_type = genomic DNA
agagtttgatcctggctcagattgaacgctggcggcatgccttacacatgcaagtcgaacggtaacggaccttcgggtgccgacgagtggcgaacgggtgagtaatacatcggaacgtgcccgatcgtgggggataacgaggcgaaagctttgctaataccgcatacgatctacggatgaaagcaggggaccgcaaggccttgcgcggacggagcggccgatggcagattaggtagttggtgggataaaagcttaccaagccgacgatctgtagctggtctgagaggatgatcagccacactgggactgagacacggcccagactcctacgggaggcagcagtggggaattttggacaatgggcgcaagcctgatccagccatgccgcgtgcaggatgaaggccttcgggttgtaaactgcttttgtacggaacgaaaagccttcttctaatacaggagggtcatgacggtaccgtaagaataagcaccg

SEQ ID NO: 6359 - DNA, 490 bp, unidentified
  misc_feature 1..490: note = Ascusbbf_132123, encodes 16S rRNA
  source 1..490: mol_type = genomic DNA
agagtttgatcatggctcaggacgaacgctggcggcgtgcctaacacatgcaagtcgaacgagaatcatatgacggaggcttcggccaactgagtatgaggaaagtggcgaacgggtgagtaacgcgtgaggaacctgcctcggagtgggggacaacagttggaaacgactgctaataccgcataatgtgcctgaagggcatccttcgggtaccaaagctttatgtgctctgagatggcctcgcgtctgattagatagttggcggggtaacggcccaccaagtctgcgatcagtagccgggttgagagactgaacggccacattgggactgagatacggcccagactcctacgggaggcagcagtggggaatattgggcaatgggggaaaccctgacccagcaacgccgcgtgaaggaagaaggctttcgggttgtaaacttcttttaccagggacgaaggacgtgacggtacctggagaaaaagccacg

SEQ ID NO: 6360 - DNA, 490 bp, unidentified
  misc_feature 1..490: note = Ascusbbf_34608, encodes 16S rRNA
  source 1..490: mol_type = genomic DNA
agagtttgatcatggctcaggatgaacgctggcggcgtgcttaacacatgcaagtcgaacgggatacttacagtggagacttcggttgaagcagtaaattatctagtggcggacgggtgagtaacgcgtgggtaacctgcccattagaggaggataacagggagaaattcttgctaatactccatatgcttacggtatcgcatgatacagtgaggaaagaattttgctaatggatggacccgcgtttgattagccagttggtggggtaacggcctaccaaagctacgatcaatagccggcctgagagggtgatcggccacattgggactgagacacggcccaaactcctacgggaggcagcagtggggaatattgcacaatggggggaaccctgatgcagcaacgccgcgtgagtgaagaagtatttcggtatgtaaagctctatcgatgggaaataagatgaaggtacccaaataagaagccccggcta

SEQ ID NO: 6361 - DNA, 490 bp, unidentified
  misc_feature 1..490: note = Ascusbbf_116382, encodes 16S rRNA
  source 1..490: mol_type = genomic DNA
agagtttgatcctggctcaggatgaacgctggcggcgtgcctaacacattcaagtcgaacggagttattgcggtgaggccctcgggcggaactgttttaacttagtggcggacgggtgagtaacgcgtgagcaacctgcctttgcaaccgggataacagccggaaacggctgctaatacgggatgacgtataactgccgcatggtggatataccaaagatccgttgtgcaaagatgggctcgcgtctgattagatagttggcggggtaacggcccaccaagtcgacgatcagtagccggactgagaggttgaacggccacattggaactgagatacggtccagactcctacgggaggcagcagtggggaatattgggcaatggacgaaagtctgacccagcgacgccgcgtgagggaagaaggtcttcggattgtaaacctctgttgatagggaagaagcaagtgacggtacctatcgaggaagtcacgg

SEQ ID NO: 6362 - DNA, 490 bp, unidentified
  misc_feature 1..490: note = Ascusbbf_51067, encodes 16S rRNA
  source 1..490: mol_type = genomic DNA
agagtttgatcatggctcagaatgaacgttggcggcatggattaggcatgcaagtcgtgcgagaagctcccttcggggagtggaaagcggcgaaagggagagtaacgcgtgggtatctgccctcaggtctgggatagcggcgggaaactgccggtaataccagataatgtcttcggactaaaggtgtgattccgcctgtggatgggcccgcgtcctattagcttgttggtgaggtaatggctcaccaaggccgcgatgggtaccgggcgtgagagcgtggcccggctcactgggactgagacactgcccagacacctacgggtggctgcagtcgagaatcttcggcaatgggcgaaagcctgaccgagcgatgccgcgtgcgggatgaaggccctcgggttgtaaaccgctgtcagaggggaggaaatattggggggttctccccccagtttgacctagcctcgaaggaaggacgggctaagttcgtgcc

SEQ ID NO: 6363 - DNA, 490 bp, unidentified
  misc_feature 1..490: note = Ascusbbf_175287, encodes 16S rRNA
  source 1..490: mol_type = genomic DNA
agagtttgatcctggctcaggatgaacgctagcggcaggcctaacacatgcaagtcgaggggcagcgcggtgtagcaatacactggcggcgaccggcgcacgggtgcgtaacgcgtatgcaacccacccgcgacaggggcataacggggggaaacccccactaattccccgtaaggccgcgtccccgcatggggatgcggcgaaagccttcgggcggttgcggacgggcatgcgtgacattagctagttggcggggcaacggcccaccaaggctgcgatgtctaggggagctgagaggctaatcccccacactggtactgagacacggaccagactcctacgggaggcagcagtgaggaatattggtcaatggtcggaagactgaaccagccatgccgcgtgggggaaggaggccctatgggtcgtaaaccccttttagccgggagtaataagggtcctgcggggcctgatgagagtaccggcggaataa

SEQ ID NO: 6364 - DNA, 490 bp, unidentified
  misc_feature 1..490: note = Ascusbbf_61831, encodes 16S rRNA
  source 1..490: mol_type = genomic DNA
agagtttgatcatggctcaggatgaacgctagcggcaggcttaacacatgcaagtcgaggggcagcgcgttgtagcaatacaatggcggcgaccggcgcaagggtgcgtaacgcgtgagcaatctgcccgtgtcagggggataagcgatggaaacgtcgtctaataccgcataacaacctgggaggcatcttccgggcttgaaagatacgtcggacacggatgagctcgcgagacattagttagttggcggggtaacggcccaccaagaccgcgatgtctaggggaactgagaggttggtcccccacactggaactgagacacggtccagactcctacgggaggcagcagtgaggaatattggacaatggccggaaggctgatccagccatgccgcgtgaaggataaggtcctatggattgtaaacttcttttgagtgggagcaataagggtgtcgtgacacccgatgagagtaccattcgaataagcat

SEQ ID NO: 6365 - DNA, 490 bp, unidentified
  misc_feature 1..490: note = Ascusbbf_28126, encodes 16S rRNA
  source 1..490: mol_type = genomic DNA
agagtttgatcatggctcaggatgaacgctggcggcgtgcctaacacatgcaagtcgaacgatgaaatacggagacgagttttcggacgagaggaagtatggaatagtggcggacgggtgagtaacgcgtggataatctgccccatacagggggatagcagttggaaacgactgataacaccgcataagcgcacggagaggcatctctttgtgtgaaaatctacggaggtaagggatgagtccgcgtccgattagccagttggcggggtaagagcccaccaaagcgacgatcggtagccggcctgagagggcggacggccacattgggactgagacacggcccagactcctacgggaggcagcagtgggggatattgcacaatggggggaaccctgatgcagcgacgccgcgtgggtgaagaagtatttcggtatgtaaagccctatcagcagggaagaaagtgacggtacctgagtaagaagccccggc

SEQ ID NO: 6366 - DNA, 490 bp, unidentified
  misc_feature 1..490: note = Ascusbbf_288952, encodes 16S rRNA
  source 1..490: mol_type = genomic DNA
agagtttgatcctggctcaggatgaacgctggcggcatgcctaagacatgcaagtcgaacgaggtggccctttgaaggatgcgtgcttgcacaattctggaaaaggattttccacctagtggcagacgggtgagtaacacgtgggtgacctacctctaagttggggataacagttggaaacgattgctaataccgaatgagatataactgtcatggttatattgaaaggagctttcaagcttcgcttagaaatgggcctgcggcgtattaactagttggtggggtaatggcctaccaaggtaacgatgcgtagccggactgagaggttgaacggccacactgggactgagacacggcccagactcctacgggagacagcagttaggaatattcgtcaatgggggaaaccctgaacgagcaatgccgcgtgagtgatgaaggtctttggattgtaaaactctgttgtatggaaaaaacggctaggttagga

SEQ ID NO: 6367 - DNA, 490 bp, unidentified
  misc_feature 1..490: note = Ascusbbf_736674, encodes 16S rRNA
  source 1..490: mol_type = genomic DNA
agagtttgatcctggctcaggatgaacgctggcggcgtgcctaacacatgcaagtcgaacggacctatcatttaacagagacttcggttgaagttggttttaggttagtggcggacgggtgagtaacgcgtggagaacctgccctgtactgggggataacagtgagaaatcactgctaataccgcataagcgcacggaaccgcatggttttgtgtgaaaaactccggtggtacaggatggctccgcgttggattagcctgttggcggggtaacggcccaccaaagctacgatccatagccggcctgagagggtgaacggccacattgggactgagacacggcccagactcctacgggaggcagcagtggggaatattgcacaatggggggaaccctgatgcagcgacgccgcgtgaaggaagaagtatctcggtatgtaaacttctatcagcagggaagaaaatgacggtacctgactaagaagccccgg

SEQ ID NO: 6368 - DNA, 490 bp, unidentified
  misc_feature 1..490: note = Ascusbbf_281557, encodes 16S rRNA
  source 1..490: mol_type = genomic DNA
agagtttgatcatggctcaggacgaacgctggcggcgtgcctaacacatgcaagtcgaacgagaaatatggaaaggatcccttcggggagaatagaaatatggacagtggcggacgggcgagtaacgcgtgagtaacctgcccataagcgggggatagccgatggaaacgtcgagtaataccccatgatgtatatatatcgcatggtatatatatcaaagatttatcgtttatggatggactcgcgtctgattagatagttggtgaggtaacggctcaccaagtcgacgatcagtagccgaactgagaggttgatcggccgcattgggactgagacacggcccagactcctacgggaggcagcagtgggggatattgcgcaatggggggaaccctgacgcagcaacgccgcgtgcaggaagaaggtcttcggattgtaaactgttgtcgcaagggaagaagaaagtgacggtaccttgtgagaaagtcac

SEQ ID NO: 6369 - DNA, 490 bp, unidentified
  misc_feature 1..490: note = Ascusbbf_1459368, encodes 16S rRNA
  source 1..490: mol_type = genomic DNA
agagtttgatcatggctcagaacgaacgctggtggcgtgtcttatacatgcaagtcgagcgaggcagcgatgccgagcggcgaacgggtgagtaacgcgtaagcgatctgcctcatatcaggaaatacccgtgccaacgcgcggttaatgtccaggagggtggccagctgcatggctggttgactagagatttatcggtgtgggatgagcttgcgtccgattagctagttggcggggcaacggcccaccaaggcgacgatcggtagccggcctgagagggtgatcggccacattgggactgagatacggcccagactcctacgggaggcagcagtagggaatattgcacaatgggggaaaccctgatgcagcaacgccacgtgtgggaagaagcatttcggtgtgtaaaccactgtcatgagggaataaggcccgttttaggacgggattgaatgtaccttgagaggaaacaccggcaaacttcgtgcca

SEQ ID NO: 6370 - DNA, 490 bp, unidentified
  misc_feature 1..490: note = Ascusbbf_143119, encodes 16S rRNA
  source 1..490: mol_type = genomic DNA
agagtttgatcatggctcagattgaacgctggcggcatgctttacacatgcaagtcggacggcagcgaggaagtgcttgcacttctgtcggcgagtggcgaacgggtgagtaatgcattggaacgtaccgagtagtgggggataactgtccgaaaggatagctaataccgcatacgacctgagggtgaaagcgggggactcttagagcctcgcgctatttgagcggccaatgtctgattaggtagttggtggggtaaaggcctaccaagccgacgatcagtagcgggtctgagaggatgatccgccacactgggactgagacacggcccagactcctacgggaggcagcagtggggaattttggacaatgggggcaaccctgatccagccatgccgcgtgtctgaagaaggccttcgggttgtaaaggacttttgtcggggaagaaaaggaattggttaatacccagttctgatgacggtacccgaagaa

SEQ ID NO: 6371 - DNA, 490 bp, unidentified
  misc_feature 1..490: note = Ascusbbf_113346, encodes 16S rRNA
  source 1..490: mol_type = genomic DNA
agagtttgatcatggctcaggatgaacgctggcggcgtgcttaatacatgcaagtcgaacgaagcatgttgacggaatcccctcggggaggaagatgacatgacttagtggcggacgggtgagtaacgcgtgggcaatctgccctgtacagggggacaacagttggaaacgactgctaataccgcataagcgcacgatgaccgcatggtcaggtgtgaaaaggagcaatccggtacaggatgagcccgcgtccgattagccagttggcggggtaacggcccaccaaagctacgatcggtagccgacttgagagagtgatcggccacattgggactgagacacggcccagactcctacgggaggcagcagtagggaatattgcacaatgggggaaaccctgatgcagcgacgccgcgtgagtgaagaagcatttcggtgcgtaaagctctatcagcagggaagatgatgacggtacctgactaagaagccc

SEQ ID NO: 6372 - DNA, 490 bp, unidentified
  misc_feature 1..490: note = Ascusbbf_281856, encodes 16S rRNA
  source 1..490: mol_type = genomic DNA
agagtttgatcatggctcagattgaacgctagcgggatgccttacacatgcaagtcgaacggcagcacggacttcggtctggtggcgagtggcgaacgggtgagtaatgtatcggaacgtgcctagtagcgggggataactacgcgaaagcgtagctaataccgcatacgccctacgggggaaagcaggggatcgtaagaccttgcactattagagcggccgatatcggattagctagttggtggggtaacggctcaccaaggcgacgatccgtagctggtttgagaggacgaccagccacactgggactgagacacggcccagactcctacgggaggcagcagtggggaattttggacaatgggggaaaccctgatccagccatcccgcgtgtgcgatgaaggccttcgggttgtaaagcacttttggcaggaaagaaacgttccgggttaataccccgggaaactgacggtacctgcagaataagcac

SEQ ID NO: 6373 - DNA, 490 bp, unidentified
  misc_feature 1..490: note = Ascusbbf_300189, encodes 16S rRNA
  source 1..490: mol_type = genomic DNA
agagtttgatcatggctcaggatgaacgctagctacaggcttaacacatgcaagtcgaggggcagcatggacttagcttgctaagtccgatggcgaccggcggacgggtgagtaacgcgtatccaaccttcccgcgagtaggggatagcccggagaaatccggattaataccctatgtgcccgagagatgacatcagaccccgggcaaagattcatcgctcgcggatggggatgcgtccgattaggcagcaggcggggtgacggcccacctggccttcgatcggtaggggttctgagaggaaggtcccccacactggtactgagacacggaccagactcctacgggaggcagcagtgaggaatattggtcaatgggcgagagcctgaaccagccaagtagcgtgcaggacgacggccctacgggttgtaaactgcttttaccaggggataaaagtcgccacgcgtggcgttttgcaggtacctggtgaat

SEQ ID NO: 6374 - DNA, 490 bp, unidentified
  misc_feature 1..490: note = Ascusbbf_96807, encodes 16S rRNA
  source 1..490: mol_type = genomic DNA
agagtttgatcatggctcaggatgaacgctggcggcgcgcctaacacatgcaagtcgaacgaagcatttatacggatcccttcggggtgaaggatttatgacttagtggcggacgggtgagtaacgcgtggggaacctgccccgtacagggggataacagttagaaatgactgctaataccgcataagcgcacacgaaggcatcttcgagtgtgaaaagccgagacggtacgggagggccccgcgtctgattagctggttggtggggtaacggcctaccaaggcgacgatcagtagccgaactgagaggttgatcggccacattgggactgagacacggcccagactcctacgggaggcagcagtgggggattttgcacaatggggggaaccctgatgcagcgacgccgcgtgagtgaagaagtatttcgatacgtaaagctctatcagcagggaagaaaatgacggtacctgactaagaagccccggct

SEQ ID NO: 6375 - DNA, 490 bp, unidentified
  misc_feature 1..490: note = Ascusbbf_140446, encodes 16S rRNA
  source 1..490: mol_type = genomic DNA
agagtttgatcatggctcaggatgaacgctggcggcgtgcttaacacatgcaagtcgaacgaggctcatctgtggaagttttcggatggaaacggatgtgaccgagtggcggacgggtgagtaacgcgtggggaacctgccccattccgggggataccagttggaaacgactgttaataccgcataagcgcacgggaaggcatcttccagtgtgaaaaactgaggtggaatgggatggccccgcgtctgattagccagttggcagggtaacggcctaccaaagcgacgatcagtagccggcctgagagggcgaccggccacattgggactgagacacggcccaaactcctacgggaggcagcagtggggaatattgcacaatggggggaaccctgatgcagcgacgccgcgtgagtgaggaagtatttcggtatgtaaagctctatcagcagggaagaagatgacggtacctgcacaagaagccccggct

SEQ ID NO: 6376 - DNA, 490 bp, unidentified
  misc_feature 1..490: note = Ascusbbf_197210, encodes 16S rRNA
  source 1..490: mol_type = genomic DNA
agagtttgatcatggctcagaacgaacgctggcggcgcgtcttaagcatgcaagtcggacggcaagatcggtgcttgcactgatcctagagtggcggactggtgagtaacgcgtgggtgacgtaccctccggacggggatagctactagaaatagtagataataccggatacggtgcactgtgtcagaggcagtgcaggaaaggttcttttgaaccgccgggggagcggcccgcgtgccattagctagttggtggggtaacggcttaccaaggcaacgatggctacccggcctaagagggggatcgggcacattgggactgagatacggcccagactcctacgggaggcagcagctaagaatattccgcaatgggggaaaccctgacggagcgacgccgcgtggacgatgaaggccggaaggttgtaaagtccttttaggtacgaggaataagtagagtgagagaaacgctttacggtgacggtagtacc

SEQ ID NO: 6377 - DNA, 490 bp, unidentified
  misc_feature 1..490: note = Ascusbbf_65378, encodes 16S rRNA
  source 1..490: mol_type = genomic DNA
agagtttgatcatggctcaggatgaacgctggcggcgtgcttaacacatgcaagtcgaacgaggtccatggagcttgctccggaagatctagtggcgaacgggtgcgtaacacgtgagaaacctgccccggtctctgggataacagttggaaacgactgctaataccggatgccatcgctccgccgcatgatggagcgatgaaagatttatcggatcgggagggtctcgcggcctatcagcttgttggagaggtaacggctcaccaaggcatcgacgggtagctggtctgagaggatgatcagccacactgggactgagacacggcccagactcctacgggaggcagcagtggggaatcttgcacaatgggcgaaagcctgatgcagcaacgccgcgtgcgggaagaaggccctagggttgtaaaccgctttcagcagggaagaaaatgacggtacctgcagaagaaggtgcggccaactacgtgccagc

SEQ ID NO: 6378 - DNA, 490 bp, unidentified
  misc_feature 1..490: note = Ascusbbf_705281, encodes 16S rRNA
  source 1..490: mol_type = genomic DNA
agagtttgatcctggctcaggatgaacgctggcggcgtgcttaacacatgcaagtcgaacggagcacccatgaaggagttttcggacaacagattggaatgcttagtggcggacgggtgagtaacgcgtgaggaacctgcctcggagtggggaataacacagtgaaaattgtgctaataccgcataacgcagttgagtcgcatggctctgactgccaaagatttatcgctctgagatggcctcgcgtctgattagcttgttggcggggtaacggcccaccaaggcgacgatcagtagccggactgagaggttgatcggccacattgggactgagacacggcccagactcctacgggaggcagcagtggggaatattgggcaatgggcgcaagcctgacccagcaacgccgcgtgaaggaagaaggctttcgggttgtaaacttcttttaagagggacgaaacaaatgacggtacctcttgaataagccac

SEQ ID NO: 6379 - DNA, 490 bp, unidentified
  misc_feature 1..490: note = Ascusbbf_695310, encodes 16S rRNA
  source 1..490: mol_type = genomic DNA
agagtttgatcatggctcaggatgaacgctggcggcgtgcctaacacatgcaagtcgagcggagttaacagaagattcttcgaatgattttgtcaacttagcggcggatgggtgagtaacacgtgggtaatctgccctgcacagggggataacagctggaaacggctgttaataccgcatatgcacacgttatcgcatgatagagtgtggaaagatttatcggtgcaggatgagcccgcgtcggattaacttgttggcagggtaacggcctaccaaggtgatgatccgtagccggcctgagagggcgaccggccacattgggactgagacacggcccaaactcctacgggaggcagcagtggggaatattgcacaatgggcgcaagcctgatgcagcgacgccgcgtgaaggaagacgtatttcggtatgtaaacttctatcagcggggaagaagatgacggtacccgactaagaagccccggctaacta

SEQ ID NO: 6380 - DNA, 489 bp, unidentified
  misc_feature 1..489: note = Ascusbbf_77108, encodes 16S rRNA
  source 1..489: mol_type = genomic DNA
agagtttgatcctggctcagaacgaacgctggcggcaggcttaacacatgcaagttgaacgggattgttccggtagcttgctactggagcatgagagtagcgcactggtgagtaacacgtgggaacgcacccattggtgggggatagcaattggaaacgattgataataccgcataagccctaagggggaaagattgattgccgatggaacggcccgcggaagattaggtagttggtggggtaaaggcctaccaagcctacgatctatagctgatctgagaggatgaacagccacattggaactgagacacggtccagactcctacgggaggcagcagtgaggaatattgggcaatggaggaaactctgacccagccatgccgcgtgagtgagaaggtcttcggattgtaaagctcttttatgcaggaagatgatgacagtactgcaagaaaaagcaccggcaaacttcgtgccagcagccgcggtaat

SEQ ID NO: 6381 - DNA, 490 bp, unidentified
  misc_feature 1..490: note = Ascusbbf_62751, encodes 16S rRNA
  source 1..490: mol_type = genomic DNA
agagtttgatcatggctcaggatgaacgctagcggcaggcctaacacatgcaagtcgagcgggatccaccttcgggtggtgagagcggcgcacgggtgcgtaacgcgtatacaacctaccttttgctacgggatagcccagagaaatttggattaacaccgtatagtataatttcccggcatcgggggcttattaaaggctacggcaaaagatgggtatgcgtcctattagctagatggtgtggtaacggcataccatggcaacgataggtaggggccctgagagggggatcccccacactggtactgagacacggaccagactcctacgggaggcagcagtgaggaatattggacaatgggcgcaagcctgatccagccatgccgcgtgcaggaagactgccctatgggttgtaaactgcttttatacgggaagaaacaccccctcgtgagggggcttgacggtaccgtaggaataaggatcggctaac

SEQ ID NO: 6382 - DNA, 490 bp, unidentified
  misc_feature 1..490: note = Ascusbbf_90854, encodes 16S rRNA
  source 1..490: mol_type = genomic DNA
agagtttgatcatggctcaggatgaacgctggcggcgtgcttaacacatgcaagtcgaacggacatatgtcaccgctgttgatttagcttgctattgacgcagcaccggcatatgttagtggcggacgggtgagtaacgcgtgggcaacctgcctttatccgggggataacagttagaaatgactgctaataccgcataagcgcacggtaccgcatggtacagtgtgaaaaactccggtggatagagatggacccgcgttagattagccagttggcggggtaacggcccaccaaagcgacgatctatagccggcctgagagggcgaccggccacattgggactgagacacggcccaaactcctacgggaggcagcagtggggaatattgcacaatgggggaaaccctgatgcagcgacgccgcgtgagtgaagaagtatttcggtatgtaaagctctatcagcagggaagaaaaaggacggtacctgcac

SEQ ID NO: 6383 - DNA, 490 bp, unidentified
  misc_feature 1..490: note = Ascusbbf_137298, encodes 16S rRNA
  source 1..490: mol_type = genomic DNA
agagtttgatcatggctcaggatgaacgctggcggcgtgcttaatacatgcaagtcgaacgagcagagatattcgtatcgaagcgagtggcggacgggtgagtaacgcgtgggaaacctgccctataccgggggataacagttggaaacgactgctaataccgcataagcgcacggtgtcgcatgacattgtgtgaaaaactccggtggtataggatggtcccgcgtctgattagctagttggtgaggtaacggcccaccaaggcgacgatcagtagccgacctgagagggtgaccggccacattgggactgagacacggcccaaactcctacgggaggcagcagtagggaatattggacaatgggggcaaccctgatccagcgacgccgcgtgagtgaagaagtatttcggtatgtaaagctctatcagcagggaagaaaatgacggtacctgactaagaagcaccggctaaatacgtgccagcagccg

SEQ ID NO: 6384 - DNA, 490 bp, unidentified
  misc_feature 1..490: note = Ascusbbf_155325, encodes 16S rRNA
  source 1..490: mol_type = genomic DNA
agagtttgatcatggctcagagcgaacgttagcggcgcgcctaacacatgcaagtcgcacggggtagcaatacccagtggcgcacgggtgcgtaacacgtagataacctgccctgaagagggggataacgttccgaaaggagcgctaataccgcataacgccgagttgggtttgcctgattcggacaaaggctgggaccagcaatggccagtcgctttaggaggggtctgcggcccatcagctagttggtaaggtaaaggcttaccaaggcaaagacgggtagctggtctgagaggatgatcagccacactggtactggaacacggaccagactcctacgggaggcagcagtggggaatcttggtcaatgggcgcaagcctgaaccagcgacgccgcgtgagtgatgaaggccttcgggttgtaaagctctgtggggagggacgaaagactgaggtctaataggcttcaggttgacggtacctccttagc

SEQ ID NO: 6385 - DNA, 470 bp, unidentified
  misc_feature 1..470: note = Ascusbbf_81569, encodes 16S rRNA
  source 1..470: mol_type = genomic DNA
agagtttgatcatggctcagaacgaacgctggcggcaggcctaacacatgcaagtcgagcgctccagcaatggagagcggcagacgggtgagtaacgcgtgggaaccttcccagtggtacggaatagctcagggaaacttggggtaataccgtatacgccccttgggggaaagatttatcgccattggatgggcccgcgttggattagctagttggtgaggtaacggctcaccaaggcgacgatccatagctggtctgagaggatgaccagccacactgggactgagacacggcccagactcctacgggaggcagcagtggggaatattggacaatgggcgcaagcctgatccagccatgccgcgtgagtgacgaaggtcttcggattgtaaagctcttttggcggggacgataatgacggtacccgcagaataagccccggctaacttcgtgccagcagccgcggtaat

SEQ ID NO: 6386 - DNA, 359 bp, unidentified
  misc_feature 1..359: note = Ascusbbf_394497, encodes 16S rRNA
  source 1..359: mol_type = genomic DNA
agagtttgatcatggctcagaacgaacgctggcggcgcgtcttaagcatgcaagtcggacggcagggcaccttcgggtgtccgagagtggcgaacgggtgagtaacacgtaagtgatctgccctgcagttggggatagcctgtggaaacacagggtaataccggatgagatgtcaatgattgaactatgacatgaaagtggctatggccacgctgcaggatgagcttgcggctcattagctagttgggggtgtaacggaccaccaaggcgacgatgagtagccggcctgagagggtgaacggccacattgggactgagacacggcccagactcctacgggagccagcagccgcggtaat

SEQ ID NO: 6387 - DNA, 490 bp, unidentified
  misc_feature 1..490: note = Ascusbbf_1067063, encodes 16S rRNA
  source 1..490: mol_type = genomic DNA
agagtttgatcatggctcaggatgaacgctagcggcaggcttaacacatgtaagtcgaggggcagcgcgggtagcaatacctggcggcgaccggcggaagggtgcgtaacgcgtgagcaacctgcccgtatcagggggataagcgatggaaacgccgtctaataccccataacaacagaggctgcatgacctttgtttgaaagattcgtcggatacggatgggctcgcgagacattagctagttggagtggtaacggcacaccaaggcgacgatgtctaggggttctgagaggaaggtcccccacattggaactgagacacggtccaaactcctacgggaggcagcagtgaggaatattggtcaatggccgcaaggctgaaccagccatgccgcgtgcgggaataaggccctatgggtcgtaaactgcttttgtggtggagcaataagacgtacgtgtacgtcgatgagagtacatcacgaataagcatc

SEQ ID NO: 6388 - DNA, 490 bp, unidentified
  misc_feature 1..490: note = Ascusbbf_1149773, encodes 16S rRNA
  source 1..490: mol_type = genomic DNA
agagtttgatcctggctcagaacgaacgctggcggcgcgtcttaagcatgcaagtcgagcgagctacttcggtagcgagcggcgcacgggtgagtaacgcgtagatgatctacccttgagacggagatacctctgggaaactggagttaatacccgataacgcacattggttggttccgatgtgttaaagcggtgcaagtcgcacttgaggatgagtctgcggcctatcagctagttggtggggtaacggcctaccaaggcgaagacgggtagctgatctgagaggatgatcagccacattgggactgagacacggcccaaactcctacgggaggcagcagtagggaatattgcgcaatggggggaaccctgacgcagcgacgccgcgtgagtgatgacggcctttttggttgtaaagctctgtaaagagggaaaaatgttgcagtgaagagctgcaattgatggtacctctaaagtaaggaccggctaa

SEQ ID NO: 6389 - DNA, 490 bp, unidentified
  misc_feature 1..490: note = Ascusbbf_398561, encodes 16S rRNA
  source 1..490: mol_type = genomic DNA
agagtttgatcatggctcaggatgaacgctagcgataggcttaacacatgcaagtcgaggggcagcataattttagcttgctaagattgatggcgaccggcgcacgggtgcgtaacgcgtatgcaacttgcctgtcagagggggataacccggagaaattcggactaataccgcatatacttattttgttgcatgacagattaaggaaagatttattgctgacagataggcatgcgttccattagttagttggtgaggtaacggctcaccaagacgacgatggatagggggactgagaggttgaccccccacactggtactgagatacggaccagactcctacgggaggcagcagtgaggaatattggtcaatgggcgaaagcctgaaccagccaagtcgcgtgaaggatgacggttctatggattgtaaacttcttttgtacaggattaaaagcttctacgtgtagggggaattgcagttactgtacga

SEQ ID NO: 6390 - DNA, 490 bp, unidentified
  misc_feature 1..490: note = Ascusbbf_282286, encodes 16S rRNA
  source 1..490: mol_type = genomic DNA
agagtttgatcatggctcaggacgaacgctggcggcgtgcttcacacatgcaagtcgaacggaaaggcccagcttgctgggtgctcgagtggcgaacgggtgagtaacacgtgggtaacctgcccccatcttcgggataactgttggaaacgatggctaataccggatactactactggtcgcatggcctggtggtggaaagcttttgcggttggggaggggctcgcggcctatcagctggttggtggggtgatggcctaccaaggcggtgacgggtagccggcctgagagggcggtcggtcacattgggactgagatacggcccagactcctacgggaggcagcagtggggaattttgcacaatgggcggaagcctgatgcagcgacgccgcgtgagggatgacggctttcgggttgtaaacctcttttatccatgacgaaggtcgggtttttgcttggctgacggtagtggttgaataagcgccggct

SEQ ID NO: 6391 - DNA, 490 bp, unidentified
  misc_feature 1..490: note = Ascusbbf_698042, encodes 16S rRNA
  source 1..490: mol_type = genomic DNA
agagtttgatcctggctcagaatgaacgctggcggcatggattaggcatgcaagtcgaacgccccgggcttgcccggggagtggcgaaagggtgcgcaacgcgtggggaacccgcccccgggcccgggacaagcgctggaaacggcgtctgatacgggatgcggacccgcctggcatcaggcggcgtccaaagattcatcgcccggggagggccccgcgtcccattagcttgttggcggggtgacggcccaccaaggcttcgacgggtaggtggtctgagaggatggtcacccacactgggactgagacactgcccagactcctgcgggaggctgcagtcgagaatcttccgcaatgggcgaaagcctgacggagcgatgccgcgtaagggacggaggccttcgggtcgtgaacctctgtcacccgggacgaaggacgacggtaccgggagaggaagccacggctaactacgtgccagcagccgcggtaa

SEQ ID NO: 6392 - DNA, 490 bp, unidentified
  misc_feature 1..490: note = Ascusbbf_131099, encodes 16S rRNA
  source 1..490: mol_type = genomic DNA
agagtttgatcatggctcaggatgaacgctggcggcgtgcctaatacatgcaagtcgagcgagattctgtcagatgagacttcggtggattcagacggatgaaagcggcggacgggtgagtaacgcgtaggcaacctgccccatgcacagggatagccactggaaacggtgattaatacctgataatgcggaccgtatgcatatacggactgccaaagatttatcggcaagggatgggcctgcgtctgattagctggttggtgaggtaacggctcaccaaggcgacgatcagtagccgacctgagagggtgatcggccacattggaactgagacacggtccaaactcctacgggaggcagcagtagggaatcttgcacaatgggcgaaagcctgatgcagcaacgccgcgtgaaggaagaaggccttcgggttgtaaacttcttttctcggggaagaaacaaatgacggtacctgaggaataagccccgg

SEQ ID NO: 6393 - DNA, 490 bp, unidentified
  misc_feature 1..490: note = Ascusbbf_557339, encodes 16S rRNA
  source 1..490: mol_type = genomic DNA
agagtttgatcctggctcaggacgaacgctggcggcgtgcttcatacatgcaagtcgaacgagaatctggagcttgcttcagaggaaagtggcggacgggtgagtaatatgtagagagtctgccctttagcgggggacaacagttggaaacgactgctaataccccatatgcgcgtagttgagatactattcgtgaaaactccggtgctaaaggatgagtctgcatctgattagctagttgggggtgtaatggaccaccaaggcgacgatcagtagctggtttgagaggatgatcagccacaatgggactgagacacggcccatactcctacgggaggcagcagtagggaattttgcgcaatgggcgaaagcctgacgcagcaacgccgcgtgaccgatgaagcccttcggggtgtaaaggtctgtcagtggggacgaaacttgacggtaccctcagaagaagcaccggctaactccgtgccagcagccg

SEQ ID NO: 6394 - DNA, 468 bp, unidentified
  misc_feature 1..468: note = Ascusbbf_332159, encodes 16S rRNA
  source 1..468: mol_type = genomic DNA
agagtttgatcctggctcagaacgaacgctggcggcaggcttaacacatgcaagtcgagcgccccgcaaggggagcggcagacgggtgagtaacacgtggggatctgcccaatggtacggaatagctccgggaaactggaattaataccgtatgagcccgcaaggggaaagatttatcgccattggatgaacccgcgtcggattagctagttggtgtggtaaaggcgcaccaaggcgacgatccgtagctggtctgagaggatgatcagccacactgggactgagacacggcccagactcctacgggaggcagcagtggggaatattggacaatgggcgcaagcctgatccagccatgccgcgtgagtgatgaaggccttagggttgtaaagctctttcgccgacgaagataatgacggtagtcggagaagaagccccggctaacttcgtgccagcagccgcggtaat

SEQ ID NO: 6395 - DNA, 481 bp, unidentified
  misc_feature 1..481: note = Ascusbbf_1333948, encodes 16S rRNA
  source 1..481: mol_type = genomic DNA
agagtttgatcctggctcagaacgaacgctggcggcacgcttaacacatgcaggtcggacggagtgtaagggcttgcgcttacacttagtggcggacgggtgagtaacacgtgggaacatatcctgtagtggtggatagctctgggaaactggaggtaatacagcataagctcgagagaggaaagagagattgctataggggtggcccgcggctgatttggtagttggtggggtaaaggcctaccaagccgaggatcagtagctggcctgagaggatggacagccacactgaaactgagatacggctcagactcctacgggaggcagcagtggggaatattggacaatgggggcaaccctgatccagcgatgccgcgtgagtgaagaaggtcttaggattgtaaagctcttttgacagggaagatgatgacggtacctgtagaataagcaccggctaactctgtgccagcagccgcgtaat

SEQ ID NO: 6396 - DNA, 490 bp, unidentified
  misc_feature 1..490: note = Ascusbbf_72466, encodes 16S rRNA
  source 1..490: mol_type = genomic DNA
agagtttgatcatggctcaggacgaacgctggcggcgtgcttaacacatgcaagtcgagcggtaaggccctttcgggggtacacgagcggcgaacgggtgagtaacacgtgagtgacctgccctaaactttgggataacagtcggaaacgattgctaatactggatatgacctttcatcgcatggtggggggtggaaagcttttgcggtttgggatggactcgcggcctatcagcttgttggtgcggtagtggcgtaccaaggcttcgacgggtagccggcctgagagggcgaccggccacattgggactgagatacggcccaaactcctacgggaggcagcagtgggaatattgcacaatgggcgcaagcctgatgcagcaacgccgcgtgtgggatgacggccttcgggttgtaaaccactttcgacagggacgaagcgtgagtgacggtacctgtagaagaagcaccggccaactacgtgccagcag

SEQ ID NO: 6397 - DNA, 490 bp, unidentified
  misc_feature 1..490: note = Ascusbbf_190139, encodes 16S rRNA
  source 1..490: mol_type = genomic DNA
agagtttgatcatggctcaggatgaacgctggcggcgtgcataacacattcaagtcgaacggaacaagcccttcgggacttgtttagtggcggacgggtgagtaacgcgtgagcaacctgcctctttgtacgggataacgtcgggaaactgacgctaatacggtatgacgcataggattcgcatgggttttatgccaaagatttattgcagagagatgggctcgcgtccgattagatagttggtgaggcaacggctcaccaagtcgacgatcggtagccggactgagaggttgaacggccacattggaactgagaaacggtccagactcctacgggaggcagcagtggggaatattgggcaatgggcgaaagcctgacccagcgacgccgcgtgaaggaagacggtcctcggattgtaaacttcttttataagggacgaaatatgacggtaccttatgaataagccacggctaactacgtgccagcagcc

SEQ ID NO: 6398 - DNA, 490 bp, unidentified
  misc_feature 1..490: note = Ascusbbf_721072, encodes 16S rRNA
  source 1..490: mol_type = genomic DNA
agagtttgatcctggctcagaatgaacgttggcggcgtggattaggcatgcaagtcgagcggcaaggtttccttcgggagaccctagagcggcggaagggataggacagtatagataacgtgcctcttagctcaggatagcgtctggaaacgggcgataatactgaatgacgtgtacgcacgaaaggtgtaattccgctaagagatcggtctatatcctattagctagttggtaaggtaacggcttaccaaggcgatgatgggtacggggcgtgagagcgtgaccccgatcactgggactgagacactgcccagacgcctacgggcggctgcagtcgagaatcttcggcaatggacgcaagtctgaccgagcgacgccgcgtgtatgatgaaggtcttcggattgtaaagtactgtcgattaggcggaaggagtaagggcaaacctttacttttgacctattatttgaggaaggacgggctaagttcgtg

SEQ ID NO: 6399 - DNA, 490 bp, unidentified
  misc_feature 1..490: note = Ascusbbf_452876, encodes 16S rRNA
  source 1..490: mol_type = genomic DNA
agagtttgatcatggctcaggacgaacgctggcggcgtgcctaatacatgcaagttgaacgcttctttcttatcgaacttcggttcaccaagaaagaggagtagcgaacgggtgagtaacacgtgggtaacctgcccatcagcgggggataacacttggaaacaggtgctaataccgcataatgctttttctcacatgagagaaagctgaaaggcgcttttgcgtcactgatggatggacccgcggtgcattagctagttggtagggtaacggcctaccaaggcaacgatgcatagccgacctgagagggtgatcggccacactgggactgagacacggcccagactcctacgggaggcagcagtagggaatcttcggcaatggacgaaagtctgaccgagcaacgccgcgtgagtgaagaaggttttcggatcgtaaaactctgttgttagagaagaataaggatgagaagagaatgttcatcccttga

SEQ ID NO: 6400 - DNA, 490 bp, unidentified
  misc_feature 1..490: note = Ascusbbf_194417, encodes 16S rRNA
  source 1..490: mol_type = genomic DNA
agagtttgatcatggctcaggataaacgctggcggcgtgcctaatacatgcaagttgagcggatggcttcggccattagcagcgaacgggtgagtaacacgtaggcaacctgccctgttgactgggataactgaccgaaaggtttgctaataccggataataatatatatcgcatgatatatagatgaaagttgggacacaacacaacaggatgggcctgcggcgcattagctagatggtgagatagcagcccaccatggtaatgatgcgtagccgatctgagaggatgtacggccacattggaactgagacacggtccagactcctacgggaggcagcagtagggaattttcggcaatggagggaactctgaccgagcaacgccgcgtgaacgaagaaggccttcgggtcgtaaagttttgttattgaggatgaaagatgcttatagggaatgataagtaagtgacagtacttgatgaggaagtcacgg

SEQ ID NO: 6401 - DNA, 490 bp, unidentified
  misc_feature 1..490: note = Ascusbbf_896931, encodes 16S rRNA
  source 1..490: mol_type = genomic DNA
agagtttgatcctggctcaggatgaacgctagcgacaggcctaacacatgcaagtcgaacgagcgaaagagtgcttgcactctctagctagtggcggacgggtgagtaacacgtgagcaatctgcctttcggtgggggataccaattggaaacgattgttaataccccataacatagataagccgcatgacctatctatcaaagatttattgccggaagatgagctcgcgtctgattaggtagttggtgaggtaacggcccaccaagccgacgatcagtagccggactgagaggttgaacggccacattgggactgagacacggcccagactcctacgggaggcagcagtggggaatattgcacaatgggcgaaagcctgatgcagcgatgccgcgtgagggaagaaggttttaggattgtaaacctctgtctttggggacgataatgacggtacccaaggaggaagctccggctaactacgtgccagca

SEQ ID NO: 6402 - DNA, 490 bp, unidentified
  misc_feature 1..490: note = Ascusbbf_357446, encodes 16S rRNA
  source 1..490: mol_type = genomic DNA
agagtttgatcatggctcagaacgaacgctggcggcgcgtcttaagcatgcaagtcgaacggcaaggggagcttgctccccctagagtggcggactggtgagtaacacgtgggtgacatgcccttcggttgggaatagctactagaaatagtagataatgccgaatacggttgcactttttagagaggtgtaaagaaaggagcttcggctccgccggaggattggcccgcggcccattagctagttggtgaggtaaaggcccaccaaggcaatgatgggtatccggcctgagagggtgatcggacacattgggactgagatacggcccagactcctacgggaggcagcagctaagaatattccgcaatggacgaaagtctgacggagcgacgccgcgtggatgattgaaggccgaaaggttgtaaaatccttttggatcggaagaataagtacgggagggaatgcctgtatggtgacggtacgatccgaa

SEQ ID NO: 6403 - DNA, 490 bp, unidentified
  misc_feature 1..490: note = Ascusbbf_965240, encodes 16S rRNA
  source 1..490: mol_type = genomic DNA
agagtttgatcatggctcagaatgaacgctggcggcatggattaggcatgcaagtcgaacggcagggcagcgatgcccgagagtggcgaaagggtgagcaacgcgtggggaacctgccccggggaccggaacaagcctgtgaaaacgggtctgaaaccggatgaggccccgcaccgcatggtgcggcggcgaaatattcatagccccgggagggccccgcgtcccattagcttgttggcggggtgacggcccaccaaggcgacgacgggtaggtggtctgagaggatggtcacccacactgggactgagacactgcccagactcctacgggaggctgcagtcgagaatcttccgcaatgggcgcaagcctgacggagcgatgccgcgtgggggaggaaggccttcgggttgtaaacccctgtcggacgggacgaaaccaaacgacggtaccgtccaaggaagccacggctaactacgtgccagcagccgc

SEQ ID NO: 6404 - DNA, 490 bp, unidentified
  misc_feature 1..490: note = Ascusbbf_1888766, encodes 16S rRNA
  source 1..490: mol_type = genomic DNA
agagtttgatcatggctcaggatgaacgctagcggcaggcttaacacatgcaagtcgaggggcagcgggtgtagcaatacatgccggcgaccggcgcaagggtgcgtaacgcgtgagcgacatgcccgtgacctggggataaccgatggaaacgtcgcctaacccccaatacgatacacattcgcatggacgtgtattgaaaaccttggtggtcacggattggctcgcgtcccattaggtagacggcggggtaacggcccaccgtgccgacgatgggtaggggttctgagaggaaggtcccccacaatggaactgagacacggtccatactcctacgggaggcagcagtgaggaatattggtcaatgggcggaagcctgaaccagccatgccgcgtgcgggacgacggccctacgggttgtaaaccgcttttgtgtgtgagcaataagggcgcttcgtgcgtccgatgagagtagcatacgaataagcat

SEQ ID NO: 6405 - DNA, 490 bp, unidentified
  misc_feature 1..490: note = Ascusbbf_149918, encodes 16S rRNA
  source 1..490: mol_type = genomic DNA
agagtttgatcctggctcaggacgaacgctggcggcgtgcttaacacatgcaagtcgagcggtaaggctccttcgggagtacacgagcggcgaacgggtgagtaacacgtgagcaatctgcccttcacatcggaataaccctgggaaactggggctaataccgaatatcacttccggtggcatcatcggaagttgaaagctccggcggtgaaggatgagctcgcggcctatcagcttgttggtgaggtaaaggctcaccaaggcaacgacgggtagccggcctgagagggtgaccggccacactgggactgagacacggcccagactcctacgggaggcagcagtggggaatattggacaatgggcggaagcctgatccagcaacgccgcgtgagggatgacggccttcgggttgtaaacctctttcagcagggacgaagcgaaagtgacggtacctgcagaagaagcaccggccaactacgtgccagca

SEQ ID NO: 6406 - DNA, 490 bp, unidentified
  misc_feature 1..490: note = Ascusbbf_1505869, encodes 16S rRNA
  source 1..490: mol_type = genomic DNA
agagtttgatcatggctcaggatgaacgctagctacaggcttaacacatgcaagtcgaggggcagcatgggtgtggctttccacacctgatggcgaccggcgcacgggtgagtaacgcgtatccaaccttccccccggtaggggacagcccggtgaaaaccggattaataccctatgccgtcacaccggggcatcttaatgtgacgaaagatttatcgcctggggatggggatgcgtctgattaggcagtaggcggggcaacggcccacctagccaccgatcagtaggggttctgagaggaaggtcccccacattggaactgagacacggtccaaactcctacgggaggcagcagtgaggaatattggtcaatgggcggaagcctgaaccagccaagtagcgtgagggatgacggccctacgggttgtaaacctcttttatgcggggataaccgcctccacgggtgggggcctgcaggtaccgcatgaat

SEQ ID NO: 6407 - DNA, 374 bp, unidentified
  misc_feature 1..374: note = Ascusbbf_1336907, encodes 16S rRNA
  source 1..374: mol_type = genomic DNA
agagtttgatcctggctcaggatgaacgctggcggcgtgcttaacacatgcaagtcgaacgaggattgtcggttgaagttttcggatggaaactggcaataccgagtggcggacgggtgtgtaacgcgtgggggacctgccccattccgggggataccagttggaaacgactgttaataccgcataagcgcacggcatcgcatgatgcagtgtgaaaaactgaggtggaatgggatggccccgcgtctgattagccagttggcagggtaacggcctaccaaagcgacgatcagtagccggcctgagagggcgaccggccacattgggactgagacacggcccaaactcctacgggagccagcagccgcggtaat

SEQ ID NO: 6408 - DNA, 490 bp, unidentified
  misc_feature 1..490: note = Ascusbbf_304145, encodes 16S rRNA
  source 1..490: mol_type = genomic DNA
agagtttgatcctggctcagaatgaacgctggcggcgtgcttaacacatgcaagtcgagcgtgaaagtccttcgggatgagtaaagcggcggacgggtgagtaacgcgtgagaatctgccctacagtgaagaataccttcgagaaattgaagttaatactgcatacgtccctacggggagaaaggtggctttatgctatcgctgaaggatgagcttgcgtactattagctagttggtggggtaatggcctaccaaggcattgatggttaaccggcctgagagggtgtacggtcacattggaactgagacacggtccagactcctacgggaggcagcagtgaggaatattgcacaatgggcgaaagcctgatgcagcgacgccgcgtggaggatgaaggtcttcggattgtaaacttctgttaagtgggaagaaaaaagcattcttaatacgaatgcagatgacggtaccactagagaaagcaccggctaa

SEQ ID NO: 6409 - DNA, 490 bp, unidentified
  misc_feature 1..490: note = Ascusbbf_1824635, encodes 16S rRNA
  source 1..490: mol_type = genomic DNA
agagtttgatcatggctcaggacgaacgctggcggcgtgcctaatacatgcaagtcgagcgagggtcttcggaccctagcggcggacgggtgagtaacacgtaggcaacctgcccataagactgggataacatagggaaacttatgctaataccggatagagtcttctcccgcatgagagaagacggaaaggtggcgcaagctaccacttgtggatgggcctgcggcgcattagctagttggtggggtaacggcccaccaaggcgacgatgcgtagccgacctgagagggcgaccggccacactgggactgagacacggcccagactcctacgggaggcagcagtagggaattttccacaatggacgaaagtctgatggagcaacgccgcgtgaacgatgaaggtcttcggattgtaaagttctgttgtcagggacgaacaagtaccgttcgaacagggcggtaccttgacggtacctgacgagaaagcc

SEQ ID NO: 6410 - DNA, 490 bp, unidentified
  misc_feature 1..490: note = Ascusbbf_1158615, encodes 16S rRNA
  source 1..490: mol_type = genomic DNA
agagtttgatcctggctcaggacgaacgctggcggcgtgcctaatacatgcaagtcgagcgaacagatgaggagcttgctcctctgacgttagcggcggatgggtgagtaacacgtgggcaacctgccctgtagttggggataactccgggaaaccggggctaataccgaataattagtttcttcgcatgatgaaactctgaaagacggcttcggctgtcactacgggatgggcccgcggcgcattagctagttggtggggtaatggcctaccaaggcgacgatgcgtagccgacctgagagggtgatcggccacactgggactgagacacggcccagactcctacgggaggcagcagtagggaatcttccacaatggacgaaagtctgatggagcaacgccgcgtgagcgaagaaggttttcggatcgtaaagctctgttgtgagggaagaacaagtacaggagtaactgtctgtaccttgacggtacc

SEQ ID NO: 6411 - DNA, 490 bp, unidentified
  misc_feature 1..490: note = Ascusbbf_1552770, encodes 16S rRNA
  source 1..490: mol_type = genomic DNA
agagtttgatcatggctcaggatgaacgctggcggcgtgcctaacacattcaagtcgaacgaactgtagaaatacagtgagtggcggacgggtgagtaacgcgtaagcaatctgccttcgtgtgcggaataacaaccggaaacagttgctaataccgcatgatgcaacagaatcgcatggttttattgccaaagatttatcgcacgaagatgagcttgcgtccgattagatagttggcggggcaacggcccaccaagtcaacgatcggtagccggactgagaggttgaacggccacattggaactgagagacggtccagactcctacgggaggcagcagtggggaatattgggcaatggacgaaagtctgacccagcgacgccgcgtgagggaagaaggtcttcggattgtaaaccttagtcaacagggacgaagcaagtgacggtacctgtggaggaagccacggctaactacgtgccagcagccgcgg

SEQ ID NO: 6412 - DNA, 490 bp, unidentified
  misc_feature 1..490: note = Ascusbbf_161303, encodes 16S rRNA
  source 1..490: mol_type = genomic DNA
agagtttgatcatggctcaggacgaacgctggcggcgtgcttaacacatgcaagtcgaacgaagcagaggggcttgcccctttgacttagtggcggacgggtgagtaacgcgtgagcaacctgcctctatctgggggataacacagagaaatttgtgctaataccgcatattatctttggaaggcatcttccttagatgaaagatttatcggatagagatgggctcgcgtcccattagatagttggtgaggtaacggcccaccaagtcgacgatgggtagccgacctgagagggtgatcggccacattggaactgagaaacggtccagactcctacgggaggcagcagtgaggaatattgggcaatggaggcaactctgacccagcaacgccgcgtgaatgatgaaggtcttcggattgtaaagttctgtgatgggggacgaagaaagtgacggtaccccaagagcaagccacggctaactacgtgccag

SEQ ID NO: 6413 - DNA, 470 bp, unidentified
  misc_feature 1..470: note = Ascusbbf_94624, encodes 16S rRNA
  source 1..470: mol_type = genomic DNA
agagtttgatcatggctcagaatgaacgctggcggcaggcctaaaacatgcaagtcgaacgctctagcaatagagagtggcgcacgggtgagtaacacgtgggaatatgccttttggtacggaacaacgtctggaaacggacgctaataccgtatggtccctccggggtaaagatttatcgccaaaagattagcccgcgtctgattagctagttggtgaggtaatggctcaccaaggcgacgatcagtagctggtctgagaggacgatcagccacactgggactgagacacggcccagactcctacgggaggcagcagttaggaatattggacaatgggcgcaagcctgatccagccatgccgcgtgagtgatgaaggccttcgggttgtaaagctctttagtccacgaatataatgactgtagtggaagaataagccccggctaacttcgtgccagcagccgcggtaat

SEQ ID NO: 6414 - DNA, 490 bp, unidentified
  misc_feature 1..490: note = Ascusbbf_247390, encodes 16S rRNA
  source 1..490: mol_type = genomic DNA
agagtttgatcatggctcaggatgaacgctggcggcgtgcataacacattcaagtcgaacggcgaagcaccttcgggtgcggagcagtggcggacgggtgagtaacgcgtgagcaacctgccgtacagagggggataacacagggaaacttgtgctaataccgcataacgcacggacatcgcatggtgagcgtgccaaagagaaattgctgtacgatgggctcgcgtatgattagacagttggcggggtaacggcccaccaaatcaacgatcattagccgaactgagaggttgaacggccacattggaactgagaaacggtccagactcctacgggaggcagcagtggggaatattgggcaatgggcgaaagcctgacccagcgacgccgcgtgagggaagaaggtcttcggattgtaaacctctttcagcagggaagaaggaagtgacggtacctgcagaagaagtcacggctaactacgtgccagcag

SEQ ID NO: 6415 - DNA, 490 bp, unidentified
  misc_feature 1..490: note = Ascusbbf_326410, encodes 16S rRNA
  source 1..490: mol_type = genomic DNA
agagtttgatcctggctcaggatgaacgctagcggcaggcttaacacatgcaagtcgaggggcagcgcgagagtagcaatacgcttggcggcgaccggcggaagggtgcgtaacgcgtgagcaacatgcccgtcacagggggataacagttggaaacgactcctaataccccataacacaagggatgacatcttcccttgttgaaagttacggcggtgacggattggctcgcgtgacattagctagtcggcggggtaacggcccaccgaggcgacgatgtctaggggttctgagaggaaggtcccccacactggaactgagacacggtccagactcctacgggaggcagcagtgaggaatattggtcaatgggcggaagcctgaaccagccatgccgcgtgaaggaataaggccctatgggtcgtaaacttcttttgtggtggagcaataagtgttacgtgtagcacgatgagagtacatcacgaataag

SEQ ID NO: 6416 - DNA, 490 bp, unidentified
  misc_feature 1..490: note = Ascusbbf_221468, encodes 16S rRNA
  source 1..490: mol_type = genomic DNA
agagtttgatcatggctcaggacgaacgctggcggcgtgcttaacacatgcaagtcgagcggaaaggccctttcgggggtactcgagcggcgaacgggtgagtaacacgtgagtaatctgccctgtgctctgggatagccaccggaaacggtgattaataccggatatgacgtgctcctgcatgggagtgtgtggaaagttttttcggcatgggatgtgctcgcggcctatcagcttgttggtgaggtaatggcttaccaaggctttgacgggtaaccggcctgagagggtgaccggtcacactgggactgagacacggcccagactcctacgggaggcagcagtggggaatattggacaatgggcggaagcctgatccagcaacgccgcgtgagggatgacggccttcgggttgtaaacctctttcagtaccggcgaaggctctgctttttggtggggttgacggtaggtacagaagaaggaccggcca

SEQ ID NO: 6417 - DNA, 490 bp, unidentified
  misc_feature 1..490: note = Ascusbbf_1651205, encodes 16S rRNA
  source 1..490: mol_type = genomic DNA
agagtttgatcctggctcaggatgaacgctggcggcgtgcttaacacatgcaagtcgaacgggaagacttttaggaagatttcggttggaataaaagtattctagtggcggacgggtgagtaacgcgtaaacaatctgccttagagagggggataacagatagaaatatttgctaataccgcataagaccacgtttaggcatctagatggggtaaaaggagaaatccactttaagatgagtttgcgtactattagttagttggtgaggtaacggcccaccaagacgaggatggttagccggcctgagagggtgaccggccacattggaactgagatacggtccagactcctacgggaggcagcagtgaggaatattgggcaatgggcgaaagcctgacccagcaacgccgcgtgaaggaagaaggttttaggattgtaaacttctgttatgggggaaaaagaaagtgatggtaccccatgagaaagctac

SEQ ID NO: 6418 - DNA, 490 bp, unidentified
  misc_feature 1..490: note = Ascusbbf_1351760, encodes 16S rRNA
  source 1..490: mol_type = genomic DNA
agagtttgatcatggctcagaacgaacgctggcagcgtggattaggcatgcaagtcgaacgggatcgggaagatagcaatatcggcccgtgagagtggcggaagggcgaggaacacgtgagcaacctgtccaggagacggggaaaacctcgggaaactgaggctaataccggatgcggcgtcccggcacatgccgggagcgccaaagggggcgaaagctcccgctccacgaggggctcgcgcaccatcagcttgttggcggggtaacggcccaccaaggcttacggttagctggtctgaggggatggccagccgcactgggactgagatactgcccagactcctacgggaggctgcagtcgaggatcattcgcaatgggggaaaccctgacgatgcgacgctgcgtggaggatgacggccttcgggttgtaaactcctgtcatgaaggaaaaggcgaggggacccaacacgtcccttagttgatggtact

SEQ ID NO: 6419 - DNA, 367 bp, unidentified
  misc_feature 1..367: note = Ascusbbf_436647, encodes 16S rRNA
  source 1..367: mol_type = genomic DNA
agagtttgatcatggctcaggacgaacgctggcggcgtgcttaacacatgcaagtcgaacgaggtttactgaagagcttgctctgaggtagaccgagtggcggacgggtgagtaacgcgtgaggaacctgtcttacacagggggataacgcaccgaaaggtgtgctaataccgcataagaccacactttcgcatggaagaggggtcaaaggagcgatccggtgtaaggtggactcgcgtcccattaggcagttggcggggtaacggcccaccaaaccgacgatgggtagccgacctgagagggtgatcggccacattggaactgagacacggtccaaactcctacgggagccagcagccgcggtaat

SEQ ID NO: 6420 - DNA, 490 bp, unidentified
  misc_feature 1..490: note = Ascusbbf_1749388, encodes 16S rRNA
  source 1..490: mol_type = genomic DNA
agagtttgatcctggctcaggatgaacgctggcggcgtgcctaacacatgcaagtcgagcgagatgctgttgaacagagattcgtcaacggaatggagcggaaagcggcggacgggtgagtaacgcgtaggcaacctgccccttacacagggatagccattggaaacgatgattaaaacctgatgataccggaagatgacatcttcatccggtcaaagatttatcggtaagggatgggcctgcgtctgattagatagttggtgaggtaacggcccaccaagtcaacgatcagtagccgacctgagagggtgatcggccacattggaactgagacacggtccaaactcctacgggaggcagcagtggggaatattacacaatgggggaaaccctgatgcagcaacgccgcgtgaaggatgaaggtcttcggatcgtaaacttctgtccttgaggaagataatgacggtactcttggaggaagccccggcta

SEQ ID NO: 6421 - DNA, 490 bp, unidentified
  misc_feature 1..490: note = Ascusbbf_1891572, encodes 16S rRNA
  source 1..490: mol_type = genomic DNA
agagtttgatcatggctcaggatgaacgctggcggcgtgcttaatacatgcaagtcgaacgaagcactttccccggactttttcggaacgaagggggttgtgacttagtggcggacgggtgggtaacgcgtggataacctgccccatgcagggggacaacagctggaaacggctgctaataccgcataagcgcacagtgaggcatctcacggtgtgaaaagatttatcggcatgagatggatccgcgtctgattagccagttggcggggtaacggcccaccaaagcgacgatcagtagccgacttgagagagtgatcggccacattgggactgagacacggcccagactcctacgggaggcagcagtagggaatattgcacaatgggggaaaccctgatgcagcgacgccgcgtgagtgatgaagtatttcggtacgtaaagctctatcagcagggaagatgatgacggtacctgactaagaagccccgg

SEQ ID NO: 6422 - DNA, 490 bp, unidentified
  misc_feature 1..490: note = Ascusbbf_418089, encodes 16S rRNA
  source 1..490: mol_type = genomic DNA
agagtttgatcatggctcaggatgaacgctggcggcgtgcttaacacatgcaagtcgaacggacatggcaccggagcagaagagttcgcttggacgctccaccgtcatgttagtggcggacgggtgagtaacgcgtgagcaaccaaccctatgcagggggataacagttagaaatgactgctaataccgcataagcccacactgccgcatggcagagggggaaaagatttatcggcataggacgggctcgcgtccgattagttagttggtggggtaacggcctaccaagaccgcgatcggtagccggcctgagagggtgatcggccacattgggactgagacacggcccaaactcctacgggaggcagcagtggggaatattgcacaatgggggaaaccctgatgcagcaacgccgcgtgagtgaagaagtatttcggtatgtaaagctctatcaatggggaagaaaacgacggtacccatataagaagc

SEQ ID NO: 6423 - DNA, 490 bp, unidentified
  misc_feature 1..490: note = Ascusbbf_740125, encodes 16S rRNA
  source 1..490: mol_type = genomic DNA
agagtttgatcctggctcaggacgaacgctggcggcgtgcctaacacatgcaagtcgagcggagttatttgacggaaagcttcggccggaaggcgaataacttagcggcggacgggtgagtaacgcgtgagcaacctgtcctctacagggggataagacagcgaaagttgttctaataccgcataagaccacgcagtcgcatggctgaggggtcaaaggagtaatccggtagagggtgggctcgcgtccgattagatagttggtgaggtaacggcccaccaagtcaacgatcggtagccgacctaagagggtgatcggccacattgggactgagacacggcccagactcctacgggaggcagcagtggggaatattgggcaatgggcgaaagcctgacccagcaacgccgcgtggaggaagaaggtcttcggatcgtaaactcctgtcctaaaggacgagaggaagacggtactttaggaggaagccccg

SEQ ID NO: 6424 - DNA, 490 bp, unidentified
  misc_feature 1..490: note = Ascusbbf_518109, encodes 16S rRNA
  source 1..490: mol_type = genomic DNA
agagtttgatcctggctcaggacgaacgctggcggcgtgcctaacacatgcaagtcgaacggaactttgcgctgaacatgagattagcttgctaaaggattattcttgtaaagtttagtggcggacgggtgagtaacgcgtgaggaacctgccttacagagggggacaacagttggaaacgactgctaataccgcataacatagctgtgggacatcccatagttatcaaaggagcaatccgctgtaagatggcctcgcgtccgattagatagttggcggggtaacggcccaccaagtcgacgatcggtagccggactgagaggttgaacggccacattgggactgagacacggcccagactcctacgggaggcagcagtgggggatattgcacaatggaggaaactctgatgcagcaacgccgcgtgagggaagaaggttttcggattgtaaacctctgttttcagtgacgaaacaaatgacggtagctg

SEQ ID NO: 6425 - DNA, 490 bp, unidentified
  misc_feature 1..490: note = Ascusbbf_1882384, encodes 16S rRNA
  source 1..490: mol_type = genomic DNA
agagtttgatcatggctcaggatgaacgctggcggcgtgcctaacacatgcaagtcgaacggttaaggccccctcgggggcgcataaagtggcgaacgggtgagtaacacgtgaccaacctgcccccgtcaccgggataacgtcgggaaaccgacgctaataccggatactcaggggcccccgcatggggggcccgggaaagcccaggcggacggggatggggtcgcggcccattaggtagacggcggggtgacggcccaccgtgccgacgatgggtagccgggttgagagaccgaccggccacattgggactgagacacggcccagactcctacgggaggcagcagtggggaattttgcgcaatgggcgaaagcctgacgcagcaacgccgcgtgcgggacggaggccttcgggtcgtaaaccgctttcagcagggaagaccacgactgtacctgcagaagaagccccggctaaatacgtgccagcagc

SEQ ID NO: 6426 - DNA, 490 bp, unidentified
  misc_feature 1..490: note = Ascusbbf_743988, encodes 16S rRNA
  source 1..490: mol_type = genomic DNA
agagtttgatcctggctcagattgaacgctggcggcatgcttaacacatgcaagtcgaacggcagcacggtctagcttgctagatgggtggcgagtggcgaacgggtgagtaacgcgtaggaatatgccttgaagagtgggataacctggggaaactcaggctaataccgcataatctcgcgagaggaaagctggggaccttcgggcctggcgctttaagattagcctgcgtccgattagctagttggtggggtaagggcctaccaaggcgacgatcggtagctggtctgagaggatggccagccacactgggactgagacacggcccagactcctacgggaggcagcagtggggaatattggacaatggggggaaccctgatccagcaatgccgcgtgtgtgaagaaggcctatgggttgtaaagcactttcagtggggaggagtattgattggttaagagctgattaataggacgttacccacagaag

SEQ ID NO: 6427 - DNA, 490 bp, unidentified
  misc_feature 1..490: note = Ascusbbf_1840597, encodes 16S rRNA
  source 1..490: mol_type = genomic DNA
agagtttgatcatggctcaggatgaacgctagcggcaggcctaacacatgcaagtcgaggggcagcgcgggatagcaatatcctggcggcgaccggcagaagggtgcgtaacgcgtgagcgacatgcccgtcatcgggggacaagcgctggaaacggcgtctaataccccatatgcctggggagtgcatgcttccttggtgaaagtttcgacggtgacggattggctcgcgtctgattagctagtcggcggggtaacggcccaccgaggcgacgatcagtaggggttctgagaggaaggtcccccacactggaactgagacacggtccagactcctacgggaggcagcagtgaggaatattggtcaatgggcggaagcctgaaccagccatgccgcgtgcaggaataaggccctatgggtcgtaaactgcttttgcgatggagcaataaggtccacgcgtggaccgacgagagtacatcgcgaataagca

SEQ ID NO: 6428 - DNA, 490 bp, unidentified
  misc_feature 1..490: note = Ascusbbf_917077, encodes 16S rRNA
  source 1..490: mol_type = genomic DNA
agagtttgatcatggctcaggacgaacgctggcggcatgcctaatacatgcaagtcgagcgaacgattagaagcttgcttctaatcgttagcggcggacgggtgagtaacacgtgggcaacctaccttacagatggggataactccgggaaaccggggctaataccgaataatccattctctcgcatgagtgaatgttgaaagacggcttttagctgtcactgttagatgggcccgcggcgcattagctagttggtggggtaatggctcaccaaggccacgatgcgtagccgacctgagagggtgatcggccacactgggactgagacacggcccagactcctacgggaggcagcagtagggaatcttccacaatggacgaaagtctgatggagcaatgccgcgtgagtgaagaaggttttcggatcgtaaagctctgttgtaagggaagaacaagtacaggagtaactgtctgtaccttgacggtacct

SEQ ID NO: 6429 - DNA, 490 bp, unidentified
  misc_feature 1..490: note = Ascusbbf_1889275, encodes 16S rRNA
  source 1..490: mol_type = genomic DNA
agagtttgatcctggctcaggatgaacgctggcggcgtgcttaacacatgcaagtcgaacgattaaaccacttcggtggatatagagtggcgaacgggtgagtaacacgtgggcaacctgcccctcacaccgggacaactattggaaacgatagctaataccggatactccgatcgcgtggcatcacgctttcgggaaagcccagacggtgagggatgggcccgcggtccattagctcgttggtggggtaacggcccaccaagacgacgatggatagccgggttgagagaccgaccggccacattgggactgagacacggcccagactcctacgggaggcagcagtggggaattttgcgcaatggggggaaccctgacgcagcaacgccgcgtgcgggatgaaggccttcgggttgtaaaccgctttcagcagggaagaagatgacggtacctgcggaagaagctccggctaactacgtgccagcagccg

SEQ ID NO: 6430 - DNA, 490 bp, unidentified
  misc_feature 1..490: note = Ascusbbf_1721767, encodes 16S rRNA
  source 1..490: mol_type = genomic DNA
agagtttgatcatggctcaggatgaacgctggcggcgtgcctaacacatgcaggtcgaacggggcataggccttcgggtttatgcttagtggcggacgggtgagtaacgcgtgagcaacctgcccttcagtgggggacaacagctggaaacggctgctaataccgcatgacgtaccgggggggcatccctctggtaccaaagatttattgctgaaggatgggctcgcgtctgattagatagttggcggggtaacggcccaccaagtcgacgatcagtagccggactgagaggttgaacggccacattgggactgagatacggcccagactcctatgggaggcagcagtgggggatattgggcaatgggcgaaagcctgacccagcaacgccgcgtgaaggaagaaggccttcgggttgtaaacttcttttaagagggacgaaggacgtgacggtacctcatgaataagccacggctaactacgtgccagc

SEQ ID NO: 6431 - DNA, 490 bp, unidentified
  misc_feature 1..490: note = Ascusbbf_65881, encodes 16S rRNA
  source 1..490: mol_type = genomic DNA
agagtttgatcctggctcaggatgaacgctagcggcaggcttaacacatgcaagtcgaggggcagcgcgaggtagcaatactttggcggcgaccggcgcaagggtgcgtaacgcgtgagcaatctgcccgtatcagggggataagcgatggaaacgtcgtctaataccgcataacagacgaggaggcatctccttgttttgaaagcttcggtggatacggatgagctcgcgagacattagttagttggcggggtaacggcccaccaagaccgcgatgtctaggggaactgagaggttggtcccccacactggaactgagacacggtccagactcctacgggaggcagcagtgaggaatattggacaatggccggaaggctgatccagccatgccgcgtgcaggaataaggtcctatggattgtaaactgcttttgagagggagcaataagtgctacgtgtagcacgatgagagtacctttcgaataagca

SEQ ID NO: 6432 - DNA, 490 bp, unidentified
  misc_feature 1..490: note = Ascusbbf_109662, encodes 16S rRNA
  source 1..490: mol_type = genomic DNA
agagtttgatcctggctcaggacgaacgctggcggcgtgcctaacacatgcaagtcgaacggagcaccctggaagataacttcggtttgattctaggaatgcttagtggcggacgggtgagtaacgcgtgagtaacctgccttggagagggggataacacagagaaatttgtgctaataccgcatattgtagcgaattcgcatgtttttgctatgaaagatttatcgctccaagatggactcgcgtccgattagctagtaggcggggtaatggcccacctaggcgacgatcggtagccggactgagaggttgaacggccacattgggactgagatacggcccagactcctacgggaggcagcagtggggaatattggtcaatgggggcaaccctgaaccagcaacgccgcgtgaaggaagaaggtcttcggatcgtaaacttttgtcgtataggacgaagaaagtgacggtactatacaagaaagccacg

SEQ ID NO: 6433 - DNA, 490 bp, unidentified
  misc_feature 1..490: note = Ascusbbf_41720, encodes 16S rRNA
  source 1..490: mol_type = genomic DNA
agagtttgatcatggctcaggacgaacgctggcggcgtgcgtaacacatgcaagttgagcgacgacgttctgaagtggcaacacggagggacgagcggagcagcggacgggtgagtacaacatgagaagctgtcctgtggcgggggacaacgtctggaaacggacgctaataccgcataagccgagaggtaaaagcagagatgtgccacgggaggtgctcgtgtcctatcagctagttggtgaggtaacggctcaccaaggcgatgacgggtagccggcctgagagggtgtacggccacactgggactgagatacggcccagactcctacgggaggcagcagtggggaatattgggcaatgggaggaatcctgacccagcgacgccgcgtgaacgaagaaggccttcgggtcgtaaagttcttttatgcgggaagaaggaagtgacggtaccgcatgaataagccccggctaactacgtgccagcagccg

SEQ ID NO: 6434 - DNA, 490 bp, unidentified
  misc_feature 1..490: note = Ascusbbf_26150, encodes 16S rRNA
  source 1..490: mol_type = genomic DNA
agagtttgatcctggctcaggacgaacgctggcggcgtgcctaacacatgcaagtcgagcgagaattcttgatttgattctttcgggatgacgattaagaaggaaagcggcggacgggtgagtaacgcgtgagtaacctgccccatagaacggaatagcctagtgaaaactggaataatgccgtatgaagcagcagcaccgcatgatgcagctgttaaagatttatcgctatgggatggactcgcgtctgattagatagttggcggggtaacggcccaccaagtcgacgatcagtagccgaactgagaggttgatcggccacattgggactgagacacggcccagactcctacgggaggcagcagtgggggatattgcacaatgggggaaaccctgatgcagcaacgccgcgtgaaggaagaaggtcttcggattgtaaacttttgtctttagggaagaaacaaatgacggtacctaaggaggaagccac

SEQ ID NO: 6435 - DNA, 490 bp, unidentified
  misc_feature 1..490: note = Ascusbbf_397572, encodes 16S rRNA
  source 1..490: mol_type = genomic DNA
agagtttgatcctggctcaggatgaacgctggcggcgtgcataacacattcaagtcgaacgaagcgcagagacggaaggccttcgggccggaagattctgtgacttagtggcggacgggtgagtaacgcgtgagcaacctgcctgtgatagagggataacacatggaaacgtgtgctaataccacatgaggcgcagatatcgcatggtgactgcgttaaagatttatcgattgcagatgggctcgcgtatgattaggcagttggtgaggcaacggctcaccaaaccgacgatcattagccgaactgagaggttgaacggccacattggaactgagaaacggtccagactcctacgggaggcagcagtggggaatattgggcaatgggcgaaagcctgacccagcgacgccgcgtgagggaagaaggtcttcggattgtaaacctctttcagtagggaagaagaaagtgacggtacctacagaagaagtca

SEQ ID NO: 6436 - DNA, 490 bp, unidentified
  misc_feature 1..490: note = Ascusbbf_114778, encodes 16S rRNA
  source 1..490: mol_type = genomic DNA
agagtttgatcatggctcagattgaacgctagcgggatgctttacacatgcaagtcgaacggcagcgcggacttcggtctggcggcgagtggcgaacgggtgagtaatgtatcggaacgtacccagtagcgggggataactactcgaaagagtggctaataccgcatacgccctacgggggaaagggggggatcgcaagacctctcactattggagcggccgatatcggattagctagttggtggggtaacggcctaccaaggcaacgatccgtagctggtttgagaggacgaccagccacactgggactgagacacggcccagactcctacgggaggcagcagtggggaattttggacaatgggggcaaccctgatccagccatcccgcgtgtgcgacgaaggccttcgggttgtaaagcacttttggcaggaaagaaatcgcccgggctaacactccgggtggatgacggtacctgcagaataagcac

SEQ ID NO: 6437 - DNA, 490 bp, unidentified
  misc_feature 1..490: note = Ascusbbf_473279, encodes 16S rRNA
  source 1..490: mol_type = genomic DNA
agagtttgatcctggctcagattgaacgctggcggcatgctttacacatgcaagtcgtacggcagcgcgggcttcggcctggcggcgagtggcggacgggtgagtaagacatcggaacgtgccacggggtgggggacaaccagccgaaaggttggctgataccgcatggcatccacggattaaagccggggacccttcggggcctggcgccctgtgagcggccgatggctgattagcttgttggtggggtaatggcctaccaaggcgacgatcagtagctggtctgagaggacggccagccacattgggactgagacacggcccaaactcctacgggaggcagcagtggggaattttggacaatggggggaaccctgatccagcaatgccgcgtgagtgaagaaggccttcgggttgtaaagctcttttgccagggaagaaaaggcggaggttaagagcttccgctgctgacggtacctggagaataagc

SEQ ID NO: 6438 - DNA, 474 bp, unidentified
  misc_feature 1..474: note = Ascusbbf_196354, encodes 16S rRNA
  source 1..474: mol_type = genomic DNA
agagtttgatcatggctcaggatgaacgctggcggcatgcttaacacatgcaagtcggacgggaagtggtgtttccagtggcggacgggtgagtaacgcgtaagaacctgcccttgggaggggaacaacagctggaaacggctgctaataccccgtaggctgaggagcaaaaggaggaatccgcccgaggaggggctcgcgtctgattagctagttggtgaggcaatagcttaccaaggcgatgatcagtagctggtccgagaggatgatcagccacactgggactgagacacggcccagactcctacgggaggcagcagtggggaattttccgcaatgggcgaaagcctgacggagcaatgccgcgtggaggaagaaggcccacgggttgtaaacttcttttcccggagaagaagcaatgacggtatctggggaataagcatcggctaactctgtgccagcagccgcggtaat

SEQ ID NO: 6439 - DNA, 490 bp, unidentified
  misc_feature 1..490: note = Ascusbbf_243112, encodes 16S rRNA
  source 1..490: mol_type = genomic DNA
agagtttgatcatggctcaggacgaacgctggcggcgtgcttaacacatgcaagtcgaacgctgaagcccgagcttgctcgggtggatgagtggcgaacgggtgagtaacacgtgagtaacctgcccatgtctctgggataagcgctggaaacggcgtctaatactggatacgagcatccactgcatggtgaggtgttggaaagatttatcggacatggatggactcgcggcctatcagcttgatggtgaggtaatggctcaccatggcgacgacgggtagccggcctgagagggtgaccggccacactgggactgagacacggcccagactcctacgggaggcagcagtggggaatattgcacaatgggcgcaagcctgatgcagcaacgccgcgtgagggatgacggccttcgggttgtaaacctcttttgtcagggaagaagccttcgggtgacggtacctggagaaaaagcaccggctaactacgt

SEQ ID NO: 6440 - DNA, 484 bp, unidentified
  misc_feature 1..484: note = Ascusbbf_54785, encodes 16S rRNA
  source 1..484: mol_type = genomic DNA
agagtttgatcatggctcaggataaacgctggcggcgtgcttcaggcatgcaagtcgaacggaccttcgggtcagtggcggacgggtgagtaacacgtgagcaacctgcccagaagtggggaataacttgccgaaaggtgagctaataccgcatatggtgactcctccttggagggttcactaaaggcttcggccgcttttggaggggcttgcgctcgattagctagttggtggggtaaaggcctaccaaggcaacgatcgatagctggtctgagaggacggtcagccacacggggactgagatacggccccgactcctacgggaggcagcagctaggaatcttgggaatgggcgaaagcctgacccagcaacgccgcgtgggcgatgaaggccttagggtcgtaaagcccttttgtgagggacgatgatgacggtacctcacgaataagccacggctaactacgtgccagcagccgcggtaat

SEQ ID NO: 6441 - DNA, 490 bp, unidentified
  misc_feature 1..490: note = Ascusbbf_1367198, encodes 16S rRNA
  source 1..490: mol_type = genomic DNA
agagtttgatcatggctcaggatgaacgctggcggcgtgcctaacacatgcaagtcgaacggagtcattttggaaagtccttcgggactggaattcttgacttagtggcggacgggtgagtaacgcgtgagcaatctgcccttaggtgggggataacagccggaaacggctgctaataccgcataatgcatcgagatcgcatggttttgacgccaaagatttattgcctttggatgagctcgcgtctgattagctagttggtgaggtaacggcccaccagggcgacgatcagtagccggactgagaggttgaacggccacattgggactgagacacggcccagactcctacgggaggcagcagtggggaatattgcgcaatgggggcaaccctgacgcagcaacgccgcgtgattgaagaaggccttcgggttgtaaagatctttaatcagggacgaattttgacggtacctgaagaataagctccggct

SEQ ID NO: 6442 - DNA, 490 bp, unidentified
  misc_feature 1..490: note = Ascusbbf_241992, encodes 16S rRNA
  source 1..490: mol_type = genomic DNA
agagtttgatcatggctcaggacgaacgctggcggcgtgcttaacacatgcaagtcgaacgaggtccatggagcttgctccagaagacctagtggcgaacgggtgcgtaacacgtgagaaacctatcccggacttgggaataacagttggaaacggctgctaataccgaatacctccgcagcgtcgcatggcgcagcgaagaaagcgtatgcggtttgggagggtctcgcggcctatcagctagttggtgaggtaacggctcaccaaggcatcgacgggtagctggtctgagaggatgatcagccacactgggactgagacacggcccagactcctacgggaggcagcagtggggaatattgcacaatgggcgcaagcctgatgcagcaacgccgcgtgcgggaagaaggccctagggttgtaaaccgctttcagcagggaagaaaatgacggtacctgcagaagaaggtgcggccaactacgtgccagc

SEQ ID NO: 6443 - DNA, 490 bp, unidentified
  misc_feature 1..490: note = Ascusbbf_198371, encodes 16S rRNA
  source 1..490: mol_type = genomic DNA
agagtttgatcatggctcagggtgaacgctggcggcgtgcctaagacatgcaagtcgagcggggcaggtttatacctgttcagcggcggacgggtgagtaacgcgtgggtgacctacccggaagaggcggacaacctggggaaacccaggctaatccgccatgtggtcctgtcctgtggggcaggactaaagggtggatagcccgcttccggatgggcccgcgtcccatcagctagttggtggggtaaaggcccaccaaggcgacgacgggtagccggtctgagaggatggccggccacaggggcactgagacacgggccccactcctacgggaggcagcagttaggaatcttccgcaatggacggaagtctgacggagcgacgccgcttggaggaggaagcccttcggggtgtaaactcctgaactggggacgaaagccctgtgtagggggatgacggtacccaggtaatagcgccggccaactccgtg

SEQ ID NO: 6444 - DNA, 490 bp, unidentified
  misc_feature 1..490: note = Ascusbbf_742074, encodes 16S rRNA
  source 1..490: mol_type = genomic DNA
agagtttgatcctggctcaggacgaacgctggcggcgtgcttaacacatgcaagtcgagcggggattatccgacagaagtccttcgggatggaagatgggtaattctagcggcggacgggtgagtaacgcgtgaacaatctgtcccagacagggggataacacttggaaacaggtgctaataccgcataagaccacgaagtcgcatggctttgaggtaaaaggagtgatccggtttggggtgagttcgcgtccgattagctagttggcggagtaacggcccaccaaggcgacgatcggtagccgacctgagagggtgatcggccacattggaactgagacacggtccaaactcctacgggaggcagcagtgggaatattgggcaatgggcgaaagcctgacccagcaacgccgcgtgagggaagaaggttttcggattgtaaacctctgtcctcagggacgaaggaagtgacggtacctgaggaggaagc

SEQ ID NO: 6445 - DNA, 490 bp, unidentified
  misc_feature 1..490: note = Ascusbbf_384817, encodes 16S rRNA
  source 1..490: mol_type = genomic DNA
agagtttgatcctggctcaggacgaacgctggcggcgtgcctaaaacatgcaagtcgaacgaggtccacccagtggcaacactggtgaagacctagtggcgaacgggtgagtaacacgtgaggaacctgccccgaagaccggaataaccctccgaaaggagagctaataccggataccccctggagatcgcatggtcaccagaggaaatgcattgtgcttcgggagggcctcgcggcctatcagcttgttggtgaggtaacggctcaccaaggcatcgacgggtagctggtctgagaggacgaccagccacactgggactgagacacggcccagactcctacgggaggcagcagttaggaatcttgcgcaatgggcgaaagcctgacgcagcaacgccgcgtgggggatgaaggccttcgggttgtaaacccctttcagtagggacgaattcagacggtacctacagaagaagcaccggccaactacgtg

SEQ ID NO: 6446 - DNA, 490 bp, unidentified
  misc_feature 1..490: note = Ascusbbf_447944, encodes 16S rRNA
  source 1..490: mol_type = genomic DNA
agagtttgatcctggctcaggacgaacgctggcggcgtgcctaatacatgcaagtcgaacgcttcctaccggtgcttgcaccgggaaagaagagtggcggacgggtgagtaacacgtgggtaacctacctacaagcgggggataacattcggaaacggatgctaataccgcatagatctttttgtctcctggcagaaagaagaaagacggtttcggctgtcacttgtagatggacccgcggcgcattagttagttggtgaggtaatggctcaccaagacgatgatgcgtagccgacctgagagggtgatcggccacactgggactgagacacggcccagactcctacgggaggcagcagtagggaatcttccgcaatggacgaaagtctgacggagcaacgccgcgtgagtgaagaaggttttcggatcgtaaaactctgttgttagagaagaacaaggatgagagtaactgctcgtcccttgacggtat

SEQ ID NO: 6447 - DNA, 471 bp, unidentified
  misc_feature 1..471: note = Ascusbbf_1343606, encodes 16S rRNA
  source 1..471: mol_type = genomic DNA
agagtttgatcctggctcagaacgaacgctggcggcaggcttaacacatgcaagtcgagcgccccgcaaggggagcggcagacgggtgagtaacgcgtgggaatctacccatctctacggaataactcagggaaacttgtgctaataccgtatacgcccttcgggtgaaagatttatcggagatggatgagcccgcgttggattagatagtgtttgaggtaacgccccaccaagtcaacgatcagtagccggcctgagagggtgaacggccacattgggactgagacacggcccaaactcctacgggaggcagcagtggggaatattgcacaatgggggaaaccctgatgcagcgacgccgcgtgagtgaagaagtatttcggtatgtaaagctctatcagcaaggaagaaaaaaatgacggtacgtgactaagaagccccggctaactacgtgccagcagccgcggtaat

SEQ ID NO: 6448 - DNA, 470 bp, unidentified
  misc_feature 1..470: note = Ascusbbf_1680420, encodes 16S rRNA
  source 1..470: mol_type = genomic DNA
agagtttgatcctggctcagagcgaacattggcggtaggcttaacacatgcaagtcgagcgaggcgtaatagtcgagcggcgaacgggtgagtaatacatggaaatctaccctgaagtgggggataacgtccagaaatggacgctaataccgcataatccatattgggaaagcgttgcagcgctttaggatgagtccatggccgattagcttgttgttgaggtaatggctcaccaaggcgacgatcagtagctggtctgagaggatgaccagccacactggaactgagacacggtccagactcctacgggaggcagcagtggggaatcttgcgcaatgggggcaaccctgacgcagccataccgcgtgagtgatgaaggtcttcggattgtaaagctctttcggcggggacgacgatgacggtacccgcaaaagaagtcacggctaacttcgtgccagcagccgcggtaa

SEQ ID NO: 6449 - DNA, 490 bp, unidentified
  misc_feature 1..490: note = Ascusbbf_11853, encodes 16S rRNA
  source 1..490: mol_type = genomic DNA
agagtttgatcctggctcaggataaacgctggcggcgcacataagacatgcaagtcgaacggaagtcgttaaaaatgaattgacgatttatctgattgaagtttttaacaatggctttagtggcggactggtgagtaacacgtaaggaacctgcctatcagaggggaataacagtgagaaatcattgctaataccgcataagctagtagaatcgcatgattcagctagaaaaggagcaatccgctgatagatggccttgcgcctgattagctagttggtggggtaacggcctaccaaggcgacgatcagtagccggactgagaggttgaacggccacattgggactgagatacggcccagactcctacgggaggcagcagtcgggaatattgcgcaatggaggaaactctgacgcagtgacgccgcgtataggaagaaggttttcggattgtaaactattgtcgtgagggaagaaattgacagtacctca

SEQ ID NO: 6450 - DNA, 490 bp, unidentified
  misc_feature 1..490: note = Ascusbbf_22208, encodes 16S rRNA
  source 1..490: mol_type = genomic DNA
agagtttgatcatggctcagaatgaacgctggcggcatggattaggcatgcaagtcgaacgggatccctcgggatctagtggcgaaagggtgagtaacacgtgagcaacctgcccccaaggctggaataagcactggaaacggtgtctaaaaccggatgaggcctctgtccacatggacagtcagccaaatatttataccctggggatgggctcgcggcccattagctagttggcggggtaacggcccaccaaggctgcgacgggtaggtggtctgagaggatggtcacccacactgggactgagacactgcccagactcctacgggaggctgcagtcgagaatcttccgcaatgggcgcaagcctgacggagcgatgccgcgtgagggacgaaggccttcgggtcgtaaacctctgtcaccgggaacgaaatcaatgacggtacccggaaaggaagccacggctaaccacgtgccagcagccgcggtaa

SEQ ID NO: 6451 - DNA, 486 bp, unidentified
  misc_feature 1..486: note = Ascusbbf_13196, encodes 16S rRNA
  source 1..486: mol_type = genomic DNA
agagtttgatcctggctcagaacgaacgctggcggcacgcttaacacatgcaagtcggacgggatgaagttagtttactaatggaatttagtggcggactggtgagtataatacaggaatatgcccttaggaatgggatagctttgggaaactggaggtaataccatataaggtcgagagaggaaagcagagatgcgcctgaggattagcctgtatctgattaggaagttggcggggtaaaggcccaccaatccagtgatcagtagctgttctgagaggaagatcagccacattgggactgagatacggcccagactcctacgggaggcagcagtggggaatattggacaatggggggaaccctgatccagcgatgccgcgtgaatgaagaaggttttcggattgtaaagttcttttcttagggaagatgatgacggtacctgaggaataagcaccggcaaactctgtgccagcagccgcggtaat

SEQ ID NO: 6452 - DNA, 490 bp, unidentified
  misc_feature 1..490: note = Ascusbbf_204441, encodes 16S rRNA
  source 1..490: mol_type = genomic DNA
agagtttgatcatggctcaggatgaacgctggcggcgtgcttaacacatgcaagtcgagcgagaactcgctcagccgattcttcggaagaaagcagagcgacggaaagcggcggacgggtgagtaacgcgtgggaaacctgccctgtgcagggggacagccgagggaaacttcgattaataccccataacaccaaagcatcgcatggtgcaatggtcaaagatttatcggcacaggatggtcccgcgtctgattagctggttggtgaggtagcggctcaccaaggcgacgatcagtagccggcctgagagggtgaacggccacattggaactgagacacggtccagactcctacgggaggcagcagtggggaatattgcacaatgggggaaaccctgatgcagcaacgccgcgtgaaggaagaaggccttcgggtcgtaaacttctgtccttggggaagaagaatgacggtacccttggaggaagccccg

SEQ ID NO: 6453 - DNA, 489 bp, unidentified
  misc_feature 1..489: note = Ascusbbf_14290, encodes 16S rRNA
  source 1..489: mol_type = genomic DNA
agagtttgatcctggctcaggattaacgctggcggcgtgcctaacacatgcaagtcgaacggacgtcttcggacgtcagtggcgaacgggtgagtaacgcgtaggtaatgtgcctctgcgctgcgaataacagcctgaaaaggctgctaatacggaatggtcctctcggggggcatcccccttgaggtaaagatttatcgcgcggagatcagcctgcgtcctattagttagttggcggggtaacggcccaccaagacgacgatgggtaactggtctgagaggatgaacagtcacactggaactgagaacggtccagactcctacgggaggcagcagtgaggaattttgcgcaatggagggaactctgacgcagcaacgccgcgtgagtgatgacggccttcgggttgtaaagctctgtcgagagggacgagtagggacggtacctctcaagaaagccccggctaactatgtgccagcagccgcggtaat

SEQ ID NO: 6454 - DNA, 490 bp, unidentified
  misc_feature 1..490: note = Ascusbbf_290865, encodes 16S rRNA
  source 1..490: mol_type = genomic DNA
agagtttgatcatggctcaggataaacgctggcggcgtgcttaacacatgcaagtcgaacggggtgattctcccgaggattgacggtgcttgcacctgattgactcatttgaatcacttagtggcggacgggtgagtaacgcgtgggaaacctgccctatactgggggatagcagttggaaacgactgataataccgcataagcgcacagcaccgcatggtgcagtgtgaaaaactccggtggtataggatggtcccgcgtctgattagctagttggtgaggtaacggcccaccaaggcgacgatcagtagccggcctgagagggtgtacggccacattgggactgagacacggcccaaactcctacgggaggcagcagtggggaatattggacaatgggggcaaccctgatccagcgacgccgcgtgaacgaagaagtatctcggtatgtaaagttctatcagcagggaagataatgacggtacctgac

SEQ ID NO: 6455 - DNA, 490 bp, unidentified
  misc_feature 1..490: note = Ascusbbf_164313, encodes 16S rRNA
  source 1..490: mol_type = genomic DNA
agagtttgatcctggctcaggatgaacgctagcggcaggcctaacacatgcaagtcgaggggcagcgggaggtagcaataccttgccggcgaccggcgcacgggtgcgtaacgcgtatgcaacctgcccgcatccggggtatagcccgccgaaaggcggattaatcccccgtggtcatctggggccgcatggttctggatggatagcttcggcggatgcggatgggcatgcgtcccattaggaagacggcggggtaacggcccaccgttcctacgatgggtagggggcctgagagggtagccccccacactggtactgagacacggaccagactcctacgggaggcagcagtgaggaatattggtcaatgggcggaagcctgaaccagccatgccgcgtgcgggaagaaggccctacgggtcgtaaaccgcttttgcccgggaagaataaggaccctgcggggttcgatgccggtaccgggcgaataagg

SEQ ID NO: 6456 - DNA, 490 bp, unidentified
  misc_feature 1..490: note = Ascusbbf_8626, encodes 16S rRNA
  source 1..490: mol_type = genomic DNA
agagtttgatcatggctcaggatgaacgctggcggcgtgcctaacacatgcaagtcgagcgagaaactcatgaccaatacttcggttgcgtgattgagcggaaagcggcggacgggtgagtaacgcgtaggcaacctgccccttgcagagggatagcctcgggaaaccgggattaaaacctcataatgccgagagtcgacatcttctttcggccaaagatttatcggcaagggatgggcctgcgtctgattagctggttggtggggtaacggcctaccaaggcaacgatcagtagccgacctgagagggtgatcggccacattggaactgagacacggtccaaactcctacgggaggcagcagtggggaatattgcacaatgggcgaaagcctgatgcagcaacgccgcgtgaaggatgaaggcccttgggtcgtaaacttctgttctaagggaagataatgacggtaccttaggagcaagtcccggcta

SEQ ID NO: 6457 - DNA, 490 bp, unidentified
  misc_feature 1..490: note = Ascusbbf_58227, encodes 16S rRNA
  source 1..490: mol_type = genomic DNA
agagtttgatcatggctcaggatgaacgctggcggcgtgcttaacacatgcaagtcgaacgaagctccatttaagatttcttcggaatgattttatggatgacttagtggcggacgggtgagtaacgcgtgaggaacctgccttgcagtggggaataacagttggaaacgactgctaataccgcataacacggagagatcgcatgttttctccgtcaaagatttatcgctgtgagatggcctcgcgtctgattagctggttggtgaggtaacggctcaccaaggcgacgatcagtagccggactgagaggttgatcggccacattgggactgagacacggcccagactcctacgggaggcagcagtggggaatattgggcaatgggcgcaagcctgacccagcaacgccgcgtgaaggaagaaggctttcgggttgtaaacttcttttaagtgggacgataatgacggtaccacttgaataagctccggc

SEQ ID NO: 6458 - DNA, 490 bp, unidentified
  misc_feature 1..490: note = Ascusbbf_494063, encodes 16S rRNA
  source 1..490: mol_type = genomic DNA
agagtttgatcatggctcagattgaacgctggcggcaggcctaacacatgcaagtcgaacggtaacaggaagcagcttgctgcttcgctgacgagtggcggacgggtgagtaatgtctgggaaactgcccggtggagggggataactactggaaacggtagctaataccgcataacgtcgcaagaccaaagagggggaccttcgggcctcttgccaccggatgtgcccagatgggattagcttgttggtgaggtaacggctcaccaaggcgacgatccctagctggtctgagaggatgaccagccacactggaactgagacacggtccagactcctacgggaggcagcagtggggaatattgcacaatgggcgcaagcctgatgcagccatgccgcgtgtatgaagaaggccttcgggttgtaaagtactttcagcggggaggaagggattgtggttaataaccgcagtcattgacgttacccgcagaag

SEQ ID NO: 6459 - DNA, 490 bp, unidentified
  misc_feature 1..490: note = Ascusbbf_119781, encodes 16S rRNA
  source 1..490: mol_type = genomic DNA
agagtttgatcctggctcaggacgaacgctggcggcgtgcttaacacatgcaagtcgaacgggggtaagagagaagcttgcttttttcttacccgagtggcgaacgggtgagtaacgcgtgaggaacctgtcttatacagggggataacgcatcgaaagatgtgctaataccgcataggaccacactgccgcatggcagaggggtgaaaggagcgatccggtgtaaggtggactcgcgtctgattagatagttggtgaggtaacggctcaccaagtcaacgatcagtagccgacctgagagggtgatcggccacattgggactgagacacggcccagactcctacgggaggcagcagtggggaatattgggcaatgggcgcaagcctgacccagcaacgccgcgtgaaggaagaaggttttcggattgtaaacttctgtccttggtgaagaggagaagacggtagccaaggaggaagccccggctaacta

SEQ ID NO: 6460 - DNA, 490 bp, unidentified
  misc_feature 1..490: note = Ascusbbf_35741, encodes 16S rRNA
  source 1..490: mol_type = genomic DNA
agagtttgatcatggctcaggatgaacgctggcggcgtgcctaacacatgcaagtcgagcgagaaacctgcaaatgaagtttcgacagattttacaggcggaaagcggcggacgggtgagtaacgcgtaggcaacctgccccttgcacagggatagcctcgggaaaccgggattaaaacctgataacaccgcactttcacatgtaagagcggtcaaagatttatcggcaagggatgggcctgcgtctgattagttagttggtggggtaacggctcaccaaggcaatgatcagtagccgacctgagagggtgatcggccacattggaactgagacacggtccaaactcctacgggaggcagcagtggggaatattgcacaatgggcgaaagcctgatgcagcaacgccgcgtgagcgaagaaggcggaatcgtcgtaaagctctgtccttggggaagaagaactgacggtacccttggaggaagccccggc

SEQ ID NO: 6461 - DNA, 490 bp, unidentified
  misc_feature 1..490: note = Ascusbbf_312893, encodes 16S rRNA
  source 1..490: mol_type = genomic DNA
agagtttgatcctggctcaggacgaacgctggcggcgtgcctaatacatgcaagtcgagcggacttgatggagagcttgctctcctgatggttagcggcggacgggtgagtaacacgtaggcaacctgcctgcaagaccgggataacccacggaaacgtgagctaataccggatatctcatttcctctcctgagggaatgatgaaagacggagcaatctgtcacttgcggatgggcctgcggcgcattagctagttggtgaggtaacggctcaccaaggcgacgatgcgtagccgacctgggagggtgaacggccacactgggactgagacacggcccagactcctacgggaggcagcagtagggaatcttccgcaatgggcgaaagcctgacggagcaacgccgcgtgagtgatgaaggttttcggatcgtaaagctctgttgccagggaagaacgtccgatagagtaactgctatcggagtgacggta

SEQ ID NO: 6462 - DNA, 490 bp, unidentified
  misc_feature 1..490: note = Ascusbbf_117616, encodes 16S rRNA
  source 1..490: mol_type = genomic DNA
agagtttgatcctggctcaggatgaacgctggcggcgtgcctaatacatgcaagtcgaacgagaatagcttgctattcgagtggcgaacgggtgagtaacacgttggtaatctgccctttagttggggatacccggacgaaagtctggctaataccgtaatatgatatgaggtgggattccttatattgaaaggtccgtttggatcgctaatggatgagcctgcgtctgattagctagttggtgagataatagcccaccaaggcgaggatcagtagccgaactgagaggttgatcggccacaatggaactgagacacggtccatactcctacgggaggcagcagtagggagttttcgtcaatgggcgcaagcctgaacgagcaacgccgcgtgagtgatgaaggtcttcggattgtaaagctcttttatattggaaaaatggctagaagaggaaatgcttttagtttgatggtactttatgaataagcaa

SEQ ID NO: 6463 - DNA, 490 bp, unidentified
  misc_feature 1..490: note = Ascusbbf_56610, encodes 16S rRNA
  source 1..490: mol_type = genomic DNA
agagtttgatcctggctcaggattaacgctagcggtatgcctaatacatgcaagtcgagcgggagcagcaatgctctagcggcaaacgggtgagtaatacgtatctaatctgccctttagaaaggaacaacagatcgaaagatttgctaataccttataggacattaactcgcatgagataatgtttaaagttccgttcggaacgctttaggatgagggtgcggcttatcagatagttggtgaggtaatggcccaccaagtctatgacgagtagctatgctgagaggtagaatagccacaaggggactgagacacggcccctactcctacgggaggcagcagtagggaatttttcacaatgggcgaaagcctgatggagcaataccgcgtgaatgatgaaggtcttcggattgtaaaattcttttataagggacgaacgatatgaacaggaaatggttcgtaagtgactgtaccttttgaataagtaacg

SEQ ID NO: 6464 - DNA, 490 bp, unidentified
  misc_feature 1..490: note = Ascusbbf_427579, encodes 16S rRNA
  source 1..490: mol_type = genomic DNA
agagtttgatcctggctcaggacgaacgctggcggcgtgcttaacacatgcaagtcgaacgaagcatagagactgaagttttcggatggaagaatctatgacttagtggcggacgggtgagtaacgcgtgagcaacctgcctgtaagagggggacaacagctggaaacggctgctaataccgcataagaccacaccaccgcatggtggaggggtaaaagagatatcgcttacagatgggctcgcgtcctattaggtagttggtgaggtaaaggctcaccaagccgacgataggtagccgacctgagagggtgatcggccacactggaactgagacacggtccagactcctacgggaggcagcagtggggaatattgggcaatgggggcaaccctgacccagcaacgccgcgtgagggatgaaggccttcgggttgtaaacctctgtccttggggacgaagaagatgacggtacccagggaggaagctccg

SEQ ID NO: 6465 - DNA, 490 bp, unidentified
  misc_feature 1..490: note = Ascusbbf_231857, encodes 16S rRNA
  source 1..490: mol_type = genomic DNA
agagtttgatcctggctcaggatgaacgctggcagtgtgccttagacatgcaagtcggacgggggttttcttgttgatcctttcggggtgatgcttgattactctagtggcgtacgggtgagtaacacgtgggtgacctgccctcaagtgggggataactctgggaaactggggctaatcccgcatgtgctggcttttgtcagtaaaggctcttcggagttgcttggggatgggcccgcggcctatcagcttgttggtgtggtaatggcgcaccaaggcgatgacaggtagccggcctgagagggtgtacggccacaggggcactgagatacgggccccactcctacgggaggcagcagttaggaattttcgacaatgggggaaaccctgatcgagcgacactgcgtgagggatgaaggtcttaggatcgtaaacttctaatagagggacgatagtgacggtacctcttgattagcaccggctaactccg

SEQ ID NO: 6466 - DNA, 490 bp, unidentified
  misc_feature 1..490: note = Ascusbbf_13407, encodes 16S rRNA
  source 1..490: mol_type = genomic DNA
agagtttgatcatggctcagaacgaacgctggcggcgtggattaggcatgcaagtcgtacgcgaaagcagacttcggtttgtgagtagagtggcgaactggtgagtacaaggtgactaacctgcccttaagtgggggataacttcgtgaaaacggagctaataccgcatggtctcttagccttacggggttacgagtaaagcagtaatgcgcttaaggatggggtcacctcccattagcttgttggtgaggtaacggctcaccaaggctgcgatgggtagctggactgagaggttggccagccacactgggactgagatacggcccagactcctacggggggcagcagtctagaggcttcgacaatgaccgaaaggttgatcgagcgacgccgcgtgcgggatgaaggtcttcggattgtaaaccgcttttgtttgtgaagaaggcctgtatcgtgaatatgggattgacggtagcaaacgaataagccc

SEQ ID NO: 6467 - DNA, 490 bp, unidentified
  misc_feature 1..490: note = Ascusbbf_89719, encodes 16S rRNA
  source 1..490: mol_type = genomic DNA
agagtttgatcatggctcagaacgaacgctggcggcgcgtcttaagcatgcaagtcgaatggcaagatcggtgcttgcactgatcctagaatggcggactggtgagtaacgcgtgggtgacgtaccttttggatggggatagctcctggaaacaggagataataccgaatacgctgcatgggaacagaggccatgcaggaaaggatcttttgattcgccgaaagagcggcccgcgggctattagcttgttggcggggtaacggcccaccaaggcgatgatagctacccggcctaagagggtgatcgggcacattgggactgagatacggcccagactcctacgggaggcagcagctaagaatattccgcaatggaggaaactctgacggagcgacgccgcgtggacgaggaaggccggaaggttgtaaagtccttttaagcatgaagaataaggaagatgagagaaacgttttctggtgacggtagtgct

SEQ ID NO: 6468 - DNA, 490 bp, unidentified
  misc_feature 1..490: note = Ascusbbf_79432, encodes 16S rRNA
  source 1..490: mol_type = genomic DNA
agagtttgatcctggctcagaacgaacgctggcggcgcgtcttaagcatgcaagtcgaacggcaagctaccttcgggtagcctagagtggcggactggtgagtaacacgtgggtgacatgccttcaggactggaatagcctgcagaaatgcagggtaatgccggatacggtgcaggacgttaggggtcctgcaagaaaggagcatttgctccgccgggagattggcccgcggcccattagctagttggtgaggtaaaggcccaccaaggcaatgatgggtatccggcctgagagggtgatcggacacattgggactgagatacggcccagactcctacgggaggcagcagctaagaatattccgcaatggaggaaactctgacggagcgacgccgcgtggatgattgaaggccgaaaggttgtaaaatccttttgaaccggaagaataagcgcaggagggaatgcctgcgtggtgacggtacggttcgaa

SEQ ID NO: 6469 - DNA, 490 bp, unidentified
  misc_feature 1..490: note = Ascusbbf_737130, encodes 16S rRNA
  source 1..490: mol_type = genomic DNA
agagtttgatcatggctcaggatgaacgctggcggcgtgcataacacattcaagtcgaacgaagcgccgggacggaacccttcggggggaagacccgatgacttagtggcggacgggtgagtaacgcgtgagcaacctgcctgcgatagagggataacaccgggaaaccggtgctaataccacatgacgcagcggggtcacatggccctgttgttaaagatttatcgatcgcagatgggctcgcgtatgattaggcagttggtggggcaacggcccaccaaaccgacgatcattagccgaactgagaggttgaacggccacattggaactgagaaacggtccagactcctacgggaggcagcagtggggaatattgggcaatgggcgaaagcctgacccagcgacgccgcgtgagggaagaaggtcttcggattgtaaacctctttcagcagggaagaagaaagtgacggtacctgcagaagaagtcacg

SEQ ID NO: 6470 - DNA, 490 bp, unidentified
  misc_feature 1..490: note = Ascusbbf_333422, encodes 16S rRNA
  source 1..490: mol_type = genomic DNA
agagtttgatcctggctcaggatgaacgctggcggcgtgcctaatacatgcaagtcgagcgagatactttcaaatgagacttcggtggattttggaagttgaaagcggcggacgggtgagtaacgcgtaggcaacctgccctttgcacagggatagccattggaaacgatgattaatacctgataacgcgggagcgatgcatatcgcttccgtcaaagattcatcggcaagggatgggcctgcgtctgattagctggttggtgaggtaacggcccaccaaggcgacgatcagtagccgacctgagagggtgatcggccacattggaactgagacacggtccaaactcctacgggaggcagcagtagggaattttgcacaatgggcgcaagcctgatgcagcaacgccgcgtgaaggatgaaggccttcgggttgtaaacttcttttctcggggaagaaacaaatgacggtacctgaggaataagccccgg

SEQ ID NO: 6471 - DNA, 490 bp, unidentified
  misc_feature 1..490: note = Ascusbbf_1850418, encodes 16S rRNA
  source 1..490: mol_type = genomic DNA
agagtttgatcatggctcaggatgaacgctggcggcatgcctaagacatgcaagtcgaacgaagtggcccattgatttgacggaagttggagtgcttgcacaaagacggaagactttgatttggattttccacttagtggcgcaagggtgagtaacacgtaggttatctgccttcgagtctggaataacagttagaaatgattgctaatgccggattatatataaagcgatacgttactttatattaaaaggagcctttaaagcttcgcttgaagatgagcctgcggcgtattagctagttggtgaggtaatggcccaccaaggcaacgatgcgtagccgacctgagagggtgatcggccacactgggactgagacacggcccagactcctacgggagacagcagttaggaatattcgtcaatgggggaaaccctgaacgagcaatgccgcgtgaaggatgaaggtcctatggattgtaaacttctgttg

SEQ ID NO: 6472 - DNA, 490 bp, unidentified
  misc_feature 1..490: note = Ascusbbf_16828, encodes 16S rRNA
  source 1..490: mol_type = genomic DNA
agagtttgatcatggctcaggacgaacgctggcggcgtgcctaacacatgcaagtcgaacggagatgcattgaatgaagatttcggttggatttcgatacatcttagtggcggacgggtgagtaacgcgtgagtaacctgccgatgagagtggaataacgttctgaaaaggacgctaataccgcataatgtagagcggccgcatgaccattctaccaaagattttatcgctcatcgatggactcgcgtccgattagctagttggtggggtaacggctcaccaaggcgacgatcggtagccggactgagaggttgaacggccacattgggactgagacacggcccagactcctacgggaggcagcagtgggggatattgcgcaatgggggcaaccctgacgcagcaacgccgcgtgaaggaagacggttttcggattgtaaacttcttttgttaaggacgaagaaagtgacggtacttaacgaataagctc

SEQ ID NO: 6473 - DNA, 490 bp, unidentified
  misc_feature 1..490: note = Ascusbbf_1420019, encodes 16S rRNA
  source 1..490: mol_type = genomic DNA
agagtttgatcatggctcaggacgaacgctggcggcgtgcttaacacatgcaagtcgaacggggcgatttgaaagcttgcttttgatgagcctagtggcaaacgggtgagtaacgcgtaggcaacctgccctcaggatggggacaacggcccgaaaggaccgctaataccgaatgacataccatgtccgcatggacgaggtatcaaaggcggagcaatccgtcacctgaggatgggcctgcgtctgattaggtagttggtgaggtaacggcccaccaagccgacgatcagtagccggtctgagaggatgaacggcaacattgggactgagacacggcccagactcctacgggaggcagcagtggggaatcttccgcaatgggcgaaagcctgacggagcaacgccgcgtgagtgaagaaggtcttcggatcgtaaagctctgttgtcggggacgaaggggcagatcaggaaatgggtctgcttagacggt

SEQ ID NO: 6474 - DNA, 490 bp, unidentified
  misc_feature 1..490: note = Ascusbbf_6407, encodes 16S rRNA
  source 1..490: mol_type = genomic DNA
agagtttgatcatggctcaggatgaacgctagcggcaggcttaacacatgcaagtcgaggggcagcgggtgtagcaatacatgccggcgaccggcgaaagggtgagtaacgcgtgagcaacgtgcccgtatgtgggggatagtcattggaaacgatgcgtaataccccgtaacacatcttcccgcatgaggagatgttgaaagattgattgcatacggatcggctcgcgtgccattaggtagacggcggggtaacggcccaccgtgccgacgatggctaggggttctgagaggaaggtcccccacattggaactgagacacggtccagactcctacgggaggcagcagtgaggaatattggacaatggccggaaggctgatccagccatgccgcgtgcgggaagacggccctatgggttgtaaaccgcttttgcgagggagcaataaggtccacgtgtgggccgatgagagtacctcgcgaataagcatc

SEQ ID NO: 6475 - DNA, 490 bp, unidentified
  misc_feature 1..490: note = Ascusbbf_3612, encodes 16S rRNA
  source 1..490: mol_type = genomic DNA
agagtttgatcctggctcaggacgaacgctggcggcgtgcttcatacatgcaagtcgaacgagaatcttaacttcggttgagaggaaagtggcggacgggtgagtaatgtgtagagaatctacccttgagtgggggacaacagctggaaacggttgctaataccccatatgagattagttgagatattaatcttgaaaactccggtgctcaaggatgagtctgcatctgattagctagttgggggtgtaatggaccaccaaggcgacgatcagtagctggtttgagaggatgatcagccacaatgggactgagacacggcccatactcctacgggaggcagcagtagggaattttgcgcaatgggcgaaagcctgacgcagcaacgccgcgtgattgattaagcccttcggggtgtaaagatctgtcagtagggacgaacaatgacggtacctacagaggaagcaccggctaactccgtgccagcagccg

SEQ ID NO: 6476 - DNA, 490 bp, unidentified
  misc_feature 1..490: note = Ascusbbf_22814, encodes 16S rRNA
  source 1..490: mol_type = genomic DNA
agagtttgatcatggctcaggacgaacgctggcggcgtgcttaacacatgcaagtcgaacgaggttaagtgaaggaaagcttcggctggaatttatttaaccgagtggcggacgggtgagtaacgcgtgaggaacctgtcttctacagggggataacggtccgaaaggattgctaataccgcataagaccacggaatcgcatggttcaggggtcaaaggagaaatccggtagaaggtggactcgcgtcccattagatagttggtgaggtaacggcccaccaagtcgacgatgggtagccgacctgagagggtgatcggccacattggaactgagatacggtccagactcctacgggaggcagcagtggggaatattgggcaatgggcgaaagcctgacccagcaacgccgcgtgagggaagaaggtcttcgggttgtaaacctctgtccttggtgaaaaggaaggatggtagccaaggaggaagctccgg

SEQ ID NO: 6477 - DNA, 490 bp, unidentified
  misc_feature 1..490: note = Ascusbbf_16733, encodes 16S rRNA
  source 1..490: mol_type = genomic DNA
agagtttgatcctggctcaggatgaacgctagcgacaggcctaacacatgcaagtcgaggggcagcgggaaggaagcttgcttcctttgccggcgaccggcgcacgggtgagtaacgcgtatgcaacctggccgcagttgcgggatagccttccgaaagggagattaacaccgcatgaggccggagaggggcatccctttccggtgaaaagtcaatgactgcggatgggcatgcgtccgattagccagccggcggggtaacggcccaccggggcgacgatcggtaggggttctgagaggaaggtcccccacattggaactgagacacggtccaaactcctacgggaggcagcagtgaggaatattggtcaatggacggaagtctgaaccagccaagtcgcgtgaaggaagaatgtcctatggattgtaaacttcttttgggaggggataaaggtctccacgtgtggagatttgcaggtacctcccgaata

SEQ ID NO: 6478 - DNA, 490 bp, unidentified
  misc_feature 1..490: note = Ascusbbf_98593, encodes 16S rRNA
  source 1..490: mol_type = genomic DNA
agagtttgatcctggctcagggtgaacgctggcggcgtgcctaagacatgcaagtcgtgcgggccgcggggttttactccgtggtcagcggcggacgggtgagtaacgcgtgggtgacctacccggaagagggggacaacccggggaaactcgggctaatcccccatgtggacccgccccttggggtgtgtccaaagggctttgcccgcttccggatgggcccgcgtcccatcagctagttggtggggtaatggcccaccaaggcgacgacgggtagccggcctgagagggtggccggccacaggggcactgagacacgggccccactcctacgggaggcagcagttaggaatcttccgcaatgggcgcaagcctgacggagcgacgccgcttggaggaagaagcccttcggggtgtaaactcctgaacccgggacgaaacccccgacgaggggactgacggtaccggggtaatagcgccggccaactcc

SEQ ID NO: 6479 - DNA, 490 bp, unidentified
  misc_feature 1..490: note = Ascusbbf_57435, encodes 16S rRNA
  source 1..490: mol_type = genomic DNA
agagtttgatcctggctcagagtgaacgctggcggcgtggctaagacatgcaagtcgggcggttgtgcgccttcgggtgtacaatagcggcaaacgggtgagtaacacgtaagtaacctgcccttaagactgggatagcccagcgaaagttggggtaataccggatgaggacctttagtgcatgctaagggatcgaaaggtatgtgaagacgcttaaggaggggcttgcggcctatcagctagttggtggtgtaacggacccccaaggcgaagacgggtagccggtctgagaggacgaacggccacattggaactgagacatggtccagacatctacggatggcagcagtttcgaattattcacaatgggcgaaagcctgatggtgcgacgtcgcgtggaggaagaaggtctttggattgtaaactcctgtcattagggagcaaagtgcaagtgcagagcttgttttgagttaacctaaagaggaagcag

SEQ ID NO: 6480 - DNA, 490 bp, unidentified
  misc_feature 1..490: note = Ascusbbf_466455, encodes 16S rRNA
  source 1..490: mol_type = genomic DNA
agagtttgatcatggctcaggacgaacgctggcggcgtgcctaacacatgcaagtcgagcggggattattcagaggagagcttcggcaggaatcgggataattccagcggcggacgggtgagtaacgcgtgaacgatctgtcccagacagggggataacacttggaaacaggtgctaataccgcataagaccacggagctgcatggctttggggtaaaaggagcgatccggtttggggtgagttcgcgtctgattagctggttggtgaggtaacggcccaccaaggcgacgatcagtagccgacctgagagggtgatcggccacattggaactgagacacggtccaaactcctacgggaggcagcagtgggaatattgggcaatgggcgaaagcctgacccagcaacgccgcgtgagggaagaaggttttcggattgtaaacctctgtccttggtgacgaaggaagtgacggtagccaaggaggaagccc

SEQ ID NO: 6481 - DNA, 490 bp, unidentified
  misc_feature 1..490: note = Ascusbbf_139603, encodes 16S rRNA
  source 1..490: mol_type = genomic DNA
agagtttgatcctggctcaggacgaacgctggcggcgtgcttaacacatgcaagtcgagcggaaaggccccttcgggggtactcgagcggcgaacgggtgagtaacacgtgagtaacctgccccgaactctgggataagcctgggaaactgggtctaatactggatggtcatctcctgctgcatggtgggaggtggaaagtgtttagcggttcgggatgggctcgcggcctatcagcttgttggtgaggtaatggctcaccaaggcttttacgggtagccggcctgagagggcgaccggccacactgggactgagatacggcccagactcctacgggaggcagcagtggggaatattgcgcaatgggcggaagcctgacgcagcaacgccgtgtgagggatgacggccttcgggttgtaaacctctttcaccagggacgaagcttttgtgacggtacctggggaagaagcgccggccaactacgtgccag

SEQ ID NO: 6482 - DNA, 490 bp, unidentified
  misc_feature 1..490: note = Ascusbbf_17898, encodes 16S rRNA
  source 1..490: mol_type = genomic DNA
agagtttgatcctggctcaggataaacgctggcggcgcacataagacatgcaagtcgaacggacgactttgatttgttttacttatcaaagaagttagtggcggactggtgaggaacacgtaaataatctgcctataagaggggaacaacagtgagaaatcactgctaataccgcataattcataactatcgcatgatagatatggaaaaggagcaatccgcttatagatgagtttgcgtctgattagctagttggtgtggtaaaggcataccaaggcaacgatcagtagccgtgctgagaggcagaacggccacattgggactgagatacggcccagactcctacgggaggcagcagtcgggaatattgcgcaatggaggaaactctgacgcagtgacgccgcgtataggaagaaggttttcggattgtaaactattgtagacagggaagaaaacagacagtacctgtaaagtaagctccggctaacta

SEQ ID NO: 6483 - DNA, 490 bp, unidentified
  misc_feature 1..490: note = Ascusbbf_67732, encodes 16S rRNA
  source 1..490: mol_type = genomic DNA
agagtttgatcctggctcaggatgaacgctggcggcgtgcctaacacatgcaagtcgagcgagaaacctgtaattgacgcttcggttgattttacaggcggaaagcggcggacgggtgagtaacgcgtaggcaacctgccctttgcacagggatagcctcgggaaaccgggattaaaacctgatgataccgagacaccacatggtgttccggccaaagatttatcggcaaaggatgggcctgcgtctgattagttagttggtgaggtaacggctcaccaaggcaatgatcagtagccgacctgagagggtgatcggccacattggaactgagacacggtccaaactcctacgggaggcagcagtggggaatattgcacaatgggcgaaagcctgatgcagcaacgccgcgtgagcgaagaaggcggaatcgtcgtaaagctctgtccttggggaagaaaacaatgacggtacccttggaggaagccccgg

SEQ ID NO: 6484 - DNA, 490 bp, unidentified
  misc_feature 1..490: note = Ascusbbf_251159, encodes 16S rRNA
  source 1..490: mol_type = genomic DNA
agagtttgatcatggctcaggatgaacgctggcggcgtgcctaacacatgcaagtcgagcgagaaaccattttcggagatttcggttgaagaagatggcggaaagcggcggacgggtgagtaacgcgtaggcaacctgcctcatgcagagggatagcctcgggaaaccgggattaaaacctcataacgcggtgagttcacatgaacacagcgccaaagatttatcggcatgagatgggcctgcgtctgattagctagttggtggggtaacggctcaccaaggcgacgatcagtagccgacctgagagggtaatcggccacattggaactgagacacggtccaaactcctacgggaggcagcagtggggaatattgcacaatgggcgaaagcctgatgcagcaacgccgcgtgagcgaagaaggcctttgggtcgtaaagctctgtcggtagggaagaaacaaatgacggtacctaccgaggaagccccgg

SEQ ID NO: 6485 - DNA, 490 bp, unidentified
  misc_feature 1..490: note = Ascusbbf_368, encodes 16S rRNA
  source 1..490: mol_type = genomic DNA
agagtttgatcatggctcaggatgaacgctagcgacaggcctaacacatgcaagtcgaggggcagcgggagtgaagcttgcttcacttgccggcgaccggcgcacgggtgagtaacgcgtatgcaacctgcctgtaacagggggataacccggagaaatccggactaagaccgcataacgctgagaagccgcatgacttttcagccaaatattcataggttacagatgggcatgcgtccgattagccagttggcggggtaacggcccaccaaagcgacgatcggtaggggttctgagaggaaggtcccccacattggaactgagacacggtccaaactcctacgggaggcagcagtgaggaatattggtcaatggacggaagtctgaaccagccatgtcgcgtgaaggatgaaggtactatgtattgtaaacttcttttgcctgggggtaaagtgggtcacgcgtggcctattgcaagtaccaggcgaat

SEQ ID NO: 6486 - DNA, 490 bp, unidentified
  misc_feature 1..490: note = Ascusbbf_7947, encodes 16S rRNA
  source 1..490: mol_type = genomic DNA
agagtttgatcatggctcaggatgaacgctagcggcaggcttaacacatgcaagtcgaggggcagcgggttgtagcaatacaatgccggcgaccggcgaaagggtgagtaacgcgtgagcaacatgcccgatactggaggatagtcgatggaaacgtcgcgtaatactccgtaacaacagagaccgcatgatctttgtttaatagatttatcggtatcggattggctcgcgtcccattaggcagttggcggggtaacggcccaccaaaccgacgatgggtaggggttctgagaggaaggtcccccacattggaactgagacacggtccagactcctacgggaggcagcagtgaggaatattggtcaatggccgagaggctgaaccagccatgccgcgtgcgggaggacggccctatgggttgtaaaccgcttttgttggggagcaataaggagcacgtgtgcttcgatgagagtacccagcgaataagca

SEQ ID NO: 6487 - DNA, 490 bp, unidentified
  misc_feature 1..490: note = Ascusbbf_1346, encodes 16S rRNA
  source 1..490: mol_type = genomic DNA
agagtttgatcatggctcaggatgaacgctggcggcgtgcctaacacatgcaagtcgaacggagcttaatggaaggagacttcggtcaacggaagataagcttagtggcggacgggtgagtaacgcgtgagcaacctgcctcagagtgggggacaacagctggaaacggctgctaataccgcataaaattgttagaaggcatcttctgataatcaaagcttaatgtgctctgagatgggctcgcgtctgattagatagttggtggggtaacggcctaccaagtcgacgatcagtagccggactgagaggttgaacggccacattgggactgagatacggcccagactcctacgggaggcagcagtggggaatattggtcaatgggggaaaccctgaaccagcaacgccgcgtgaaggaagaaggctttcgggttgtaaacttcttttatctgtgacgatagtgacggtagcagatgaataagccacggct

SEQ ID NO: 6488 - DNA, 490 bp, unidentified
  misc_feature 1..490: note = Ascusbbf_1482665, encodes 16S rRNA
  source 1..490: mol_type = genomic DNA
agagtttgatcatggctcagattgaacgctggcggcatgccttacacatgcaagtcgaacggcagcatgatctagcttgctagattgatggcgagtggcgaacgggtgagtaatacatcggaacgtgccctgtagtgggggataactagtcgaaagattagctaataccgcatacgacctgagggtgaaagtgggggaccgcaaggcctcatgctataggagcggccgatgtctgattagctagttggtgaggtaaaggctcaccaaggcgacgatcagtagctggtctgagaggacgatcagccacactgggactgagacacggcccagactcctacgggaggcagcagtggggaatgttggacaatgggggcaaccctgatccagcaatgccgcgtgtgtgaagaaggccttcgggttgtaaagcacttttgtccggaaagaaatcgcacttactaatattaggtgtggatgacggtaccggaagaat

SEQ ID NO: 6489 - DNA, 490 bp, unidentified
  misc_feature 1..490: note = Ascusbbf_31821, encodes 16S rRNA
  source 1..490: mol_type = genomic DNA
agagtttgatcatggctcaggatgaacgctagctacaggcttaacacatgcaagtcgaggggcatcatggaagtagcttgctacttctgatggcgaccggcgaatgggtgagtaacgcgtatccaacctggcctatgctctgggatagcccttagaaatgaggattaatacgagatggtctcctttgatcgcctgagattaggagtaaagacttgtcggcataggatggggatgcgttccattagatagttggcggggtaacggcccaccaagtcgatgatggataggggttctgagaggaaggtcccccacattggtactgagacacggaccaaactcctacgggaggcagcagtgaggaatattggtcaatgggcggaagcctgaaccagccaagtagcgtgaaggaagacggccctacgggttgtaaacttcttttgtcggggaataaccgtcggcacgtgtgccgacctgcatgtacccggtgaat

SEQ ID NO: 6490 - DNA, 490 bp, unidentified
  misc_feature 1..490: note = Ascusbbf_378541, encodes 16S rRNA
  source 1..490: mol_type = genomic DNA
agagtttgatcctggctcaggataaacgctggcggcgcacataagacatgcaagtcgaacggaagtcgtcataatgattctgatatagatatgaagatttatctgatttgaaattgaagttgacttatgacaatggctttagtggcggactggtgagtaacgcgtaagcaatctgcctattagaggggaataacagtgagaaatcactgctaataccgcatatgccatagttatcgcatgataatagtgggaaaggagcaatccgctaatagatgagcttgcgtctgattagctagttggtggggtaacggcctaccaaggcgacgatcagtagccggactgagaggttgaacggccacattgggactgagatacggcccagactcctacgggaggcagcagtcgggaatattgcgcaatggaggaaactctgacgcagtgacgccgcgtataggatgaaggttttcggattgtaaactattgtcgttag

SEQ ID NO: 6491 - DNA, 490 bp, unidentified
  misc_feature 1..490: note = Ascusbbf_53912, encodes 16S rRNA
  source 1..490: mol_type = genomic DNA
agagtttgatcctggctcaggacgaacgctggcggcgtgcctaacacatgcaagtcgaacgaagcattggaagcttgcttttgatgcttagtggcggacgggtgagtaacgcgtgagcaacctgcctttcagagggggataacgtttggaaacgaacgctaataccgcataacatatctgggtcgcatgattgagatatcaaaggagcaatccgctgaaagatgggctcgcgtccgattagctagttggcgggataacagcccaccaaggcgacgatcggtagccggactgagaggtcgaacggccacattgggactgagacacggcccagactcctacgggaggcagcagtgggggatattgcacaatggaggaaactctgatgcagcaacgccgcgtgagggaagaaggatttcggtttgtaaacctctgtcattggtgacgataatgacggtagccgatgaggaagctccggctaactacgtgccag

SEQ ID NO: 6492 - DNA, 490 bp, unidentified
  misc_feature 1..490: note = Ascusbbf_144284, encodes 16S rRNA
  source 1..490: mol_type = genomic DNA
agagtttgatcctggctcaggatgaacgctagcggcaggcttaatacatgcaagtcgtgggacgatagcaatattggaccggcaaacgggtgcgtaacacgtacacaactttccgtcaagtgggggatagcctaaagaaatttggattaataccccatagaataatgatgtggcatcatattattattaaagctccggcgcttgatgatgggtgtgcggctgattaggtagttggcggggtaacggcccaccaagccttcgatcagtagctgatgtgagagcatgatcagccacacgggcactgagacacgggcccgactcctacgggaggcagcagtaaggaatattggtcaatgggcgcaagcctgaaccagccatgccgcgtggaggatgaaggtcctctggattgtaaacttcttttatttgggacgaaaacgggatattcttatcttcttgacggtaccagatgaataagcaccggctaactccg

SEQ ID NO: 6493 - DNA, 490 bp, unidentified
  misc_feature 1..490: note = Ascusbbf_172151, encodes 16S rRNA
  source 1..490: mol_type = genomic DNA
agagtttgatcatggctcaggatgaacgctagcggcaggcctaacacatgcaagtcgaggggtagacatcttcggatgttgagaccggcgcacgggtgcgtaacgcgtatgcaatctaccttatactgagggatagcccggagaaatccggattaataccttatagtttttagagatagcattgtctttaaaataaagatttattggtataagatgagcatgcgtcccattagttagttggtaaggtaacggcttaccaagacgatgatgggtaggggtcctgagagggagatcccccacactggtactgagacacggaccagactcctacgggaggcagcagtgaggaatattggtcaatggagggaactctgaaccagccatgccgcgtgcaggaagaatgtcctatggattgtaaactgcttttatacgggaagaaaaagagctacgtgtagtttattgacggtaccgtaagaataaggatcggcta

SEQ ID NO: 6494 - DNA, 490 bp, unidentified
  misc_feature 1..490: note = Ascusbbf_3873, encodes 16S rRNA
  source 1..490: mol_type = genomic DNA
agagtttgatcatggctcaggacgaacgctggcggcatgcctaacacatgcaagtcgaacggagatagaaatatcttagtggcgaacgggtgagtaacacgtgagcaacctgcctcatacacagggataacagttagaaatgactgctaataccggataagaccacagtccggcatcggacaggggtcaaagtgctttagcggtatgagatgggctcgcgtccaattagctagttggtgaggtaacggcccaccaaggcgacgattggtagccgacctgagagggtgatcggccacattggaactgagacacggtccaaactcctacgggaggcagcagtggggaatattgggcaatgggcgaaagccttacccagcaatgccgcgtgagtgatgaaggtcttatggattgtaaagctctttgattagggacgaataaatgacggtacctaaagaacaagccccggctaactatgtgccagcagccgcgg

SEQ ID NO: 6495 - DNA, 490 bp, unidentified
  misc_feature 1..490: note = Ascusbbf_14922, encodes 16S rRNA
  source 1..490: mol_type = genomic DNA
agagtttgatcatggctcaggataaacgctggcggcgtgcctaatacatgcaagtcgatcgctggaattccagcttgctggaatgaaggagaggcgaacgggtgagtaatacataagcaacctgcccacgaagactgggataattcctggaaacggggactaataccggataggtagtgtgatcgcatgatcgcactattaaaggttcaagacactggtggatgggcttatggcgcattagctggttggtgaggtaacggcccaccaaggcgatgatgcgtagccggcctgagagggtgaacggccacattgggactgagacacggcccagactcctacgggaggcagcagtagggaattttcggcaatgggcgcaagcctgaccgagcaacgccgcgtgagtgaagacggccttcgggttgtaaagctctgttgtaagggaagaattggcatgagagaatcgtgcagtgacggtaccttaccagaaagc

SEQ ID NO: 6496 - DNA, 490 bp, unidentified
  misc_feature 1..490: note = Ascusbbf_22470, encodes 16S rRNA
  source 1..490: mol_type = genomic DNA
agagtttgatcatggctcagaatgaacgttggcggcgtggattaggcatgcaagtcgagcggcaaggtttttttcggaagaccctagagcggcggaagggataggagagtatagattacgtgcctcttagctcaggatagcgtctggaaacgggcgataatactgaatgacgtgtacgcacgaaaggtgtaaatccgctaggagatcggtctatatcctattagctagttggtaaggtaacggcttaccaaggcgatgatgggtacggggcgtgagagcgtgaccccgatcactgggactgagacactgcccagacgcctacgggcggctgcagtcgagaatcttcggcaatggacgaaagtctgaccgagcgacgccgcgtgtatgatgaaggtcttcggattgtaaagtactgtcgattaggcggaaggagcgagagcgaactctcgcttttgacctattatttgaggaaggacgggctaagttcgtg

SEQ ID NO: 6497 - DNA, 490 bp, unidentified
  misc_feature 1..490: note = Ascusbbf_1424286, encodes 16S rRNA
  source 1..490: mol_type = genomic DNA
agagtttgatcctggctcaggattaacgctggcggcatgcctaagacatgcaagtcgaacgagagggcccattgacattcatcgaaagttgaagtgcttgcactgatgctggacttgtttagatttggattttccctctagtggcaaacgggtgagtaacacgtgggttacctgcctcttagaccgggataccgattggaaacgatcgttaataccggatgttctctacggagtaaaggagcctttaaagcttcgctaagagatgggcctgcggcgtattagctagttggtggggtaatggcctaccaaggcgacgatgcgtagccgtactgagaggttaaacggccacactgggactgagacacggcccagactcctacgggagacagcagttaggaatattcgtcaatgggggaaaccctgaacgagcaatgccgcgtgagtgatgaaggtcctttggattgtaaaactctgttgttatggaaaaatg

SEQ ID NO: 6498 - DNA, 490 bp, unidentified
  misc_feature 1..490: note = Ascusbbf_51209, encodes 16S rRNA
  source 1..490: mol_type = genomic DNA
agagtttgatcatggctcaggatgaacgctggcggcgtgcctaatacatgcaagtcgaacgagggtgcttgcaccctagtggcgaacgggtgagtaacacgtaggtaacctgccttttagtttgggatacccagaggaaactttggctaataccggatatgaattcgagaggcatctcttgaatttgaaaggggctcttggccccgctttaagatggacctgcggcgcattagctagttggtgagataacagcccaccaaggcgaggatgcgtatccgatctgagaggatgaccggacacattggaactgagacacggtccaaactcctacgggaggcagcagtaaggagttttcggcaatgggggaaaccctgaccgagcaacgccgcgtgagtgatgacggccctatgggttgtaaagctctgttgtaagagacgaatggtagagtcaggaaatgggctttgcttgacggtatcttaccagaaagcca

SEQ ID NO: 6499 - DNA, 490 bp, unidentified
  misc_feature 1..490: note = Ascusbbf_428240, encodes 16S rRNA
  source 1..490: mol_type = genomic DNA
agagtttgatcatggctcaggacgaacgctggcggcgtgcctaatacatgcaagtcgaacgagaatttcttacaccgagtgcttgcactcaccgtaagaaattcgagtggcggacgggtgagtaacacgtgggtaacctgcccaaaagaaggggataacatttggaaacaaatgctaataccgtataaccatgatgaccgcatggtcattatgtaaaaggtggttctgctatcgcttttggatggacccgcggcgtattaactagttggtagggtaacggcctaccaaggtgatgatacgtagccgagttgagagactgatcggccacaatgggactgagacacggcccatactcctacgggaggcagcagtagggaatcttccacaatgggcgcaagcctgatggagcaacgccgcgtgaatgaagaaggtcttcggatcgtaaaattctgttgttagagaagaatatgagtaatagtaactgattatt

SEQ ID NO: 6500 - DNA, 484 bp, unidentified
  misc_feature 1..484: note = Ascusbbf_51358, encodes 16S rRNA
  source 1..484: mol_type = genomic DNA
agagtttgatcctggctcagaacgaacgctggcggcaggcttaacacatgcaagtcgagcgcccttttcggagggagcggcagacgggtgagtaacacgtgggaatctacccatctctagggaataactcagggaaacttgtgctaataccctatacgcccccctttggagacattgggggggaaagatttatcggagatggatgagcccgcgttggattagctagttggtgaggtaatggctcaccaaggcgacgatccatagctggtctgagaggatgatcagccacactgggactgagacacggcccagactcctacgggaggcagcagtggggaatattggacaatgggcgcaagcctgatccagccatgccgcgtgtgtgatgaaggccttagggttgtaaagcactttcaccgatgaagataatgacggtagtcggagaagaagccccggctaacttcgtgccagcagccgcggtaat

SEQ ID NO: 6501 - DNA, 490 bp, unidentified
  misc_feature 1..490: note = Ascusbbf_7174, encodes 16S rRNA
  source 1..490: mol_type = genomic DNA
agagtttgatcctggctcaggatgaacgctagctacaggcttaacacatgcaagtcgaggggtaacgtgaggaaagcttgctttccttgacgacgaccggcgcacgggtgagtaacgcgtatccaacctgccccagagtcagggataaccttccgaaagggagcctaatacctgatgtagtgcgatgatggcatcagagtttcactaaagatttatcgctctgggatggggatgcgtctgattaggtagtaggcggggtaacggcccacctagccatcgatcagtaggggttctgagaggaaggtcccccacattggtactgagacacggaccaaactcctacgggaggcagcagtgaggaatattggtcaatgggcgcgagcctgaaccagccaagtagcgtgcaggaagactgccctatgggttgtaaactgcttttatgaggggataaagtcggccacgtgtggccgtttgcaggtacctcatgaat

SEQ ID NO: 6502 - DNA, 490 bp, unidentified
  misc_feature 1..490: note = Ascusbbf_42674, encodes 16S rRNA
  source 1..490: mol_type = genomic DNA
agagtttgatcatggctcaggatgaacgctggcggcgtgcttaacacatgcaagtcgaacggacttgtgacaccgtctcggatttagcttgctattgaagagacaccgttgcaagttagtggcggacgggtgagtaacgcgtgggcaacctgcctttatccgggggataacagttagaaatgactgctaataccgcataagcgcacggtaccgcatggtacagtgtgaaaaactccggtggatagagatggacccgcgttagattagccagttggcggggtaacggcccaccaaagcgacgatctatagccggcctgagagggcgaccggccacattgggactgagacacggcccaaactcctacgggaggcagcagtggggaatattgcacaatgggggaaaccctgatgcagcgacgccgcgtgagtgaagaagtatttcggtatgtaaagctctatcagcagggaagaaaaaggacggtacctgcac

SEQ ID NO: 6503 - DNA, 490 bp, unidentified
  misc_feature 1..490: note = Ascusbbf_710013, encodes 16S rRNA
  source 1..490: mol_type = genomic DNA
agagtttgatcctggctcaggatgaacgctggcggcatgcctaagacatgcaagtcgaacggagtgacccattgaagttggagtgcttgcacaaagacggatttggattttcactcagtggcagacgggtgagtaacgcgtgggtaatctacctcaaagtctgggataacttctggaaacggatgctaataccggataacccatagatagataactatttatgttgaaaggagctttcgcttcgctttgagatgagcttgcgttgtattagctagttggtggggtaatggcctaccaaggcaacgatgcatatccgagctgagaggctgatcggacacattgggactgagacacggcccagactcctacgggagacagcagttaggaatattcgtcaatgggggaaaccctgaacgagcaatgccgcgtgaatgatgacaatcctctggattgtaaaattctgttgtaaaggacgaaccactactatagg

SEQ ID NO: 6504 - DNA, 490 bp, unidentified
  misc_feature 1..490: note = Ascusbbf_64941, encodes 16S rRNA
  source 1..490: mol_type = genomic DNA
agagtttgatcatggctcaggatgaacgctggcggcgtgcttaacacatgcaagtcgaacggagtacatcaaccgagaccttcgggtctcatctgttgtacttagtggcggacgggtgagtaacgcgtgagcaaccaaccttatgcagagggataacaattagaaatgattgctaataccgcataagaccacagcaccgcatgatgcagtgggaaaaactccggtggcataagacgggctcgcgttcgattagcttgttggtgaggtaacggctcaccaaggcgacgatcgatagccggactgagaggtcgaccggccacattgggactgagacacggcccagactcctacgggaggcagcagtggggaatattgcacaatgggggaaaccctgatgcagcgacgccgcgtgagtgatgaagtatttcggtatgtaaagctcttttagtagggaagaagatgacggtacctacagaaacagccccggcta

SEQ ID NO: 6505 - DNA, 470 bp, unidentified
  misc_feature 1..470: note = Ascusbbf_52352, encodes 16S rRNA
  source 1..470: mol_type = genomic DNA
agagtttgatcatggctcagaacgaacgctggcggcaggcctaacacatgcaagtcgaacgccctggcaacagggagtggcagacgggtgagtaacgcgtgggaatctaccttgtggtacggaacaaccaagggaaactttggctaataccgtatgagcccttcgggggaaagatttatcgccataagatgagcccgcgtaggattagctagttggtgaggtaatggctcaccaaggcgacgatccttagctggtctgagaggatgaccagccacactgggactgagacacggcccagactcctacgggaggcagcagtggggaatattggacaatgggcggaagcctgatccagccatgccgcgtgtgtgatgacggccttagggttgtaaagcactttcgccgatgaagataatgactgtagtcggagaagaagccccggctaacttcgtgccagcagccgcggtaat

SEQ ID NO: 6506 - DNA, 490 bp, unidentified
  misc_feature 1..490: note = Ascusbbf_97283, encodes 16S rRNA
  source 1..490: mol_type = genomic DNA
agagtttgatcctggctcaggatgaacgctagcggcaggcttaatacatgcaagtcgaggggcagcagctttatagcaatatagaggctggcgaccggcaaacgggtgcggaacacgtacacaaccttcctttaagagggggatagcccatagaaatgtggattaataccccgtaatattattgaagtggcatcactttataattatagttacgacgcttgaagatgggtgtgcggctgattaggtagttggcggggtaaaggcccaccaagccttcgatcagtagctgatgtgagagcatgatcagccacacgggcactgagacacgggcccgactcctacgggaggcagcagtaaggaatattggtcaatggacgcaagtctgaaccagccatgccgcgtgaaggatgaaggtcctctggattgtaaacttcttttatagggggcgaaaaaagggaattctttctcacttgacagtaccctatgaata

SEQ ID NO: 6507 - DNA, 490 bp, unidentified
  misc_feature 1..490: note = Ascusbbf_1883489, encodes 16S rRNA
  source 1..490: mol_type = genomic DNA
agagtttgatcctggctcagaacgaacgctggcggcgcgtcttaagcatgcaagtcgggcgggatcgtggtgcttgcaccgcgtgagagcggcggactggcgaggagcgcgtgggtgacgcaccccccggacggggacagccggcagaaatgccgggtgataccggatgaggtcccccttgttggaggagggggaggaaaggggcttcggccccgccgggggagcggcccgcgtcccatcagcctgtaggcggtgtaacggaccacctaagctatgacgggtacccggactgagaggtcggacgggcgcattgggactgagatacggcccagactcctacgggaggcagcagctaagaatagtccgcaatggggggaaccctgacggagcgacgccgcgtgggcgatgaaggccggaaggttgtaaagcccttttatgcgcgaggaataaggaggggaggcaatgcccctctggtgactgtagcgcatga

SEQ ID NO: 6508 - DNA, 490 bp, unidentified
  misc_feature 1..490: note = Ascusbbf_342868, encodes 16S rRNA
  source 1..490: mol_type = genomic DNA
agagtttgatcatggctcaggatcaacgctggcggcgtgcctaatgcatgcaagtcgaacggggtcaccttcgggtggctcacgtggcggacgggtgaggaacacgtggggaatctgccgcacgctcgggggtagcccgcggaaacgcggggtaattccggatggactggatgaccgggtagggtgattcaggaaagggcttcggcccggcgagcgaggagcctgcgtccgattagctagttggtggggtaacggcctaccaaggcgatgatcggtagctggtctgagaggacgatcagccacacggggactgagacacggccccgactcctacgggaggcagcagcaaggaattttccgcaatgggcgcaagcctgacggagcaacgccgcgtgcgggatgacgcctttcggggtgtaaaccgctgttcgtggggacgaagcactgacggtacccacggaggaaggcccggctaactacgtgccagcag

SEQ ID NO: 6509 - DNA, 490 bp, unidentified
  misc_feature 1..490: note = Ascusbbf_77907, encodes 16S rRNA
  source 1..490: mol_type = genomic DNA
agagtttgatcatggctcaggacgaacgctggcggcgtgcctaatacatgcaagtcgagcgaatctgagggagcttgctcccaaagattagcggcggacgggtgagtaacacgtgggcaacctgcctgtaagactgggataactccgggaaaccggggctaataccggataatatctatttatacatataattagattgaaagatggttctgctatcacttacagatgggcccgcggcgcattagctagttggtgaggtaacggctcaccaaggcgacgatgcgtagccgacctgagagggtgatcggccacactgggactgagacacggcccagactcctacgggaggcagcagtagggaatcttccgcaatggacgaaagtctgacggagcaacgccgcgtgagtgatgaaggttttcggatcgtaaaactctgttgttagggaagaacaagtatcggagtaactgccggtaccttgacggtacctaa

SEQ ID NO: 6510 - DNA, 490 bp, unidentified
  misc_feature 1..490: note = Ascusbbf_79893, encodes 16S rRNA
  source 1..490: mol_type = genomic DNA
agagtttgatcctggctcaggatgaacgctagcggcaggcttaacacatgcaagtcgaggggcagcgcgggtagcaatacctggcggcgaccggcgaaagggtgagtaacgcgtgagcaacgtgcccgtatgtgggggatagtcattggaaacgatgcgtaataccccgtaacacaaatcttcgcatggggatttgttgaaagatttattgcatacggatcggctcgcgtgccattaggtagacggcggggtaacggcccaccgtgccgacgatggctaggggttctgagaggaaggtcccccacattggaactgagacacggtccagactcctacgggaggcagcagtgaggaatattggacaatggccggaaggctgatccagccatgccgcgtgcgggatgacggccctatgggttgtaaaccgcttttgcgagggagcaataagtgttacgtgtagcacgatgagagtacctcgcgaataagcatc

SEQ ID NO: 6511 - DNA, 490 bp, unidentified
  misc_feature 1..490: note = Ascusbbf_43064, encodes 16S rRNA
  source 1..490: mol_type = genomic DNA
agagtttgatcatggctcaggatgaacgctagcggcaggcttaacacatgcaagtcgaggggcagcgggaggagtgcttgcacttcttgccggcgaccggcgcacgggtgagtaacacgtatgcaacctgcctccgtcagggggacaacccggcgaaagccgggctaatcccgcgtatattccgtgagggcatccttacggaaggaaaggcttcggccggacggggatgggcatgcggcgcattaggtagtcgggggtgtaacggaccaccgagccgacgatgcgtaggggttctgagaggaaggtcccccacactggtactgagacacggaccagactcctacgggaggcagcagtgaggaatattggtcaatggtcggaagactgaaccagccaagccgcgtgaaggaagaaggtgctcggcatcgtaaacttcttttgtcagggaacaaagggcggtacgtgtaccgctgtgagtgtacctgaagaa

SEQ ID NO: 6512 - DNA, 490 bp, unidentified
  misc_feature 1..490: note = Ascusbbf_418828, encodes 16S rRNA
  source 1..490: mol_type = genomic DNA
agagtttgatcatggctcaggatgaacgctggcggcgtgcttaacacatgcaagtcgaacgggaaagcgccctcgggcgcgagtacagtggcgaacgggtgagtaacacgtgaccaacctgccccccgcaccgggatagccgggcgaaagcccgggtaataccggatgaccccgcaccgcggcatcgcggcgcgggcaaagcccagacggcgggggatggggtcgcggcccattagctagtcggcggggtaacggcccaccgaggcgacgatgggtagccgggttgagagaccgaccggccacattgggactgagacacggcccagactcctacgggaggcagcagtggggaatattgcgcaatgggggaaaccctgacgcagcaacgccgcgtgcgggatggaggccttcgggttgtaaaccgctttcagcagggaagaacaaagacggtacctgcagaagaagctccggctaaatacgtgccagcagc

SEQ ID NO: 6513 - DNA, 490 bp, unidentified
  misc_feature 1..490: note = Ascusbbf_1017, encodes 16S rRNA
  source 1..490: mol_type = genomic DNA
agagtttgatcatggctcagattgaacgctggcggcaggcttaacacatgcaagtcgagcggggaaaggtagcttgctacctgacctagcggcggacgggtgagtaatgcttaggaatctgcctattagtgggggacaacattccgaaaggaatgctaataccgcatacgccctacgggggaaagcaggggatcttcggaccttgcgctaatagatgagcctaagtcagattagctagttggtggggtaaaggcctaccaaggcgacgatctgtagcgggtctgagaggatgatccgccacactgggactgagacacggcccagactcctacgggaggcagcagtggggaatattggacaatgggcgaaagcctgatccagccatgccgcgtgtgtgaagaaggccttttggttgtaaagcactttaagcgaggaggaggctacttagattaatactctaggatagtggacgttactcgcagaataagca

SEQ ID NO: 6514 - DNA, 490 bp, unidentified
  misc_feature 1..490: note = Ascusbbf_1371617, encodes 16S rRNA
  source 1..490: mol_type = genomic DNA
agagtttgatcctggctcaggatgaacgctagcggcaggcttaacacatgcaagtcgaggggtaacgcggggtagcaatactctggcgacgaccggcgcacgggtgcgtaacgcgtatgcaacctacctgtaccaggggtataacggagcgaaatttccactaatcccccatattgttattctttcgcatgttaggataacgaaagcttcggtggttacggatgggcatgcgtgacattagctagttggtaaggtaacggcttaccaaggcgacgatgtctaggggagctgagaggcttatccacaaaactggaaatgcgaaacggaccagactcctacgggaggcagcagtgaggaatattggtcaatgggcggaagtctgaaccagccatgccgcggggaggaagaaggtcctatgggttgtaaactccttttgttcgagagtaataagggctttgcgaagcccgatgagagtatcggacgaataagc

SEQ ID NO: 6515 - DNA, 490 bp, unidentified
  misc_feature 1..490: note = Ascusbbf_8722, encodes 16S rRNA
  source 1..490: mol_type = genomic DNA
agagtttgatcatggctcaggatgaacgctagcggcaggcctaatacatgcaagtcgaacggtaaacgccccttcgggggtgtgagagtggcgcacgggtgcgtaacgcgtatgcaacccacccgctgtcgggggatagcccggagaaattcgaattaataccccatgaggagtgtttgaggcatctcaggcatttcaaaactaaggtgacggcggacgggcatgcgtgccattagatagttggcggggtaacggcccaccaagtcgacgatggctaggggatctgagaggacggtcccccacactggtactgagacacggaccagactcctacgggaggcagcagtaagggatattggtcaatggggggaaccctgaaccagccatgccgcgtgagggaataaggccctacgggtcgtaaacctcttttgccgggggataaggacatccacgtgtgggtgtttgaaggtacccggagaataagcatcgg

SEQ ID NO: 6516 - DNA, 490 bp, unidentified
  misc_feature 1..490: note = Ascusbbf_18378, encodes 16S rRNA
  source 1..490: mol_type = genomic DNA
agagtttgatcatggctcaggatgaacgctggcggcgtgcttaacacatgcaagtcgaacgggaactctgaactgaaggttcgctggatgtttagaaattctagtggcggacgggtgagtaacgcgtgggtaacctgcctataagacgtgaacaacagttagaaatgactgctaatacacgataagcacacagtatcgcatgatatagtgtgaaaagaatttcgcttatagatggacccgcgtttgattagccagttggtggggtaacggcctaccaaagcaacgatcaatagccggcctgagagggcgatcggccacattgggactgagacacggcccaaactcctacgggaggcagcagtggggaatattggacaatgggggcaaccctgatccagcaacgccgcgtgagtgatgaagtatcttggtatgtaaagctctatcagtaggtatgaaacaagacagcctaactaagaagccccggctaact

SEQ ID NO: 6517 - DNA, 490 bp, unidentified
  misc_feature 1..490: note = Ascusbbf_10121, encodes 16S rRNA
  source 1..490: mol_type = genomic DNA
agagtttgatcctggctcaggacgaacgctggcggcgcgcctaacacatgcaagtcgaacgggattgtttacaatccagtggcggacgggtgagtaatgcatgagtaatctgcctgaaagagggggatagcttctggaaacagaagataataccgcatatttcaaaatttccgcatggtttttttggcaaaggagcaatccactttcagatgagctcatgtccgattagctagttggtagggtaaatgcctaccaaggcaacgatcggtagccgtactgagaggttctacggccacattgggactgagacacggcccagactcctacgggaggcagcagtgaggaatattgcgcaatggaggaaactctgacgcagcgacgccgcgtgagggaagaaggttttcgaattgtaaacctctgttctcagggaagataatgacggtacctgaggagtaagccccggctaactacgtgccagcagccgcggtaa

SEQ ID NO: 6518 - DNA, 490 bp, unidentified
  misc_feature 1..490: note = Ascusbbf_21927, encodes 16S rRNA
  source 1..490: mol_type = genomic DNA
agagtttgatcatggctcaggatgaacgctagctacaggcttaacacatgcaagtcgaggggcagcatgaatcaagcttgcttgatttgatggcgaccggcgcacgggtgcgtaacgcgtatccaatctaccctattctcagggatagccttgcgaaagtaagattaatacctgatggtctcacgtcgccgcatggcgttgtgagtaaagatttatcggaatgggatggggatgcgtccgattagcttgacggcggggtaacggcccaccgtggcgacgatcggtaggggttctgagaggaaggtcccccacactggaactgagacacggtccagactcctacgggaggcagcagtgaggaatattggtcaatggccgtaaggctgaaccagccaagtagcgtgagggatgacggccctacgggttgtaaacctcttttgttggggaataaagtcaggtacgtgtacctgtttgtatgtaccttacgaat

SEQ ID NO: 6519 - DNA, 490 bp, unidentified
  misc_feature 1..490: note = Ascusbbf_44195, encodes 16S rRNA
  source 1..490: mol_type = genomic DNA
agagtttgatcctggctcaggatgaacgctagctacaggcttaacacatgcaagtcgaggggcatcgcgggagttgcttgcaacttctggcggcgaccggcgcacgggtgagtaacgcgtatccaacctgccctttactacggtatagcccagcgaaagttggattaatcccgtatgttgtcgcgcgatggcatctgatcgcgacgaaaggttcaccggtagaggatggggatgcgtccgattaggtagtcggcgggttgacagcccaccgagccgacgatcggtaggggttctgagaggaaggtcccccacattggaactgagacacggtccaaactcctacgggaggcagcagtgaggaatattggtcaatgggcgcaggcctgaaccagccaagtagcgtgagggaagacggccctacgggttgtaaacctctttttcacggggataaagtgtgccacgtgtggcatattgcaggtaccgtgtgaat

SEQ ID NO: 6520 - DNA, 488 bp, unidentified
  misc_feature 1..488: note = Ascusbbf_24237, encodes 16S rRNA
  source 1..488: mol_type = genomic DNA
agagtttgatcatggctcagaacgaacgctggcggcatggattaggcatgcaagtcgaacgaagcagcaatgcttagtggcggaagggtgaggaacgcgtgagcaatctgcccccaagttgggaataacagttggaaacgactgctaataccgaatgtggctgagagaccgcatgatctttcggctaaagatttatcgcttggggatgagctcgcgtcccattagctagttggtgaggtaacggcccaccaaggcgatgatgggtagctggtctgagaggatggtcagccacactgggactgagacactgcccagactcctacgggaggctgcagtcgagaatcttgggcaatgcgcgaaagcgtgacccagcaatgccgcgtgtgtgatgaaggtcttcggattgtaaaacactgtctcccgggacgaaagttgacggtaccggggaaggaagccacggctaactacgtgccagcagccgcggtaat

SEQ ID NO: 6521 - DNA, 490 bp, unidentified
  misc_feature 1..490: note = Ascusbbf_10429, encodes 16S rRNA
  source 1..490: mol_type = genomic DNA
agagtttgatcatggctcaggacgaacgctggcggcgtgcttcatacatgcaagtcgaacgagaagtcaccttcgggtgatggaaagtggcggacgggtgagtaatacgtagggaatctgccctagagcgggggacaacagttggaaacgattgctaataccccatatgagcttggttgaaataccaatcttgaaaactccggtgctctaggatgagcctgcggctgattagcttgttggcggggtaaatgcccaccaaggcgacgatcagtagctggtttgagaggatgatcagccacaatgggactgagacacggcccatactcctacgggaggcagcagtagggaattttgcgcaatgggcgaaagcctgacgcagcaacgccgcgtgaatgttaagcccttcggggtgtaaagttctgtcagtggggacgaaacttgacggtacccacagaggaagcaccggctaactccgtgccagcagccgcgg

SEQ ID NO: 6522 - DNA, 490 bp, unidentified
  misc_feature 1..490: note = Ascusbbf_1341365, encodes 16S rRNA
  source 1..490: mol_type = genomic DNA
agagtttgatcctggctcaggatgaacgctagcgataggcctaacacatgcaagtcgaggggcagcacatgacgtagcaatacagatggtggcgaccggcgcatgggtgagtaacacgtatgcaacctaccttcaacaggggaataacccgtcgaaagacggactaataccccataatacagggctccctcatgggaatatttgttaaagatttatcggttgaagatgggcatgcgttccattagctagttggtgaggtaacggctcaccaaggcaacgatggataggggaactgagaggttgagccccaacactggtactgagaaccggaccagactccgacggaaggcagcagtgaggaagattggtcaatggaggcaactctgaaccagccacgtcgcgtgaaggatgacggccctacgggttgtaaacttcttttgtaagggaataaagttagttacgtgtagctatttgcatgtaccttacgaat

SEQ ID NO: 6523 - DNA, 490 bp, unidentified
  misc_feature 1..490: note = Ascusbbf_35016, encodes 16S rRNA
  source 1..490: mol_type = genomic DNA
agagtttgatcatggctcagattgaacgctggcggcaggcttaacacatgcaagtcgagcggggataggtagcttgctactgattcctagcggcggacgggtgagtaatacttaggaatctgcctattagtgggggacaacgttccgaaagggacgctaataccgcatacgtcctacgggagaaagcaggggatcttcggaccttgcgctaatagatgagcctaagtcggattagctagttggtggggtaaaggcctaccaaggcgacgatctgtagcgggtctgagaggatgatccgccacactgggactgagacacggcccagactcctacgggaggcagcagtggggaatattggacaatgggggcaaccctgatccagccatgccgcgtgtgtgaagaaggccttttggttgtaaagcactttaagcgaggaggaggcttacctggataatacctgggataagtggacgttactcgcagaataagc

SEQ ID NO: 6524 - DNA, 468 bp, unidentified
  misc_feature 1..468: note = Ascusbbf_12113, encodes 16S rRNA
  source 1..468: mol_type = genomic DNA
agagtttgatcatggctcagaacgaacgctggcggcaggcttaacacatgcaagtcgagcgcctcgcaaggggagcggcagacgggtgagtaacgcgtgggaatgtacccttctctacggaataacacagagaaatttgtgctaataccgtatacgccctttgggggaaagatttatcggagaaggatcagcccgcgtaggattagctagttggtgtggtaatggcgcaccaaggcgacgatccttagctggtctgagaggatgatcagccacactgggactgagacacggcccagactcctacgggaggcagcagtggggaatattggacaatgggcgcaagcctgatccagccatgccgcgtgagtgatgaaggccttagggttgtaaagctctttcacccacgacgataatgacggtagtgggagaagaagccccggctaacttcgtgccagcagccgcggtaat

SEQ ID NO: 6525 - DNA, 489 bp, unidentified
  misc_feature 1..489: note = Ascusbbf_25048, encodes 16S rRNA
  source 1..489: mol_type = genomic DNA
agagtttgatcatggctcagaacgaacgctggcggcatggattaggcatgcaagtcgaacggtgcagcaatgcatagtggcgcaagggtgaggaacacgtgagtaatctgccctcgagtttggaatagctcctggaaacgggaattaataccggatgttatcaggttgacgcatgttgaccggatgaaagcagagatgcgcttgaggatgagctcgcgtcccattagctggttggtgaggtaacggcccaccaaggcgatgatgggtagctggtctgagaggacgatcagccacactgggactgagaactgcccagactcctacgggaggctgcagtcgagaattttgggcaatgggcgaaagcctgacccagcaatgccgcgtgcgggatgaaggtcttcggattgtaaaccgctgtcaagagggacgaaaattgacggtacctctgaaggaagtcacggctaactacgtgccagcagccgcggtaat

SEQ ID NO: 6526 - DNA, 490 bp, unidentified
  misc_feature 1..490: note = Ascusbbf_125415, encodes 16S rRNA
  source 1..490: mol_type = genomic DNA
agagtttgatcatggctcagaacgaacgctggcggcaggcctaacacatgcaagtcgagcgtgaaaggggcttcggccctgagtaaagcggcgcacgggtgagtaacacgtgaataatctgcccttgagaccgggataacagaccgaaaggactgctaataccggataagcccacagaccaaccgggtgtgtgagaaaagagcgggaatcttcggatccgttcacttaaggatgagttcgcgttccattagatagttggtgaggtaatggctcaccaagtcgacgatggatagctggtcttagaggatgatcagccacactggaactgagacacggtccagactcctacgggaggcagcagtggggaatcttgcgcaatggaggaaactctgacgcagccatgccgcgtgagcgatgaaggccttcgggttgtaaagctccgtctaaggggacgaatggtcaaggtgacaacaacgccttggcgtgacgg

SEQ ID NO: 6527 - DNA, 490 bp, unidentified
  misc_feature 1..490: note = Ascusbbf_112743, encodes 16S rRNA
  source 1..490: mol_type = genomic DNA
agagtttgatcatggctcaggatgaacgctggcggcgtgcctaacacatgcaagtcgaacgggactgtttagtgacgatttcggtctgaactttacagtttagtggcggacgggtgagtaacgcgtggataacctgcctttcacagggggatagcagctggaaacggctggtaataccgcatacgcgagagatgccgcatgacatcactcggaaagatttatcggtgaaagatggatccgcgtctgattagccagttggcggggtaacggcccaccaaagcgacgatcagtagccggcctgagagggcggacggccacattgggactgagacacggcccagactcctacgggaggcagcagtgggggatattgcacaatgggcgcaagcctgatgcagcgacgccgcgtgagtgaagaagtatttcggtatgtaaagctctatcagcagggaagaaagacccgcaagggggatgacggtacctgactaag

SEQ ID NO: 6528 - DNA, 490 bp, unidentified
  misc_feature 1..490: note = Ascusbbf_84801, encodes 16S rRNA
  source 1..490: mol_type = genomic DNA
agagtttgatcatggctcaggatgaacgctggcggcgtgcttaacacatgcaagtcgaacggagatatatttttgaagttttcggatggattgaatatatcttagtggcggacgggtgagtaacgcgtaaacaatctgccttagagagggggataacagatagaaatatttgctaataccgcataagaccacggttggcatcaaccaggggtaaaaggagcaatccgctttaagatgagtttgcgtactattagctagttggtgaggtaacggcccaccaaggcgacgatggttagccggcctgagagggtgaacggccacattggaactgagatacggtccagactcctacgggaggcagcagtgaggaatattgggcaatggaggaaactctgacccagcaacgccgcgtgaaggaagaaggttttaggattgtaaacttctgttgtagaggaaaaagaaagtgatggtactctgcgaggaagctacg

SEQ ID NO: 6529 - DNA, 490 bp, unidentified
  misc_feature 1..490: note = Ascusbbf_84524, encodes 16S rRNA
  source 1..490: mol_type = genomic DNA
agagtttgatcatggctcaggatgaacgctagcgggaggcttaatacatgcaagtcgaacggcagcaggtccttcgggacgctggcgagtggcgaacgggtgagtaacgcgtacacgatctgcccataagtctgggatagtcactggaaacggtgaataataccggatgtggataaattgcttcatggtaatttatttaaaggctggtctgcttatggatgagtgtgcgtcctattagttagttggtgaggtaacggctcaccaagacgatgataggtagggggcgtgagagcgtggacccccacacgggtactgagacacggacccgactcctacgggaggcagcagtaaggaatattggacaatgggcgagagcctgatccagccatcccgcgtgcaggaagacggccctttgggttgtaaactgcttttataagggaagaacagccccgattgatcggggtatgacggtaccttaggaataagcacc

SEQ ID NO: 6530 - DNA, 490 bp, unidentified
  misc_feature 1..490: note = Ascusbbf_91325, encodes 16S rRNA
  source 1..490: mol_type = genomic DNA
agagtttgatcctggctcaggacgaacgctggcggcgtgcctaacacatgcaagtcgaacgagaaatatgacattgattccttcgggatgatttggattatggacagtggcggacgggcgagtaacgcgtgagtaacctgcccataagagagggatagccgatggaaacgtcgagtaatacctcatattgtaatataatcgcatggttaaattatgaaagatttatcgcttatggatggactcgcgtctgattagatagttggtgaggtaacggctcaccaagtcgacgatcagtagccgaactgagaggttgatcggccgcattgggactgagacacggcccagactcctacgggaggcagcagtggggaatattgcgcaatgggggaaaccctgacgcagcaacgccgcgtgcaggaagaaggtcttcggattgtaaactgttgtcgcaagggaagaagaaagtgacggtaccttgtgagaaagtcac

SEQ ID NO: 6531 - DNA, 490 bp, unidentified
  misc_feature 1..490: note = Ascusbbf_108742, encodes 16S rRNA
  source 1..490: mol_type = genomic DNA
agagtttgatcatggctcaggatgaacgctggcggcgtgcctaacacattcaagtcgaacggactgattcggtagtaatactgatgaaagttagtggcggacgggtgagtaacgcgtgaggaacctgcctctgtgagcgggataacgtccggaaacagacgctaataccgcatgaaccgacagtaccgcatggtacaatcggcaaatgaacttcgcacagagatggcctcgcgtccgattagatagttggcggggcaacggcccaccaagtctgcgatcggtagccggactgagaggttgaacggccacattggaactgagatacggtccagactcctacgggaggcagcagtggggaatattgggcaatgggcgaaagcctgacccagcgacgccgcgtgagggaagaaggtcttcggattgtaaaccttaaacaacggggacgaaacaaatgacggtacccgttaggaagccacggctaactacgtgc

SEQ ID NO: 6532 - DNA, 490 bp, unidentified
  misc_feature 1..490: note = Ascusbbf_34542, encodes 16S rRNA
  source 1..490: mol_type = genomic DNA
agagtttgatcatggctcaggacgaacgctggcggcgtgcctaacacatgcaagtcgaacgggatatatgctttgagtttttcggaacgattagcatatcatctagtggcggacgggtgagtaacacgtgagtaatctgccttgtagagggggataacggctagaaatggtcgctaataccgcgtaaaatatatttagcgcatgctagatatatcaaagatttatcgctgcaagatgagctcgcgtctgattagatagttggcggggtaaaggcccaccaagtctacgatcagtagccgaactgagaggttgattggccacattgggactgagacacggcccagactcctacgggaggcagcagtgggggatattgcacaatgggggaaaccctgatgcagcaacgccgcgtgagggaagaaggttttcgaattgtaaacctctgtctttgaggatgataatgacagtactcaaagaggaagctccggct

SEQ ID NO: 6533 - DNA, 490 bp, unidentified
  misc_feature 1..490: note = Ascusbbf_109858, encodes 16S rRNA
  source 1..490: mol_type = genomic DNA
agagtttgatcatggctcaggacgaacgctggcggcgtgcttaacacatgcaagtcgaacgaagtaagaaattacttagtggcggacgggtgagtaacgcgtgagtaacctgcccttatctggggaataacacagagaaatctgtgctaataccgcatgacatttaccgaaggcatcttaggtaaatcaaagatttatcggataaggatgggctcgcgtccaattaggtagtaggtgaggtaacggcccacctagccgacgattggtagccgacctgagagggtgatcggccacattggaactgagaaacggtccagactcctacgggaggcagcagtggggaatattgggcaatggaggcaactctgacccagcaacgccgcgtgaatgatgaaggtcttcggattgtaaagttctgtgatgggggacgaagaaagtgacggtaccccaatagcaagctacggctaactacgtgccagcagccgcggta

SEQ ID NO: 6534 - DNA, 472 bp, unidentified
  misc_feature 1..472: note = Ascusbbf_58318, encodes 16S rRNA
  source 1..472: mol_type = genomic DNA
agagtttgatcctggctcagaacgaacgctggcggcgcgcttaacacatgcaagtcggacgctcattttcggatgggagtggcggacgggtgagtaacgcgtgggaacctgccctgaggtctgggacaaccgctggaaacggcggctaataccggatgtctcctacgggagaaagatttatcgccttgggaggggcccgcgttggattagctagttggtggggtaatggcccaccaaggctgcgatccatagctggtctgagaggatggccagccacactgggactgagacacggcccagactcctacgggaggcagcagtggggaatcttggacaatgggggcaaccctgatccagcgacgccgcgtgggtgatgaaggccttagggttgtaaagcccttttctcggggaagatgatgacggtacccgaggaataagcaccggctaactccgtgccagcagccgcggtaat

SEQ ID NO: 6535 - DNA, 490 bp, unidentified
  misc_feature 1..490: note = Ascusbbf_897048, encodes 16S rRNA
  source 1..490: mol_type = genomic DNA
agagtttgatcatggctcaggacgaacgctggcggcgtgcctaatacatgcaagtagaacgctgaaggaggagcttgctcttctggatgagttgcgaacgggtgagtaacgcgtaggtaacctgcctggtagcgggggataactattggaaacgatagctaatactgcataatagtagatgttgcatgacatttacttaaaaggtgcaattgcatcactaccagatggacctgcgttgtattagctagttggtggggtaacggctcaccaaggcgacgatacatagccgacctgagagggtgatcggccacactgggactgagacacggcccagactcctacgggaggcagcagtagggaatcttcggcaatggacggaagtctgaccgagcaacgccgcgtgagtgaagaaggttttcggatcgtaaagctctgttgtaagagaagaacgagtgtgagagtggaaagttcacactgtgacggtatctta

SEQ ID NO: 6536 - DNA, 472 bp, unidentified
  misc_feature 1..472: note = Ascusbbf_71974, encodes 16S rRNA
  source 1..472: mol_type = genomic DNA
agagtttgatcctggctcagagcgaacgctggcggcaggcttaacacatgcaagtcgaacgctcgtcttcggacgggagtggcagacgggtgagtaacacgtgggaacgtaccctttggttcggaataacgcagggaaacttgcgctaataccggatacgcccttttggggaaaggtttactgccgaaggatcggcccgcgtctgattagctagttggtggggtaacggcctaccaaggcgacgatcagtagctggtctgagaggatgatcagccacactgggactgagacacggcccagactcctacgggaggcagcagtggggaatattggacaatgggcgcaagcctgatccagccatgccgcgtgagtgatgaaggccttagggttgtaaagctcttttgtccgggacgataatgacggtaccggaagaataagccccggctaacttcgtgccagcagccgcggtaat

SEQ ID NO: 6537 - DNA, 489 bp, unidentified
  misc_feature 1..489: note = Ascusbbf_52512, encodes 16S rRNA
  source 1..489: mol_type = genomic DNA
agagtttgatcatggctcaggatgaacgctggcggcgtgcttaacacatgcaagtcgaacgagcgccttcgggcgcgagtggcggacgggtgagtaacgcgtgggtaacctgccctgtacaggggaataacagagagaaatctctgctaatgccgcataagcgcacggcactgcatggtgctgtgtgaaaagctccggcggtacaggatggacccgcgtctgattagctggttggcggggtaacggcccaccaaggcgacgatcagtagccggcctgagagggtgaacggccacattgggactgagatacggcccagactcctacgggaggcagcagtggggaatattgcacaatgggggaaaccctgatgcagcaacgccgcgtgagtgaagaagtatttcggtatgtaaagctctatcagcagggaagaagatgacggtacctgcacaagaagccccggctaactacgtgccagcagccgcggtaat

SEQ ID NO: 6538 - DNA, 490 bp, unidentified
  misc_feature 1..490: note = Ascusbbf_92402, encodes 16S rRNA
  source 1..490: mol_type = genomic DNA
agagtttgatcatggctcaggattaacgctggcggcgtgcataacacattcaagtcgaacggagtgtagaaatacacttagtggcggacgggtgagtaacgcgtgagcaatctaccttccagtgcgggataacaaccggaaacagttgctaataccgcatgaaccggcagcatcgcatggtgcaaccggcaaaggcttgctgctggaagatgagcttgcgtccgattagatagttggcggggcagaggcccaccaagtcgacgatcggtagccggactgagaggttgaacggccacattggaactgagaaacggtccagactcctacgggaggcagcagtggggaatattgggcaatgggcgaaagcctgacccagcgacgccgcgtgagggaagaagatcttcggattgtaaaccttagtcaacagggacgaagcaagtgacggtacctgtggaggaagccacggctaactacgtgccagcagccgcgg

SEQ ID NO: 6539 - DNA, 490 bp, unidentified
  misc_feature 1..490: note = Ascusbbf_988909, encodes 16S rRNA
  source 1..490: mol_type = genomic DNA
agagtttgatcatggctcaggatgaacgctagcggcaggcttaacacatgcaagtcgaggggcagcgtaaggatgtagcaatacaaccttgacggcgaccggcgcaagggtgcgtaacgcgtgagcaacttgcccgtatcaggggcataaccggtggaaacgccgactaattcccataacataccttgcggcatcgcagggtattgaaatctttggaggatacggatgggctcgcgtgacattaggcagttggcggggtaacggcccaccaaaccgacgatgtctaggggaactgagaggttaatcccccacactggaactgaacaacggtccagactcctacgggaggcagcagtgaggaatattggacaatggccggaaggctgatccagccatgccgcgtgcaggataaggtcctatggattgtaaactgcttttgtatgagagcaataaggattacgtgtaatccgatgagagtatcatacgaata

SEQ ID NO: 6540 - DNA, 490 bp, unidentified
  misc_feature 1..490: note = Ascusbbf_499794, encodes 16S rRNA
  source 1..490: mol_type = genomic DNA
agagtttgatcctggctcaggataaacgctggcggcgcacataagacatgcaagtcgaacggaagtcgttatactgatttagataagaacggagaacttgttcaaagggacttgaagaagatttataacaatggctttagtggcggactggtgagtaatacgtaagcaacctgcctattagaggggaacaacagttagaaatgactgctaataccgcatatgccatatggatcacatgattcaagtgggaaaggagtaatccgctaatagatgggcttacggctgattagctagttggtgtggtaacggcataccaaggcgacgatcagtagccggactgagaggttcaacggccacattgggactgagatacggcccagactcctacgggaggcagcagtcgggaattttgcgcaatggaggaaactctgacgcagtgacgccgcgtgcaggaagaaggttttcggattgtaaactgctttagacaggg

SEQ ID NO: 6541 - DNA, 490 bp, unidentified
  misc_feature 1..490: note = Ascusbbf_1590761, encodes 16S rRNA
  source 1..490: mol_type = genomic DNA
agagtttgatcatggctcaggatgaacgctggcggcgtgcctaacacatgcaagtcgagcgagaagctcatgatcgattgactgagtggaaagcggcggacgggtgagtaacgcgtaggcaacctgccccttgcagagggatagcctcgggaaaccgggattaaaacctcataatgcgtaagtgagacatctcagatacgccaaagatttatcggcaagggatgggcctgcgtctgattagttagttggtggggtaacggcctaccaaggcgacgatcagtagccgacctgagagggtgatcggccacattggaactgagacacggtccaaactcctacgggaggcagcagtggggaatattgcacaatgggcgaaagcctgatgcagcaacgccgcgtgaaggatgaaggcccttgggtcgtaaacttctgttctaagggaagataatgacggtaccttaggagcaagtcccggctaactacgtgccag

SEQ ID NO: 6542 - DNA, 468 bp, unidentified
  misc_feature 1..468: note = Ascusbbf_43813, encodes 16S rRNA
  source 1..468: mol_type = genomic DNA
agagtttgatcatggctcagaacgaacgctggcggcaggcctaatacatgcaagtcgaacgcaccttcgggtgagtggcagacgggtgagtaacgcgtgggaaccttcccgatagtacggaataactccgggaaaccggtgctaataccgtatacgcccttcgggggaaagatttatcgctatcggatgggcccgcgttggattagctagttggtggggtaaaagcctaccaaggcgacgatccatagctggtctgagaggatgatcagccacactgggactgagacacggcccagactcctacgggaggcagcagtagggaatcttggacaatgggcgaaagcctgatccagccatgccgcgtgagtgaagaaggccttagggttgtaaaactcttttagcggggaagataatgacggtacccgcagaataagccccggctaacttcgtgccagcagccgcggtaat

SEQ ID NO: 6543 - DNA, 490 bp, unidentified
  misc_feature 1..490: note = Ascusbbf_47552, encodes 16S rRNA
  source 1..490: mol_type = genomic DNA
agagtttgatcatggctcaggatgaacgctagcgacaggcctaacacatgcaagtcgaggggtaacaggggagcttgctcccgctgacgaccggcgcacgggtgagtaacacgtatgcaacctacccgtaagagggggataacccggagaaatccggactaacaccgcataatatcacgatgaggcatcttgacgtgattaaatatttatagcttacggatgggcatgcgcatgattagctagttggtggggtaacggcctaccaaggcgacgatcattaggggtcctgagagggaaatcccccacattggtactgagacacggaccaaactcctacgggaggcagcagtgaggaatattggtcaatgggcgagagcctgaaccagccatgtcgcgtgaaggatgaatgtcctatggattgtaaacttcttttataggggaataaagtgagtctcgtgaggctttttgcatgtaccctatgaataagcat

SEQ ID NO: 6544 - DNA, 485 bp, unidentified
  misc_feature 1..485: note = Ascusbbf_128789, encodes 16S rRNA
  source 1..485: mol_type = genomic DNA
agagtttgatcatggctcagaacgaacgctggcggcaggcttaacacatgcaagtcgaacggaacatagggagcttgcttcttatgtcagtggcgcacgggtgagtaacgcgtaggaacctgtcttttagcctgggatagcctctggaaacggagggtaaaaccggatgagccctgagggggaaatgagtaatcagctggaagaggggcctgcgttagattaggcagttggtggggtaacggcctaccaaaccgacgatctatagctggtctgagaggatgatcagccacattgggactgagacacggcccaaactcctacgggaggcagcagtggggaatattggacaatgggggagaccctgatccagccatgccgcgtgagtgatgacggccttcgggttgtaaagctcttttacacgggaagatgatgacggtaccgtgagaataagcaccggcaaacttcgtgccagcagccgcggtaat

SEQ ID NO: 6545 - DNA, 490 bp, unidentified
  misc_feature 1..490: note = Ascusbbf_1580781, encodes 16S rRNA
  source 1..490: mol_type = genomic DNA
agagtttgatcctggctcagattgaacgctggcggcaggcttaacacatgcaagtcgaacggtagcaggaagaagcttgcttctttgctgacgagtggcggacgggtgagtaatgcttgggaatctggcttatggagggggataactactggaaacggtagctaataccgcgtaatctctacggagtaaagggtgggaccgtaaggccacctgccataagatgagcccaagtgggattaggtagttggtggggtaatggctcaccaagccgacgatctctagctggtctgagaggatgaccagccacactggaactgagacacggtccagactcctacgggaggcagcagtggggaatattgcacaatggggggaaccctgatgcagccatgccgcgtgaatgaagaaggccttcgggttgtaaagttctttcggtgatgaggaaggcggttagtttaatagactaatcgattgacgttagtcacagaag

SEQ ID NO: 6546 - DNA, 470 bp, unidentified
  misc_feature 1..470: note = Ascusbbf_109121, encodes 16S rRNA
  source 1..470: mol_type = genomic DNA
agagtttgatcctggctcagagtgaacgctggcggcatgcttaacacatgcaagtcgtgcgccccgcaaggggagcggcggacgggtgagtaacacgtaggaatgtgtccggaggtgggggataaccctgggaaactagggctaataccgcatatgggctgaggctcaaagcagcgatgcgccttcggagtagcctgcgcctgattagctagttggtggggtaaaggcctaccaaggcgacgatcagtagctggtctgagaggacgatcagccacactgggactgagacacggcccagactcctacgggaggcagcagtggggaatattggacaatgggcgcaagcctgatccagcaatgccgcgtgtgtgaagaaggtcttcggatcgtaaagcactttcggcggggacgatgatgacggtacccgcagaagaagccccggctaacttcgtgccagcagccgcggtaat

SEQ ID NO: 6547 - DNA, 490 bp, unidentified
  misc_feature 1..490: note = Ascusbbf_125831, encodes 16S rRNA
  source 1..490: mol_type = genomic DNA
agagtttgatcatggctcaggacgaacgctggcggcgtgcctaacacatgcaagtcgaacgaagcttgatgaatgatcccttcggggtgatttctgatatgacttagtggcggacgggtgagtaacgcgtgagcaacctgcctttcagagggggatagcgtttggaaacgaacgataataccgcataacatcagagtgctgcatggcattttgatcaaaggagcaatccgctgaaagatgggctcgcgtctgattagatagttggtgaggtaacggctcaccaagtcgacgatcagtagccggactgagaggttgaacggccacattgggactgagacacggcccagactcctacgggaggcagcagtggggaatattgcacaatgggggaaaccctgatgcagcaacgccgcgtgagggaagacggttttcggattgtaaacctttgtctttggtgaagaagaagtgacggtagccaaggaggaagcca

SEQ ID NO: 6548 - DNA, 490 bp, unidentified
  misc_feature 1..490: note = Ascusbbf_141749, encodes 16S rRNA
  source 1..490: mol_type = genomic DNA
agagtttgatcatggctcaggatgaacgctggcggcaggcttaatacatgcaagtcgaacggtaacgaccggtagcaataccggggcgacgagtggcgcacgggtgcgtaacgcgtatgcaacctgccttcaaccggggcataacgttgagaaatcggcgctaatatcccatgtgtatgagagacggcatcgtcttacatataaagatttattggttgaggatgggcatgcgtaacattagcttgttggcggggtaacggcccaccaaggcgacgatgtttaggggttctgagaggattcacccccacactggaactgagacacggtccagactcctacgggaggcagcagtagggaatattgggcaatggaggcaactctgacccagccatgccgcgtgaaggaagacggccctatgggttgtaaacttcttttgccgcagagtaacccgggggacgcgtcccccgctgagagtatgcggcgaataagt

SEQ ID NO: 6549 - DNA, 490 bp, unidentified
  misc_feature 1..490: note = Ascusbbf_334896, encodes 16S rRNA
  source 1..490: mol_type = genomic DNA
agagtttgatcctggctcagattgaacgctggcggcatgctttacacatgcaagtcgaacggcagcacggggagcttgctccctggtggcgagtggcgaacgggtgagtaatatatcggaacgtgtccaataatgggggataactagtcgaaagattagctaataccgcatacgccctgagggggaaagtgggggatcttcggacctcacgttaatggagcggccgatatctgattagctagttggtggggtaaaggcctaccaaggcgacgatcagtagctggtctgagaggatgatcagccacactgggactgagacacggcccagactcctacgggaggcagcagtggggaattttggacaatgggcgaaagcctgatccagccatgccgcgtgagtgaagaaggccttcgggttgtaaagctctttcgcaaggaaagaaaacttatctactaatactagatgaggatgacggtaccttgataagaa

SEQ ID NO: 6550 - DNA, 490 bp, unidentified
  misc_feature 1..490: note = Ascusbbf_91548, encodes 16S rRNA
  source 1..490: mol_type = genomic DNA
agagtttgatcctggctcaggatgaacgctagcgataggcttaacacatgcaagtcgaggggcatcagggacttcggtctgctggcgaccggcgcacgggtgcgtaacgcgtatgcaacttaccctacaatggaggataacccgtcgaaagacggactaatactgcgtatgctcacgctgaggcatctcaaagtgaggaaagaaaatcgatgtaggataggcatgcgtcccattagctagttggtgaggtaacggctcaccaaggcgacgatgggtaggggaactgagaggtttatcccccacactggtactgagacacggaccagactcctacgggaggcagcagtgaggaatattggtcaatgggcgagagcctgaaccagccaagtcgcgtgaaggaagactgtcttatggattgtaaacttcttttgtatgggaataacatgacctacgtgtaggttactgcatgtaccatacgaataagcatcgg

SEQ ID NO: 6551 - DNA, 490 bp, unidentified
  misc_feature 1..490: note = Ascusbbf_134904, encodes 16S rRNA
  source 1..490: mol_type = genomic DNA
agagtttgatcatggctcaggatgaacgctggcggcgtgcctaacacatgcaagtcgaacggagtgttttcttcggaggacacttagtggcggacgggtgagtaacgcgtgggtaatctgccttacacagggggacaacagttggaaacgactgctaataccgcataagccggtagcgccgcatggcgcatccggaaaagattcatcggtgtaagatgagcccgcgtctgattagttagttggcggggtaacggcccaccaagacgacgatcagtagccgacctgagagggtgatcggccacattgggactgagacacggcccaaactcctacgggaggcagcagtggggaatattgcgcaatggggggaaccctgacgcagcaacgccgcgtgagtgaagaagtatttcggtatgtaaagctctatcagcagggaagaaaacgacggtacctgcagaagaagtcccggctaactacgtgccagcagccg

SEQ ID NO: 6552 - DNA, 490 bp, unidentified
  misc_feature 1..490: note = Ascusbbf_96014, encodes 16S rRNA
  source 1..490: mol_type = genomic DNA
agagtttgatcatggctcaggatgaacgctggcggcgtgcttaatacatgcaagtcgaacgaagagcccttaaccgaagatgatgacgtgcttgcactgaatctgattcaccttagggttactgagtggcggacgggtgagtaacgcgtgggtaacctgccttagacagggggataacatcaagaaattggtgctaataccgcatatgctcacagtatcgcatgatacagtgaggaaaactccggtggtctaagatggacccgcgtctgattagctagttggaggggtaacggcccaccaaggcgacgatcagtagccgacttgagagagtgatcggccacattgggactgagacacggcccaaactcctacgggaggcagcagtagggaatattgcacaatgggggaaaccctgatgcagcgacgccgcgtgaaggatgaagtatttcggtatgtaaacttctatcagcaaggaagaaaatgacggtac

SEQ ID NO: 6553 - DNA, 490 bp, unidentified
  misc_feature 1..490: note = Ascusbbf_106031, encodes 16S rRNA
  source 1..490: mol_type = genomic DNA
agagtttgatcatggctcaggatgaacgctagctacaggcttaacacatgcaagtcgaggggcagcatgatcaaagcttgctttgattgatggcgaccggcgcacgggtgcgtaacgcgtatccaacctgccgtgtactcggggatagccctctgaaaggaggattaatacccgatgtggttgcttgaggacatcctcttgcaattaaagatttatcggtacaccgatggggatgcgtacgattaggtagtcggcggggtaacggcccaccgagccaacgatcgttaggggttctgagaggaaggtcccccacataggaactgagacacggtcctaactcctacgggaggcagcagtgaggaatattggtcaatgggcgagagcctgaaccagccaagtagcgtgaaggatgactgccctatgggttgtaaacttcttttataggggaataaagtgtggcacgtgtgccattttgtatgtaccctatgaa

SEQ ID NO: 6554 - DNA, 490 bp, unidentified
  misc_feature 1..490: note = Ascusbbf_917792, encodes 16S rRNA
  source 1..490: mol_type = genomic DNA
agagtttgatcatggctcagattgaacgctggcggcaggcttaacacatgcaagtcgaacgagatgagtggcttcggtcatgagtctagtggcggacgggtgagtaacgcgtggacaacttgccttatagtgggggatagccgaaagaaatttcgattaataccgcataatacgatttggtcgcatgattgaatcgggaaagacttcggtcgctaaaagaaaggtctgcgtctgattagctagttggtgtggtaacggcataccaaggcaacgatcagtagctggtttgagagaatgaacagccacattgggactgagatacggcccagactcctacgggaggcagcagtggggaatattgcgcaatggaggaaactctgacgcagcgacgccgtgtaaaggatgaaggccttcgggttgtaacttatatcgattgtgaaaagcaaggatggtagcaaagtaagaagctccggctaactacgtgccagca

SEQ ID NO: 6555 - DNA, 490 bp, unidentified
  misc_feature 1..490: note = Ascusbbf_111004, encodes 16S rRNA
  source 1..490: mol_type = genomic DNA
agagtttgatcatggctcaggatgaacgctggcggcgtgcttaacacatgcaagtcgaacgaagcatctcgcccgatgaagtggagtgcttgcacaaagcggattcaattgagatgactgagtggcggacgggtgagtaacgcgtgggtaacctacccttatcagggggataacagttggaaacagctgctaataccgcataagcgcacagtatcgcatgatacagtgtgaaaagctccgacggataaggatggacccgcgtctgattagctagttggtgaggtaacggctcaccaaggcgacgatcagtagccgacctgagagggtgatcggccacattgggactgagacacggcccaaactcctacgggaggcagcagtggggaatattgcacaatgggcgaaagcctgatgcagcgacgccgcgtgagtgatgaagtatttcggtatgtaaagctctatcagcagggaagaataatgacggtacctg

SEQ ID NO: 6556 - DNA, 490 bp, unidentified
  misc_feature 1..490: note = Ascusbbf_503613, encodes 16S rRNA
  source 1..490: mol_type = genomic DNA
agagtttgatcctggctcaggatgaacgctggcggcgcacataagacatgcaagtcgaacgaacttaatcgaaagtttacttttgaagcggttagtggcggactggtgagtaacacgtaagcaacctgcctatcagaggggaataacagtgagaaatcattgctaataccgcatatgctcacagtaccacatggtacagtgaggaaaggagcaatccgctgatagatgggcttgcgtctgattagatagttggtggggtaacggcctaccaagtcgacgatcagtagccggactgagaggttgaacggccacattgggactgagatacggcccagactcctacgggaggcagcagtcgggaatattgcgcaatggaggaaactctgacgcagtgacgccgcgtgcaggaagaaggttttcggattgtaaactgctttagttaaggaagatacaagacagtacttaaagaataagcaccggctaactatgt

SEQ ID NO: 6557 - DNA, 490 bp, unidentified
  misc_feature 1..490: note = Ascusbbf_1358092, encodes 16S rRNA
  source 1..490: mol_type = genomic DNA
agagtttgatcatggctcaggatgaacgctggcggcgtgcctaacacatgcaagtcgaacggggttaaggaaaattttcggatagaacttaacttagtggcggacgggtgagtaacgcgtggataacctgcctcgcacagggggatagcagctggaaacggctgataataccgcataagactacagcaccgcctggtgcagcagtaaaagatttatcggtgcgagatggatccgcgtctgattagccagttggcggggtaacggcccaccaaagcgacgatcagtagccggcctgagagggtgaacggccacattgggactgagacacggcccaaactcctacgggaggcagcagtggggaatattgcacaatgggcgcaagcctgatgcagcaacgccgcgtgagtgaagaagtatttcggtatgtaaagctctatcagcagggaagaaaggccctttaagggagatgacggtagctgactaagaagcc

SEQ ID NO: 6558 - DNA, 490 bp, unidentified
  misc_feature 1..490: note = Ascusbbf_307552, encodes 16S rRNA
  source 1..490: mol_type = genomic DNA
agagtttgatcctggctcaggatgaacgctagctacaggcttaacacatgcaagtcgaggggcagcatggtggtagcttgctaccaccgatggcgaccggcgcacgggtgagtaacacgtatccaacctgcccatgacccggggatagccctctgaaaggaggattaatacccgatacggtgcgagtgggacatcccgctcttaccaaagattcatcggtcacggatggggatgcgtctgattagcttgtcggcggggtaacggcccaccgaggctacgatcagtaggggttctgagaggaaggtcccccacataggaactgagacacggtcctaactcctacgggaggcagcagtgaggaatattggtcaatggtcgaaggactgaaccagccaagtagcgtgaaggatgactgccctacgggttgtaaacttcttttatgcgggaataaagtgtggcacgcgtgccattttgcatgtaccgcatgaat

SEQ ID NO: 6559 - DNA, 490 bp, unidentified
  misc_feature 1..490: note = Ascusbbf_182992, encodes 16S rRNA
  source 1..490: mol_type = genomic DNA
agagtttgatcatggctcaggacgaacgctggcggcgtgcctaacacatgcaagtcgaacgagaaatacagaaggaagttcttcgggacggacggaagtatggacagtggcggacgggcgagtaacgcgtgagtaacctgcccataagagcgggatagccgatggaaacgtcgagtaataccgcatgacatatatctatcgcatgataaatatatcaaagaattatcgcttatggatggactcgcgtcagattagatagttggagaggtaacggctcaccaagtcgacgatctgtagccgaactgagaggttgatcggccgcattgggactgagacacggcccagactcctacgggaggcagcagtggggaatattgcgcaatggggggaaccctgacgcagcaacgccgcgtgcaggaagaaggtcttcggattgtaaactgttgtcgcaggggaagaagaaagtgacggtaccctgtgagaaagtcac

SEQ ID NO: 6560 - DNA, 490 bp, unidentified
  misc_feature 1..490: note = Ascusbbf_459233, encodes 16S rRNA
  source 1..490: mol_type = genomic DNA
agagtttgatcctggctcaggacgaacgctggcggcgtgcttaacacatgcaagtcgagcggagtcatgatgaaagcttgctggattcatgacttagcggcggacgggtgagtaacgcgtgagcaatctgtcccatacagggggataataccgcgaaagtggttctaataccgcatgagaccacggcgaggcatctcgttgaggtcaaaggagcaatccggtatggggtgagctcgcgtccgattagatagtaggtgaggtaacggcccacctagtcgacgatcggtagccgacctaagagggtgatcggccacattgggactgagacacggcccagactcctacgggaggcagcagtggggaatattgggcaatgggggaaaccctgacccagcaacgccgcgtggaggaagaaggtcttcggatcgtaaactcctgtcctacaggaagaggagaagactgtactgtaggaggaagccccggctaacta

SEQ ID NO: 6561 - DNA, 470 bp, unidentified
  misc_feature 1..470: note = Ascusbbf_640935, encodes 16S rRNA
  source 1..470: mol_type = genomic DNA
agagtttgatcatggctcagaacgaacgctggcggcaggcttaacacatgcaagtcgaacgcatccttcggggtgagtggcagacgggtgagtaacacgtgggaacgtacctttcagttcggaataacccagggaaacttgggctaagaccggatacgcccttttggggaaagatttatcgctgagagatcggcccgcgtctgattagctagttggtgaggtaaaggctcaccaaggcgacgatcagtagctggtctgagaggatgatcagccacattgggactgagacacggcccaaactcctacgggaggcagcagtggggaatattggacaatgggcgcaagcctgatccagccatgccgcgtgagtgatgaaggccttagggttgtaaagctctttcgtccgggacgataatgacggtaccggaagaagaagccccggctaacttcgtgccagcagccgcggtaat

SEQ ID NO: 6562 - DNA, 490 bp, unidentified
  misc_feature 1..490: note = Ascusbbf_356125, encodes 16S rRNA
  source 1..490: mol_type = genomic DNA
agagtttgatcatggctcaggacgaacgctggcggcgtgcctaacacatgcaagtcgaacggatttacagagaagcttgcttttttgtaaattagtggcggacgggtgagtaacgcgtgagtaacctgccttaaagagggggataacaccaagaaattggtgctaataccgcataaaatacgagcaccgcatgatgcttgtatcaaaggagcaatccgctttaagatggactcgcgtccgattagctagttggtgagataaaagcccaccaaggcgacgatcggtagccgggttgagagactgaacggccacattgggactgagacacggcccagactcctacgggaggcagcagtgggggatattgcacaatgggcgaaagcctgatgcagcaacgccgcgtgagggaagaaggttttcggattgtaaacctctgtccaaagggaagaaaaaaatgacggtacctttggaggaagctccggctaactac

SEQ ID NO: 6563 - DNA, 490 bp, unidentified
  misc_feature 1..490: note = Ascusbbf_328174, encodes 16S rRNA
  source 1..490: mol_type = genomic DNA
agagtttgatcctggctcaggacgaacgctggcggcgtggattaggcatgcaagtcgagcgatatcttaccttcgggtaagtgaaagcggcgaacgggtgagtaacacgtgaacaacctgccctcacattccggataatagaccgaaaggtcttgtaatacgggcgaggattcctcttaggcatcttagaggaagggaaggcgcaagccgtgcgaggaggggttcgcggattatcaggtagttggtggggtaacggcctaccaagcctacgacgattagctggtctgagaggatggtcagccacactgggactgagacactgcccagactcctacgggaggctgcagtcgagaatcttgcacaatgcgcgaaagcgtgatgcagcgacgccgcgtgaaggatgaaggcccttgggtcgtaaacttcttttatcggggaagaattcatgacggtacccgatgaataagccacggctaactacgtgccagca

SEQ ID NO: 6564 - DNA, 490 bp, unidentified
  misc_feature 1..490: note = Ascusbbf_1603295, encodes 16S rRNA
  source 1..490: mol_type = genomic DNA
agagtttgatcctggctcaggatgaacgctagctacaggcttaacacatgcaagtcgaggggcagcataaggtttgcttgcaaaccttgatggcgaccggcgcacgggtgcgtaacgcgtatccaaccttccccgcagtagggtccagcccgttgaaagacggattaatcccctatgttgtccattgacggcatccgatttggacgaaaggttttctccgctgcgggatggggatgcgtaggattagctggtcggcggggtaacggcccaccgaggctacgatccttaggggttctgagaggaaggtcccccacactggaactgagacacggtccagactcctacgggaggcagcagtgaggaatattggtcaatggaggcaactctgaaccagccaagtagcgtacaggacgacggccctacgggttgtaaactgcttttgcacagggataaacccggccacgcgtggccgtttgcaggtactgtgcga

SEQ ID NO: 6565 - DNA, 490 bp, unidentified
  misc_feature 1..490: note = Ascusbbf_202880, encodes 16S rRNA
  source 1..490: mol_type = genomic DNA
agagtttgatcctggctcaggacgaacgctggcggcgtgcttaacacatgcaagtcgagcgagagagatgtcttcggacatcaatctagcggcggacgggtgagtaacacgtgggcaacctgccttagtgagggggatagccttccgaaaggaagattaataccgcataaagtagtatttacacatgtagatattaagaaaggagtaatccgcactaagatgggcccgcggcgcattagctagttggagaggtaacggctcaccaaggcaacgatgcgtagccgacctgagagggtgaacggccacattggaactgagagacggtccagactcctacgggaggcagcagtggggaatattgcacaatggaggaaactctgatgcagcaacgccgcgtgagtgaagaaggtcttcggattgtaaagctctgttaatcgggacgaaaaatgacggtaccgatagaggaagccacggctaactacgtgccagc

SEQ ID NO: 6566 - DNA, 490 bp, unidentified
  misc_feature 1..490: note = Ascusbbf_295965, encodes 16S rRNA
  source 1..490: mol_type = genomic DNA
agagtttgatcctggctcaggatgaacgctagcggcaggcttaacacatgcaagtcgaggggcagcggggtgtagcaatacactgccggcgaccggcgcacgggtgcgtaacgcgtatgcaacctgcccgtaacagggggataactcggggaaacccgaactaataccccgtattgacgtggggccgcatggttctgcgacgaaagcttcggtggttacggatgggcatgcgtggcattaggtagttggcggggcaacggcccaccaagccgacgatgtctaggggagctgagaggcttatcccccacactggtactgagacacggaccagactcctacgggaggcagcagtgaggaatattggtcaatggacggaagtctgaaccagccatgccgcgtgaaggaagaatgccctatgggttgtaaacttcttttgccgcagagtaataaggggcgtgcgcgccccgatgagagtatgcggcgaataagc

SEQ ID NO: 6567 - DNA, 490 bp, unidentified
  misc_feature 1..490: note = Ascusbbf_193901, encodes 16S rRNA
  source 1..490: mol_type = genomic DNA
agagtttgatcatggctcagaacgaacgctggcagtatgctttaaccatgcaagtcgaacgagaaagtgtagcaatacataagtaaagtggcaaacgggtgagtaacacacaggaatctacccagtagagaggaataagcactagaaatggtgtctaatacctcataagccaatgtagtaaaatatattgggaaaggattggtagcaatattaattcactattggatgagcctatggcggattagctagttggtagggtaatggcctaccaaggcaatgatccgtagctggtctgagaggatgatcagccacattgaaactgcgatacggttcaaactcctacgggaggcagcaggtgggaatattggacaatggacgaaagtctgatccagcaatactgcgtgaatgatgaaggcctttgggttgtaaagttcttttaatagggaagataatgactgtacctatagaataagtaccggcaaacttcgtg

SEQ ID NO: 6568 - DNA, 490 bp, unidentified
  misc_feature 1..490: note = Ascusbbf_739192, encodes 16S rRNA
  source 1..490: mol_type = genomic DNA
agagtttgatcctggctcaggatgaacgctggcggcgtgcctaacacatgcaagtcgaacgaggctcttctctcagacgtttcgaccgaagagagaggatcaccgagtggcggatgggtgagtaacgcgtggagtacctgcccctgtcagggggataacagccggaaacagctgacaataccgcatagagtacttgatcgcatgttcgagtacggaaagatttatcggacagggatggctccgcgttggattagctcgttggtggggtaacggcctaccaaggcgacgatccatagccggcctgagagggcgaccggccacattgggactgagacacggcccagactcctacgggaggcagcagtggggaatattgcacaatgggcgcaagcctgatgcagcgacgccgcgtggaggaagaagtatttcggtatgtaaactcctatcagcagggaagaaaatgacggtacctgactaagaagccccggct

SEQ ID NO: 6569 - DNA, 490 bp, unidentified
  misc_feature 1..490: note = Ascusbbf_737999, encodes 16S rRNA
  source 1..490: mol_type = genomic DNA
agagtttgatcatggctcaggacgaacgctggcggcgtgcctaacacatgcaagtcgaacggagtgttttgctgaaaggaaggaagcttgcttccggatattcttaaaacacttagtggcggactggtgagtaacgcgtgagcaacctgccttacagagggggacaacagttggaaacgactgctaataccgcataaagtctgaccttggcatcgaggacagaccaaaggagcaatccgctgtaagatgggctcgcgtccgattagatagttggtgaggtaacggctcaccaagtcgacgatcggtagccggactgagaggttgaacggccacattgggactgagatacggcccagactcctacgggaggcagcagtgggggatattgcacaatggaggaaactctgatgcagcaacgccgcgtgagggaagaaggttttcggattgtaaacctctgttttaagtgacgaaacaaatgacggtagcttaa

SEQ ID NO: 6570 - DNA, 490 bp, unidentified
  misc_feature 1..490: note = Ascusbbf_1689279, encodes 16S rRNA
  source 1..490: mol_type = genomic DNA
agagtttgatcctggctcaggatgaacgctggcggcgtgcctaacacatgcaagtcgaacggggtattgacgctgaagagagaagtagcttgctacggatcgaatcatgttgatacttagtggcggacgggtgagtaacgtgtggataacctggtccatccagggggatagcagctggaaacggctgataataccgcataagcgcacggaagggcatccttctgtgtgaaaagatttttcgggatggaatggatccgcatctgattagccagttggcgggatagaagcccaccaaagcgacgatcagtagccggcctgagagggcggacggccacattgggactgagaaacggcccagactcctacgggaggcagcagtgggggatattgcacaatggggggaaccctgatgcagcgacgccgcgtgggtgaagaagtatttcggtatgtaaagccctatcagcagggaagataatgacggtacctgagt

SEQ ID NO: 6571 - DNA, 490 bp, unidentified
  misc_feature 1..490: note = Ascusbbf_735819, encodes 16S rRNA
  source 1..490: mol_type = genomic DNA
agagtttgatcctggctcaggacgaacgctggcggcgtgcctaacacatgcaagtcgaacggagtgattcgaaagcttgcttttgaatcacttagtggcggacgggtgagtaacgcgtgagtaacctgcctttcagagggggataacatcctgaaaaggatgctaataccgcataacatatcgaggccgcatggtcttggtatcaaaggagcaatccgctgagagatggactcgcgtccgattagccagttggcggggtaacggcccaccaaagcgacgatcggtagccggactgagaggttgaacggccacattgggactgagacacggcccagactcctacgggaggcagcagtgggggatattgcacaatggaggaaactctgatgcagcaacgccgcgtgagggaagaaggtcttcggattgtaaacctttgtccttggtgacgaaacaaatgacggtagccaaggaggaagctccggctaactac

SEQ ID NO: 6572 - DNA, 490 bp, unidentified
  misc_feature 1..490: note = Ascusbbf_155684, encodes 16S rRNA
  source 1..490: mol_type = genomic DNA
agagtttgatcatggctcaggatgaacgctggcggcgtgcttaacacatgcaagtcgaacgaagcatttcggaatgcggctatgccaaatgaagatctgacttagtggcggacgggtgagtaacgcgtgggtaacctgccttgtactgggggataacagttagaaatgactgctaataccgcataagcccacggtttcgcatggaactgtgagaaaagatttattgatacaagatggacccgcgtctgattagctagttggcgaggtaacggcccaccaaggcgacgatcagtagccgacctgagagggtgatcggccacattgggactgagacacggcccaaactcctacgggaggcagcagtggggaatattgcacaatgggggaaaccctgatgcagcgacgccgcgtgagtgaagaagtatttcggtatgtaaagctctttaagcagggaagataatgacggtacctgcagaataagcaccggcta

SEQ ID NO: 6573 - DNA, 490 bp, unidentified
  misc_feature 1..490: note = Ascusbbf_1735273, encodes 16S rRNA
  source 1..490: mol_type = genomic DNA
agagtttgatcatggctcaggattaacgctggcggcgtgcctaacacatgcaagtcgagcgagaaatggtgaagagattcttcggatgaacagatccatggacagcggcggacgggtgagtaacgcgtgggcaacctgcccctttccggaggatagccaagggaaactttgaataatactccataaagcagagacaccgcatgatgattctgccaaagatttatcggagagggatgggcccgcgtctgattagccagttggtgaggcagcggctcaccaaagcgacgatcggtagccggcctgagagggtgaacggccacattggaactgagacacggtccagactcctacgggaggcagcagtggggaatattgcacaatgggcggaagcctgatgcagcaacgccgcgtgaaggatgaaggttttcggatcgtaaacttctgtccctggggaagaagaaagtgacggtacccggggaggaagccccgg

SEQ ID NO: 6574 - DNA, 490 bp, unidentified
  misc_feature 1..490: note = Ascusbbf_741617, encodes 16S rRNA
  source 1..490: mol_type = genomic DNA
agagtttgatcatggctcaggacgaacgctggcggcgtgcttaacacatgcaagtggtgcgacgaaccagggcttgccctggggcaaagccgcgaacgggtgagtaacacgtgggtaatctgccccgatgaccgggacaacccgaggaaactcgggctaataccggatgtggtgcactggcataagccggtgtactaaaggaagcttcggcctccgcattgggaggtgcccgcggcccattagcttgttggtggggtaatggcctaccaaggcaacgatgggtagctggtctgagaggacgatcagccacactgggactgagacacggcccagactcctacgggaggcagcagtggggaatcttgcgcaatgcgcgaaagcgtgacgcagcaacgccgcgtgggggaagacggccttcgggttgtaaacccctttcaggagggacgaaggttcgccggtgaatagccgtgcggattgacggtacctccac

SEQ ID NO: 6575 - DNA, 490 bp, unidentified
  misc_feature 1..490: note = Ascusbbf_287794, encodes 16S rRNA
  source 1..490: mol_type = genomic DNA
agagtttgatcatggctcagattgaacgctggcggcgtgcttaacacatgcaagtcgagcggtaacaggtgtagcaatacatgctgacgagcggcgaacgggtgagtaatgcttaggaatcttcctcgtagtggggaataacttggggaaactcaagctaataccgcatacgaactacggttgaaagcgggggatcgcaagacctcgcgctatgagatgagcctaagtcggattagctagttggtggggtaatggcctaccaaggcgacgatccgtagctggtctgagaggacgaccagccacactgggactgagacacggcccagactcctacgggaggcagcagtggggaatattggacaatgggggaaaccctgatccagcgacgccgcgtgtgtgaagaaggcctgcgggttgtaaagcacttttagtggggatgaaaagcgcaaggttaatacctttgcgtcttgacctaacctacagaaaaagc

SEQ ID NO: 6576 - DNA, 490 bp, unidentified
  misc_feature 1..490: note = Ascusbbf_151916, encodes 16S rRNA
  source 1..490: mol_type = genomic DNA
agagtttgatcatggctcaggacgaacgctggcggcgtgcctaatacatgcaagtcgagcgagtcccttcgggggctagcggcggacgggtgagtaacacgtaggcaacctgcccgtaagctcgggataacatggggaaactcatgctaataccggatagggtcttctctcgcatgagaggagacggaaaggtggcgcaagctaccacttacggatgggcctgcggcgcattagctagttggtggggtaacggcctaccaaggcgacgatgcgtagccgacctgagagggtgaccggccacactgggactgagacacggcccagactcctacgggaggcagcagtagggaattttccacaatggacgaaagtctgatggagcaacgccgcgtgaacgatgaaggtcttcggattgtaaagttctgttgtcagagacgaacaagtaccgttcgaacagggcggtaccttgacggtacctgacgagaaagcc

SEQ ID NO: 6577 - DNA, 490 bp, unidentified
  misc_feature 1..490: note = Ascusbbf_1807490, encodes 16S rRNA
  source 1..490: mol_type = genomic DNA
agagtttgatcctggctcaggatgaacgctggcggcgtgcctaatacatgcaagtcgagcgagaagctttcgagaagattcttcggatgattcatgaaagtggaaagcggcggacgggtgagtaacgcgtaggcaacctgccccttgcacagggatagccattggaaacgatgattaatacctgataaagccggaccatagccttatggatcggccaaagatttatcggcgagggatgggcctgcgtctgattagctagttggtggggtaacggcctaccaaggcgacgatcagtagccgacctgagagggtgatcggccacattggaactgagacacggtccaaactcctacgggaggcagcagtagggaatcttgcacaatgggcgcaagcctgatgcagcaacgccgcgtgagcgatgaaggcccttgggtcgtaaagctctgtcctatgggaagaagaaagtgacggtaccattggaggaagcccc

SEQ ID NO: 6578 - DNA, 490 bp, unidentified
  misc_feature 1..490: note = Ascusbbf_366270, encodes 16S rRNA
  source 1..490: mol_type = genomic DNA
agagtttgatcatggctcaggatgaacgctggcggcgtgcttaacacatgcaagtcgaacggaacacctttccggatccttcgggtgacgggctggtgtttagtggcggacgggtgagtaacgcgtgggtaacctgccctgtacagggggataacagccagaaatggctgctaataccgcatgagcgcacgagagggacatccctcggtgtgaaaaactccggtggtacaggatgggcccgcgtctgattagcttgttggcggggtaacggcccaccaaggcgacgatcagtagccggtctgagaggatgaacggccacattggaactgagacacggtccaaactcctacgggaggcagcagtggggaatattgcacaatggggggaaccctgatgcagcaacgccgcgtgagtgaagaagtatttcggtatgtaaagctctatcagcagggaagataatgacggtacctgaccaagaagctccggctaa

SEQ ID NO: 6579 - DNA, 490 bp, unidentified
  misc_feature 1..490: note = Ascusbbf_369206, encodes 16S rRNA
  source 1..490: mol_type = genomic DNA
agagtttgatcctggctcagaatgaacgttggcggcgtggattaggcatgcaagtcggacgagaagtttccttcgggaaacggaaagtggcaaacggggtagtaaggcgtaggtgacgtaccctcaggttcgggatagccacgggaaaccgtgattaataccgaatgatctctttttgtatggtgcattaagagcaaaggtgtgattccgccagaggagcggcttacgtgatattaggtagttggtgaggtaatggctcaccaagccttagatgtctagggggtgtgagagcatggcccccaccactgggactgagacactgcccagacacctacgggtggctgcagtcgagaatcttcggcaatggacgcaagtctgaccgagcgacgccgcgtgcgggatgaaggcccttgggttgtaaaccgctgtcagaggggatgaaatgcagaagggttatcccttttgtttgacagagcctcagaggaagcac

SEQ ID NO: 6580 - DNA, 490 bp, unidentified
  misc_feature 1..490: note = Ascusbbf_217627, encodes 16S rRNA
  source 1..490: mol_type = genomic DNA
agagtttgatcctggctcaggacgaacgctggcggcgtgcctaacacatgcaagtcgagcggggatacgaggcggaagttttcggatggaagccctgtattcgagcggcggacgggtgagtaacgcgtgagcaacctttccttcacagggggataacacagcgaaagttgtcgtaataccgcataagaccacagcgccgcatggcgcgggggtcaaaggagaaatccggtgaagggtgggctcgcgtccgattagccggttggcggggtaaaggcccaccaaagcaacgatcggtagccgacctgagagggtgatcggccacattggaactgagacacggtccaaactcctacgggaggcagcagtgggaatattgggcaatgggcgaaagcctgacccagcaacgccgcgtgagggaagaaggtcttcgggtcgtaaacctctgtcctcagtgaagagaaggagacggtagctgaggaggaagccccgg

SEQ ID NO: 6581 - DNA, 490 bp, unidentified
  misc_feature 1..490: note = Ascusbbf_1794843, encodes 16S rRNA
  source 1..490: mol_type = genomic DNA
agagtttgatcctggctcagaacgaacgctggtagcgtggattaggcatgcaagtcgaacgggatcgcccggttagcaataattgggcgtgagagtggcggattggggaggaacacgtgagcaacctgtccttgagtggtggaaaacctcgggaaactgaggctaatacagcatgtggcgcccggagacatctccggagcgtcaaagggggccgcaaggctctcgctcatcgaggggctcgcgcaccatcagcttgttggcggggtaacggcccaccaaggcctacggttagctggtctgggaggatgaccagccccactgggactgagatactgcccagactcctacgggaggctgcagtcgaggatcatttgcaatgggcgaaagcctgacaatgcgacgctgcgtggaggatgaaggccttcgggttgtaaactcctgtcatgagggaacaggcgagggtacccaacacgtaccttagttgagtgta

SEQ ID NO: 6582 - DNA, 353 bp, unidentified
  misc_feature 1..353: note = Ascusbbf_1539399, encodes 16S rRNA
  source 1..353: mol_type = genomic DNA
agagtttgatcctggctcagaacgaacgctggcggcgcgttttaagcatgcaagtcgagcggcagcagcaatgcgagagcggcggacgggtgagtaacacgtgggtaatctgccctccggtcgggaatagcctgtggaaacacaggataataccggatgcgatggccaccacacaagtggaggacaggaaaggagccaaggctccgccggaggatgagcccgcgtcccattagcttgatggtgaggtaaaggcccaccatggcgatgatgggtagccggcctgagagggtgaacggccacattggaactgagacacggtccagactcctacgggagccagcagccgcggtaat

SEQ ID NO: 6583 - DNA, 490 bp, unidentified
  misc_feature 1..490: note = Ascusbbf_1624038, encodes 16S rRNA
  source 1..490: mol_type = genomic DNA
agagtttgatcctggctcaggatgaacgctggcggcgtgcctaatacatgcaagtcgtgcgggggaagatccttcgggatcggacccagcggcgaacgggtgagtaacacgtgggcaatctgcccgcaagacggggataactccgggaaaccggtgctaatacccgataatcccggctcccgcatgggagcggggtgaaaggcggcttcggctgtcacttgcggatgggcccgcggcgcattagctggttggtgaggtaacggctcaccaaggcgacgatgcgtagccgacctgagagggtgatcggccacactgggactgagacacggcccagactcctacgggaggcagcagtagggaattttccgcaatgggcgcaagcctgacggagcaacgccgcgtgagtgaggacggccttcgggttgtaaaactctgttcttgaggaagaacccttccgaggcgaacagcctcggaagttgacggtactcaa

SEQ ID NO: 6584 - DNA, 490 bp, unidentified
  misc_feature 1..490: note = Ascusbbf_1732737, encodes 16S rRNA
  source 1..490: mol_type = genomic DNA
agagtttgatcatggctcaggataaacgctggcggcgtgcttaacacatgcaagtcgaacggagtggtcctcccgaagcgtgacgaagcttgcttctgaacaattcatttggatcacttagtggcggacgggtgagtaacgcgtgggtaacctgccctatactgggggatagcagttggaaacgactgataataccgcataagcatacactttcgcatgaaagagtgtgaaaaactccggtggtataggatggacccgcgtctgattagctagttggtgaggtaacggcccaccaaggcgacgatcagtagccggcctgagagggtgtacggccacattgggactgagacacggcccaaactcctacgggaggcagcagtggggaatattggacaatgggggaaaccctgatccagcgacgccgcgtgagcgaagaagtatttcggtatgtaaagctctatcagcagggaagaaaatgacggtacctgac

SEQ ID NO: 6585 - DNA, 490 bp, unidentified
  misc_feature 1..490: note = Ascusbbf_1589259, encodes 16S rRNA
  source 1..490: mol_type = genomic DNA
agagtttgatcctggctcaggatgaacgctggcggcacgcttaacacatgcaagtcgaacgaggttatgaacttcggttaataacctagtggcggacgggtgcgtaacgcgtggtaatctgcccttgacagggggataacgtatagaaatgtacgctaataccgcataagcccacggaaccgcatggttctgagggaaaagggtcactggtcaaggatgagcccgcgtctgattaggtagttggcagggtaaaggcctaccaagcccgcgatcagtagccggtctgagaggatggacggccacattgggactgagacacggcccaaactcctacgggaggcagcagtggggaatattgcacaatgggggaaaccctgatgcagcgatgccgcgtgaaggatgaagtgtttcggcacgtaaacttctatcagcaaggaagaatgaagacagtacttgaataagcagccccggctaactacgtgccagcagc

SEQ ID NO: 6586 - DNA, 490 bp, unidentified
  misc_feature 1..490: note = Ascusbbf_1763013, encodes 16S rRNA
  source 1..490: mol_type = genomic DNA
agagtttgatcatggctcaggatgaacgctggcggcgtgcttaacacatgcaagtcgaacgaagaggtgctaaaggaggggcttcggctctgaattcggcacatatcttagtggcggacgggtgagtaacgcgtgggcaacctgccctttacaggggaataatcattggaaacgatgactaataccgcatgtccccgagaaatggcatcatttttcggaaaaaggagaaatccggtaaaggatgggcccgcgtctgattagctggttggtggggtaacggcctaccaaggcgacgatcagtagccgacctgagagggtgatcggccacattgggactgagacacggcccaaactcctacgggaggcagcagtggggaatattgcacaatggggggaaccctgatgcagcaacgccgcgtgaaggaagaaggttttcggatcgtaaacttctatcaatagggacgaagaaagtgacggtacctaaataaga

SEQ ID NO: 6587 - DNA, 490 bp, unidentified
  misc_feature 1..490: note = Ascusbbf_810834, encodes 16S rRNA
  source 1..490: mol_type = genomic DNA
agagtttgatcctggctcaggatgaacgctggcggcgtgcctaacacatgcaagtcgaacgaggttacttatcttggagattcgtcaaagagatttttaaccgagtggcggatgggtgagtaacgcgtggagaacctgcccttgtcagggggataacaactggaaacggttgacaataccgcatacgctctttaagtcgcatgacccaaagaggaaagatttatcggacaaggatggctccgcgtcggattagccagttggcggggtaacggcccaccaaagcgacgatccgtagccggcctgagagggcgaccggccacattgggactgagacacggcccagactcctacgggaggcagcagtgggggatattgcacaatggggggaaccctgatgcagcgacgccgcgtggaggaagaagtatttcggtatgtaaactcctatcagcagggaagaaaatgacggtacctgactaagaagccccggcta

SEQ ID NO: 6588 - DNA, 490 bp, unidentified
  misc_feature 1..490: note = Ascusbbf_1736001, encodes 16S rRNA
  source 1..490: mol_type = genomic DNA
agagtttgatcctggctcagattgaacgctggcggcaggcttaacacatgcaagtcgaacgatgattactagcttgctagtaagattagtggcgaacgggtgagtaaagcttaggaatctgccgtgtagtgggggacaactaaccgaaaggttagctaataccgcatacgccctacgggggaaagcatgggatcttaggaccatgcgctatacgatgagcctaagtcggattagctagttggtggggtaaaggcctaccaaggcgacgatctgtagcgggtcttagaggatgatccgccacactgggactgagacacggcccagactcctacgggaggcagcagtggggaatattggacaatggggggaaccctgatccagccatgccgcgtgtgtgaagaaggtcgtaagattgtaaagcactttaagcgaggaggaaagggcgttggttaatagctagcgtctgtgacgttactcgcagaataagcac

SEQ ID NO: 6589 - DNA, 490 bp, unidentified
  misc_feature 1..490: note = Ascusbbf_1477679, encodes 16S rRNA
  source 1..490: mol_type = genomic DNA
agagtttgatcatggctcaggacgaacgctggcggcgtgcctaatacatgcaagtcgagcgaatgacgagaagcttgcttctctgatttagcggcggacgggtgagtaacacgtgggcaacctgccctacagatcgggataactcagggaaacctgggctaataccggataatccttcgaatcacatgttttgaagttgaaaggcgcttcggcgtcactgtaggatgggcccgcggtgcattagctagttggtggggtaacggcctaccaaggcaacgatgcatagccgacctgagagggggatcggccacattgggactgagacacggcccaaactcctacgggaggcagcagtagggaatcttccacaatggacgaaagtctgatggagcaacgccgcgtgagtgatgaaggttttcggatcgtaaaactctgttgtaagggaagaacaagtacgttaggaaatgaacgtaccttgacggtaccttat

SEQ ID NO: 6590 - DNA, 490 bp, unidentified
  misc_feature 1..490: note = Ascusbbf_259343, encodes 16S rRNA
  source 1..490: mol_type = genomic DNA
agagtttgatcctggctcaggatgaacgctggcggcgtgcataacacattcaagtcgaacggtgaagggacttcggtcccggatcagtggcggacgggtgagtaacgcgtgagcaacctgccctgcagtgcgggataacagagggaaacttctgctaataccgcatatagcatcggaaccgcatgattccggtatgaaagatttattgctgcaggatgggctcgcgtctgattagatagttggcggggtaacggcccaccaagtctacgatcagtagccggactgagaggttgaacggccacattggaactgagatacggtccagactcctacgggaggcagcagtggggaatattgggcaatgggcgaaagcctgacccagcgacgccgcgtgaaggaagaaggtcttcggattgtaaacttctgttaaccagggacgaaacaaatgacggtacctggagagaaagccacggctaactacgtgccagca

SEQ ID NO: 6591 - DNA, 490 bp, unidentified
  misc_feature 1..490: note = Ascusbbf_981679, encodes 16S rRNA
  source 1..490: mol_type = genomic DNA
agagtttgatcatggctcaggatgaatgctggcggcgtgcctaatacatgcaagtcgagcggtaacagggcttcaccgtgttcttgacgcacttggccattgagcaagtagttgaattcgagagcacagtgaagctgctgacgagcggcggacggctgagtaacgcgtgggaacggaccccaaactgagggataactactcgaaagagtagctaataccgcatgtgatcttcggattaaagcttttgcggtttgggactggcctgcgtacgattagatagttggtagggtaatggcctaccaagtcgacgatcgttagatggtttgagaagatgatcatccagactgggactgagacacggcccagactcctacgggaggcagcagtagggaatctttcacaatgggcgaaagcctgatggagcaacgccgcgtgcaggatgacggccttcgggttgtaaactgcttttataaccgagaaatatgatggt

SEQ ID NO: 6592 - DNA, 490 bp, unidentified
  misc_feature 1..490: note = Ascusbbf_731606, encodes 16S rRNA
  source 1..490: mol_type = genomic DNA
agagtttgatcatggctcaggatgaacgctagctacaggcttaacacatgcaagtcgaggggcatcaggggactagcttgctagtcctgctggcgaccggcgcacgggtgagtaacacgtatccaacctgcccccagcttggggatagccctctgaaaggaggattaatacccgatatgcttgttctccggcatcggaggacaatcaaagattcatcggctgtggatggggatgcgtctgattagcttgttggcggggtaacggcccaccaaggcgacgatcagtaggggttctgagaggaaggtcccccacataggaactgagacacggtcctaactcctacgggaggcagcagtgaggaatattggtcaatgggcgagagcctgaaccagccaagtagcgtgaaggatgactgccctacgggttgtaaacttcttttatgggaggataaagtgggtcacgtgtggccctttgcaggtatcccatgaat

SEQ ID NO: 6593 - DNA, 487 bp, unidentified
  misc_feature 1..487: note = Ascusbbf_1060647, encodes 16S rRNA
  source 1..487: mol_type = genomic DNA
agagtttgatcctggctcagaacgaacgctggcggcaggcttaacacatgcaagttgaacgggattcaatttgtgcttgcacgagttgatgagagtagcgcactggtgagtaacacgtgggaacgtacattttggtggggaacaacagagggaaacttctgctaataccgcataagccctgagggggaaagatttatcgccgagatatcggcccgcggaagattaggtagttggtggggtaaaggcctaccaagcctacgatctatagctggtctgagaggacgatcagccacattggaactgagacacggtccagactcctacgggaggcagcagtgaggaatattgggcaatggagggaactctgacccagccatgccgcgtgagtgagaaggttttcgaattgtaaagctctttcgggtgtgaagatgatgacggtaacaccagaagaagccccggcaaacttcgtgccagcagccgcggtaat

SEQ ID NO: 6594 - DNA, 490 bp, unidentified
  misc_feature 1..490: note = Ascusbbf_733925, encodes 16S rRNA
  source 1..490: mol_type = genomic DNA
agagtttgatcctggctcaggatgaacgctggcggcgtgcttaacacatgcaagtcgaacggacttgttcaattggaaacggaagatgcttgcatacgaagtttccgcccgaacaagttagtggcggacgggtgagtaacgcgtggagaacctgcctttatctgggggataacagttagaaatgactgctaataccgcataagcgcacatggtcgcatggccgagtgtgaaaaactccggtggatagagatggctccgcgtcagattagccagttggcggggtaacggcccaccaaagcgacgatctgtagccggcctgagagggcgatcggccacattgggactgagacacggcccaaactcctacgggaggcagcagtggggaatattgcacaatgggggaaaccctgatgcagcgacgccgcgtgagtgatgacgtatttcggtatgtaaagctctatcagcagggaagataatgacggtacctgac

SEQ ID NO: 6595 - DNA, 490 bp, unidentified
  misc_feature 1..490: note = Ascusbbf_1524564, encodes 16S rRNA
  source 1..490: mol_type = genomic DNA
agagtttgatcatggctcaggacgaacgctggcggcgcgcctaacacatgcaagtcgaacggagctgatattgacagcgacttcggtcaaaggagatttcagcttagtggcgaacgggtgagtaacgcgtgagtaacctgcctcagagagggggacaacagttggaaacgactgctaataccgcataagcccacactgcctcatggcagagtgagaaaaggggattaccgctttgagatggactcgcgtctgattagccagttggcggggtaacggcccaccaaagcgacgatcagtagccggactgagaggctgatcggccacattgggactgagacacggcccagattcctacgggaggcagcagtggggaatattgcacaatggggggaaccctgatgcagcgacgccgcgtggaggaagaaggtattcgtattgtaaactcctgtcgtgtgggacgaagaatgacggtaccacacaagaaagcacc

SEQ ID NO: 6596 - DNA, 490 bp, unidentified
  misc_feature 1..490: note = Ascusbbf_1438428, encodes 16S rRNA
  source 1..490: mol_type = genomic DNA
agagtttgatcatggctcaggatgaacgctggcggcgtgcttaacacatgcaagtcgaacgaagctcttacgacagatctcttcggagtgaagatgtttgagactgagtggcggacgggtgagtaacgcgtgggtaacctgcctcatagagggggacaacagttggaaacgactgctaataccgcatagtaagaaagaaccgcatgattttttcttgaaagcttttgcgctatgagatggacccgcgtctgattagctagttggtaaggtaacggcttaccaaggcaacgatcagtagccggcttgagagagtgaacggccacattgggactgagacacggcccaaactcctacgggaggcagcagtggggaatattgcacaatgggggaaaccctgatgcagcgacgccgcgtgagtgaagaagtatttcggtatgtaaagctctatcagcaggaaagataatgacggtacctgactaagaagccccgg

SEQ ID NO: 6597 - DNA, 490 bp, unidentified
  misc_feature 1..490: note = Ascusbbf_1777365, encodes 16S rRNA
  source 1..490: mol_type = genomic DNA
agagtttgatcatggctcaggatgaacgctggcggcgtgcctaacacatgcaagtcgaacggttaaaccgccctcgggcggaaataaagtggcgaacgggtgagtaacacgtgaccaacctgccccctccaccgggacagccccgcgaaagcgcggttaataccggatactccgggcgcggcgcatgccgggcccgggaaagccctggcgggaggggatggggtcgcggcccatcaggtagtaggtcgggcagcggccgacctagccgacgacgggtagccgggttgagagaccgaccggccacattgggactgagatacggcccagactcctacgggaggcagcagtggggaatattgcgcaatgggggcaaccctgacgcagcaacgccgcgtgcgggaagaaggcgtccgcgtcgtaaaccgctttcagcagggaagacatcgacggtacctgcagaagaagccccggctaactacgtgccagcagc

SEQ ID NO: 6598 - DNA, 490 bp, unidentified
  misc_feature 1..490: note = Ascusbbf_1724539, encodes 16S rRNA
  source 1..490: mol_type = genomic DNA
agagtttgatcctggctcaggatgaacgctggcggcgtgcctaacacatgcaagtcgagcggagatattgggaagatctttcgagtgaatccccttatcttagcggcggatgggtgagtaacacgtgggtaacctgccctgcacagggggataacagctggaaacggctgttaataccgcatatgcacacgctgccgcatggcagggggtggaaagatttatcggtgcaggatgggcccgcgtcggattaactagttggcagggtaacggcctaccaaggtgatgatccgtagccgacctgagagggtgaccggccacattgggactgagacacggcccaaactcctacgggaggcagcagtgggggatattgcacaatgggcgcaagcctgatgcagcgacgccgcgtgaaggaagaagtatttcggtatgtaaacttctatcagcggggaagaagatgacggtacccgactaagaagccccggctaac

SEQ ID NO: 6599 - DNA, 490 bp, unidentified
  misc_feature 1..490: note = Ascusbbf_1779887, encodes 16S rRNA
  source 1..490: mol_type = genomic DNA
agagtttgatcctggctcaggatgaacgctggcggcgtgcttaacacatgcaagtcgaacggagtttaaaatgaagcttgcgatttttaaacttagtggcggacgggtgagtaacgcgtgggtaacctgccttataccgggggataacacttagaaataggtgctaataccgcataagcgcacagcttcgcatgaagcagtgtgaaaaactccggtggtataagatggacccgcgtctgattagctggttggtgaggtaacggcccaccaaggcgacgatcagtagccggcctgagagggtgaacggccacattggtactgagacacggcccaaactcctacgggaggcagcagtggggaatattggacaatgggggaaaccctgatccagcgacgccgcgtgagtgaagaagtatttcggtatgtaaagctctatcagacgggaagatgatgacggtaccgtcagaagaagcaccggctaacttcgtgc

SEQ ID NO: 6600 - DNA, 490 bp, unidentified
  misc_feature 1..490: note = Ascusbbf_1823703, encodes 16S rRNA
  source 1..490: mol_type = genomic DNA
agagtttgatcatggctcaggacgaacgctggcggcgtgcctaacacatgcaagtcgagcggagacatggggaatggagacttcggtcaaaaggaaccatgttttagcggcggacgggtgagtaacgcgtgagcaatctgtccttcacaggggaataagataccgaaaggtgttctaataccgcataagaccacatattcgcatgaataaggggtcaaaggagcaatccggtgaagggtgagctcgcgtccgattagatagttggtgaggtaacggcccaccaagtcaacgatcggtagccgacctgagagggtgatcggccacattgggactgagacacggcccagactcctacgggaggcagcagtgggaatattgggcaatggggggaaccctgacccagcaacgccgcgtggaggaagaaggtcttcggatcgtaaactcctgtcctaagagacgagcaggagacggtatcttaggaggaagcccc

SEQ ID NO: 6601 - DNA, 490 bp, unidentified
  misc_feature 1..490: note = Ascusbbf_1443290, encodes 16S rRNA
  source 1..490: mol_type = genomic DNA
agagtttgatcatggctcaggacgaacgctggcggtgtgcttaatacatgcaagtcgagcggactatgggggcttgctcccatagttagcggcggacgggtgagtaacgcgtgagcaacctgcctgtatctgggggataacacatagaaatgtgtgctaataccgcatatgaccacagtgaggcatctcacagaggtaaaagatttatcggatacagatgggctcgcgttcaattagatagttggtagtgtaacggactaccaagtcgacgattgatagccgacctgagagggtgatcggccacattggaactgagatacggtccagactcctacgggaggcagcagtagggaatattgggcaatggaggcaactctgacccagcaacaccgcgtgaatgatgaaggtcttcggattgtaaagttctgtgatgggggacgaagaaagtgacggtaccccaagagcaagccacggctaactacgtgccagc

SEQ ID NO: 6602 - DNA, 490 bp, unidentified
  misc_feature 1..490: note = Ascusbbf_102933, encodes 16S rRNA
  source 1..490: mol_type = genomic DNA
agagtttgatcatggctcaggatgaacgctggcggcgtgcttaatacatgcaagtcgaacgaagcgacccacccgaagattgaagtagcttgctacggattgattcaaccgggttgacttagtggcggacgggtgagtaacgcgtgggtaacctgccttagacagggggataacagttagaaatgactgctaataccgcatatgcgcacagtatcgcatgatacagtgtggaaaacttttgtggtctaagatggacccgcgtctgattagctagttggaggggtaacggcccaccaaggcgacgatcagtagccgacttgagagagtgatcggccacattgggactgagacacggcccaaactcctacgggaggcagcagtagggaatattgcacaatgggggaaaccctgatgcagcgacgccgcgtgaaggatgaagtatttcggtatgtaaacttctatcagcaaggaagaaaatgacggtacttga

SEQ ID NO: 6603 - DNA, 490 bp, unidentified
  misc_feature 1..490: note = Ascusbbf_60761, encodes 16S rRNA
  source 1..490: mol_type = genomic DNA
agagtttgatcatggctcaggatgaacgctggcggcgtgcctaacacatgcaagtcgaacgaagcgcctcgcccgacgaagtggagtgcttgcacaaagcagaatcaattgaggcgacttagtggcggacgggtgagtaacgcgtgggtaacctgccgtatgcagggggataacagttagaaatgactgctaataccgcataagcgcacagtatcgcatgatacagtgtgaaaagccttaacggcatacgatggacccgcgtctgattagccagttggcagggtaacggcctaccaaagcgacgatcagtagccggcctgagagggtgaacggccacattgggactgagacacggcccaaactcctacgggaggcagcagtgggggatattgcacaatgggggaaaccctgatgcagcgacgccgcgtgagtgaagaagtatttcggtatgtaaagctctatcagcagggaagaaaatgacggtacctga

SEQ ID NO: 6604 - DNA, 490 bp, unidentified
  misc_feature 1..490: note = Ascusbbf_76049, encodes 16S rRNA
  source 1..490: mol_type = genomic DNA
agagtttgatcctggctcaggatgaacgctagctacaggcttaacacatgcaagtcgaggggcagcatgagatcagcttgctgattttgatggcgaccggcgcacgggtgagtaacacgtatccaacctgcccgctactcagggatagccttctgaaaggaagattaatacttgatatatcattatatcacatgttatgatgatgaaagatttatcggtagcggatggggatgcgttccattagcttgttggcggggtaacggcccaccaaggcatcgatggataggggttctgagaggaaggtcccccacattggaactgagacacggtccaaactcctacgggaggcagcagtgaggaatattggtcaatgggcgtaagcctgaaccagccaagtagcgtgaaggatgactgccctatgggttgtaaacttcttttaatcgggaataaagtggtctacgtgtagacttttgtatgtaccgattgaata

SEQ ID NO: 6605 - DNA, 490 bp, unidentified
  misc_feature 1..490: note = Ascusbbf_92106, encodes 16S rRNA
  source 1..490: mol_type = genomic DNA
agagtttgatcatggctcaggataaacgctggcggcgtgcataacacattcaagtcgaacggacgatacgagaaacttcggttttttgtaaagttagtggcggacgggtgagtaacgcgtgagcaatctgcctttgatagagggataacacatggaaacgtgtgctaataccgcataacgttaaagaaccgcatgattctttaaccaaagctccggcgatcaaagatgagctcgcgtccgattagctagttggcagggtaaaggcctaccaaggcgacgatcggtagccggactgagaggttgaacggccacattggaactgagaacggtccagactcctacgggaggcagcagtggggaatattgggcaatggaggcaactctgacccagcgacgccgcgtgaaggaagaaggtcttcggattgtaaactttagttatcagggacgaaggaagtgacggtacctgaagagaaagccacggctaactacg

SEQ ID NO: 6606 - DNA, 485 bp, unidentified
  misc_feature 1..485: note = Ascusbbf_6104, encodes 16S rRNA
  source 1..485: mol_type = genomic DNA
agagtttgatcctggctcagaacgaacgctggcggcaggcttaacacatgcaagttgaacggtattgtgaggtgcttgcactgagcaagagagtagcgcactggtgagtaacacgtgggaacatgccctaaagtacgggatagcgtctggaaacggacgataatacggtatacgccctgagggggaaagatttatcgctttaggattggcccgcggcagattaggtagtaggtggggtaaaggcctacctagccgacgatctatagctggtctgagaggacgatcagccacattgggactgagacacggcccagactcctacgggaggcagcagtgaggaatattgggcaatggggggaaccctgacccagccatgccgcgtgagtgagaaggtcttcggattgtaaagctctttcggatgtgacgatgatgacggtaacatctaaagaagccccggcaaacttcgtgccagcagccgcggtaat

SEQ ID NO: 6607 - DNA, 490 bp, unidentified
  misc_feature 1..490: note = Ascusbbf_109934, encodes 16S rRNA
  source 1..490: mol_type = genomic DNA
agagtttgatcatggctcaggatgaacgctggcggcgtgcctaacacatgcaagtcgagcgagaaacttatgattgacgcttcggtagatttcataagcggaaagcggcggacgggtgagtaacgcgtaggcaacctgccctttgcacagggatagcctcgggaaaccgggattaaaacctgataacaccgaagattcacatgtataatcggtcaaagatttatcggcaaaggatgggcctgcgtctgattagttagttggtgaggtaacggctcaccaaggcaatgatcagtagccgacctgagagggtgatcggccacattggaactgagacacggtccaaactcctacgggaggcagcagtggggaatattgcacaatgggggaaaccctgatgcagcaacgccgcgtgagcgaagaaggcggaatcgtcgtaaagctctgtccttggggaagaaaaaaatgacggtacccttggaggaagccccgg

SEQ ID NO: 6608 - DNA, 488 bp, unidentified
  misc_feature 1..488: note = Ascusbbf_644637, encodes 16S rRNA
  source 1..488: mol_type = genomic DNA
agagtttgatcctggctcagattgaacgctggcggcaggcttaacacatgcaagttgaacgggattattgagtagcttgctatttgatatgagagtggcgcacgggtgagtaatacgtgggaacgtacctattagttcggaacaactgttggaaacgacagctaataccggataagccctgagggggaaagatttatcgctagtagaacggcccgcggcagattaggcagttggtggggtaaaggcctaccaaacctacgatctgtagctggtctgagaggacgatcagccacattggaactgagacacggtccagactcctacgggaggcagcagtgaggaatattgggcaatgggggaaaccctgacccagccatgccgcgtgagtgaagaaggttttcggattgtaaagctctttcgggagagaagatgatgacggtatctccagaggaagccccggcaaacttcgtgccagcagccgcggtaat

SEQ ID NO: 6609 - DNA, 490 bp, unidentified
  misc_feature 1..490: note = Ascusbbf_358604, encodes 16S rRNA
  source 1..490: mol_type = genomic DNA
agagtttgatcatggctcagattgaacgctggcggcaggcctaacacatgcaagtcgagcggcagcacagagaaacttgtttctcgggtggcgagcggcggacgggtgagtaatgcctgggaaattgccctgatgtgggggataaccattggaaacgatggctaataccgcatgatagcttcggctcaaagagggggaccttcgggcctctcgcgtcaggatatgcccaggtgggattagctagttggtgaggtaatggctcaccaaggcgacgatccctagctggtctgagaggatgatcagccacactggaactgagacacggtccagactcctacgggaggcagcagtggggaatattgcacaatgggcgcaagcctgatgcagccatgccgcgtgtgtgaagaaggccttcgggttgtaaagcactttcagtcgtgaggaaggtggtagtgttaatagcactatcatttgacgttagcgacagaag

SEQ ID NO: 6610 - DNA, 490 bp, unidentified
  misc_feature 1..490: note = Ascusbbf_635932, encodes 16S rRNA
  source 1..490: mol_type = genomic DNA
agagtttgatcctggctcagattgaacgctggcggcaggcctaatacatgcaagtcgaacggtaacagggagagagcttgctctctctgctgacgagtggcggacgggtgagtaaggcctgggaaactgcctggcagagggggacaacagctggaaacggctgctgataccgcatataccctgagggggaaaggagcgatccgctgccagatgcgcccagatgggattaggcagttgggaggtaacggctcaccaaaccgatgatctctagctggtttgagaggacaatcagccacattggaattgagaaacggaccaaactcctacgggaggcagcagtggggaatattgcacaatgggggaaaccctgatgcagccatgccgcgtgtgtgaagaaggccttcgggttgtaaagcacttttgcattcgaggaagacggcgtataaataaatgcgctatttgacgttagagtgtgaataagcaccggcaa

SEQ ID NO: 6611 - DNA, 470 bp, unidentified
  misc_feature 1..470: note = Ascusbbf_142664, encodes 16S rRNA
  source 1..470: mol_type = genomic DNA
agagtttgatcatggctcagagcgaacgctggcggcaggcctaacacatgcaagtcgagcgcccgggcaaccgggagcggcagacgggagagtaacacgtgggaacatgcccttcagttcggaataacccggggaaactcggactaataccggatacgcccgtaaggggaaagatttatcgctgaaggattggcccgcgtctgattagctagttggtggggtaatggcccaccaaggcgacgatcagtagctggtctgagaggatgatcagcctcactgggactgagacacggcccagactcctacgggaggcagcagtggggaatattggacaatgggcgaaagcctgatccagccatgccgcgtgagtgatgaaggccttagggttgtaaagctctttcgtcagggaagataatgacggtacctgaagaagaagccccggctaacttcgtgccagcagccgcggtaat

SEQ ID NO: 6612 - DNA, 490 bp, unidentified
  misc_feature 1..490: note = Ascusbbf_267924, encodes 16S rRNA
  source 1..490: mol_type = genomic DNA
agagtttgatcatggctcaggacgaacgctggcggcgcgcctaacacatgcaagtcgagcgggaattttgcgagagtaatcgagtgaaaatccagcggcggacgggtgagtaacgcgtgagtgacctgccttacacagggggataacgtaccgaaaggtacactaataccgcatgagaccccggcagcgcatgctgcagaggtcaaaggagcaatccggtgtaagatggactcgcgtccgattagatagttggtgaggtaacggcccaccaagtcagcgatcggtagccgacctgagagggtgatcggccacattggaactgagagacggtccaaactcctacgggaggcagcagtggggaatattgggcaatgggggaaaccctgacccagcgacgccgcgtgagggaagaaggttttcggattgtaaacctctgttcttggtgaagagaagaagacggtagccaaggaggaagccccggctaactacg

SEQ ID NO: 6613 - DNA, 490 bp, unidentified
  misc_feature 1..490: note = Ascusbbf_1367663, encodes 16S rRNA
  source 1..490: mol_type = genomic DNA
agagtttgatcatggtcaggatgaacgctagcggcaggcctaatacatgcaagtcggacgggatccatcggagagcttgctcgaagatggtgagagtggcgcacgggtgcgtaacgcgtgagcaacctacctctatcagggggatagcctctcgaaagagagattaacaccgcataacatatctgaccggcatcggttagctattaaatatttataggatagagatgggctcgcgtgacattagctagttggtagggtaacggcttaccaaggcgacgatgtctaggggctctgagaggagaatcccccacactggtactgagacacggaccagactcctacgggaggcagcagtaaggaatattggtcaatgggcggaagcctgaaccagccatgccgcgtgcaggaagactgccctatgggttgtaaactgcttttgtccaggaataaacctctttacgagtagagagctgaatgtactggaagaata

SEQ ID NO: 6614 - DNA, 490 bp, unidentified
  misc_feature 1..490: note = Ascusbbf_1360999, encodes 16S rRNA
  source 1..490: mol_type = genomic DNA
agagtttgatcctggctcaggacgaacgctggcggcgtgcctaatacatgcaagtcgtacgcaattgatccaccgagtgcttgcactcaccggatcgttgagcggcgcacgggtgagtaacacgtgggtaacctgcccaccagaggggggtaacagtcggaaacgattgctaataccgcataggttgaacgaccgcatggtcgctcaaggaaagacggctttggctgtcactggtggatggacccgcggcgtattagttagttggtgaggtaacggctcaccaagacaatgatacgtagccgacctgagagggtgatcggccacattgggactgagacacggcccaaactcctacgggaggcagcagtagggaatcttccgcaatggacgaaagtctgacggagcaacgccgcgtgagtgaagaaggttttcggatcgtaaaactctgttgttagagaagaacatgtctgagagtaactgttcaggcaat

SEQ ID NO: 6615 - DNA, 490 bp, unidentified
  misc_feature 1..490: note = Ascusbbf_1189718, encodes 16S rRNA
  source 1..490: mol_type = genomic DNA
agagtttgatcctggctcaggatgaacgctggcggcgtgcctaacacatgcaagtcgagcgagaagctcatcacagatgcttcggttgaagtgatgagtggaaagcggcggacgggtgagtaacgcgtaggcaacctgccctttgcagagggatagcctcgggaaaccgggattaaaacctcatgacacctcttaaagacatctttgagaggtcaaagatttatcggcaaaggatgggcctgcgtctgattagctagttggtggggtaacggcctaccaaggcgacgataagtagccgacctgagagggtgatcggccacattggaactgagacacggtccaaactcctacgggaggcagcagtggggaatattgcacaatgggggaaaccctgatgcagcaacgccgcgtgaaggaagaaggcctttgggtcgtaaacttctgttctaagggaagataatgacggtaccttaggagcaagtcccggcta

SEQ ID NO: 6616 - DNA, 490 bp, unidentified
  misc_feature 1..490: note = Ascusbbf_1900993, encodes 16S rRNA
  source 1..490: mol_type = genomic DNA
agagtttgatcctggctcaggatgaacgctagctacaggcttaacacatgcaagtcgaggggcagcatggaagtagcttgctacttccgatggcgaccggcgaatgggtgagtaacgcgtatccaacctgccgtgtgctcatggatagcccttagaaatgaggattaatacatgatggtctcctttgatcgcctgagattgggagtaaagattgatcggcacacgatggggatgcgttccattagatagttcgcggggtaacggcccaccaagtcgatgatggataggggttctgagaggaaggtcccccacactggtactgagacacggaccagactcctacgggaggcagcagtgaggaatattggtcaatgggcgagagcctgaaccagccaagtagcgtgaaggaagacggccctacgggttgtaaacttcttttgtcggggaataacaagcgccacgtgtggcgccctgcacgtacccggtgaat

SEQ ID NO: 6617 - DNA, 490 bp, unidentified
  misc_feature 1..490: note = Ascusbbf_64234, encodes 16S rRNA
  source 1..490: mol_type = genomic DNA
agagtttgatcatggctcagaacgaacgctggtggcgtgtcttatacatgcaagtcgagcggtgcagcaatgcatagcggcgaacgggtgagtaacacgtaagcaatctgccccctgcttgggaatagccgtgccaacgcgcggataataccgaatatcgtggcctcccgcatgggaggttgacaaaagatttatcggcaggggatgagcttgcgtccgattagctagttggcggggcaacggcccaccaaggcgacgatcggtagccggcctgagagggcgatcggccacattgggactgagatacggcccagactcctacgggaggcagcagtagggaatattgcacaatgggggaaaccctgatgcagcaacgccacgtgtgggaagaagcatttcggtgtgtaaaccactgtcgtgagggaataaggctatttttcggaacagttgaatgtacctcgaaaggaagcaccggcaaacttcgtgccag

SEQ ID NO: 6618 - DNA, 490 bp, unidentified
  misc_feature 1..490: note = Ascusbbf_15117, encodes 16S rRNA
  source 1..490: mol_type = genomic DNA
agagtttgatcatggctcaggacgaacgctggcggcgtgcctaacacatgcaagtcgaacggagtattgcgctgaaacgagagtagcttgctacaggaatttcttgtaatacttagtggcggacgggtgagtaacgcgtgaggaacctgccttacagagggggacaacagttggaaacgactgctaataccgcataacatattgagaggacatcctcttaatatcaaaggagcaatccgctgtaagatggcctcgcgtctgattagatagttggtgaggtaacggcccaccaagtcgacgatcagtagccggactgagaggttgaacggccacattgggactgagacacggcccagactcctacgggaggcagcagtgggggatattgcacaatggaggaaactctgatgcagcaacgccgcgtgagggaagaaggttttcggattgtaaacctctgtttttagcgaagaaagaaatgacggtagctaaa

SEQ ID NO: 6619 - DNA, 490 bp, unidentified
  misc_feature 1..490: note = Ascusbbf_949232, encodes 16S rRNA
  source 1..490: mol_type = genomic DNA
agagtttgatcatggctcagattgaacgctggcggcaggcctaatacatgcaagtcgaacgaacttaattcattcttttagattgaaagcggttagtggcggactggtgagtacaacataagcaacctgcctataagaggggaacaacagttagaaatgactgctaataccgcatatgccataataatcacatgattatagtgggaaaggagtaatccgcttatagatgggcttatgcctgattagctagttggtggggcaacggcctaccaaggcgacgatcagtagccgaactgagaggttaaacggccacattgggactgagatacggcccagactcctacgggaggcagcagtcgggaatattgcgcaatggaggaaactctgacgcagtgacgccgcgtgcaggatgaaggttttcggattataaactgctttagacagggaagatacaagacagtacctgtagaataagctccggctaactacg

SEQ ID NO: 6620 - DNA, 490 bp, unidentified
  misc_feature 1..490: note = Ascusbbf_30424, encodes 16S rRNA
  source 1..490: mol_type = genomic DNA
agagtttgatcctggctcaggatgaacgctagcggcaggcttaacacatgcaagtcgaggggcagcgtgatgtagcaatacattgacggcgaccggcgaaagggtgagtaacgcgtgagcaacatgcccggtagaggaggatagtcgatggaaacgtcgcgtaatactccgtaacaacagggaccgcatgatccttgtttaatagatttatcgctaccggattggctcgcgtcccattaggcagttggcggggtaacggcccaccaaaccgacgatgggtaggggttctgagaggaaggtcccccacattggaactgagacacggtccagactcctacgggaggcagcagtgaggaatattggtcaatggccgagaggctgaaccagccatgccgcgtgcgggaggacggccctatgggttgtaaaccgcttttgttggggagcaataagggtcacgtgtggcccgatgagagtacccagcgaataagca

SEQ ID NO: 6621 - DNA, 490 bp, unidentified
  misc_feature 1..490: note = Ascusbbf_103254, encodes 16S rRNA
  source 1..490: mol_type = genomic DNA
agagtttgatcctggctcaggatgaacgctagcggcaggcttaacacatgcaagtcgaggggcagcgtggagtagcaatactctgacggcgaccggcgaaagggtgagtaacgcgtgagcaacatgcccgatagtggaggatagtcgatggaaacgtcgcgtaatactccgtaacatacgggaccgcatgattctgtattaatagatttattgctatcggattggctcgcgtaccattagctagttggcggggtaacggcccaccaaggcgacgatggttaggggttctgagaggaaggtcccccacattggaactgagacacggtccagactcctacgggaggcagcagtgaggaatattggacaatggccggaaggctgatccagccatgccgcgtgcgggaagacggccctatgggttgtaaaccgcttttgttggggagcaataagcagtacgtgtactgcgatgagagtacccagcgaataagca

SEQ ID NO: 6622 - DNA, 490 bp, unidentified
  misc_feature 1..490: note = Ascusbbf_180291, encodes 16S rRNA
  source 1..490: mol_type = genomic DNA
agagtttgatcctggctcaggacgaacgctggcggcgtgcttaacacatgcaagtcgagcggaaaggcctcaaccttgtgttggggtactcgagcggcgaacgggtgagtaacacgtgagtaatctgccctccactctgggataagccttggaaacggggtctaataccggatatgacctgctcctgcctgggagtgggtggaaagcgtttagcggtgggggatgtgctcgcggcctatcagcttgttggtggggtaatggcctaccaaggctttgacgggtagccggcctgagagggtgaccggtcacactgggactgagacacggcccagactcctacgggaggcagcagtggggaatattggacaatgggcggaagcctgatccagcaacgccgcgtgggggatgaaggccttcgggttgtaaacctctttcagtaccgacgaagcccctgctttggtggggtgtgacggtaggtacagaagaagca

SEQ ID NO: 6623 - DNA, 490 bp, unidentified
  misc_feature 1..490: note = Ascusbbf_1016, encodes 16S rRNA
  source 1..490: mol_type = genomic DNA
agagtttgatcatggctcaggatgaacgctagcggcaggcttaacacatgcaagtcgaggggcagcgtggagtagcaatactctgacggcgaccggcgaaagggtgagtaacgcgtgagcaacatgcccgggactgggggatagtcgatggaaacgtcgtgtaataccccgtaacacattgcaccgcatgatgcgatgttgagagatttatcgattccggattggctcgcgtcccattagctagttggcggggtaacggcccaccaaggcgacgatgggtaggggttctgagaggaaggtcccccacattggaactgagacacggtccagactcctacgggaggcagcagtgaggaatattggacaatggccgagaggctgatccagccatgccgcgtgcgggaggacggccctatgggttgtaaaccgcttttgtcagggggcaataagtgtcacgtgtggcacgatgagagtacctggcgaataagca

SEQ ID NO: 6624 - DNA, 490 bp, unidentified
  misc_feature 1..490: note = Ascusbbf_8620, encodes 16S rRNA
  source 1..490: mol_type = genomic DNA
agagtttgatcatggctcaggatgaacgccggcggtgtgcctaatacatgcaagtcgtacgcactggcccaactgattgatggtgcttgcacctgattgacgatggattaccagtgagtggcggacgggtgagtaacacgtaggtaacctgccccggagcgggggataacatttggaaacagatgctaataccgcataacaacaaaagccacatggcttttgtttgaaagatggctttggctatcactctgggatggacctgcggtgcattagctagttggtaaggtaacggcttaccaaggcgatgatgcatagccgagttgagagactgatcggccacaatggaactgagacacggtccatactcctacgggaggcagcagtagggaatcttccacaatgggcgcaagcctgatggagcaacaccgcgtgagtgaagaagggtttcggctcgtaaagctctgttgttggagaagaacgtgcgtgagag

SEQ ID NO: 6625 - DNA, 490 bp, unidentified
  misc_feature 1..490: note = Ascusbbf_3982, encodes 16S rRNA
  source 1..490: mol_type = genomic DNA
agagtttgatcatggctcaggatgaacgctagctacaggcttaacacatgcaagtcgaggggcagcatgacgatagcttgctattgtcgatggcgaccggcgcacgggtgagtaacgcgtatccaacctgcccattactcaggtatagcccagtgaaaactggattaatccctgatgtggtctcgtgcagacatctaagcgagactaaagtttcaacggtaatggatggggatgcgtctgattagcttgttggcggggtaacggcccaccaaggcgacgatcagtaggggttctgagaggaaggtcccccacattggaactgagacacggtccaaactcctacgggaggcagcagtgaggaatattggtcaatggacggaagtctgaaccagccaagtagcgtgcaggatgacggccctatgggttgtaaactgcttttgtgcgggaataaagaaggggacgtgtcctctgttgcatgtaccgcacgaat

SEQ ID NO: 6626 - DNA, 490 bp, unidentified
  misc_feature 1..490: note = Ascusbbf_27171, encodes 16S rRNA
  source 1..490: mol_type = genomic DNA
agagtttgatcatggctcaggatgaacgctggcggcgtgcctaacacatgcaagtcgaacggggtacagacgctgaagattggagtgcttgcacaaagagattcttgtttgtacttagtggcggacgggtgagtaacgcgtggaaaacctgcctcatacagggggataacaggaagaaattcctgctaataccgcataagcgcacggtaccgcatggtagagtgtgaaaagatttatcggtatgagatggttccgcgtctgattagccagttggcggggtaacggcccaccaaagcgacgatcagtagccggcctgagagggcggacggccacattgggactgagacacggcccagactcctacgggaggcagcagtgggggatattgcacaatggagggaactctgatgcagcgacgccgcgtgggtgaagaagttattcgtaatgtaaagccctatcagcagggaagataatgacggtacctgactaa

SEQ ID NO: 6627 - DNA, 490 bp, unidentified
  misc_feature 1..490: note = Ascusbbf_110747, encodes 16S rRNA
  source 1..490: mol_type = genomic DNA
agagtttgatcatggctcagattgaacgctagcgggatgctttacacatgcaagtcgaacggcagcgcgaaagaagcttgcttcttttggcggcgagtggcgaacgggtgagtaatgtatcggaacgtgcccagtagcgggggataactactcgaaagagtggctaataccgcatacgccctacgggggaaagggggggatcgcaagacctctcactattggagcggccgatatcggattagctagttggtggggtaaaggcctaccaaggcgtcgatccgtagctggtttgagaggacgaccagccacactgggactgagacacggcccagactcctacgggaggcagcagtggggaattttggacaatgggggaaaccctgatccagccatcccgcgtgtgcgatgaaggccttcgggttgtaaagcacttttggcagggaagaaaagtcgcaggctaatatcctgcgacgctgacggtacctgcaga

SEQ ID NO: 6628 - DNA, 490 bp, unidentified
  misc_feature 1..490: note = Ascusbbf_818496, encodes 16S rRNA
  source 1..490: mol_type = genomic DNA
agagtttgatcctggctcaggatgaacgctagctacaggcttaacacatgcaagtcgaggggtaacgacagcgaaagcttgcttttgctgggcgacgaccggcgcacgggtgagtaacgcgtatccaacctgcccataactaagggataatccgtagaaatgcggtctaataccttatgtgttccgacgaggacatctgaattggaataaagatttatcggttatggatggggatgcgtctgattagattgttggcggggcaacggcccaccaagtctacgatcagtaggggttctgagaggaaggtccctcatattggaactgagacacggtccaaactcctacgggaggtagcagtgaggaatattggttaatgggtgagagcctgaattagttaagtagtgtgtaggatgatggccctatgggttgtaaattgtttttgtatggggataaagtgctccacgtgtggagttttgtaggtaccatacga

SEQ ID NO: 6629 - DNA, 490 bp, unidentified
  misc_feature 1..490: note = Ascusbbf_113009, encodes 16S rRNA
  source 1..490: mol_type = genomic DNA
agagtttgatcatggctcaggatgaacgctggcggcgtgcttaacacatgcaagtcgaacgaagcattgtgattgatttcttcggattgatttcactttgacttagtggcggacgggtgagtaacgcgtgggtaacctgccgtatgcagggggacaacagttagaaatgactgctaataccgcataacccgctagtgccgcatggcacagacggaaaagattttatcggcatacgatggacccgcgtctgattagcttgttggtgaggtaacggcccaccaaggcgacgatcagtagccgaactgagaggttgaccggccacattgggactgagacacggcccagactcctacgggaggcagcagtggggaatattgcacaatgggggaaaccctgatgcagcaacgccgcgtgagtgatgacgtatttcggtatgtaaagctctatcagcagggaagaaaatgacggtacctgactaagaagccccggc

SEQ ID NO: 6630 - DNA, 484 bp, unidentified
  misc_feature 1..484: note = Ascusbbf_9615, encodes 16S rRNA
  source 1..484: mol_type = genomic DNA
agagtttgatcatggctcagaacgaacgctggcggcacgcttaacacatgcaagtcgaacggtgtaatggggcttgctccattacgtagtggcggacgggtgagtaacacgtggagacctgactagaggaggtggatagcttcgggaaactggaggtaatacagcataagctcgagagaggaaaggggaaacccgcctttagagggatctgcggctgattaggtagttggtggggtaaaggcctaccaagccgacgatcagtagctggtctgagaggatgatcagccacactggaactgagatacggtccagactcctacgggaggcagcagtggggaatattggacaatggggggaaccctgatccagcgatgccgcgtgagtgaagaaggccttagggttgtaaagctcttttgacggggacgatgatgacggtacccgtagaataagcaccggctaactctgtgccagcagccgcggtaat

SEQ ID NO: 6631 - DNA, 490 bp, unidentified
  misc_feature 1..490: note = Ascusbbf_10289, encodes 16S rRNA
  source 1..490: mol_type = genomic DNA
agagtttgatcatggctcagaacgaacgctggcggcgcgttttaagcatgcaagtcgagcggcagtagcaatacgagagcggcggacgggtgagtaacacgtgggtaatctgcctaccagtcggggatagcctgtggaaacacaggataataccggatgcgatgccctgcacacaagtgcggggcaggaaaggggccaaggccccgctggaagatgagcccgcgtcccattagctagatggcggggtaaaggcccaccatggcgatgatgggtagccggcctgagagggtgaacggccacattggaactgagacacggtccagactcctacgggaggcagcagctaagaatcttccacaatggacgaaagtctgatggagcgacgccgcgtgggcgatgaaggccgtgaggttgtaaagcccttttcttgaggaggaataagcggatcagggaatgggtctgcgatgacgtgaatcaaggaataagcccc

SEQ ID NO: 6632 - DNA, 490 bp, unidentified
  misc_feature 1..490: note = Ascusbbf_10861, encodes 16S rRNA
  source 1..490: mol_type = genomic DNA
agagtttgatcatggctcaggataaacgctggcggcgtgcctaatacatgcaagtcgatcggcagacagtgagcttgcttaatgtctgcagaggcgaacgggtgagtaatacataagcaacctgcccacgaagactgggataatccctggaaacggggactaataccggataggtaacgagatcgcatgatcttgttattaaaggttcaaaacactggtggatgggcttatggcgcattagctggttggtgaggtaacggcccaccaaggcgatgatgcgtagccggcctgagagggtgaacggccacattgggactgagacacggcccagactcctacgggaggcagcagtagggaattttcggcaatgggcgaaagcctgaccgagcaacgccgcgtgagtgaagacggccttcgggttgtaaagctctgttgtaagggaagaataccagggagagaatctctggctgacggtaccttaccagaaagc

SEQ ID NO: 6633 - DNA, 490 bp, unidentified
  misc_feature 1..490: note = Ascusbbf_534099, encodes 16S rRNA
  source 1..490: mol_type = genomic DNA
agagtttgatcctggctcaggacgaacgctggcggcgcgcttaacacatgcaagtcgaacggtgaatgtagtaaagcttgctttaagacattcatagtggcggacgggtgagtaacgcgtgaggacttgtcctgtacagggggacaactgatggaaacgtcagctaataccccataagccgagaggtaaaaggagcgatccggtacaggagggactcgcgttctatcagttagttggtggggtaacggcccaccaaggcgaagacggatagccggactgagaggttggccggccacattggaactgagatacggtccagactcctgcgggaggcagcagtggggaatattgggcaatggggggaaccctgacccagcgacgccgcgtgagtgaagaaatccctcgggatgtaaagctctgttgtgcgggaagaaggaagtgacggtaccgcacgaggaagccacggcaaactacgtgccagcagccgcgg

SEQ ID NO: 6634 - DNA, 490 bp, unidentified
  misc_feature 1..490: note = Ascusbbf_18699, encodes 16S rRNA
  source 1..490: mol_type = genomic DNA
agagtttgatcatggctcaggatgaacgctggcggcgtgcttaacacatgcaagtcgaacgagaaccttacgacggagacttcggttgaagatgtaagaattctagtggcggacgggtgagtaacgcgtgggtaacctgcccatgagaggaggataacagggagaaattcttgctaatactctatatgcttacggtatcgcatgatactgtgaggaaatgaatttcgctcatggatggacccgcgtttgattagccagttggtggggtaacggcctaccaaagcaacgatcaatagccggcctgagagggtgatcggccacattgggactgagacacggcccaaactcctacgggaggcagcagtggggaatattgcacaatgggggaaaccctgatgcagcaacgccgcgtgagtgaagaagtatttcggtatgtaaagctctatcgatgggaaataagatgaaggtacccaaataagaagccccggct

SEQ ID NO: 6635 - DNA, 490 bp, unidentified
  misc_feature 1..490: note = Ascusbbf_47370, encodes 16S rRNA
  source 1..490: mol_type = genomic DNA
agagtttgatcatggctcagattgaacgctggcggcatgctttacacatgcaagtcggacggcagcacagagaagcttgcttcttgggtggcgagtggcgaacgggtgagtaatatattggaacgtaccgagtaatgggggataactaatcgaaagattagctaataccgcatacgtcctgagggagaaagcgggggatcttcggacctcgcgttattcgagcggccaatatctgattagctagttggtggggtaaaggcccaccaaggcgacgatcagtagcgggtctgagaggatgatccgccacactgggactgagacacggcccagactcctacgggaggcagcagtggggaattttggacaatgggcgcaagcctgatccagccatgccgcgtgtctgaagaaggccttcgggttgtaaaggacttttgtcagggaagaaaaggaacgggctaatatcccgttctgatgacggtacctgaagaat

SEQ ID NO: 6636 - DNA, 490 bp, unidentified
  misc_feature 1..490: note = Ascusbbf_66745, encodes 16S rRNA
  source 1..490: mol_type = genomic DNA
agagtttgatcatggctcaggacgaacgctggcggcgtgcttaacacatgcaagtcgaacgctgaagctctgcccttgtggtggggtggatgagtggcgaacgggtgagtaacacgtgggtaatctgccccatactctgggataacccctggaaacgggggctaataccggataggacattctgccgcatggtggggtgtggaaagttccggcggtatgggatgggcccgcggcctatcagcttgttggtggggtaatggcctaccaaggcgacgacgggtagccggcctgagagggtgaccggccacactgggactgagacacggcccagactcctacgggaggcagcagtggggaatcttgcgcaatgggcgaaagcctgacgcagcaacgccgcgtgggggatgaaggccttcgggttgtaaacctctttcaccatcgacgaagccctttggggtgacggtaggtggggaagaagcaccggctaact

SEQ ID NO: 6637 - DNA, 490 bp, unidentified
  misc_feature 1..490: note = Ascusbbf_633621, encodes 16S rRNA
  source 1..490: mol_type = genomic DNA
agagtttgatcctggctcaggacgaacgctggcagcgtgcttcatacatgcaagtcgaacgagaagctctcgcttgctagagtggaaagtggcggacgggtgagtaatatgtaggaaatctgccctagagagggggacaacagagcgaaacttctgctaataccccatatgagcttagttgcaataccaatcttgaaaactccggtgctctaggatgagcctgcatctgattagcttgttggtggtgtaatggactaccaaggcgacgatcagtagctggtttgagaggatgatcagccacaatgggactgagacacggcccatactcctacgggaggcagcagtagggaattttgcgcaatgggcgaaagcctgacgcagcaacgccgcgtgaatgatgaagcccttcggggtgtaaaattctgtcagtggggacgaattttgacggtacccacagaggaagcaccggctaactccgtgccagcagccg

SEQ ID NO: 6638 - DNA, 490 bp, unidentified
  misc_feature 1..490: note = Ascusbbf_1672, encodes 16S rRNA
  source 1..490: mol_type = genomic DNA
agagtttgatcatggctcaggacgaacgctggcggcgtgcctaacacatgcaagtcgaacgagtgtactagcaatagtacattagtggcggacgggtgagtaatacatgagtaacctgccttatacagggggataacacctagaaatgggtgctaataccgcataataacctattgtggcatcacaataggaggaaaggagaaatccggtaaaagatggactcatgttcgattagctagttggtggggtaaaggcctaccaaggcaacgatcgatagccgaactgagaggttgatcggccacattggaactgagaaacggtccagactcctacgggaggcagcagtggggaatattgcgcaatgggggaaaccctgacgcagcaacgccgtgtgaaggaagaaggctctagggttgtaaacttctttgattagggacgaaagaaatgacggtacctaaagaacaagccacggctaactacgtgccagcag

SEQ ID NO: 6639 - DNA, 490 bp, unidentified
  misc_feature 1..490: note = Ascusbbf_8776, encodes 16S rRNA
  source 1..490: mol_type = genomic DNA
agagtttgatcatggctcaggatgaacgctagcggcaggcttaacacatgcaagtcgaggggcagcgcggggtagcaatactctggcggcgaccggcgaaagggtgagtaacgcgtgagcaacatgcccgggactgggggatagtcgatggaaacgtcgcgtaataccccgtaatacacggaaccgcatgattctgtgttgagagatttattgattccggattggctcgcgtgccattagctagttggcggggtaacggcccaccaaggcgacgatggctaggggttctgagaggaaggtcccccacattggaactgagacacggtccagactcctacgggaggcagcagtgaggaatattggacaatggccgagaggctgatccagccatgccgcgtgcgggaagacggccctatgggttgtaaaccgcttttgcgagggagcaataaggtctacgtgtagaccgatgagagtaccttacgaataagca

SEQ ID NO: 6640 - DNA, 490 bp, unidentified
  misc_feature 1..490: note = Ascusbbf_36838, encodes 16S rRNA
  source 1..490: mol_type = genomic DNA
agagtttgatcatggctcaggatgaacgctggcggcgtgcctaacacatgcaagtcgagcggacttaagaaaagaatcttcggatgaaatttttaagttagcggcggatgggtgaggaacgcgtggagaacctgcccttcacagggggataacagctggaaacggctgttaataccgcatatgctcacggagccgcatggccccgggaggaaagctccggcggtgaaggatggctccgcgtcggattaacttgttggcggggtaacggcccaccaaggtgatgatccgtagccggcctgagagggcgaccggccacattgggactgagacacggcccaaactcctacgggaggcagcagtgggggatattgcacaatgggcgcaagcctgatgcagcgacgccgcgtgatggaggaagtacttcggtatgtaaacatctatcagcagggaagaagatgacggtacctgcagaagaagccccggctaacta

SEQ ID NO: 6641 - DNA, 490 bp, unidentified
  misc_feature 1..490: note = Ascusbbf_320393, encodes 16S rRNA
  source 1..490: mol_type = genomic DNA
agagtttgatcatggctcaggacgaacgctggcggcgtgcctaatacatgcaagtcgagcgagcttgcctagatgattttagtgcttgcactaaatgaaactagatacaagcgagcggcggacgggtgagtaacacgtgggtaacctgcccaagagactgggataacacctggaaacagatgctaataccggataacaacactagacgcatgtctagagtttgaaagatggttctgctatcactcttggatggacctgcggtgcattagctagttggtaaggtaacggcttaccaaggcaatgatgcatagccgagttgagagactgatcggccacattgggactgagacacggcccaaactcctacgggaggcagcagtagggaatcttccacaatggacgaaagtctgatggagcaacgccgcgtgagtgaagaagggtttcggctcgtaaagctctgttggtagtgaagaaagatagaggtagtaac

SEQ ID NO: 6642 - DNA, 490 bp, unidentified
  misc_feature 1..490: note = Ascusbbf_15310, encodes 16S rRNA
  source 1..490: mol_type = genomic DNA
agagtttgatcctggctcaggacgaacgctggcggcgtgcttaacacatgcaagtcgaacgagaatagattggaagcttgcttttgatttattcgagtggcggacgggtgagtaacgcgtgaataatctgtcctatacagggggataacgcatcgaaagatgtgctaataccgcgtaggaccacgggatcgcatgattccgaggtgaaaggagcaatccagtatagggtgagttcgcgtctgattagatagttggtgaggtaacggcccaccaagtcaacgatcagtagccgacctgagagggtgatcggccacattgggactgagacacggcccagactcctacgggaggcagcagtggggaatattgggcaatgggcgaaagcctgacccagcaacgccgcgtgaaggaagaaggttttcggattgtaaacttctgtcctatgtgaagagatagagacggtagcataggaggaagccccggctaacta

SEQ ID NO: 6643 - DNA, 489 bp, unidentified
  misc_feature 1..489: note = Ascusbbf_23610, encodes 16S rRNA
  source 1..489: mol_type = genomic DNA
agagtttgatcctggctcagaatgaacgctggcggcatggattaggcatgcaagtcgaacggggtccttcgggacctagtggcgaaagggtgagtaacacgtgagcaatctgcccccaaggccggaataagcactggaaacggtgtctaaaaccggatgaggcccggagtcgcatgactcctcagccaaatattgataccctggggatgagctcgcggcccattagctagttggcggggtaacggcccaccaaggctgcgacgggtaggtggtctgagaggatggtcacccacactgggactgagacactgcccagactcctacgggaggctgcagtcgagaatcttccgcaatgggcgcaagcctgacggagcgatgccgcgtgagggacgaaggccttcgggtcgtaaacctctgtcaccggggacgaaacctgacggtacccggaaaggaagccacggctaaccacgtgccagcagccgcggtaat

SEQ ID NO: 6644 - DNA, 490 bp, unidentified
  misc_feature 1..490: note = Ascusbbf_49197, encodes 16S rRNA
  source 1..490: mol_type = genomic DNA
agagtttgatcatggctcaggatgaacgctggcggcgtgcctaacacatgcaagtcgaacggttaaaccggcttcggccggaaataaagtggcgaacgggtgagtaacacgtgaccaacctgccccgcgcaccgggacagccccccgaaagggggattgataccggatactccgccgggcccgcatgggcccggcgggaaagctccggcggcgcgggatggggtcgcggcccatcaggtagtgggtcgggtagaggccggcccagccgacgacgggtagccgggttgagagaccgaccggccacattgggactgagatacggcccagactcctacgggaggcagcagtggggaatattgcgcaatgggggcaaccctgacgcagcaacgccgcgtgcgggaggaaggcactcgtgtcgtaaaccgctttcagcagggaagacatcgacggtacctgcagaagaagccccggctaactacgtgccagcagc

SEQ ID NO: 6645 - DNA, 490 bp, unidentified
  misc_feature 1..490: note = Ascusbbf_33854, encodes 16S rRNA
  source 1..490: mol_type = genomic DNA
agagtttgatcatggctcagaatgaacgttggcggcatggattaggcatgcaagtcgagcgagaaccctaagatggagacttcggtcaaagtcttagggggacagcggcgaaagggtgagtaacgcgtagttacctgccccagggtccagaatagcctcgggaaactgagagtaatgctggataatatctccggatcaaaggtgagattccgccctgggaggggactgcgtcctactagcttgttggtaaggtaatggcttaccaaggctacgatgggtagcgggcgtgagagcgtggcccgtcacactgggactgagacactgcccagacacctacgggtggctgcagtcgagaatcttcggcaatgcgcgaaagcgtgaccgagcaatgccgcgtgcgggatgaaggccctcgggttgtaaaccgcgaaagtaaggcggaaggctctgtgaagagcagagtttgaccaatttacagtaaggacgggct

SEQ ID NO: 6646 - DNA, 490 bp, unidentified
  misc_feature 1..490: note = Ascusbbf_138617, encodes 16S rRNA
  source 1..490: mol_type = genomic DNA
agagtttgatcctggctcaggacgaacgctggcggcgtgcttaacacatgcaagtcgagcggaaaggcccttcggggtactcgagcggcgaacgggtgagtaacacgtgagcaacctgccccaagctttgggataaccctcggaaacgggggctaataccgaatattactgctggtcgcatggctggtggtggaaagtttttcggcttgggatgggctcgcggcctatcagcttgttggtggggtgatggcctaccaaggcgacgacgggtagccggcctgagagggcgaccggccacactgggactgagacacggcccagactcctacgggaggcagcagtgggaatattgcacaatgggcggaagcctgatgcagcgacgccgcgtgagggatgacggccttcgggttgtaaacctctttcagcagggacgaagcgagagtgacggtacctgcagaagaagcaccggccaactacgtgccagcagccg

SEQ ID NO: 6647 - DNA, 490 bp, unidentified
  misc_feature 1..490: note = Ascusbbf_1436053, encodes 16S rRNA
  source 1..490: mol_type = genomic DNA
agagtttgatcctggctcaggatgaacgctagcggcaggcttaacacatgcaagtcgaggggcagcgcggggtagcaatactctggcggcgaccggcggacgggtgcgtaacgcgtgagcaacttgcccgtcactgggggataggccctggaaacggtgtgtaatactccataacatatggattcacatggattcatattgaaagattcgttggtgacggatgggctcgcgtaacattagcaagtcggcggggtaacggcccaccgaggccacgatgtttaggggttctgagaggaaggtccccaacaccggaactgggaaacggtccagcctcctacggagggaagaagtgaggaatattggtcaatgggcggaagcctgaaccagccatgccgcgtgcaggaatagggccctatgggtcgtaaactgcttttccttgagggcaataagggtcacgagtggcccgatgagagtatcaggggaataagca

SEQ ID NO: 6648 - DNA, 490 bp, unidentified
  misc_feature 1..490: note = Ascusbbf_11922, encodes 16S rRNA
  source 1..490: mol_type = genomic DNA
agagtttgatcctggctcaggatgaacgctggcggcgtgcctaatacatgcaagtcgaacgcaaatcttcgggtttgagtggcgaacgggtgagtaacacgtaggtaatctaccgtagagacggggataacgattggaaacgatcgctaataccggatagcatatcggatcgcatgatctgatatttaaagatacaattgtatcactctatgatgagcctgcgtcgcattagctagttggtgagataatagcccaccaaggcgatgatgcgtagccggactgagaggttgaacggccacattgggactgagacacggcccagactcctacgggaggcagcagtagggaattttcggcaatgggggaaaccctgaccgagcaacgccgcgtgaatgaagaagtatttcggtatgtaaaattcttttgtatgggaagaacgaatcagggagtggaaagccctggaagtgactgtaccatacgaataagcccc

SEQ ID NO: 6649 - DNA, 490 bp, unidentified
  misc_feature 1..490: note = Ascusbbf_32758, encodes 16S rRNA
  source 1..490: mol_type = genomic DNA
agagtttgatcctggctcagagtgaacgctagcggaatgctttatacatgcaagtcgaacggagttttgttatgaagtagcaatatggaatagtaaaacttagtggcgaactggcgagtaatagttaggaacttaccgagtagtgggggacaacagttagaaatgactgctaataccgcatacgcccgagaggggaaagatttatcgctatttgagaggcctaaccacgattagcttgttggtgagataaaagcccaccaaggcagtgatcgttatctgatctgagaggatgatcggacgcatcgggactgagacacggcccggactcctacgggaggcagcagtagggaatattggacaatggacgcaagtctgatccagcaattccgcgtgagtgatgaaggtgttatgcattgtaaaactcttttgcctgcgaagataatgacggtagcaggagaataagcaccgactaactatgtgccagcagccg

SEQ ID NO: 6650 - DNA, 490 bp, unidentified
  misc_feature 1..490: note = Ascusbbf_9913, encodes 16S rRNA
  source 1..490: mol_type = genomic DNA
agagtttgatcatggctcaggacgaacgctggcggcgtgcctaacacatgcaagtcgaacggagttaccaagaatttcggtttgaagtaacttagtggcggacgggtgagtaacgcgtgagtaacctgcctagaagagggggataacgttctgaaaagaacgctaataccgcataacgtataagtttcgcatggaatttataccaaaggagtaatccgcttttagatggactcgcgtccgattagcttgttggcggggtaacagcccaccaaggcgacgatcggtagccggactgagaggttgaacggccacattgggactgagacacggcccagactcctacgggaggcagcagtgggggatattgcgcaatgggggaaaccctgacgcagcaacgccgcgtgaaggacgaaggtcttcggattgtaaacttcttttgttaaggacgaagaaagtgacggtacttaacgaataagctccggctaactac

SEQ ID NO: 6651 - DNA, 490 bp, unidentified
  misc_feature 1..490: note = Ascusbbf_117003, encodes 16S rRNA
  source 1..490: mol_type = genomic DNA
agagtttgatcatggctcaggatgaacgctagcggcaggcctaacacatgcaagtcgaggggtagatatcttcggatattgagaccggcgcacgggtgcgtaacgcgtatgcaatctaccttatactaagggatagcccagagaaatttggattaataccttatagttattttgaatggcatcgtttaaaatataaagatttattggtataagatgagcatgcgtcccattagttagttggtaaggtaacggcttaccaagacgatgatgggtaggggtcctgagagggagatcccccacactggtactgagacacggaccagactcctacgggaggcagcagtgaggaatattggtcaatggacggaagtctgaaccagccatgccgcgtgcaggatgacggtcctatggattgtaaactgcttttgtacgggaagaaaacacattacgtgtaatgtactgacggtaccgtaagaataaggatcggcta

SEQ ID NO: 6652 - DNA, 490 bp, unidentified
  misc_feature 1..490: note = Ascusbbf_365530, encodes 16S rRNA
  source 1..490: mol_type = genomic DNA
agagtttgatcatggctcaggatgaacgctagctacaggcttaacacatgcaagtcgaggggcatcaggatgtagcaatacattgctggcgaccggcgcacgggtgagtaacacgtatccaacctgccttttactcggggataggctttcgaaagaaagattaatacccgatggcataatatttccgcatgggattattattaaagaatttcggtaaaagatggggatgcgttccattaggcagttggcggggtaacggcccaccaaaccttcgatggataggggttctgagaggaaggtcccccacattggaactgagacacggtccaaactcctacgggaggcagcagtgaggaatattggtcaatgggcgagagcctgaaccagccaagtagcgtgaaggatgactgccctatgggttgtaaacttcttttataggggaataaagtgagccacgtgtggctttttgtatgtaccctatgaataagga

SEQ ID NO: 6653 - DNA, 490 bp, unidentified
  misc_feature 1..490: note = Ascusbbf_1226, encodes 16S rRNA
  source 1..490: mol_type = genomic DNA
agagtttgatcatggctcaggatgaacgctagctacaggcttaacacatgcaagtcgaggggcagcatggaggttgcttgcaacttccgatggcgaccggcgcacgggtgagtaacgcgtatccaaccttccccctagtagggcacagcccggcgaaagtcggattaataccctatgttgtttgaagcggacatctaattcaaaccaaagattcatcgctagtggatggggatgcgtctgattagcttgatggcggggtaacggcccaccatggcgacgatcagtaggggttctgagaggaaggtcccccacattggaactgagacacggtccaaactcctacgggaggcagcagtgaggaatattggtcaatggaggcaactctgaaccagccaagtagcgtgcaggatgacggccctatgggttgtaaactgcttttacgaggggataaccgatgccacgcgtggtgttttgcatgtacctcgtgaat

SEQ ID NO: 6654 - DNA, 490 bp, unidentified
  misc_feature 1..490: note = Ascusbbf_4594, encodes 16S rRNA
  source 1..490: mol_type = genomic DNA
agagtttgatcatggctcaggatgaacgctggcggcgtgcctaatacatgcaagtcgaacgagcaaaatccagcttgctggatggagctagtggcgaacgggtgagtaatacgtaagcaacctgcctacaaggactgggataacacctggaaacgggcgctaataccggataggtaacgggagggcatccttctgttattaaaggtttgaaacacaagtagatgggcttacggtgcattagctagttggtgaggtaacggcccaccaaggcgatgatgcatagccggcctgagagggtgaacggccacattgggactgagacacggcccagactcctacgggaggcagcagtagggaattttcggcaatgggcgcaagcctgaccgagcaacgccgcgtgagtgatgaaggttttcggatcgtaaagctctgttgtaagggaagaatggcgcggatagactccgcgattgacggtaccttaccagaaagc

SEQ ID NO: 6655 - DNA, 490 bp, unidentified
  misc_feature 1..490: note = Ascusbbf_7641, encodes 16S rRNA
  source 1..490: mol_type = genomic DNA
agagtttgatcatggctcaggatgaacgctggcggcgtgcttaacacatgcaagtcgaacggagcttatttggaaagcttgcttttcgtttaagcttagtggcggacgggtgagtaacgcgtgagcaacctgccctagagtggggaataacaccgagaaatcggtgctaataccgcataatgtcggaggaccgcatgatccaccgaccaaaggatttattcgctttaggatgggctcgcgtccgattaggcagttggcggggtaacggcccaccaaaccgacgatcggtagccgaactgagaggttgatcggccacattgggactgagacacggcccagactcctacgggaggcagcagtggggaatattgggcaatgggcgaaagcctgacccagcaacgccgcgtgaaggatgaaggtcttcggattgtaaacttctttgattggggaagaataaatgacctacccaaagaacaagtcacggctaact

SEQ ID NO: 6656 - DNA, 489 bp, unidentified
  misc_feature 1..489: note = Ascusbbf_641844, encodes 16S rRNA
  source 1..489: mol_type = genomic DNA
agagtttgatcatggctcagaacgaacgctggcggcatggattaggcatgcaagtcgaacgggagcagcaatgctccagtggcgcaagggtgaggaacacgtgaacaacccttcgagttggggatagcttctggaaacgggagataataccgaataacatcaccggatcgcatgattaggtgatcaaagcagtaatgcgcttgaagaggggttcgcgtcccattagctagttggtgaggtaacggcccaccaaggcgatgatgggtagctggtctgagaggacgaccagccacattgggactgagatactgcccagactcctacgggaggctgcagtcgagaattttgggcaatggacgaaaatctgacccagcaatgccgcgtgcgggatgaaggtcttcggattgtaaaccgctgtcaagagggacgaaacatgacggtacctctgaaggaagccacggctaactacgtgccagcagccgcggtaat

SEQ ID NO: 6657 - DNA, 490 bp, unidentified
  misc_feature 1..490: note = Ascusbbf_111038, encodes 16S rRNA
  source 1..490: mol_type = genomic DNA
agagtttgatcctggctcaggatgaacgctggcggcgtgcctaatacatgcaagtcgaacgagctgcttcggcagcgagtggcgaacgggtgagtaacatatgaataatctacctctttaactgggataccagtctgaaaagactgctaataccggataggtaatactgaggcatcttggtattattaaagatgcgtttgcatcgaattgagatgagttcatatcgcattagctagttggtgaggtaacggctcaccaaggcgatgatgcgtagccggtctgagaggatgaacggccacattgggactgagacacggcccagactcctacgggaggcagcagtagggaattttcggcaatgggcgcaagcctgaccgagcaacgccgcgtgaacgatgaaggtcttgggattgtaaagttctgttacgagggaagaacatttggtataggaaatgatatcaaactgacggtacctcgccagaaagccacg

SEQ ID NO: 6658 - DNA, 490 bp, unidentified
  misc_feature 1..490: note = Ascusbbf_1347676, encodes 16S rRNA
  source 1..490: mol_type = genomic DNA
agatttgatcatggctcagaacgaacgctggcggcatggattaggcatgcaagtcgaacgggagcagcaatgctccagtggcgcaagggtgaggaacacgtgaacaacctgccttcgagttggggatagcctctggaaacgggagataataccgaataacatcattttctcacatggggatttgatcaaagcagcaatgcgcttgaagaggggttcgcgtcccattagctagttggtgaggtaacggcccaccaaggcgatgatgggtagctggtctgagaggacgatcagccacattgggactgagatactgcccagactcctacgggaggctgcagtcgagaattttgggcaatggacgaaagtctgacccagcaatgccgcgtgcgggatgaaggtcttcggattgtaaaccgctgtcaagagggacgaagattgacggtacctctggaggaagccacggctaactacgtgccagcagccgcggtaa

SEQ ID NO: 6659 - DNA, 490 bp, unidentified
  misc_feature 1..490: note = Ascusbbf_26972, encodes 16S rRNA
  source 1..490: mol_type = genomic DNA
agagtttgatcatggctcaggatgaacgctggcggcgtgcctaacacatgcaagtcgaacgggaactccaagatgagacttcggtggatttttggaaattctagtggcggacgggtgagtaacgcgtgggtaacctgcccttaagaggtgaataacaacgagaaatcggtgctaatacaccatatgcttacgagatcgcatgattttgtgaggaaagatttatcgcttaaggatggacccgcgtttgattagccagttggtagggtaacggcctaccaaagcaacgatcaatagccggcctgagagggtgaacggccacattggaactgagacacggtccaaactcctacgggaggcagcagtggggagtattgcacaatgggcgcaagcctgatgcagcaacgccgcgtgagtgaagaagtatttcggtatgtaaagctctatcgatggggaataaaatgaaggtacccaagtaagaagccccggctaa

SEQ ID NO: 6660 - DNA, 490 bp, unidentified
  misc_feature 1..490: note = Ascusbbf_1815139, encodes 16S rRNA
  source 1..490: mol_type = genomic DNA
agagtttgatcctggctcaggacgaacgctggcggcatgcctaacacacgcaagtcgaacggagtttaaggagcttgctctttaaacttagtggcggacgggtgagtaacgcgtgagcaacttgcctctcggtggggaataatgtactgaaaaggacactaataccgcataacgtatcgggaccgcatgattctgataccaaagatttatcgccgagagatgggctcgcgtccgattagccagttggtggggtagcggcctaccaaagcgacgatcggtagccggactgagaggttgaacggccacattgggactgagacacggcccagactcctacgggaggcagcagtgggggatactgcgcaatgggggaaaccctgacgcagcaatgccgcgtggaggatgaaggtcttcggattgtaaactccttttgtcagggacgaaaatgacggtacctgacgaataagctccggctaactacgtgccagca

SEQ ID NO: 6661 - DNA, 490 bp, unidentified
  misc_feature 1..490: note = Ascusbbf_848160, encodes 16S rRNA
  source 1..490: mol_type = genomic DNA
agagtttgatcatggctcaggacgaacgctggcggcgtgcctaacacatgcaagtcgaacggagctatcgagaatttcggtttgagataacttagtggcggacgggtgagtaacgcgtgagtaacctgcctgaaagagggggataacgttctgaaaagaacgctaataccgcatgacatattgaggtcgcatgactttgatatcaaaggagcaatccgctttcagatggactcgcgtccgattatctagttggcggggtaacggcccaccaaggcgacgatcggtagccggactgagaggttgaacggccacattgggactgagacacggcccagactcctacgggaggcagcagtgggggatattgcgcaatgggggaaaccctgacgcagcaacgccgcgtgaaggacgaaggtcttcggattgtaaacttcttttgttaaggacgaagaaagtgacggtacttaacgaataagctccggctaactac

SEQ ID NO: 6662 - DNA, 490 bp, unidentified
  misc_feature 1..490: note = Ascusbbf_100564, encodes 16S rRNA
  source 1..490: mol_type = genomic DNA
agagtttgatcctggctcagaatgaacgctggcggcatggattaggcatgcaagtcgaacgagaaagcggtttcggccgcgagtaaagtggcgaaagggtgagtagcacgtggggaacctgccccggggaccggaacaagcctgtgaaaacgggtctgagaccggatgccgccccggcccgcatgggccggaggcgaaagattaatcgccccgggatggccccgcgccccattagcttgttggcggggtgacggcccaccaaggctgcgacgggtaggtggtctgagaggatggtcacccacactgggactgagacactgcccagactcctacgggaggctgcagtcgagaatcttccgcaatgggcgcaagcctgacggagcgatgccgcgtgggggaaggaggccctcgggtcgtaaacccctgtcggacgggacgaaatcaatgacggtaccgtccaaggaagccacggctaaccacgtgccagcag

SEQ ID NO: 6663 - DNA, 490 bp, unidentified
  misc_feature 1..490: note = Ascusbbf_30577, encodes 16S rRNA
  source 1..490: mol_type = genomic DNA
agagtttgatcatggctcaggatgaacgctagcggcaggcctaacacatgcaagtcgaggggtagtggttgcttgcaaccatgagaccggcgcacgggtgcgtaacgcgtatgcaacctaccttgtacagggggatagcccagagaaatttggattaataccccatggtaccgatacccggcattggggatcggttaaagctccggcggtacaagatgggcatgcgtcctattagctagtaggtatggtaacggcatacctaggcaacgataggtaggggccctgagagggggatcccccacactggtactgagacacggaccagactcctacgggaggcagcagtgaggaatattggacaatgggcgggagcctgatccagccatgccgcgtgcaggaagactgccctatgggttgtaaactgcttttgtacgggaagaaacaccccctcgtgagggggcttgacggtaccgtaagaataaggatcggc

SEQ ID NO: 6664 - DNA, 490 bp, unidentified
  misc_feature 1..490: note = Ascusbbf_56514, encodes 16S rRNA
  source 1..490: mol_type = genomic DNA
agagtttgatcatggctcagaacgaacgctggcggcgcgtcttaagcatgcaagtcgaacggcaagatagtagcttgctactatcctagagtggcggactggtgagtaacgcgtgggtgatgtaccctttggatggggatagccggtagaaataccgggtaataccgaataagcttgcttctttaaagtgaagtaaggaaagcagtgtatgctgcaccgaaggaacggcccgcgtactattagctagttggtgaggtaacggctcaccaaggcgacgatagttatccggcctaagagggtgaacggacacattgggactgagatacggcccagactcctacgggaggcagcagctaagaatattccgcaatggaggaaactctgacggagcgacgccgcgtggatgatgaaggccggaaggttgtaaagtccttttaagtgagaagaataaacagtataggtaatgatactgagatgacggtaacacttg

SEQ ID NO: 6665 - DNA, 490 bp, unidentified
  misc_feature 1..490: note = Ascusbbf_86544, encodes 16S rRNA
  source 1..490: mol_type = genomic DNA
agagtttgatcatggctcaggatgaacgctggcggcgtgcctaacacatgcaagtcgaacggagtgtagacgctgtgcgaagaagtgcttgcacggattcaaacttgtttacacttagtggcggacgggtgagtaacgcgtggaaaacctgcctcatacagggggataacaggaagaaattcctgctaataccgcatgagcgcacactgtcgcatggcagagtgtgaaaagatttatcggtatgagatggttccgcgtctgattagccagttggcggggtaacggcccaccaaagcgacgatcagtagccggcctgagagggcggacggccacattgggactgagacacggcccagactcctacgggaggcagcagtgggggatattgcacaatggaggcaactctgatgcagcgacgccgcgtgggtgaagaagttattcgtaatgtaaagccctatcagcagggaagataatgacggtacctgactaa

SEQ ID NO: 6666 - DNA, 490 bp, unidentified
  misc_feature 1..490: note = Ascusbbf_70243, encodes 16S rRNA
  source 1..490: mol_type = genomic DNA
agagtttgatcctggctcaggatgaacgctggcggcgtgcttaacacatgcaagtcgaacggaacagaagttttcggatttctgtttagtggcggacgggtgagtaacgcgtgggtaacctgcctcaaactgggggataacggttggaaacgaccgctaataccgcataagcccacagtgccgcatggcacagagggaaaagatttatcggtttgagatggacccgcgtctgattagccagttggtggggtaacggcctaccaaagcaacgatcagtagccgacctgagagggtgatcggccacattgggactgagacacggcccaaactcctacgggaggcagcagtggggaatattgcgcaatgggggaaaccctgacgcagcaacgccgcgtgagtgaggaagtatttcggtatgtaaagctctatcagcggggacgaagatgacggtacccgcagaagaagtcccggctaactacgtgccagcagc

SEQ ID NO: 6667 - DNA, 490 bp, unidentified
  misc_feature 1..490: note = Ascusbbf_179679, encodes 16S rRNA
  source 1..490: mol_type = genomic DNA
agagtttgatcatggctcaggatgaacgctggcggcgtgcttaacacatgcaagtcgaacgaagcatttactgccgattttttcggaaagaagcggtttatgactgagtggcggacgggtgagtaacgcgtgggcaacctgcccttaaccgggggacaacagttggaaacggctgctaataccgcataagcgcacagtgtcgcatggcacagtgtgaaaaactccggtggttaaggatgggcccgcgttggattaggtagttggggcggtaacggcgcaccaagccgacgatccatagccgacctgagagggtgaccggccacattgggactgagacacggcccagactcctacgggaggcagcagtggggaatattgcacaatgggggaaaccctgatgcagcgacgccgcgtgagtgaagaagtatttcggtatgtaaagctctatcagcagggaagaagatgacggtacctgcacaagaagccccgg

SEQ ID NO: 6668 - DNA, 490 bp, unidentified
  misc_feature 1..490: note = Ascusbbf_70528, encodes 16S rRNA
  source 1..490: mol_type = genomic DNA
agagtttgatcatggctcaggatgaacgctggcggcgtgcctaacacatgcaagtcgagcgggaaacgctcaagcagagattcgtcgaagcgagagcgtggatagcggcggacgggtgagtaacgcgtaggtaacctgccttaggctgagggatagcccggggaaacctggattaataccacataacgcgggggagtcacatggccccctcgccaaagatttatcggcctgagatggacctgcgtctgattagatagttggtgaggtaacggcccaccaagtcaacgatcagtagccgacctgagagggtgatcggccacattggaactgagacacggtccaaactcctacgggaggcagcagtggggaatattgcacaatgggggaaaccctgatgcagcaacgccgcgtgagcgaagaaggtcttcggattgtaaagctctgtccttggggacgaaagatgacggtacccaaggaggaagccccggct

SEQ ID NO: 6669 - DNA, 490 bp, unidentified
  misc_feature 1..490: note = Ascusbbf_596048, encodes 16S rRNA
  source 1..490: mol_type = genomic DNA
agagtttgatcctggctcagaatgaacgttggcggcgtggattaggcatgcaagtcgagcggcaaggtttttttcggaagaccctagagcggcggaagggataggaacatatggatacatgcctcctaggcctggatagcgtctggaaacgggcgataatacaggatgaggtcttcggaccaaaggtgcgattcccctaagagattggtccatatcctattagctagttggtaaggtaacggcttaccaaggcgatgatgggtacggggcgtgagagcgcgaccccgatcactgggactgagacactgcccagacgcctacgggcggctgcagtcgagaatcttcggcaatggacgcaagtctgaccgagcgacgccgcgtgtatgacgaaggtcttcggattgtaaaatactgtcgatagggcggaagtttagaggggtactcccttctatttgacctatcttttgaggaaggacgggctaagttcgtg

SEQ ID NO: 6670 - DNA, 490 bp, unidentified
  misc_feature 1..490: note = Ascusbbf_552981, encodes 16S rRNA
  source 1..490: mol_type = genomic DNA
agagtttgatcatggctcaggacgaacgctggcggcgtgcctaacacatgcaagtcgagcggggataccgggaacagcggcttcggccaacgggaacggtattccagcggcggacgggtgagtaacgcgtgaacaatctgtcccggacagggggataacacttggaaacaggtgctaataccgcataagaccacagggtcccatgaccgaggggtcaaaggagcaatccggttcggggtgagttcgcgtctgattagctggttggtgaggtaacggcccaccaaggcgacgatcagtagccgacctgagagggtgatcggccacattggaactgagacacggtccaaactcctacgggaggcagcagtgggaatattgggcaatgggcgcaagcctgacccagcaacgccgcgtgagggaagaaggttttcggattgtaaacctctgtccttggtgacgaaggaagtgacggtagccaaggaggaagccc

SEQ ID NO: 6671 - DNA, 490 bp, unidentified
  misc_feature 1..490: note = Ascusbbf_1401674, encodes 16S rRNA
  source 1..490: mol_type = genomic DNA
agagtttgatcctggctcaggacaaacgctggcggcgtgcctaacacatgcaagtcgaacggggtgtgttccttcgggagcacacttagtggcggacgggtgagtaacgcgtgagcaacctgcccttcagtgggggacaacagctggaaacggctgctaataccgcatgacgtattcccggggcatcccggggataccaaagatttattgctgaaggatgggctcgcgtctgattagatagttggcggggcaacggcccaccaagtcgacgatcagtagccggactgagaggttgaacggccacattgggactgagatacggcccagactcctacgggaggcagcagtggggaatattgggcaatgggcgaaagcctgacccagcaacgccgcgtgaaggaagaaggccttcgggttgtaaacttcttttaagagggacgaagggttgacggtacctcttgaataagccacggctaactacgtgccagca

SEQ ID NO: 6672 - DNA, 490 bp, unidentified
  misc_feature 1..490: note = Ascusbbf_63743, encodes 16S rRNA
  source 1..490: mol_type = genomic DNA
agagtttgatcatggctcaggacgaacgctggcggcatgcctaacacatgcaagtcgaacggacgagggtagcaatacccgagttagtggcgaacgggtgagtaacacgtgagcaacctgccctacacactgggatagcagttggaaacgactgataataccggatgagaccacagtcccgcatgggacaggggtcaaagtgaattagcggtgtaggatgggctcgcgtccaattagctagttggtgaggtaacggcccaccaaggcgacgattggtagccgacttgagagagtgatcggccacactggaactgagacacggtccagactcctacgggaggcagcagtggggaatattgggcaatggaggaaactcttacccagcaatgccgcgtgagggatggaggtcctatggattgtaaacctctttgattagggaaaaagaaagtgatggtacctaaagaacaagccccggctaactatgtgccag

SEQ ID NO: 6673 - DNA, 490 bp, unidentified
  misc_feature 1..490: note = Ascusbbf_426582, encodes 16S rRNA
  source 1..490: mol_type = genomic DNA
agagtttgatcctggctcaggatgaacgctggcggcgtgcttaacacatgcaagtcgaacggagtacatcaaccgagaccttcgggtctcacctgttgtacttagtggcggacgggtgagtaacgcgtgagcaaccaaccttttgcagagggataacaattagaaatgattgctaataccacataagaccacagcatcgcatggtgcagtgggaaaagttccggcggcaagagacgggctcgcgttcgattagctggatggcggggtaacggcccaccatggcgacgatcgatagccggactgagaggtcgaccggccacattgggactgagacacggcccagactcctacgggaggcagcagtggggaatattgcacaatgggggaaaccctgatgcagcgacgccgcgtgagtgatgacgtatttcggtatgtaaagctcttttagcagggaagaagatgacggtacctgcagaaacagccccggcta

SEQ ID NO: 6674 - DNA, 490 bp, unidentified
  misc_feature 1..490: note = Ascusbbf_36204, encodes 16S rRNA
  source 1..490: mol_type = genomic DNA
agagtttgatcctggctcaggacgaacgctggcggcgtgcttaacacatgcaagtcgagcggagacatataacggaaggcttcggccggaagatatatgttttagcggcggacgggtgagtaacgcgtgagcaacctgtccttcacagggggataagataccgaaaggtgttctaataccgcataagaccacagagccgcatggcagaggggtcaaaggagcaatccggtgaagggtgggctcgcgtccgattagatagttggtgaggtaacggcccaccaagtcgacgatcggtagccgacctgagagggtgatcggccacattgggactgagacacggcccagactcctacgggaggcagcagtggggaatattgggcaatgggggaaaccctgacccagcaacgccgcgtggaggaagaaggtcttcggatcgtaaactcctgtcctaagagacgagcaggagacggtatcttaggaggaagccccg

SEQ ID NO: 6675 - DNA, 490 bp, unidentified
  misc_feature 1..490: note = Ascusbbf_103367, encodes 16S rRNA
  source 1..490: mol_type = genomic DNA
agagtttgatcatggctcaggatgaacgctggcggcgtgcttaacacatgcaagtcgaacggggtacccatgattgaggcttcggctgattgattggactacctagtggcggacgggtgcgtaacacgtgagtaacctgcccttcagagggggacaacagttggaaacgactgctaataccgcataacgtacagctatcgcatggtagttgtaccaaagattttatcgctgaaggatggactcgcggccgattagctagttggtgaggtaatggctcaccaaggcgacgatcggtagccggactgagaggttgaccggccacattgggactgagacacggcccagactcctacgggaggcagcagtggggaatattgcacaatgggcgcaagcctgatgcagcaacgccgcgttaaggatgaaggttttcggatcgtaaacttatgtcttcagggacgaaatttgacggtacctgaggaggaagccacgg

SEQ ID NO: 6676 - DNA, 490 bp, unidentified
  misc_feature 1..490: note = Ascusbbf_124368, encodes 16S rRNA
  source 1..490: mol_type = genomic DNA
agagtttgatcctggctcaggatgaacgctggcggcgtgcttaacacatgcaagtcgaacggagtttataggacagattccttcgggatgaagacttataaacttagtggcggacgggtgagtaacgcgtgggtaacctgccttacacagggggatagcagttggaaacgactggtaataccgcataccttgcattagttgcatgacttatgcaagaaagatttatcggtgtaagatggacccgcgtctgattagctagttggtacggtaacggcgtaccaaggcgacgatcagtagccggcctgagagggtgaacggccacattgggactgagatacggcccagactcctacgggaggcagcagtggggaatattgcacaatggaggcaactctgatgcagcgacgccgcgtgagcgaagaagtatttcggtatgtaaagctctatcagtagggaagataatgacggtacctacagaagaagccccggc

SEQ ID NO: 6677 - DNA, 490 bp, unidentified
  misc_feature 1..490: note = Ascusbbf_111895, encodes 16S rRNA
  source 1..490: mol_type = genomic DNA
agagtttgatcatggctcaggatgaacgctggcggcgtgcctaacacatgcaagtcgaacgaggtattttgattggagattcgtcaaagatctttataccgagtggcggatgggtgagtaacgcgtggagaacctgcccttatctgggggataacaactggaaacggttgacaataccgcatacgcttccgtggtcgcatgaccgtggaaggaaagatttatcggataaggatggctccgcgtcggattagccagttggcggggtaacggcccaccaaagcgacgatccgtagccggcctgagagggcgaccggccacattgggactgagacacggcccagactcctacgggaggcagcagtgggggatattgcacaatgggggaaaccctgatgcagcgacgccgcgtggaggaagaagtatttcggtatgtaaactcctatcagcagggaagaaaacgacggtacctgactaagaagccccggctaac

SEQ ID NO: 6678 - DNA, 490 bp, unidentified
  misc_feature 1..490: note = Ascusbbf_72947, encodes 16S rRNA
  source 1..490: mol_type = genomic DNA
agagtttgatcctggctcaggatgaacgctagcggcaggcttaacacatgcaagtcgaggggcatcacgagtagcaatacttggtggcgaccggcgcaagggtgcgtaacgcgtgagcaacatgcccgtatcagggggataatccagggaaacttggtctaataccccatagcaattgaaggaggcatcttctttgatttaaagctttggtggatacggattggctcgcgtgacattagctagatggtaaggtaacggcttaccatggctacgatgtctaggggttctgagaggaaggtcccccacactggaactgagacacggtccagactcctacgggaggcagcagtgaggaatattggacaatggatggaaatctgatccagccatgccgcgtgcaggaagacggccctatgggttgtaaactgcttttatatgggagcaataagacctacgagtaggttgatgagagtaccatatgaataagcac

SEQ ID NO: 6679 - DNA, 490 bp, unidentified
  misc_feature 1..490: note = Ascusbbf_80, encodes 16S rRNA
  source 1..490: mol_type = genomic DNA
agagtttgatcatggctcaggatgaacgctggcggcatgcctaacacatgcaagtcgaacggagttgttggtagcttgctatcgacaacttagtggcggacgggtgagtaacgcgtgagtaacctgcctctaagagggggataacgttctgaaaagaacgctaataccgcatataattacgaaatcgcatgattttgtaatgaaaggagcaatccgcttagagatggactcgcgtctgattagcttgatggcggggtaacggcccaccatggcgacgatcagtagccggactgagaggttgaacggccacattgggactgagacacggcccagactcctacgggaggcagcagtgggggatattgcgcaatgggggaaaccctgacgcagcaatgccgcgtgaaggatgaaggttttcggattgtaaacttcttttgttaaggacgataatgacggtacttaacgaataagctccggctaactatgtgcc

SEQ ID NO: 6680 - DNA, 490 bp, unidentified
  misc_feature 1..490: note = Ascusbbf_1581, encodes 16S rRNA
  source 1..490: mol_type = genomic DNA
agagtttgatcatggctcaggatgaacgctagctacaggcttaacacatgcaagtcgagcggaacagcttcggctgtttagcggcagacgggtgagtaacacgtatccaacctttcccttactcgggtatagcctcgggaaactgagagtaatccccgatgttgtgtacgaatagcattttttgcacactaaagatttatcggtaaggggtggggatgcgttccattaggtagtaggcggggcaacggcccacctagccgatgatggataggggttctgagaggaaggtcccccacattggaactgcgacacggtccaaactcctacgggaggcagcagtgaggaatattggtcaatggtcggaagactgaaccagccaagtagcgtgcaggatgacggccctatgggttgtaaactgcttttgtgcgggaataacgtacgccacgtgtggtgtagtgcatgtaccgtacgaataaggatcggctaactc

SEQ ID NO: 6681 - DNA, 490 bp, unidentified
  misc_feature 1..490: note = Ascusbbf_1828119, encodes 16S rRNA
  source 1..490: mol_type = genomic DNA
agagtttgatcctggctcaggatgaacgctggcggcgtgcttaacacatgcaagtcgaacgaagcacctctaatcgaagattgagaaagcttgcttttgattgattcaccttgaggtgactgagtggcggacgggtgagtaacgcgtgggtaacctaccctatacagggggataacagttggaaacgactgctaataccgcataagcgcacagggccgcatggtctagtgtgaaaaactccggtggtataggatggacccgcgtctgattagctagttggtgaggtaacggctcaccaaggcgacgatcagtagccgacctgagagggtgaccggccacattgggactgagacacggcccaaactcctacgggaggcagcagtggggaatattgcgcaatgggcgaaagcctgatgcagcgacgccgcgtgaacgaagaagtatttcggtatgtaaagttctatcagcagggaagaaaaatgacggtacc

SEQ ID NO: 6682 - DNA, 490 bp, unidentified
  misc_feature 1..490: note = Ascusbbf_32376, encodes 16S rRNA
  source 1..490: mol_type = genomic DNA
agagtttgatcatggctcaggatgaacgctggcggcgtgcctaacacatgcaagtcgagcgagaaacctttgattgacacttcggttgatttcaaaggcggaaagcggcggacgggtgagtaacgcgtaggcaacctgccccttgcagagggatagcctcgggaaaccgggattaaaacctcataacaccgaacctacacatgttcgatcggtcaaagatttatcggcaagggatgggcctgcgtctgattagctggttggtggggtaacggcctaccaaggcaatgatcagtagccgacctgagagggtgatcggccacattggaactgagacacggtccaaactcctacgggaggcagcagtggggaatattgcacaatgggcgaaagcctgatgcagcaacgccgcgtgagcgatgaaggcggattcgtcgtaaagctctgtccttggggaagaagaactgacggtacccttggaggaagccccggc

SEQ ID NO: 6683 - DNA, 490 bp, unidentified
  misc_feature 1..490: note = Ascusbbf_97694, encodes 16S rRNA
  source 1..490: mol_type = genomic DNA
agagtttgatcctggctcaggatgaacgctagcgacaggcctaacacatgcaagtcgaggggtagcatgaaagtagcaatacttttgatgacgaccggcgcacgggtgagtaacgcgtatgcaacctacctactacaggggaatagcccgaagaaattcggattaatgccgcataatacaggggcaccgcatggtgatatttgttaaagattaattggtagtagatgggcatgcgttccattagccagttggtgaggtaacggctcaccaaagcaacgatggataggggaactgagaggtttatcccccacactggtactgagacacggaccagactcctacgggaggcagcagtgaggaatattggtcaatgggcgagagcctgaaccagccaagtcgcgtgaaggatgactgccctatgggttgtaaacttcttttgtactggggtaaaaaagaggacgtgtcctttcttgcaagtacagtacgaata

SEQ ID NO: 6684 - DNA, 490 bp, unidentified
  misc_feature 1..490: note = Ascusbbf_1263, encodes 16S rRNA
  source 1..490: mol_type = genomic DNA
agagtttgatcatggctcagaacgaacgctggtggcgtgtcttatacatgcaagtcgagcggtgcagcaatgcatagcggcgaacgggtgagtaacgcgtaagcaatctgccccctgctcgggaatagccgtgccaacgcgcgggtaataccggatatagtggccctggacatccggggttgacaaaagatttatcggcaggggatgagcttgcgtccgattagctagttggcggggcaacggcccaccaaggcgacgatcggtagccggcctgagagggtgatcggccacattgggactgagatacggcccagactcctacgggaggcagcagtagggaatattgcacaatgggggaaaccctgatgcagcaacgccacgtgtgggaagaagcatttcggtgtgtaaaccactgtcgtgagggaataaggctgattttcggatcagttgaatgtacctcgagaggaagcaccggcaaacttcgtgccag

SEQ ID NO: 6685 - DNA, 490 bp, unidentified
  misc_feature 1..490: note = Ascusbbf_509, encodes 16S rRNA
  source 1..490: mol_type = genomic DNA
agagtttgatcatggctcaggacgaacgctggcggcgtgcttcatacatgcaagtcgaacgagaatctgacttcggtcagaggaaagtggcggacgggtgagtaatatgtagagaatctgcccttaagtgggggacaacagttggaaacgactgctaataccgcatatgagcgtagctgagatgctattcttgaaaacttcggtgcttagggatgagtctgcatctgattagctagttggcggtgtaatggaccaccaaggcgacgatcagtagctggtttgagaggatgatcagccacaatgggactgagacacggcccatactcctacgggaggcagcagtagggaattttgcgcaatggggggaaccctgacgcagcaacgccgcgtgattgaataagcccttcggggtgtaaagatctgtcagtggggacgaaacttgacggtacccacagaggaagcatcggctaactccgtgccagcagccgcg

SEQ ID NO: 6686 - DNA, 490 bp, unidentified
  misc_feature 1..490: note = Ascusbbf_8151, encodes 16S rRNA
  source 1..490: mol_type = genomic DNA
agagtttgatcctggctcaggacaaacgctggcggcgtgcctaacacatgcaagtcgaacgaagcactgtggaaagagacttcggtcaattgaaactttgacttagtggcggacgggtgagtaatgcatgagcaacctgccctggagagggggacaacagctggaaacggctgctaataccgcatgatgtcaccggaaggcatcttctggtgaccaaagatttatcgctctgggatgggctcatgtctgattagatagttggcggggcaacggcccaccaagtctgcgatcagtagccggactgagaggttgaacggccacattgggactgagatacggcccagactcctacgggaggcagcagtggggaatattgggcaatgggcgcaagcctgacccagcaacgccgcgtgaaggaagaaggctttcgggttgtaaacttcttttatcagggacgaagaacgtgacggtacctgatgaataagccacg

SEQ ID NO: 6687 - DNA, 490 bp, unidentified
  misc_feature 1..490: note = Ascusbbf_25712, encodes 16S rRNA
  source 1..490: mol_type = genomic DNA
agagtttgatcatggctcaggacgaacgctggcggcgtgcttaacacatgcaagtcgagcggaaaggccccttcgggggtactcgagcggcgaacgggtgagtaacacgtgagcaacctgcccctgacttcgggataagcctgggaaaccgggtctaataccggatatgacgcgtcaccgcatggtgtgcgtgtggaaagattttttggttggggttgggctcgcggcctatcagcttgttggtggggtgatggcctaccaaggcgacgacgggtaaccggcctgagagggcgaccggtcacactgggactgagacacggcccagactcctacgggaggcagcagtgggaatattgcgcaatgggcggaagcctgacgcagcgacgccgcgtgggggatgacggccttcgggttgtaaacctctttcagcaccgacgaagcggaagtgacggtaggtgcagaagaagcgccggctaactacgtgccagca

SEQ ID NO: 6688 - DNA, 490 bp, unidentified
  misc_feature 1..490: note = Ascusbbf_101725, encodes 16S rRNA
  source 1..490: mol_type = genomic DNA
agagtttgatcatggctcaggacgaacgctggcggcgtgcctaatacatgcaagtcgagcgagccgaactaattgattaccttcgggtatgaagttagggaagcgagcggcggatgggtgagtaacacgtgggtaacctaccctatagtctgggataccacttggaaacaggtgctaataccggataaaaggagagatcacatgatttctttttgaaaggcggcgtaagctgtcgctaaaggatggacccgcggtgcattagctagttggtaaggtaacggcttaccaaggcaacgatgcatagccgagttgagagactgatcggccacattgggactgagacacggcccaaactcctacgggaggcagcagtagggaatcttccacaatggacgcaagtctgatggagcaacgccgcgtgagtgaagaaggttttcggatcgtaaagctctgttgttggtgaagaaagatagtgagagtaactgctcat

SEQ ID NO: 6689 - DNA, 490 bp, unidentified
  misc_feature 1..490: note = Ascusbbf_1332114, encodes 16S rRNA
  source 1..490: mol_type = genomic DNA
agagtttgatcctggctcagaacgaacgctggcggcgcgtcttaagcatgcaagtcggacggcaagatgccttcgggcatcctagagtggcgaacgggtgagtaacacgtaagtgatctgccctgcagttggggatagcctgtggaaacacagggtaataccggatgagatgacaatgattgaactatgtcaagaaagtggctacggccacgctgcgggatgagcttgcggctcattagctagttgggggtgtaacggaccaccaaggcgacgatgagtagccggcctgagagggtgaacggccacattgggactgagacacggcccagacacctacgggaggcagcagctaagaatattccgcaatggggggaaccctgacggagcgacgccgcgtgaacgatgaaggcagagatgttgtaaagttcttttattgctgaagaataaggggggcagggaatggcctcctgatgacgttaggcgatgaata

SEQ ID NO: 6690 - DNA, 490 bp, unidentified
  misc_feature 1..490: note = Ascusbbf_107547, encodes 16S rRNA
  source 1..490: mol_type = genomic DNA
agagtttgatcctggctcaggacgaacgctggcggcgtgcttcatacatgcaagtcgaacggggtccattcagtggcaacactgaggaagatctagtggcgaacgggtgagtaacacgtgaggaacctatcccggtctctggaataacaagtggaaacatttgctaataccggatgccgtcgctatctctcatggggtggtgacgaaagatttatcggattgggcgggcctcgcggcctatcagcttgttggtggggtaatggcctaccaaggcatcgacgggtagctggtctgagaggatgatcagccacactgggactgagacacggcccagactcctacgggaggcagcagtagggaatcttgcgcaatgggcgaaagcctgacgcagcaacgccgcgtgcgggaagaaggctctcgggttgtaaaccgctttcagtaggaacgaatttgacggtacctgcagaagaaggtgcggccaactacgtgc

SEQ ID NO: 6691 - DNA, 490 bp, unidentified
  misc_feature 1..490: note = Ascusbbf_304588, encodes 16S rRNA
  source 1..490: mol_type = genomic DNA
agagtttgatcatggctcagaacgaacgctggcggcgtgcctaacacatgcaagtcgagcgcgaaaggggcaacctgagtagagcggcggacgggtgcgtaacacgtgggtaatctgccctggagattcagataaccactcgaaagggtggctaatacgaaataagcccacggcctcttcggaggctgagggaaaaggtggcctctacatgtaagctaccactccaggatgagcccgcggcccatcagctagttggcggggtaatggcccaccaaggcaacgacgggtagctggtctgagaggacgatcagccacactgggactgagacacggcccagactcctacgggaggcagcagtggggaattttgcgcaatggacgaaagtctgacgcagcaacgccgcgtgtgtgatgaaggttttcggatcgtaaagcactttcgtccgggaagaaaaagcaggtgctaatcagcctgtattgacggtaccgg

SEQ ID NO: 6692 - DNA, 490 bp, unidentified
  misc_feature 1..490: note = Ascusbbf_1490159, encodes 16S rRNA
  source 1..490: mol_type = genomic DNA
agagtttgatcctggctcaggatgaacgctggcggcgtgcctaatacatgcaagtcgaacgggtgcagcaatgcattagtggcgaacgggtgagtaacacgttggtgacctgccccaaagatgggaatatcacctggaaacgggtggcaaaaccgaataagcttggctcagtcagaaaaggccaagtaaaagcgaaagctactttgggaggggcctgcggcccatcagttagttggtgagggtaacggcccaccaagacgaagacgggtaggggacctgagagggtggtcccccacaatggagctgaaacacggtccatacacctgcgggtggcagcagtagggaacattgcttaatgggcgaaagcctgaagcagcaacgccgcgtggacgaaggaggccttcgggttgtaaagtccttttacgagggaagaggaaggacggtacctcgtgaataagtctcggctaactacgtgccagcagccgcggta

SEQ ID NO: 6693 - DNA, 490 bp, unidentified
  misc_feature 1..490: note = Ascusbbf_617640, encodes 16S rRNA
  source 1..490: mol_type = genomic DNA
agagtttgatcctggctcagaacgaacgctggcggcgtggattaggcatgcaagtcgtacgcgaaagtttccttcggggaataagtagagtggcgaactggtgagtacaaggtgactaacctgcccttgagtgggggataacttcgggaaaccggagctaataccgcatggcttcttacttccttggaggtaagaataaagcagtgatgcgctcaaggatggggtcaccccccattagcttgttggtagggtaatggcctaccaaggctgcgatgggtagctggactgagaggttgaccagccacactgggactgagatacggcccagactcctacggggggcagcagtctagaggcttcgacaatgcccgaaagggtgatcgagcgacgccgcgtgtgggatgaaggttttcggattgtaaaccacttttgtttgggaagaaggcttgtatcgtgaatatgagattgacggtaccaaacgaataagccc

SEQ ID NO: 6694 - DNA, 470 bp, unidentified
  misc_feature 1..470: note = Ascusbbf_96664, encodes 16S rRNA
  source 1..470: mol_type = genomic DNA
agagtttgatcctggctcagaacgaacgctggcggcaggcctaacacatgcaagtcgaacgcccccttcggggggagtggcgcacgggtgagtaacgcgtgggaacctaccccgaggtccgggacaaccgctggaaacggcggctaataccggatgtgtcctgagggagaaagatttatcgccttgggaggggcccgcgtccgattaggtagttggtgtggtaacggcgcaccaagccatcgatcggtagctggtctgagaggatgatcagccacactgggactgagacacggcccagactcctacgggaggcagcagtggggaatattggacaatgggcgcaagcctgatccagccatgccgcgtgagtgaagaaggccttagggttgtaaagctctttcacgggcgacgatgatgacggtagcccgagaagaagccccggctaactccgtgccagcagccgcggtaat

SEQ ID NO: 6695 - DNA, 354 bp, unidentified
  misc_feature 1..354: note = Ascusbbf_1901765, encodes 16S rRNA
  source 1..354: mol_type = genomic DNA
agagtttgatcctggctcaggatcaacgctggcggcgtgcctaatgcatgcaagtcgaacggggtggccttcgggtcacttacgtggcggacgggtgaggaacacgtgggcaacctgcctgatggagggggataaccgctggaaacagtgggtaataccgcataatcctggatctcgagtgggagatatagggaaagtcgcaagacgccgacagaggggcctgcgtccgattagctagacggtggggtaacggcctaccgtggcagtgatcggtagctggtttgagaggatgatcagccacacggggactgagacacggccccgactcctacgggagccagcagccgcggtaat

SEQ ID NO: 6696 - DNA, 490 bp, unidentified
  misc_feature 1..490: note = Ascusbbf_438175, encodes 16S rRNA
  source 1..490: mol_type = genomic DNA
agagtttgatcatggctcaggacgaacgctggcggcgtgcttaacacatgcaagttgaacgagaattttttaattaatttcttcggaaagagattaaagaaggaaagtagcgaacgggtgagtaacacgtgagaaacctgcctttcacaaagggatagcctcgggaaaccgggattaataccttatgacacttagatatcgcatgataattaagttaaagaatttcggtgaaagatggtctcgcgtctgattagctagttggtaaggtaacggcttaccaaggcgacgatcagtagccggattgagaggttgaacggccacactggaactgagacacggtccagactcctacgggaggcagcagtggggaattttgcacaatggggggaaccctgatgcagcgacgccgcgtgaacgatgaaggtcttcggattgtaaagttctgtccttagtgaagataatgactgtaactaagaagcaagccctggct

SEQ ID NO: 6697 - DNA, 470 bp, unidentified
  misc_feature 1..470: note = Ascusbbf_98712, encodes 16S rRNA
  source 1..470: mol_type = genomic DNA
agagtttgatcctggctcagaacgaacgctggcggcaggcttaacacatgcaagtcgaacggtctcttcggaggcagtggcagacgggtgagtaacgcgtgggaacatacctttcggtacggaacaacagttggaaacgactgctaataccgtatacgccctgagggggaaagatttatcgccgagagattggcccgcgttggattagctagttggtggggtaatggcctaccaaggcgacgatccatagctggtctgagaggatgatcagccacactgggactgagacacggcccagactcctacgggaggcagcagtggggaatattggacaatgggcgcaagcctgatccagccatgccgcgtgagtgatgaaggccttagggttgtaaagctctttcgccggtgaagataatgacggtaaccggtaaagaagccccggctaacttcgtgccagcagccgcggtaat

SEQ ID NO: 6698 - DNA, 490 bp, unidentified
  misc_feature 1..490: note = Ascusbbf_462120, encodes 16S rRNA
  source 1..490: mol_type = genomic DNA
agagtttgatcctggctcaggatgaacgctagcgataggcttaacacatgcaagtcgaggggcatcattattttagcttgctaagatagatggcgaccggcgcacgggtgcgtaacgcgtatgcaacctacctgtaattaggggataacccggtgaaagtcggactaataccctatatgctcttagagtcacatgatttatagaggaaagatttattgattacagatgggcatgcgtcccattagctggttggtaaggtaacggcttaccaaggcgacgatgggtagggggactgagaggttgaccccccacactggtactgagacacggaccagactcctacgggaggcagcagtgaggaatattggtcaatgggcgagagcctgaaccagccaagtcgcgtgaaggaagacggttctatggattgtaaacttcttttgtagaggagtaatggcggttacgcgtaaccgagatgcaagtactctacgaa

SEQ ID NO: 6699 - DNA, 470 bp, unidentified
  misc_feature 1..470: note = Ascusbbf_144723, encodes 16S rRNA
  source 1..470: mol_type = genomic DNA
agagtttgatcatggctcagaacgaacgctggcggcaggcctaacacatgcaagtcgaacgctctagcaatagagagtggcgcacgggtgagtaacacgtgggaatctacctgatagtctgggataacagcgggaaactgctgctaataccggatacgcccttagggggaaagatttatcgctatcagatgagcccgcgttagattagctagttggtgaggtaatggctcaccaaggctccgatctatagccggtctgagaggacgatcggccacactgggactgagacacggcccagactcctacgggaggcagcagtggggaatattgggcaatgggcgcaagcctgacccagccatgccgcgtgtgtgatgaaggccttagggttgtaaagcacttttagtagtgaagatgatgactgtagctacagaaaaagccccggctaacttcgtgccagcagccgcggtaat

SEQ ID NO: 6700 - DNA, 490 bp, unidentified
  misc_feature 1..490: note = Ascusbbf_377012, encodes 16S rRNA
  source 1..490: mol_type = genomic DNA
agagtttgatcctggctcaggatgaacgctggcggcgtgcttaacacatgcaagtcgaacgtgattgcacatctagcaatagaggtgcatgaaagtggcgaacgggtgagtaacacgtggataacctatcctgaagtgggggataacgacgggaaactgtcgctaataccgcatgagcttgatggcctgggaatgtcgtcaaggaaagctttagtgctttaggaggggtctgcgtccgattagctagatggtggggtaacggcctaccatggcgatgatcggtagctggtctgagaggatggtcagccacacgggaactgagatacggtcccgactcctacggggggcagcagtgaggaatattgcacaatgggggaaaccctgatgcagcaacgccgcgtggaggaagaaggccttcgggttgtaaactccttttccaggggacgagagaggacggtaccctgggaataagtcacggctaactacgtgc

SEQ ID NO: 6701 - DNA, 490 bp, unidentified
  misc_feature 1..490: note = Ascusbbf_294227, encodes 16S rRNA
  source 1..490: mol_type = genomic DNA
agagtttgatcatggctcaggatgaacgctagcggcaggcctaacacatgcaagtcgaggggtaacagaggagcttgcttctgctgacgaccggcgcacgggtgagtaacgcgtatgcaacctaccttttacagggagatagcccggagaaatccggattaatatcccatacgattgttaagacacaagtctctacaaagaaagcttcggcggtattagatgggcatgcgtcctattagttagttggtaaggtaacggcttaccaagactccgataggtagggggcctgagagggtgaccccccacactggtactgagacacggaccagactcctacgggaggcagcagtgaggaatattggtcaatggaggcaactctgaaccagccatgccgcgtgcaggaagaatgccctatgggttgtaaactgcttttatttaggaagaatccccagtacgtgtactgggttgacggtactaaacgaataaggac

SEQ ID NO: 6702 - DNA, 490 bp, unidentified
  misc_feature 1..490: note = Ascusbbf_1776505, encodes 16S rRNA
  source 1..490: mol_type = genomic DNA
agagtttgatcatggctcaggacgaacgctggcggcgtgcctaatacatgcaagtcgaacgagtgacccctcggtggcaacaccttgggcgatctagtggcgaacgggtgagtaacacgtgaggaacctgccccgaagactgggataaccagaggaaactctggctaataccggatgccctcaccggatcgcatgatctggtgaggaaatggattccgcttcgggagggtctcgcggcctatcagcttgttggtggggtaacggcctaccaaggcgtcgacgggtagctggtctgagaggacgatcagccacactgggactgagacacggcccagactcctacgggaggcagcagtagggaatcttgcgcaatgggcgaaagcctgacgcagcaacgccgcgtgcgggatgaaggccttcgggttgtaaaccgctttcagcagggacgaaaatgacggtacctgcagaagaagccccggccaactacgtg

SEQ ID NO: 6703 - DNA, 490 bp, unidentified
  misc_feature 1..490: note = Ascusbbf_690605, encodes 16S rRNA
  source 1..490: mol_type = genomic DNA
agagtttgatcctggctcaggatgaacgctagcggcaggcctaatacatgcaagtcgaacggaacaattttttcggagattgtttagtggcgcacgggtgagtaacgcgtacacgacctacctataagagggggatagccttgggaaactgagagtaataccgcatatgatttcgagattgcatgattttgaaattaaagctgaggcgcttatagatgggtgtgcgttctattagctagttggtagtgtaacggactaccaaggcgacgatagatagggggcgtgagagcgtggccccccaaacgggtactgagacacggacccgactcctacgggaggcagcagtaaggaatattggacaatggacgcaagtctgatccagccatgccgcgtgcaggatgaaggccctctgggttgtaaactgcttttatcagggaagaaaacccgatacgtgtatcggattgccggtacctgaggaataagcaccggc

SEQ ID NO: 6704 - DNA, 490 bp, unidentified
  misc_feature 1..490: note = Ascusbbf_286093, encodes 16S rRNA
  source 1..490: mol_type = genomic DNA
agagtttgatcctggctcagattgaacgctagcggaatgctttacacatgcaagtcgaacggcagcgcggacttcggtctggcggcgagtggcgaacgggtgagtaatgcatcggaatgtacccagtagcgggggataactacgcgaaagcgtggctaataccgcatacgccctacgggggaaagggggggatcttcggacctctcactattggagcagccgatgtcagattagctagttggtggggtaaaggcctaccaaggcaacgatctgtagctggtttgagaggacgaccagccacactgggactgagacacggcccagactcctacgggaggcagcagtggggaattttggacaatgggggaaaccctgatccagccattccgcgtgtgtgatgaaggccttcgggttgtaaagcacttttggcaggaaagaaatgactcgggccaataccccgggttgatgacggtacctgcagaataagcac

SEQ ID NO: 6705 - DNA, 490 bp, unidentified
  misc_feature 1..490: note = Ascusbbf_711651, encodes 16S rRNA
  source 1..490: mol_type = genomic DNA
agagtttgatcctggctcaggatcaacgctggcggcgtgcctaatgcatgcaagtcgaacggggtctccttcgggggactaacgtggcggacgggtgaggaacacgtggccaatctgcccaccggcagggggtagcccgcggaaacgcggggtaattccgtatacgctggctcgtcttgtgggatgagtcaggaaaggaccttcgggttcaccggtggaggaggctgcgaccgattagctagctggtggggtaacggcctaccagggcgatgatcggtagctggtctgagaggatgatcagccacacggggactgagacacggccccgactcctacgggaggcagcagcaaggaattttccgcaatgggcgaaagcctgacggagcaacgccgcgtgcgggatgacgcgtttcggcgtgtaaaccgctgttcgtggggacgaagcactgacggtacccacggaggaaggcccggctaactacgtgccagc

SEQ ID NO: 6706 - DNA, 490 bp, unidentified
  misc_feature 1..490: note = Ascusbbf_1606975, encodes 16S rRNA
  source 1..490: mol_type = genomic DNA
agagtttgatcctggctcaggatgaacgctagcggcaggcctaatacatgcaagtcgaacgggatccagggcgtagcttgctacaaactggtgagagtggcgcacgggtgcgtaacgcgtgagcaacctacccatatcagggggatagcccgaagaaattcggattaacaccgcatgacacagcgactcggcatcgagatgttgttaaatatttataggatatggatgggctcgcgtgacattagctagttggtaaggtaacggcttaccaaggctacgatgtctaggggctctgagaggagaatcccccacactggtactgagacacggaccagactcctacgggaggcggcagtaaggaatattggtcaatggagggaactctgaaccagccatgccgcgtgcaggatgactgccctatgggttgtaaactgcttttgtacgggaataaacactggtacgtgtaccagcttgaatgtaccgtaagaat

SEQ ID NO: 6707 - DNA, 366 bp, unidentified
  misc_feature 1..366: note = Ascusbbf_438397, encodes 16S rRNA
  source 1..366: mol_type = genomic DNA
agagtttgatcctggctcaggacgaacgctggcggcgtgcctaatacatgcaagtcgaacgaactctggtattgattggtgcttgcatcatgatttacatttgagtgagtggcgaactggtgagtaacacacgggaaacctgcccagaagcgggggataacacctggaaacagatgctaataccgcataacaacttggaccgcatggtccaagtttgaaagatggcttcggctatcacttttggatggtcccgcggcgtattagctagatggtggggtaacggctcaccatggcaatgatacgtagccgacctgagagggtaatcggccacattgggactgagacacggccagcagccgcggtaat

SEQ ID NO: 6708 - DNA, 478 bp, unidentified
  misc_feature 1..478: note = Ascusbbf_584144, encodes 16S rRNA
  source 1..478: mol_type = genomic DNA
agagtttgatcatggctcaggatgaacgctggcggcgtgcctaatacatgcaagtcgagcggtaaggcccttcggggtacacgagcggcggacgggtgagtaacacgtaagaacataccccaaactgagggataactgctcgaaagagtagctaataccgcatgtgctcttcggagtaaagcttcggcggtttgggaatggcttgcgtccgattagctagttggtaaggtaatggcttaccaaggcgacgatcggtagctggtctgagaggatgatcagccacactgggactgagacacggcccagactcctacgggaggcagcagtagggaattttccacaatgggggcaaccctgatggagcaacgccgcgtgcaggatgaatgccttcgggttgtaaactgcttttgtctgtgacgaatatgacggtagcagacgaataaggatcggctaactacgtgccagcagccgcggtaat

SEQ ID NO: 6709 - DNA, 490 bp, unidentified
  misc_feature 1..490: note = Ascusbbf_423792, encodes 16S rRNA
  source 1..490: mol_type = genomic DNA
agagtttgatcctggctcagaacgaacgctggcggcaggcttaacacatgcaagtcgagcgccccgcaaggggagcggcagacgggtgagtaacgcgtgggaatctacccatctctacggaataactcagggaaacttgtgctaataccgtatacgcccttcgggggaaagatttatcggagatggatgagcccgcgttggattagctagttggtgaggtaaaggctcaccaaggcgacgatccatagctggtctgagaggatgatcagccacactgggactgagacacggcccagactcctacgggaggcagcagtggggaatattcgtcaatgggggaaaccctgaacgagcaatgccgcgtgaaggatgaaggtcctatggattgtaaacttctgttgttagggaagaacgactggtataggaaatgatatcagtgtgacggtacctttccagaaagctccggctaactacgtgccagcagccgcgg

SEQ ID NO: 6710 - DNA, 488 bp, unidentified
  misc_feature 1..488: note = Ascusbbf_1447032, encodes 16S rRNA
  source 1..488: mol_type = genomic DNA
agagtttgatcatggctcagggctaacgctggcggcgcgcctaacacatgcaagtcgaacgaacccttcggggttagtggcagacgggtgagtaatgcgtggataatgtgcctttttgctggggataccgtttcgaaaggaacgttaataccgaatgtgctggacgcatcgcatggtgtgtttagtaaactgttagggtgaaaagagcagtccgcgttctatcagcttgttggtggggtaatggcctaccaaggctacgacggataactggtctgagaggatgatcagtcacactggaactgagacacggtccagactcctacgggaggcagcagtgaggaatcttgcacaatgggcgaaagcctgatgcagcgacgccgcgtgagggactaaggccttcgggttgtaaacctctgtcagtagggaagaagtatgacggtacctactgaggaagcatcggctaactacgtgccagcagccgcggtaat

SEQ ID NO: 6711 - DNA, 490 bp, unidentified
  misc_feature 1..490: note = Ascusbbf_1075052, encodes 16S rRNA
  source 1..490: mol_type = genomic DNA
agagtttgatcatggctcaggatgaacgctggcagtgtgccttagacatgcaagtcggacggggcgctttcttttatcctttcggggtgattggttggttgcctagtggcgtacgggtgagtaacacgtgggtgacctgccctcaagtgggggataactctgggaaactggggctaatcccgcatgtgctggcacttttttggggtgttagtaaaggaactttgttctgcttggggatgggtccgcggcctatcagcttgttggtgtggtaatggcgcaccaaggctttgacaggtagccggcctgagagggtgttcggccacaggggcactgagatacgggccccactcctacgggaggcagcagttaggaattttcgacaatgggggaaaccctgatcgagcgacactgcgtgagggatgaaggtcttcggatcgtaaacttctaatagagggacgatggtgacggtacctcttgattagcaccggct

SEQ ID NO: 6712 - DNA, 490 bp, unidentified
  misc_feature 1..490: note = Ascusbbf_1015163, encodes 16S rRNA
  source 1..490: mol_type = genomic DNA
agagtttgatcctggctcaggatgaacgctggcggcgtgcctaacacatgcaagtggagcgacgaacccggacttgtccgggggcaaagccgcgaacgggtgagtaacacgtgggtcacctgccccaatgaccgggacaactcgaggaaactcgagctaataccggatgtgctcttcggaggaaaggaagcttcggcctccgcattgggatgggcccacggcgcattagcttgttggtgaggtaaaagctcaccaaggcgacgatgcgtagctggtctgagaggacgatcagccacactggaactgaggtacggtccagactcctacgggaggcagcagtggggaatcttgcgcaatgcacgaaagtgtgacgcagcaacgccgcgtgggggaagaagatcttaggatcgtaaacccctttcagttgggacgagggttacacggtgaatagccggcgtaactgacggtaccttcagaagaagccccggct

SEQ ID NO: 6713 - DNA, 470 bp, unidentified
  misc_feature 1..470: note = Ascusbbf_1321840, encodes 16S rRNA
  source 1..470: mol_type = genomic DNA
agagtttgatcatggctcagaacgaacgctggcggcatgcctaacacatgcaagtcgaacgagaccttcgggtctagtggcgcacgggtgcgtaacgcgtgggaacctgcctttaggttcggaatacctcaccgacaggtgtgctaataccgaataatgtcttcggaccaaagatttatcgcctttagatgggccctcgttggcttagctagttggtggggtaacggcctaccaaggcgacgatccatagctggtcttagaggatgatccgcaacactgggactgagacacggcccagactccgacgggaggcagcagtggggaagattggacaatgggcgaaagcctgatccagcaatgccgcgtgagggatgaaggccttagggttgtaaagctcttttaccagggatgataatgacagtacctggagaataagctccggctaactccgtgccagcagccgcggtaat

SEQ ID NO: 6714 - DNA, 490 bp, unidentified
  misc_feature 1..490: note = Ascusbbf_1542161, encodes 16S rRNA
  source 1..490: mol_type = genomic DNA
agagtttgatcctggctcaggacgaacgctggcggcgtgcctaacacatgcaagtcgagcgaggtccaaccagtggcaacactggagaagacctagcggcgaacgggtgagtaacgcgtgaggaacttgccccggagttcgggataactcgaggaaactcgagctaataccgaatgccctcatctgatcgcatggtcggatgaggaaagattcatcgctccgggagagcctcgcggcctatcagctagttggtggggtaacggcctaccaaggcatcgacgggtagctggtctgagaggacgatcagccacactgggactgagacacggcccagactcctacgggaggcagcagtggggaatcttgcgcaatgggcgaaagcctgacgcagcaacgccgcgtgcgggatgacggccttcgggttgtaaaccgcattcagcagggacgaaattgacggtacctgcagaagaagccccggccaactacgtgc

SEQ ID NO: 6715 - DNA, 490 bp, unidentified
  misc_feature 1..490: note = Ascusbbf_1623667, encodes 16S rRNA
  source 1..490: mol_type = genomic DNA
agagtttgatcctggctcaggataaacgctagcggcaggcctaacacatgcaagtcgaggggcagcgtaaggagtagcaatactttttgacggcgaccggcgcacgggtgcgtaacgcgtatgcaacctaccgttcacagggggatagtcagaggaaactttgaataataccgcataaaacaattgatcggcatcgattgattgttaaggtggcgacacggtgaacgatgggcatgcgttcgattagatagttggtgaggtaacggctcaccaagtcgacgatcgatagggggtctgagaggattatcccccacactggtactgagatacggaccagactcctacgggaggcagcagtgaggaatattgggcaatgggcggaagcctgacccagccatgccgcgtgcaggaagacggccctatgggttgtaaactgcttttaaacaggaagaataagatctacgtgtaggtcgatgacggtactgtaaga

SEQ ID NO: 6716 - DNA, 490 bp, unidentified
  misc_feature 1..490: note = Ascusbbf_1063076, encodes 16S rRNA
  source 1..490: mol_type = genomic DNA
agagtttgatcatggctcaggatgaacgctagcgggaggcctaacacatgcaagccgagcggtagagattcttcggaatcttgagagcggcgcacgggtgcggaacacgtgtgcaacctgcctttatctgggagatagcctttcgaaaggaagattaataccccataatataagaaacggcatcgttttttattgaaagctccggcggatagagatgggcacgcgcaagattagatagttggtgaggtaacggctcaccaagtcaatgatctttagggggcctgagagggtgatcccccacactggtactgagacacggaccagactcctacgggaggcagcagtgaggaatattggacaatgggtgagagcctgatccagccatcccgcgtgaaggacgacggccctatgggttgtaaacttcttttgtatagggataaacctactcacgtgtgagtagctgaaggtactatacgaataagcaccggct

SEQ ID NO: 6717 - DNA, 490 bp, unidentified
  misc_feature 1..490: note = Ascusbbf_88663, encodes 16S rRNA
  source 1..490: mol_type = genomic DNA
agagtttgatcatggctcaggatgaacgctagcggcaggcctaatacatgcaagtcgaacgcgattgcggtgcttgcaccgcatgaaagtggcgtacgggtgcgtaacgcgtgagcaacctaccgttgtctgggggatagcccggagaaatccggattaataccgcataatattagagagcagcattgctttctgatcaaacatttatgggacagcgatgggctcgcgtgacattagctagttggagtggtaacggcacaccaaggcgacgatgtctaggggatctgagaggatgaccccccacactgggactgagacacggcccagactcctacgggaggcagcagtaaggaatattggtcaatggaggcaactctgaaccagccatgccgcgtgcaggaagaatgccctctgggttgtaaactgcttttatcagggaataaacccttctacgtgtaggaggctgaatgtacctgaggaataaggatcg

SEQ ID NO: 6718 - DNA, 490 bp, unidentified
  misc_feature 1..490: note = Ascusbbf_350795, encodes 16S rRNA
  source 1..490: mol_type = genomic DNA
agagtttgatcatggctcaggacgaacgctggcggcgcgcctaacacatgcaagtcgaacggaactagtgaccggagggtagatggttctatcttgcgatcactagttcagtggcggacgggtgagtaaaacatgagcaacctgcctaatagagggggatagcttttggaaacagaagataataccgcatacatcagagatttcgcatgaagtttttggaaaaggagcaatccgctattagatgggctcatgtccgattagcttgttggtggggtaatggcttaccaaggctacgatcggtagccgtactgagaggttcaacggccacattgggactgagacacggcccagactcctacgggaggcagcagtgaggaatattgcgcaatggaggaaactctgacgcagcgacgccgcgtgaaggaagacggtcttcggattgtaaacttctgtcttcagggaagaaaaaaatgacggtacctggggagga

SEQ ID NO: 6719 - DNA, 490 bp, unidentified
  misc_feature 1..490: note = Ascusbbf_318108, encodes 16S rRNA
  source 1..490: mol_type = genomic DNA
agagtttgatcctggctcagaatgaacgttggcggcgtggattaggcatgcaagtcgagcggcaaggtttttttcgtaagattgaaaccctagagcggcggaagggataggacaatatagatacgtgcctcttagcccaggatagcgtctggaaacgggcgataatactggatgaggtcttaggatcaaaggtgagattccgctaagagatcggtctatagcctattagttagttggtagggtaacggcctaccaagacgatgatgggtacggggcgtgagagcgcgaccccgatcactgggactgagacactgcccagacgcctacgggcggctgcagtcgagaatcttcggcaatggacgcaagtctgaccgagcgacgccgcgtgtatgatgaaggccttcgggttgtaaagtactgtcgattgggcggaagttagagggggtaatctctctcttttgacctatcatttgaggaaggacgggctaag

SEQ ID NO: 6720 - DNA, 490 bp, unidentified
  misc_feature 1..490: note = Ascusbbf_14471, encodes 16S rRNA
  source 1..490: mol_type = genomic DNA
agagtttgatcatggctcaggattaacgctggcggcgtgcctaatacatgcaagtcgaatggtggtagcaatacaaaccatggcgaacgggtgagtaacacgtaggtaacctatcttagcgacgaggataaccgttggaaacgacggataatactggataggacatcaaaaagggcatccttagatgtttaaaggagcaatccacggtaagaggggcctgcggcgcattagctagttggtggggtaaaggcctaccaaggccaagatgcgtagccggactgagaggttaaacggccacaatggaactgagaacggtccatactcctacgggaggcagcagtagggaattttcggcaatgggcgaaagcctgaccgagcaacgccgcgtgaacgaagaagttattcgtaatgtaaagttcttttattagggaagaaaaaacaaattgacggtacctaatgaataagctccggctaactacgtgccagcagc

SEQ ID NO: 6721 - DNA, 490 bp, unidentified
  misc_feature 1..490: note = Ascusbbf_9650, encodes 16S rRNA
  source 1..490: mol_type = genomic DNA
agagtttgatcatggctcaggacgaacgctggcggcacgcttaacacatgcaagtcgaacgagcgaaaggtgcttgcacctctagctagtggcggacgggtgagtaacacgtgagcaatctgcctttcggtgggggataccaattggaaacgattgttaataccccataacataacgaagccgcatgactttgttatcaaagatttattgccgaaagatgagctcgcgtctgattaggtagttggtgaggtaacggctcaccaagccgacgatcagtagccggactgagaggttgaacggccacattgggactgagacacggcccagactcctacgggaggcagcagtggggaatattgcacaatgggcgaaagcctgatgcagcgatgccgcgtgagggaagaaggttttaggattgtaaacctctgtcttcggggacgataatgacggtacccgaggaggaagctccggctaactacgtgccagcagc

SEQ ID NO: 6722 - DNA, 490 bp, unidentified
  misc_feature 1..490: note = Ascusbbf_15655, encodes 16S rRNA
  source 1..490: mol_type = genomic DNA
agagtttgatcatggctcaggacgaacgctggcggcgtgcctaacacatgcaagtcgagcggagccaaccgacggaagccttcgggcggaagatggtgaagcttagcggcggacgggtgagtaacgcgtgagtaacctgcctgtaagagggggataacacagagaaatttgtgctaataccgcatacggagcaattgtcgcatgacagaagcttaaaagatttatcgcttacagatggactcgcgttcgattagatagttggtaaggtaacggcttaccaagtcaacgatcgatagccgaactgagaggttgatcggccacattgggactgagacacggcccagactcctacgggaggcagcagtgggggatattgcgcaatggggggaaccctgacgcagcaacgccgcgtgaaggaagaaggccttcgggttgtaaacttttgtcgcaagggaagaagaaagtgacggtaccttgtgagaaagccacg

SEQ ID NO: 6723 - DNA, 490 bp, unidentified
  misc_feature 1..490: note = Ascusbbf_57043, encodes 16S rRNA
  source 1..490: mol_type = genomic DNA
agagtttgatcatggctcaggatgaacgctagcggcaggcttaacacatgcaagtcgcggggcagcgcgggtagcaatacctggcggcgaccggcggaagggtgcgtaacgcgtgagcaacatgcccgtatcagggggataaccgatggaaacgtcgcctaataccccataacaacgagggccgcatggcccatgtttgaaagttacggcggatacggattggctcgcgtgacattagctagttggcggggtaacggcccaccaaggctacgatgtctaggggttctgagaggaaggtcccccacactggaactgagacacggtccagactcctacgggaggcagcagtgaggaatattggtcaatgggcgcaagcctgaaccagccatgccgcgtgcaggaatgaggccctatgggtcgtaaactgcttttgctgcggagcaataagtgctacgtgtaacacgatgagagtacgcagcgaataagcatc

SEQ ID NO: 6724 - DNA, 490 bp, unidentified
  misc_feature 1..490: note = Ascusbbf_50498, encodes 16S rRNA
  source 1..490: mol_type = genomic DNA
agagtttgatcctggctcagattgaacgctggcggcaggcttaatacatgcaagtcgaacggtaacagtgaggaagcaattccttagctgacgagtggcggacgggtgagtaaagtttgggaatctgtcctgcagagggggatagcagctggaaacggctgataaaaccgcgtacgctctgaggaggaaagtgacgggatctagaaatagaccgtcagctgtagggtgagcccaaatgggattagctagtaggggtggtaaaggcacacctaggcgatgatctctagctggttttagcggatgaccagcaacattggaactgagacacggtccaaactcctacgggaggcagcagtagggaatattgcacaatggagggaactctgatgcagccatgccgcgtgtgtgaagaaggccttcgggttgtaaagcacttttattatagagaagagtaggtgtaataataagacacttatgagatgtaacataa

SEQ ID NO: 6725 - DNA, 488 bp, unidentified
  misc_feature 1..488: note = Ascusbbf_3063, encodes 16S rRNA
  source 1..488: mol_type = genomic DNA
agagtttgatcctggctcagaacgaacgctggcggcaggcttaacacatgcaagttgaacgggatttgcttggtgcttgcactgagcgatgagagtagcgcactggtgagtaacacgtgggaacatgccttttggtgggggacaacagagggaaacttctgctaataccgcataagccctaagggggaaagatttattgccgaaagattggcccgcggaagattaggtagttggtggggtaaaggcctaccaagccgacgatctatagctggtctgagaggacgaacagccacattggaactgagacacggtccagactcctacgggaggcagcagtgaggaatattgggcaatggaggaaactctgacccagccatgccgcgtgagtgaagaaggttttcgaattgtaaagctctttcggatacgaggatgatgacggtagtatctaaagaagccccggcaaacttcgtgccagcagccgcggtaat

SEQ ID NO: 6726 - DNA, 490 bp, unidentified
  misc_feature 1..490: note = Ascusbbf_9270, encodes 16S rRNA
  source 1..490: mol_type = genomic DNA
agagtttgatcctggctcaggatgaacgctagcggcaggcctaacacatgcaagtcgaggggtagagttagcttgctaacttgagaccggcgcacgggtgcgtaacgcgtatgcaatctaccttatactgagggatagcccggagaaatccggattaataccttatagtatattaaagtggcatcattttgatattaaagatttattggtataagatgagcatgcgtcccattagttagttggtgtggtaacggcacaccaagacgatgatgggtaggggtcctgagagggagatcccccacactggtactgagacacggaccagactcctacgggaggcagcagtgaggaatattggtcaatggaggcaactctgaaccagccatgccgcgtgcaggatgacggtcctatggattgtaaactgcttttgtacaggaagaaaacatactacgtgtagtaaattgacggtactgtaagaataaggatcggc

SEQ ID NO: 6727 - DNA, 490 bp, unidentified
  misc_feature 1..490: note = Ascusbbf_50464, encodes 16S rRNA
  source 1..490: mol_type = genomic DNA
agagtttgatcctggctcaggatgaacgctagctacaggcttaacacatgcaagtcgcggggcatcatggggggtagcaatacttcctgatggcgaccggcggatgggtgagtaacgcgtatccaacctggccctatctcggggacagcccctcgaaagagggattaatacccgatgtttccatgtttccgcatgttttcatggacaaaggcatttgccggatagggatggggatgcgtctgattaggttgttggcggggtaacggcccaccaaaccttcgatcagtaggggttctgagaggaaggccccccacactgggactgagacacggcccagactcctacgggaggcagcagtgaggaatattggtcaatggccgtaaggctgaaccagccaagtagcgtgagggattacggccctacgggtcttaaacctcttttgttggggagcaaccggcgccactagtggcgtcctgcgagtacccttcga

SEQ ID NO: 6728 - DNA, 490 bp, unidentified
  misc_feature 1..490: note = Ascusbbf_803616, encodes 16S rRNA
  source 1..490: mol_type = genomic DNA
agagtttgatcatggctcagaacgaacgctggtggcgtgtcttatacatgcaagtcgagcggtgcagcaatgcatagcggcgaacgggtgagtaacgcgtaagcaatctgccccatgctcgggaatagccgtgccaacgcgcggataataccggataccgtggccccctgcatagggggttgacaaaagatttatcggcatgggatgagcttgcgtccgattagctagttggcggggcaacggcccaccaaggcgacgatcggtagccggcctgagagggtgatcggccacgttgggactgagatacggcccagactcctacgggaggcagcagtagggaatattgcacaatgggggaaaccctgatgcagcaacgccacgtgtgggaagaagcatttcggtgtgtaaaccactgtcgtgagggaataaggcattttttcggagatgttgaatgtacctcgagaggaagcaccggcaaacttcgtgccag

SEQ ID NO: 6729 - DNA, 490 bp, unidentified
  misc_feature 1..490: note = Ascusbbf_26418, encodes 16S rRNA
  source 1..490: mol_type = genomic DNA
agagtttgatcctggctcaggataaacgctggcggcgcgcataacacatgcaagtcgaacgagaaacttggcttcggtcagggatctagtggcggacgggtgagtaacacgtggacaacttgtcttgtagagggggatagccggaagaaattccgattaataccgcataatgtgatagtgttgcatgacattatcaagaaagatgcaaatcgctacaagagaggtctgcgtctgattagctagttggagtggtaatggcacaccaaggcaacgatcagtagccggtttgagagaatgaacggccacattgggactgagatacggcccagactcctacgggaggcagcagtggggaatattgcgcaatgggggaaaccctgacgcagcgacgccgtgtaagggaagaaggttttcggatcgtaaacctatatcgattgtgaaaagtaaggatggtagcaaagtaagaagccccggctaactacgtgccagc

SEQ ID NO: 6730 - DNA, 490 bp, unidentified
  misc_feature 1..490: note = Ascusbbf_123663, encodes 16S rRNA
  source 1..490: mol_type = genomic DNA
agagtttgatcctggctcaggatgaacgctagcgataggccttacacatgcaagtcgaggggcagcacaaagaaagtagcaatacttttttggtggcgaccggcgcacgggtgagtaacgcgtatgcaacctacctactactttgggatagctcgttgaaagacgaattaataccttataaaacaggggctccgcatggagatatttgttaaagatttattggtagtagatgggcatgcgttccattagttagttggtgaggtaacggctcaccaagacaacgatggataggggaactgagaggtttgtcccccacactggaactgagacacggtccagactcctacgggaggcagcagtgaggaatattggtcaatggaggcaactctgaaccagccaagtcgcgtgaaggatgacggccctacgggttgtaaacttcttttttaagggaataaagtgagccacgtgtggctttttgcatgtaccttac

SEQ ID NO: 6731 - DNA, 490 bp, unidentified
  misc_feature 1..490: note = Ascusbbf_51738, encodes 16S rRNA
  source 1..490: mol_type = genomic DNA
agagtttgatcctggctcagaacgaacgctggcggcgcgttttaagcatgcaagtcgagcggtaagccggagcaatccggcctagagcggcggacgggtgagtaacacgtggataatctggcctacagtttgggatagcctggtgaaagccaggataataccggatacgacagttttaacagaagttgagattgggaaaggggctaaggcctcgctgaaggatgagtccgcgtcccattagctggatggtagggtaaaggcctaccatggcgatgatgggtagccggcctaagagggtgaacggccacattgggactgagatacggcccagactcctacgggaggcagcagctaagaatcttccgcaatggtcgaaagactgacggagcgacgccgcgtgaatgatgaaggccgtgaggttgtaaagttcttttctggagggagaataagtgcatcagggaatgggtgcatgatgacgtgaatccaggaa

SEQ ID NO: 6732 - DNA, 490 bp, unidentified
  misc_feature 1..490: note = Ascusbbf_48087, encodes 16S rRNA
  source 1..490: mol_type = genomic DNA
agagtttgatcatggctcaggatgaacgctggcggcgtgcataacacattcaagtcgaacggagttgcgatagaaagaggcttcggccaatggaaattgtaacttagtggcggacgggtgagtaacgcgtgagcaacctacctatgcgcgggggacaacagttggaaacgactgctaataccgcataaagtatattaaaggcatctttgatataccaaagagattcgcgtatagatgggctcgcgtccgattagatagttggtgaggtaacggcccaccaagtcgacgatcggtagccggactgagaggttgaacggccacattggaactgagagacggtccagactcctacgggaggcagcagtggggaatattgggcaatgggcgaaagcctgacccagcgacgccgcgtgagtgaagaaggtcttcggattgtaaagcttagttattggggaagaagaaagtgacggtacccaaagagaaagccacg

SEQ ID NO: 6733 - DNA, 490 bp, unidentified
  misc_feature 1..490: note = Ascusbbf_1053376, encodes 16S rRNA
  source 1..490: mol_type = genomic DNA
agagtttgatcatggctcaggatggacgctagctacaggcttaacacatgcaagtcggacggcagtagcaatactgtagtggcgaacgggtgagtaacacgttggtgacctgccccaaagatgggaatatcacctggaaacgggtggcaaaaccgaataagctcgggtgagttagagaaactcgagtaaaagagcgatctaccttgggaggggcctgcggcccatcagttagttggtgagggtaacggcccaccaagacgaagacgggtaggggacctgagagggtggtcccccacaatggaactgaaacacggtccatacacctgcgggtggcagcagtagggaatattgcttaatgggcgaaagcctgaagcagcaacgccgcgtggacgaaggaggccttcgggtcgtaaagtccttttataggggaaaaggaaggatggtaccctatgaataagtctcggctaactacgtgccagcagccgcggta

SEQ ID NO: 6734 - DNA, 490 bp, unidentified
  misc_feature 1..490: note = Ascusbbf_34442, encodes 16S rRNA
  source 1..490: mol_type = genomic DNA
agagtttgatcatggctcagattgaacgctggcggcatgctttacacatgcaagtcggacggcagcgagggggtgcttgcacttctgtcggcgagtggcgaacgggtgagtaatgcattggaacgtaccgagtagtgggggataactgtccgaaaggatagctaataccgcatacgacctgagggtgaaagcgggggactttttaagcctcgcgctatttgagcggccaatgtctgattagctagttggtggggtaaaggcctaccaaggcgacgatcagtagcgggtctgagaggatgatccgccacactgggactgagacacggcccagactcctacgggaggcagcagtggggaattttggacaatgggcgaaagcctgatccagccatgccgcgtgtctgaagaaggccttcgggttgtaaaggacttttgtacgggaagaaaaggcgattgctaatatcagttgctgatgacggtaccgtaagaa

SEQ ID NO: 6735 - DNA, 490 bp, unidentified
  misc_feature 1..490: note = Ascusbbf_362559, encodes 16S rRNA
  source 1..490: mol_type = genomic DNA
agagtttgatcatggctcagaacgaacgctggcggcgcgtcttaagcatgcaagtcgagcggcaagataccttcgggtatcctagagcggcggactggtgagtaacacgtagatgacgcacccttctgacggggatagcctgtggaaacacagggtaataccggataagcccgtggggattggaagcttacggggaaaggaactattgttccgcgggaggagcggtctgcggcccatcagctggttggcggggtaaaggcccaccaaggcaatgacgggtatccggcctgagagggtgagcggacacattgggactgagatacggcccagactcctacgggaggcagcagctaagaatattccgcaatgcacgaaagtgtgacggagcgacgccgcgtggacgatgaaggccggaaggttgcagagtcctttggcgcctgaggaaagggcgggggaatggaaagcccctgaattgactgtagggcgagaa

SEQ ID NO: 6736 - DNA, 490 bp, unidentified
  misc_feature 1..490: note = Ascusbbf_28960, encodes 16S rRNA
  source 1..490: mol_type = genomic DNA
agagtttgatcatggctcaggacgaacgctggcggcgtgcctaacacatgcaagtcgagcgagaatctttagtcagattccttcgggatgaagagtaaagaggaaagcggcggacgggtgagtaacgcgtgagtaacctgccttcaagagggggacaacagctggaaacggctgctaataccgcataacattacgaaatcgcatggttttgtaatcaaagatttatcgcttgaagatggactcgcgtctgattagatagttggtggggtaacggcctaccaagtcgacgatcagtagccgaactgagaggttgatcggccacattgggactgagacacggcccagactcctacgggaggcagcagtgggggatattgcgcaatgggggcaaccctgacgcagcaacgccgcgtgaaggaagaaggccttcgggttgtaaacttctttaagtgtggaagaagatgacggtacacacagaataagccacggc

SEQ ID NO: 6737 - DNA, 490 bp, unidentified
  misc_feature 1..490: note = Ascusbbf_60216, encodes 16S rRNA
  source 1..490: mol_type = genomic DNA
agagtttgatcctggctcagagttaacgctggcatcgtgcataacacatgcaagtcgaacgggacttaatttgtagcttgctatagattaagtttagtggcagacgggtgagtaatgtataagaaacctacctctgagtggggaataacggtccgaaaggatcgctaataccccataacatatttggaaggcatctttcaaatatcaaagatttatcgcttggagatggtcttatattctatcagcttgttggcagtgtaacggactaccaaggctacgacggatagccggcctgaaagggcgaccggccacaagggcactgagacacgggccctactcctacgggaggcagcagtggggaattttggacaatgggcgcaagcctgatccagcaacgatgcgtggaggacgaaggttctcggattgtaaactccttttgtgagggaagaaaaaaatgacggtacctcacgaataagccacggctaactac

SEQ ID NO: 6738 - DNA, 490 bp, unidentified
  misc_feature 1..490: note = Ascusbbf_33384, encodes 16S rRNA
  source 1..490: mol_type = genomic DNA
agagtttgatcatggctcaggacgaacgctggcggcgtgcctaacacatgcaagtcgaacgggacttaatattggaagttttcggatggaagagattaagtctagtggcggacgggtgagtaacgcgtgagtaacctgcctttcagagggggataacgtactgaaaaggacgctaataccgcataacgtatgagcatcgcatgatgcatataccaaaggagcaatccgctgaaagatggactcgcgtccgattagctagttggtgagataaaggcccaccaaggcgacgatcggtagccggactgagaggttgaacggccacattgggactgagacacggcccagactcctacgggaggcagcagtgggggatattgcgcaatgggggaaaccctgacgcagcaacgccgcgtgaaggaagacggttttcggattgtaaacttcttttgtcagggacgaagaatgacggtacctgacgaataagctccgg

SEQ ID NO: 6739 - DNA, 490 bp, unidentified
  misc_feature 1..490: note = Ascusbbf_1766236, encodes 16S rRNA
  source 1..490: mol_type = genomic DNA
agagtttgatcctggctcaggatgaacgctggcggcgtgcttaacacattcaagtcgaacgagcgagaggaagcaattccttttgctagtggcggacgggtgagtaacgcgtgagcaacctacctttgtgagtgggataacaactggaaacgattgctaataccgcataacgtatagatattgcatgataactataccaaagaaattcgcacaaagatgggctcgcgtcccattagacagttggtgaggtaacggcccaccaaacctacgatgggtagccggactgagaggttgaacggccacattggaactgagaaacggtccagactcctacgggaggcagcagtggggaatattgggcaatggacgaaagtctgacccagcgacgccgcgtgaaggaagaaggtcttcggattgtaaactttagtcaacagggaagaagaaagtgacggtacctgtagaggaagccacggctaactacgtgccagca

SEQ ID NO: 6740 - DNA, 490 bp, unidentified
  misc_feature 1..490: note = Ascusbbf_1093817, encodes 16S rRNA
  source 1..490: mol_type = genomic DNA
agagtttgatcctggctcaggatgaacgctggcggcgtgcctaatacatgcaagtcgaacgggtgtagcaatgcaccagtggcgaacgggtgagtaacacgttggtgacctgccccaaagatgggaatatcacctggaaacgggtggcaaaaccgaataagcttgagggagccagacatcctcaagtaaaagcgtaagctactttgggaggggcctgcggcccatcagttagttggtgagggtaacggcccaccaagacgaagacggataggggacctgagagggtggtcccccacaatggaactgaaacacggtccatacacctgcgggtggcagcagtagggaatattgcttaatgggcgaaagcctgaagcagcaacgccgcgtggacgatggaggccttcgggtcgtaaagtccttttatgggggaaaaggaaggatggcccccatgaataagtctcggctaactacgtgccagcagccgcggtaa

SEQ ID NO: 6741 - DNA, 490 bp, unidentified
  misc_feature 1..490: note = Ascusbbf_53917, encodes 16S rRNA
  source 1..490: mol_type = genomic DNA
agagtttgatcctggctcagattgaacgctggcggcatgctttacacatgcaagtcgagcggcagcacgggtgcttgcacctggtggcgagcggcgaacgggtgagtaatgcatcggaacgtacccatgtggtgggggataaccactcgaaagagtggctaataccgcatacgccctgagggggaaagcgggggacttcttcgggagcctcgcgccattggagcggccgatgtcggattagctagtaggtggggtaaaggctcacctaggcgacgatccgtagctggtctgagaggatgatcagccacatcgggactgagacacggcccgaactcctacgggaggcagcagtggggaattttggacaatgggggcaaccctgatccagccatgccgcgtgagtgaagaaggccttcgggttgtaaagctctttcagtcgggaagaaacggggctctctaacatagggtcttaatgacggtaccgacagaa

SEQ ID NO: 6742 - DNA, 490 bp, unidentified
  misc_feature 1..490: note = Ascusbbf_715300, encodes 16S rRNA
  source 1..490: mol_type = genomic DNA
agagtttgatcctggctcaggatgaacgctggcggcatgcctaacacatgcaagtcgagcggagatagtctgaagcctagcgatttctatcttagcggcggatgggtgagtaacacgtgggtaacctgccctgtactggggaataacagttggaaacgactgttaatgccgcatatgcgcacgctgccgcatggcagtgggcggaaagatttatcggtacaggatgggcccgcgccggattaactagttggcggggtaacggcccaccaaggtgatgatccgtagccgacctgagagggtgaccggccacattggaactgagacacggcccaaactcctacgggaggcagcagtgggggatattgcacaacgggggaaaccctgatgcagcgacgccgcgtgaaggatgacgtatctcggtatgtaaacttctatcagcggggaagaagatgacggtacccgactaagaagccccggctaactacgtgcc

SEQ ID NO: 6743 - DNA, 490 bp, unidentified
  misc_feature 1..490: note = Ascusbbf_79362, encodes 16S rRNA
  source 1..490: mol_type = genomic DNA
agagtttgatcatggctcaggatgaacgctagcggcaggcttaacacatgcaagtcgaggggcagcggggagtagcaatactctgccggcgaccggcggaagggtgcgtaacgcgtgagcaacctgcccgtaaccgggacataaccgatggaaacgtcgcctaatttcccataacaacagggtcggcatcgaccttgtttgaaagcttcggtggttacggatgggctcgcgagacattagctggttggtagggtaacggcctaccaaggctacgatgtctaggggttctgagaggaaggtcccccacactggaactgagacacggtccagactcctacgggaggcagcagtgaggaatattggtcaatgggcggaagcctgaaccagccatgccgcgtgcaggaataaggccctatgggtcgtaaactgcttttgtgcgggagcaataagggctacgtgtagcctgatgagagtaccgtacgaataagca

SEQ ID NO: 6744 - DNA, 490 bp, unidentified
  misc_feature 1..490: note = Ascusbbf_115411, encodes 16S rRNA
  source 1..490: mol_type = genomic DNA
agagtttgatcctggctcaggatgaacgctagctacaggcttaacacatgcaagtcgcggggcagcatggaggttgcttgcaacctctgatggcgaccggcgcacgggtgcgtaacgcgtatccaacctgccccttactctggaatagcccggcgaaagtcggattaatgccggatgttgtcagacgaggacatctgaatctgaccaaaggcccgaaagggttggtaagggatggggatgcgtacgattaggtagacggcggggtaacggcccaccgtgccaatgatcgttaggggttctgagaggaaggtcccccacactggtactgagacacggaccagactcctacgggaggcagcagtgaggaatattggtcaatgggcgcgagcctgaaccagccaagtagcgtgcaggatgactgccctatgggttgtaaactgcttttatgcggggataaagtgacgtacgtgtacgttattgtaggtaccgc

SEQ ID NO: 6745 - DNA, 490 bp, unidentified
  misc_feature 1..490: note = Ascusbbf_132873, encodes 16S rRNA
  source 1..490: mol_type = genomic DNA
agagtttgatcatggctcaggatgaacgctagcggcaggcctaatacatgcaagtcgaggggtaacaggggagcttgctcctgctgacgaccggcaaacgggtgaggaacacgtacacaaccttccttctagtggaggatagcccagggaaacttggattaatactccgtaagatgttagggaggcatctcccagacattatagtagcgatacgctagaagacgggtgtgcgtctgattaggtagttggcggggtaacggcccaccaagccgacgatcagtaactggtgtgagagcacgaccagtcacacgggcactgagacacgggcccgactcctacgggaggcagcagtaaggaatattggtcaatggacgaaagtctgaaccagccatgccgcgtgaaggatgaaggtcctctggattgtaaacttcttttatatgggacgaaaaaagggttttctaactctactgacggtaccatatgaataagc

SEQ ID NO: 6746 - DNA, 482 bp, unidentified
  misc_feature 1..482: note = Ascusbbf_1502377, encodes 16S rRNA
  source 1..482: mol_type = genomic DNA
agagtttgatcatggctcagaacgaacgctggcggcacgcttaacacatgcaagtcggacgggaagaagttagtttactaatggaatctagtggcggactggtgagtataatacaggaatatgcccttaggtaggggatagctttgggaaactggaggtaataccgtataaggtcgagagaggaaagcagagatgcgcctgaggattagcctgtatctgattaggaagttggtggggtaaaggcctaccaatccggggatcagtagctgttctgagaggaagatcagccacattgggactgagatacggcccagactcctacgggaggcagcagtggggaatattggacaatggggggaaccctgatccagcgatgccgcgtgaatgaagaaggttttcggattgtaaagttcttttcttagggaagatgatgacggtacctgaggaataagcaccggcaaactctgtgccagcagcgcgat

SEQ ID NO: 6747 - DNA, 490 bp, unidentified
  misc_feature 1..490: note = Ascusbbf_106279, encodes 16S rRNA
  source 1..490: mol_type = genomic DNA
agagtttgatcatggctcaggatgaacgctggcggcgtgcttaacacatgcaagtcgaacgggaagacatttaggaagttttcggatggaataaatgaattctagtggcggacgggtgagtaacgcgtaaacaatctgccttagagagggggataacagatagaaatatttgctaataccgcataagaccacagctaggcatctagcaggggtaaaaggagaaatccgctttaagatgagtttgcgtactattagctagttggtgaggtaacggcccaccaaggcgacgatggttagccggcctgagagggtgaacggccacattggaactgagatacggtccagactcctacgggaggcagcagtgaggaatattgggcaatgggggaaaccctgacccagcaacgccgcgtgaaggaagaaggttttaggattgtaaacttctgttatgggggaaaaagaaagtgatggtaccccatgagaaagctac

SEQ ID NO: 6748 - DNA, 490 bp, unidentified
  misc_feature 1..490: note = Ascusbbf_115315, encodes 16S rRNA
  source 1..490: mol_type = genomic DNA
agagtttgatcatggctcagaacgaacgctggcggcgcgtcttaagcatgcaagtcgggcgggaacgggaagcttgcttcccgcgagagcggcggactggtgagtaacgcgtgggtgacgcaccctccggacggggatagcctgcagaaatgcagggtaataccgggtaaggtccgcggcattggaggccgcggaggaaaggagctcaggctccgccgggggaacggcccgcgtcccatcagctggttggcggggaaaaggcccaccaaggcgatgacgggtacccggcctcagagggcggacgggcacattgggactgagatacggcccagactcctacgggaggcagcagctaagaatattccgcaatggggggaaccctgacggagcgacgccgcgtggacgaggaaggccggaaggttgtaaagtccttttccgcgcgaggaaatagcggggcagggaatggtcccgcggtgactgtagcgcggga

SEQ ID NO: 6749 - DNA, 490 bp, unidentified
  misc_feature 1..490: note = Ascusbbf_543777, encodes 16S rRNA
  source 1..490: mol_type = genomic DNA
agagtttgatcctggctcaggacgaacgctggcggcgtgcttaacacatgcaagtcgaacgatgaagtggcacttgtgtcatggattagtggcgaacgggtgagtaacacgtgagtaacctgcccctgacttcgggataagcccgggaaactgggtctaataccggatacgactcctgcccgcatgggtgggggtggaaagttttgtcggttggggatgggctcgcggcctatcagcttgttggtggggtaatggcctaccaaggcgtttacgggtagccggcctgagagggcgaccggccacactgggactgagacacggcccagactcctacgggaggcagcagtggggaatattgcacaatgggcgcaagcctgatgcagcgacgccgcgtgggggatgacggccttcgggttgtaaacctctttcagtagggaacaaggcctccttgatgggggtggagggtacctgcagaagaagtaccggctaa

SEQ ID NO: 6750 - DNA, 490 bp, unidentified
  misc_feature 1..490: note = Ascusbbf_52937, encodes 16S rRNA
  source 1..490: mol_type = genomic DNA
agagtttgatcatggctcaggataaacgctggcggcatgcctaatacatgcaagtcaaacgggtgtacttgtacaccagtggcgaacgggtgagtaatatataggtaacctacccttaagacgaggataaccattggaaacgatggataatactggatagtatacatttccgcatgaagatgtatttaaagacgcttcaaagcgtcacttaaggaggggcctatatcgcattagctagttggtgaggtaacggcccaccaaggcgacgatgcgtaactgtgctgagaggcaaaacagtcacattggaacttagacacggtccaaactcctacgggaggcagcagtagggaattttcggcaatggaggaaactctgaccgagcaatgccgcgtgaacgaagaagatcttcggattgtaaaattctgttattggggaagaacttacttagtaggaaatgactaagtattgacggtacctgattagaaagccc

SEQ ID NO: 6751 - DNA, 490 bp, unidentified
  misc_feature 1..490: note = Ascusbbf_289610, encodes 16S rRNA
  source 1..490: mol_type = genomic DNA
agagtttgatcatggctcaggatgaacgctggcggcgtgcttaacacatgcaagtcgaacgggcagattttgatgaagttttcggatggaatcaaaggaagctagtggcggacgggtgagtaacgcgtaaacaatctgccttagagagggggataacagatagaaatatttgctaataccgcataagaccacagtgaggcatctcacaggggtaaaaggagcaatccgctttaagatgagtttgcgtactattagctagttggtgaggtaacggcccaccaaggcaacgatggttagccggcctgagagggtgaccggccacattggaactgagatacggtccagactcctacgggaggcagcagtgaggaatattgggcaatgggcgaaagcctgacccagcaacgccgcgtgaaggaagaaggttttaggattgtaaacttctgttataggggaaaaagaaagtgatggtaccctatgagaaagctac

SEQ ID NO: 6752 - DNA, 490 bp, unidentified
  misc_feature 1..490: note = Ascusbbf_166452, encodes 16S rRNA
  source 1..490: mol_type = genomic DNA
agagtttgatcatggctcaggatgaacgctggcggcgtgcctaatacatgcaagtcgaacgcacattttcggatgtgagtggcgaacgggtgagtaacacgtaggtaacctgcccataagacgaggataactactggaaacggtagctaatactggataggatattggatcgcatgatttaatatttaaaggtgctctcaagcatcacttatggatggacctgcggcgcattagctagttggtgagataaaagcccaccaaggcgacgatgcgtagccggactgagaggttgaacggccacattgggactgagacacggcccagactcctacgggaggcagcagtagggaattttcggcaatggacgcaagtctgaccgagcaacgccgcgtgagtgatgaagttcttcggaacgtaaaattcttttatttggaaaaaacgtatagcataggaaatgatgttatagtgatggtaccaaatgaataagccc

SEQ ID NO: 6753 - DNA, 490 bp, unidentified
  misc_feature 1..490: note = Ascusbbf_297098, encodes 16S rRNA
  source 1..490: mol_type = genomic DNA
agagtttgatcctggctcaggacgaacgctggcggcgtgcttaaaacatgcaagtcgaacggggttatttgttaacactaagggatgttgtagacattctttagtgttaacaaaaaatctagtggcggacgggtgagtaacacatgagcaacctgcctttcacagggggataacagatagaaatatctgctaataccgcataagaccacgcttgggcatccaagaggggtcaaaggagcgatccggtggaagaggggcttgtggctcattagctagttggcggggtagaggcccaccaaggcgacgatgagtagccgatctgagaggatgaacggccacattggaactgagatacggtccagactcctacgggaggcagcagttaggaatattgggcaatggaggaaactctgacccagcaacgccgcgtgaaggaagaaggttttcggattgtaaacttctgatctaagggaaaaagaaagtgatggta

SEQ ID NO: 6754 - DNA, 490 bp, unidentified
  misc_feature 1..490: note = Ascusbbf_190606, encodes 16S rRNA
  source 1..490: mol_type = genomic DNA
agagtttgatcctggctcaggatgaacgctagcggcaggcttaacacatgcaagtcgaggggcagcgcggaggtagcaatacttctggcggcgaccggcgcaagggtgcgtaacgcgtgagcaacatgcccgtatcagggggataagcgatggaaacgtcgtctaataccgcataacaacttgggaggcatcttccgggtttgaaagattcgtcggatacggattggctcgcgagacattagctagtcggcggggtaacggcccaccgaggctacgatgtctaggggttctgagaggaaggtcccccacactggaactgagacacggtccagactcctacgggaggcagcagtgaggaatattggacaatggccggaaggctgatccagccatgccgcgtgaaggcagacggtcctatggattgtaaacttcttttgtacgggagcaataagtgtcacgtgtgatacgatgagagtaccgtacgaataag

SEQ ID NO: 6755 - DNA, 490 bp, unidentified
  misc_feature 1..490: note = Ascusbbf_47774, encodes 16S rRNA
  source 1..490: mol_type = genomic DNA
agagtttgatcatggctcaggacgaacgctggcggcgtgcttaacacatgcaagtcgaacgagaatctaatgaaagaggcttcggctgatggagttagaggaaagtggcggactggtgagtaacgcgtgagcaacctacctttcagagggggacaacagctggaaacggctgctaataccgcatgaagcatatttttcgcatgggagatatgtcaaagatttatcgctgagagatgggctcgcgtctgattagctagttggtgaggtagaggctcaccaaggcgacgatcagtagccggactgagaggttgaccggccacattgggactgagatacggcccagactcctacgggaggcagcagtggggaatattgggcaatggacggaagtctgacccagcaacgccgcgtgaaggaagaaggccttcgggttgtaaacttctttgacaggggaagagtagaagacggtaccctgaaaacaagccacggc

SEQ ID NO: 6756 - DNA, 490 bp, unidentified
  misc_feature 1..490: note = Ascusbbf_102521, encodes 16S rRNA
  source 1..490: mol_type = genomic DNA
agagtttgatcatggctcaggatgaacgctggcggcgtgcttaatacatgcaagtcgaacgaagcacttttcccggaagccttcgggccgaagggagctgtgacttagtggcggacgggtgagtaacgcgtgggtaacctgcctcatacagggggacaacagctggaaacgactgctaataccccataagcgcacaataccgcatggtgatgtgtgaaaagatttatcggtatgagatggacccgcgtccgattagctagttggcggggtaacggcccaccaaggctgcgatcggtagccgacttgagagagtgatcggccacattgggactgagacacggcccagactcctacgggaggcagcagtagggaatattgcacaatgggggaaaccctgatgcagcgacgccgcgtgagtgatgaagcatttcggtgcgtaaaactctatcagcagggaagacaatgacggtacctgactaagaagccccgg

SEQ ID NO: 6757 - DNA, 490 bp, unidentified
  misc_feature 1..490: note = Ascusbbf_211259, encodes 16S rRNA
  source 1..490: mol_type = genomic DNA
agagtttgatcatggctcaggacgaacgctggcggcgtgcctaatacatgcaagtagaacgctgaagaggagcttgctccttggatgagttgcgaacgggtgagtaacgcgtaggtaacctacctgatagcgggggataactattggaaacgatagctaataccgcataacagttttggtcgcatgactgaagcttgaaaggagcaattgcttcactatcagatggacctgcgttgtattagctagttggtgaggtaacggctcaccaaggcttcgatacatagccgacctgagagggtgatcggccacactgggactgagacacggcccagactcctacgggaggcagcagtagggaatcttcggcaatgggggcaaccctgaccgagcaacgccgcgtgagtgaagaaggttttcggatcgtaaagctctgttgtaagagaagaacgttgagtagagtggaaagttactcaagtgacggtatcttacc

SEQ ID NO: 6758 - DNA, 490 bp, unidentified
  misc_feature 1..490: note = Ascusbbf_308777, encodes 16S rRNA
  source 1..490: mol_type = genomic DNA
agagtttgatcatggctcaggataaacgctggcggcatgcctaatacatgcaagtcaaacgggaagtagcaatacttctagtggcgaacgggtgagtaacacgtgggcaacctgtcctaaagattgggataacagttggaaacgactgataataccgaataataagtcgtctcgcatgagatgattttgaaaggcgcttcaaagcgtcacttcaggaggggcctgcggcgcattagctagttggtgaggtaacggcttaccgaggcgatgatgcgtagctgcgctgagaggcgatacagccacattgggactgagaacggcccaaactcctacgggaggcagcagtagggaattttcggcaatgggggaaaccctgaccgagcaatgccgcgtgaatgatgaaggtcttcggattgtaaagttctgttgttgaggaagaatcgtagctataggaaatgatagttacttgacggtacttaacgagaaagcc

SEQ ID NO: 6759 - DNA, 490 bp, unidentified
  misc_feature 1..490: note = Ascusbbf_1809112, encodes 16S rRNA
  source 1..490: mol_type = genomic DNA
agagtttgatcatggctcaggacgaacgctggcggcgtgcttaacacatgcaagtcgaacggaactgttatggaatgtcttcggacaggaagtttcagtttagtggcgaacgggtgagtaacgcgtgaggaacctgcctttcagagggggacaacagttggaaacgactgctaataccgcataacacagcaacttcgcatgaagatgttgtcaaagattttatcgctgaaagatggcctcgcgtctgattagatagttggtggggtaacggcctaccaagtcgacgatcagtagccggactgggaggttgaacggccacattgggactgagatacggcccagactcctacgggaggcagcagtggggaatattgggcaatgggcgcaagcctgacccagcaacgccgcgtgaaggaagaaggctttcgggttgtaaacttcttttaccagggacgaaggatgtgacggtacctggagaaaaagccacggc

SEQ ID NO: 6760 - DNA, 490 bp, unidentified
  misc_feature 1..490: note = Ascusbbf_113924, encodes 16S rRNA
  source 1..490: mol_type = genomic DNA
agagtttgatcctggctcaggacgaacgctggcggcgtgcttaaaacatgcaagtcgaacgaacgaagttgggtacttgtacccgaccaagttagtggcggacgggtgagtaacgcgtgagcaatctgcctatcacaggggaataacaactggaaacgggtgctaataccgcatatgaccacaacctggcatcaggaaggggtgaaaggagcaatccggtgatagatgagcttgcgtctcattagctagttggtgagatagaggcccaccaaggcaacgatgagtagccgatctgagaggatgaacggccacattggaactgagagacggtccaaactcctacgggaggcagcagttaggaatattgggcaatgggcgaaagcctgacccagcaacgccgcgtgaaggaagaaggtcttcggattgtaaacttctgatctgtggaaaaaataaagtgatggtaccacaggagcaagccacggctaactac

SEQ ID NO: 6761 - DNA, 490 bp, unidentified
  misc_feature 1..490: note = Ascusbbf_198642, encodes 16S rRNA
  source 1..490: mol_type = genomic DNA
agagtttgatcatggctcaggatgaacgctagcgggaggcttaacacatgcaagccgaggggtatttgtagcttgctacagagagaccggcgcacgggtgcgtaacgcgtatgcaacttgccctactgaaagggatagcccagagaaatttggattaataccttataataaatttcattgcatgatgagattttgaaagatttatcgcagtaggataggcatgcgtcagattagctagttggtgaggtaacggctcaccaaggcgatgatctgtagggggcctgagagggtgaacccccacactggtactgagacacggaccagactcctacgggaggcagcagtgaggaatattggacaatgggtgtaagcctgatccagccatcccgcgtgaaggatgacggccttatgggttgtaaacttcttttatatggggataaaccttatcacgtgtgataagctgaaggtaccatatgaataagcaccggct

SEQ ID NO: 6762 - DNA, 490 bp, unidentified
  misc_feature 1..490: note = Ascusbbf_394777, encodes 16S rRNA
  source 1..490: mol_type = genomic DNA
agagtttgatcatggctcaggatgaacgctggcggcgtgcttaacacatgcaagtcgaacggacatgcatcaccgaagcggatctagcttgctaatgaagcttcaccgatgcatgttagtggcggacgggtgagtaacgcgtgggtaacctgcctttatccgggggataacagttagaaatgactgctaataccgcataagcgcacactgtcgcatgacagagtgtgaaaaactccggtggatagagatggacccgcgttagattagccagttggcggggtaacggcccaccaaagcgacgatctatagccggcctgagagggcgaccggccacattgggactgagacacggcccaaactcctacgggaggcagcagtggggaatattgcacaatgggggaaaccctgatgcagcgacgccgcgtgagtgaagaagtatttcggtatgtaaagctctatcagcagggaagaaaacgacggtacctgcaca

SEQ ID NO: 6763 - DNA, 490 bp, unidentified
  misc_feature 1..490: note = Ascusbbf_379616, encodes 16S rRNA
  source 1..490: mol_type = genomic DNA
agagtttgatcctggctcaggatgaacgctggcggcgtgcataacacattcaagtcgaacggacgagagggcttcggtcctcgagtcagtggcggacgggtgagtaacgcgtgagcaacctgcccccttgtgcgggataacgtttggaaacgaacgctaataccgcatgatccacagaggccgcatggtcgttgtggcaaagattgatttgcaaggggatgggctcgcgtccgattagatagttggcggtgcaacggaccaccaagtcgacgatcggtagccggactgagaggttgaacggccacattggaactgagaaacggtccagactcctacgggaggcagcagtggggaatattgggcaatgggcgaaagcctgacccagcgacgccgcgtgaaggaagacggtcctcggattgtaaacttcttttatgcaggacgaaggtagtgacggtactgcatgaataagccacggctaactacgtgccag

SEQ ID NO: 6764 - DNA, 490 bp, unidentified
  misc_feature 1..490: note = Ascusbbf_278580, encodes 16S rRNA
  source 1..490: mol_type = genomic DNA
agagtttgatcctggctcaggatgaacgctggcggcgtgcctaacacatgcaagtcgaacggtgaaacagaagcggaggttttcggactgaagcatttgtggaacagtggcggacgggtgagtaacgcgtggataacctgccccatacagggggatagcagttggaaacgactgataataccgcataagcgcacgaggggacatccccaggtgtgaaaaacttaaggtggtatgggatgggtccgcgtccgattagttagttggcggggtaagagcccaccaagacgacgatcggtagccggcctgagagggcggacggccacattgggactgagacacggcccagactcctacgggaggcagcagtgggggatattgcacaatggagggaactctgatgcagcgacgccgcgtgggtgaagaagtatttcggtatgtaaagccctatcagcagggaagaaagtgacggtacctgagtaagaagccccgg

SEQ ID NO: 6765 - DNA, 490 bp, unidentified
  misc_feature 1..490: note = Ascusbbf_261880, encodes 16S rRNA
  source 1..490: mol_type = genomic DNA
agagtttgatcatggctcaggatgaacgctggcggcgtgcctaacacatgcaagtcgaacggaccttcccaaccgaaagcggatctagcttgctattgaagctttcacctgggacggtcagtggcggacgggtgagtaacgcgtgggtaacctgcctctgtcagggggataacagatagaaatgcctgctaataccgcataagcgcacagcaccgcatggtgcagtgtgaaaagatttatcggacagagatggacccgcgttagattagccagttggcggggtaacggcccaccaaagctacgatctatagccggcctgagagggcgaccggccacattgggactgagacacggcccaaactcctacgggaggcagcagtggggaatattgcacaatgggggaaaccctgatgcagcgacgccgcgtgagtgaagaagtatttcggtatgtaaagctctatcagcagggaagaagatgacggtacctgca

SEQ ID NO: 6766 - DNA, 490 bp, unidentified
  misc_feature 1..490: note = Ascusbbf_465262, encodes 16S rRNA
  source 1..490: mol_type = genomic DNA
agagtttgatcatggctcaggatgaacgctggcggcgtgcctaacacatgcaagtcgaacgttaggatatagcaatatgtccaaaagtggcgaacgggtgagtaacacgtaggtaacctgccgcgcagagggggataacgactggaaacggtcgctaataccgcatggtactatcgagaggggactcttgatagttaaaaccttggtgctgcgcgaggggcctgcgtccgattagttagttggtgaggtaatggctcaccaaggcgatgatcggtagctggtctgagaggatgatcagtcacacgggaactgagacacggtcccgactcctacggggggcagcagtgaggaatattgcacaatggacgaaagtctgatgcagcaacgccgcgtggaggatgacggcccttgggttgtaaactccttttttcagggaagagtgaggacggtacctgaagaataagtcacggctaactacgtgccagcagcc

SEQ ID NO: 6767 - DNA, 490 bp, unidentified
  misc_feature 1..490: note = Ascusbbf_443451, encodes 16S rRNA
  source 1..490: mol_type = genomic DNA
agagtttgatcatggctcaggacgaacgctggcggcatgcctaatacatgcaagtcgtgcggatgcttcaaagagcttgctctttgaagtgttagcggcggatgggtgagtaacacgtgggcaacctgccctacagatggggataactccgggaaaccggggctaataccgaataaacagtttgtccgcatggacaaactctgaaagacggtttcggctgtcactgtaggatgggcccgcggcgcattagctagttggtgggataacggcctaccaaggcaacgatgcgtagccgacctgagagggtgatcggccacactgggactgagacacggcccagactcctacgggaggcagcagtagggaatcttccacaatggacgaaagtctgatggagcaatgccgcgtgagtgaagaaggttttcggatcgtaaagctctgttgtaagggaagaacaagtatgggagtaactgcccgtaccttgacggta

SEQ ID NO: 6768 - DNA, 490 bp, unidentified
  misc_feature 1..490: note = Ascusbbf_213940, encodes 16S rRNA
  source 1..490: mol_type = genomic DNA
agagtttgatcctggctcaggacaaacgctggcggcgtgcttaacacatgcaagtcgaacggagtacccatgacagaagcttcggcagacggaatggaatacttagtggcggacgggtgagtaacacgtgagtaacctgcccctgagtgggggataacactccgaaaggagtgctaataccgcataacatgaggatatcgcatggtaacctcatcaaagatatattgctcagggatgggctcgcgcccgattaggtagttggagaggtaacggctcaccaagccgacgatcggtagccggactgagaggttgaacggccacattgggactgagacacggcccagactcctacgggaggcagcagtggggaatattgcacaatgggggaaaccctgatgcagcgacgccgcgtgaaggaagaaggtcttcggattgtaaacttttgtcttcggggacgaaaagaatgacggtacccggggaggaagccacg

SEQ ID NO: 6769 - DNA, 490 bp, unidentified
  misc_feature 1..490: note = Ascusbbf_714955, encodes 16S rRNA
  source 1..490: mol_type = genomic DNA
agagtttgatcctggctcgggacgaacgctggcggcgtgcctaatacatgcaagtcgagcgggtttgtcccttcggggacaagcaagcggcggacgggtgagtaacacgtaggcaacctgcccatgggaccgggataacgtcgggaaaccgatgctaataccggatagatgaacttctcgcatgagaggatctggaaagacggcgcaagctgtcaccgatggatgggcctgcggcgcattagctagttggtggggtaacggctcaccaaggcgacgatgcgtagccgacctgagagggtgatcggccacactgggactgagacacggcccagactcctacgggaggcagcagtagggaatcttcggcaatgggcgaaagcctgaccgagcaacgccgcgtgagtgatgaaggctttcgggtcgtaaaactctgttgccagagaagaacgtccggtagagtaactgctgccggagtgacggtatctgagaa

SEQ ID NO: 6770 - DNA, 490 bp, unidentified
  misc_feature 1..490: note = Ascusbbf_256312, encodes 16S rRNA
  source 1..490: mol_type = genomic DNA
agagtttgatcatggctcaggacgaacgctggcggcgtgcttaacacatgcaagtcgaacggagttacaggagagcttgcttgaatgtaacttagtggcggacgggtgagtaacgcgtgagtaacctgtctcacacaggggaataacgcatcgaaagatgtgctaataccgcgtaggaccacggtgtcgcatggcactgaggtgaaagacgaaagtcggtgtgaggtgggctcgcgtctgattagatagttggtgaggtaacggcccaccaagtcaacgatcagtagccgacctgagagggtgatcggccacattgggactgagacacggcccagactcctacgggaggcagcagtggggaatattgggcaatgggcggaagcctgacccagcaacgccgcgtgaaggaagaaggttttcggatcgtaaacttctgtcctatatgaagatagtgacggtagtataggaggaagccccggctaactacgtg

SEQ ID NO: 6771 - DNA, 490 bp, unidentified
  misc_feature 1..490: note = Ascusbbf_261378, encodes 16S rRNA
  source 1..490: mol_type = genomic DNA
agagtttgatcctggctcaggacgaacgctggcggcatgcctaacccatgcaagtcgaacggatgcgacgacttcggttgtcaagtcagtggcggacgggtgagtaacacgtgaacaaccaacctcatactgggggacaacatttggaaacgaatgctaataccgcataagaccacagagccgcatggctcagaggtcaaaggagaaatccggtgtgagacgggttcgcgtcctattagttagatggtgaggtaacggcccaccatgaccgcgataggtagccgagctgagaggctgatcggccacactggaactgagagacggtccagactcctacgggaggcagcaggggggaatattgggcaatgggggaaaccctgacccagcaatgccgcgtgaatgaagaaggccttcgggttgtaaagttctgtgacagaggacgaagaaatgacggtactctgagaggaagctccggcaaactacgtgccag

SEQ ID NO: 6772 - DNA, 490 bp, unidentified
  misc_feature 1..490: note = Ascusbbf_141755, encodes 16S rRNA
  source 1..490: mol_type = genomic DNA
agagtttgatcatggctcaggatgaacgctggcggcgcgcttaacacatgcaagtcgaacgagattggtggcttcggctacaaatttagtggcggacgggtgagtaacgcgtggataacttgcctttcagtgggggatagccgagagaaatctcgattaataccgcatagtatagtctgtttgcatgaatagactattaaagatgtaaatcgctgaaagagaggtctgcgtctgattagctggttggggtggtaatggcacaccaaggcaacgatcagtaaccggtttgagagaatgaacggtcacattgggactgagatacggcccagactcctacgggaggcagcagtggggaatattgcgcaatggaggaaactctgacgcagcgacgccgtgtgaaggatgaaggccttcgggttgtaaacttttatcgattgtgaaaagaaaggatggtagcaaagtaagaagctccggctaactacgtgccagc

SEQ ID NO: 6773 - DNA, 490 bp, unidentified
  misc_feature 1..490: note = Ascusbbf_712552, encodes 16S rRNA
  source 1..490: mol_type = genomic DNA
agagtttgatcatggctcaggacgaacgcttgcgacgtgcctaagaaatgcaagtcgagcgatgacgggggcttcggctccttgattagcggcgaacggtcgcgtaacacgtaagcaatctgccccaaagtttgggatagccatccgaaaggatgattaataccggatgtggaacataaatcgcatgttttatgttctaaagcagcgatgcgctttgggatgagcttgcggcctatcagctagttggtaaggtgatggcttaccaaggcgacgacgggtagctggtctgagaggatggtcagccggattgggactgagatacggcccagactcctacggggggcagcaattaggaatcttgcgcaatggggggaaccctgacgcagcgacgtcgcgtgaatgaagaagtctttcgggatgtaaaattctttttaccgggaagataatgacgttaccggtggaataagccccggctaactccgtgccagca

SEQ ID NO: 6774 - DNA, 490 bp, unidentified
  misc_feature 1..490: note = Ascusbbf_150577, encodes 16S rRNA
  source 1..490: mol_type = genomic DNA
agagtttgatcatggctcaggatgaacgctggcggcgtgcttaacacattcaagtcgaacgagcgaggggaagcaattccttttgcgagtggcggacgggtgagtaacgcgtgagcaatctgcctctgtgagtggaataccagttggaaacgactgttaataccgcataatgtatggatgccgcatgacaaccataccaaagggaaaccgcgcagagatgagctcgcgtcccattagacagttggtgaggtaacggcccaccaaatctacgatgggtagccggactgagaggttgaacggccacattggaactgagaaacggtccagactcctacgggaggcagcagtggggaatattgggcaatggacgaaagtctgacccagcgacgccgcgtgaaggatgaaggtcttcggattgtaaactttagtcaacagggaagaagaaagtgacggtacctgtagaggaagccacggctaactacgtgccagc

SEQ ID NO: 6775 - DNA, 490 bp, unidentified
  misc_feature 1..490: note = Ascusbbf_261017, encodes 16S rRNA
  source 1..490: mol_type = genomic DNA
agagtttgatcctggctcaggatgaacgctagcggcaggcttaatacatgcaagtcgtggggcagcagaatgtagcaatacattgctggcgaccggcaaacgggtgcggaacacgtacacaaccttcctacaagtggggcatagcccagagaaatttggattaataccccgtaatatatagaaaaggcatcttttctatattatagcttcggcgcttgttgatgggtgtgcggctgattagatagttggcggggtaacggcccaccaagtctacgatcagtagctgatgtgagagcatgatcagccacacgggcactgagacacgggcccgactcctacgggaggcagcagtaaggaatattggacaatggacgaaagtctgatccagccatgccgcgtgaaggattaaggtcctctggattgtaaacttcttttatatgggacgaaaaaagggaattctttcccacttgacggtaccatgtgaataagc

SEQ ID NO: 6776 - DNA, 490 bp, unidentified
  misc_feature 1..490: note = Ascusbbf_1827870, encodes 16S rRNA
  source 1..490: mol_type = genomic DNA
agagtttgatcctggctcaggacgaacgctggcggcgtgcctaatacatgcaagtagaacgctgaagaggagcttgctccttggatgagttgcgaacgggtgagtaacgcgtaggtaacctggctcatagcgggggataactattggaaacgatagctaataccgcataacagttttggccgcatggctgaggcttgaaaggcgcaattgcgtcactatgagatggacctgcgttgtattagctagttggtgaggtaacggctcaccaaggcttcgatacatagccgacctgagagggtgatcggccacactgggactgagacacggcccagactcctacgggaggcagcagtagggaatcttcggcaatggacggaagtctgaccgagcaacgccgcgtgagtgaagaaggttttcggatcgtaaagctctgttgtaagagaagaacgttgagtagagtggaaagttactcaagtgacggtatcttacc

SEQ ID NO: 6777 - DNA, 490 bp, unidentified
  misc_feature 1..490: note = Ascusbbf_1806154, encodes 16S rRNA
  source 1..490: mol_type = genomic DNA
agagtttgatcatggctcaggacgaacgctggcggcgtgcctaatacatgcaagtcgagcgaatctgagggagcttgctcccaaaggttagcggcggacgggtgagtaacacgtgggcaacctgcctgtaagactgggataacttcgggaaaccggagctaataccggataattcttaccaacacatgttggtaagctaaaagacggcgcaagctgtcacttacagatgggcccgcggcgcattagctagttggtgaggtaatggcttaccaaggcaacgatgcgtagccgacctgagagggtgatcggccacactgggactgagacacggcccagactcctacaggaggcagcagtagggaatcttccgcaatggacgaaagtctgacggagcaacgccgcgtgagtgatgaaggttttcggatcgtaaaactctgttgttagggaagaacaagtacgagagtaactgctcgtaccttgacggtaccta

SEQ ID NO: 6778 - DNA, 490 bp, unidentified
  misc_feature 1..490: note = Ascusbbf_1501581, encodes 16S rRNA
  source 1..490: mol_type = genomic DNA
agagtttgatcatggctcaggatgaacgctggcggcgtgcctaatacatgcaagtcgaacggagggatgggagcttgctccctgaacttagtggcgaacgggtgagtaacacgtaggtaacctgccctttagcttgggatacccagaggaaactttggctaataccggataacaacaaccgaggcatctcggatgcttgaaaggccctttcgggtcactaaaggatggacctgcggcgcattagctagttggtgagataatagcccaccaaggcgaggatgcgtagccgaactgagaggttgatcggccaaattggaactgagacacggtccaaactcctacgggaggcagcagtaaggagttttcggcaatgggggaaaccctgaccgagcaacgccgcgtgagtgatgacggccctatgggttgtaaagctctgttgtaaggaaagaactgtaagagtaggaaatgacttttacttgacggtacctta

SEQ ID NO: 6779 - DNA, 490 bp, unidentified
  misc_feature 1..490: note = Ascusbbf_1484665, encodes 16S rRNA
  source 1..490: mol_type = genomic DNA
agagtttgatcatggctcagggtgaacgctggcggcgtgcttaagacatgcaagtcgaacgatcgtcttcggacggtagtggcgcacgggtgagtaacgcgtaactgacctgcccccaggaccgaactaactccccgagaggggagctaatgtgggatgtgctgtccggctgtggccggacagtaaaggctgaggccgcttggggatggggttgcgttccatcagctagatggtggggtaaaggcctaccatggcgacgacggataaccggcctgagagggtggccggtcacaggggcactgagacacgggccccactcctatgggaggcagcagttaggaatcttccccaatgggcgcaagcctgagggagcgacgccgcgtgagggatgaaggtcctcggattgtaaacctctgaacgagtgacgaaaggccccggatggggagatgacggtaactcggtaatagcaccggctaactccgtgccagca

SEQ ID NO: 6780 - DNA, 490 bp, unidentified
  misc_feature 1..490: note = Ascusbbf_1351885, encodes 16S rRNA
  source 1..490: mol_type = genomic DNA
agagtttgatcctggctcaggatgaacgctagctacaggcttaacacatgcaagtcgaggggcatcatggtggtagcttgctaccgccgatggcgaccggcgcacgggtgagtaacacgtatccaacctgccttcagctcggggatagccctctgaaaggaggattaatacccgatgtgtttgcagtccggcatcgggcggcaattaaagatttatcggctgtggatggggatgcgtctgattaggttgttggcggggtaacggcccaccaagccaccgatcagtaggggttctgagaggaaggtcccccacataggaactgagacacggtcctaactcctacgggaggcagcagtgaggaatattggtcaatggtcgagagactgaaccagccaagtagcgtgaaggatgactgccctacgggttgtaaacttcttttatgcgggaataaagttcgccacgtgtggcgttttgtatgtaccgcatgaat

SEQ ID NO: 6781 - DNA, 490 bp, unidentified
  misc_feature 1..490: note = Ascusbbf_824319, encodes 16S rRNA
  source 1..490: mol_type = genomic DNA
agagtttgatcatggctcaggacgaacgctggcggcgtgcctaatacatgcaagtcgaacgcttctttcctcccgagtgcttgcactcgattggaaagaggagtggcggacgggtgagtaacacgtgggtaacctacccatcagagggggataacacttggaaacaggtgctaataccgcataacagtttatgccgcatggcataagagtgaaaggcgctttcgggtgtcgctgatggatggacccgcggtgcattagctagttggtgaggtaacggctcaccaaggccacgatgcatagccgacctgagagggtgatcggccacactgggactgagacacggcccagactcctacgggaggcagcagtagggaatcttcggcaatggacgaaagtctgaccgagcaacgccgcgtgagtgaagaaggttttcggatcgtaaaactctgttgttagagaagaacaaggacgttagtaactgaacgtcccc

SEQ ID NO: 6782 - DNA, 490 bp, unidentified
  misc_feature 1..490: note = Ascusbbf_725801, encodes 16S rRNA
  source 1..490: mol_type = genomic DNA
agagtttgatcctggctcaggatgaacgctggcggcgtgcctaacacattcaagtcgaacggtgaaggggcttcggccccggatcagtggcggacgggtgagtaacgcgtgagcaacctacctttctgtgggggataacacagggaaacttgtgctaataccgcataacgtatctgtcccgcatggggcggataccaaagatttattgcagagagatgggctcgcgtccgattagatagttggtgaggtaacggctcaccaagtcgacgatcggtagccggactgagaggttgaacggccacattggaactgagatacggtccagactcctacgggaggcagcagtggggaatattgggcaatgggcgaaagcctgacccagcgacgccgcgtgagggaagaaggtcttcggattgtaaacctttgttgacagggaagaaacaaatgacgtaacctgtcgaggaagccacgactaactacgtgccagcag

SEQ ID NO: 6783 - DNA, 490 bp, unidentified
  misc_feature 1..490: note = Ascusbbf_1778398, encodes 16S rRNA
  source 1..490: mol_type = genomic DNA
agagtttgatcatggctcaggatgaacgctggcggcgtgcataacacattcaagtcgaacgggcgaagggagcttgctccccgagctagtggcggacgggtgagtaacgcgtgagcaacctgcctctgtgtgtgggataccgtctggaaacggacgttaataccgcatgacccatatagaacgcatgttaggtatggcaaagatttattgcacagagatgggctcgcgtctgattaggcagttggtgaggtaacggcccaccaaaacctacgatcagtagccggactgagaggttgaacggccacattggaactgagaaacggtccagactcctacgggaggcagcagtggggaatattgggcaatgggcgaaagcctgacccagcgacgccgcgtgaaggaagacggtcttcggattgtaaacttcttttatgagggacgataatgacggtacctcatgaataagccacggctaactacgtgccagcag

SEQ ID NO: 6784 - DNA, 490 bp, unidentified
  misc_feature 1..490: note = Ascusbbf_388614, encodes 16S rRNA
  source 1..490: mol_type = genomic DNA
agagtttgatcatggctcaggatgaacgctggcggcgtgcttaacacatgcaagtcgaacggagtatctctcccgagatcaaagaagcttgcttctgcgaaatcatttgagatacttagtggcggacgggtgagtaacgcgtgggtaacctgcctcacacagggggataacagttggaaacgactgttaataccgcataagcgcacggtatcgcatgatacagtgtgaaaaactccggtggtgtgagatggacccgcgtctgattagctagttggtgaggtaacggcccaccaaggcgacgatcagtagccggcctgagagggtaaacggccacattgggactgagacacggcccaaactcctacgggaggcagcagtggggaatattgcacaatgggggaaaccctgatgcagcgacgccgcgtgagcgatgaagtatttcggtatgtaaagctctatcagcagggaagataatgacggtacctgacta

SEQ ID NO: 6785 - DNA, 490 bp, unidentified
  misc_feature 1..490: note = Ascusbbf_421406, encodes 16S rRNA
  source 1..490: mol_type = genomic DNA
agagtttgatcatggctcagagttaacgctggcagcgtgcataacacatgcaagtcgaacggggattattcgatgtagcaatacattggataattctagtggcagacgagtgagtaatacataagaaatctacccgaaagtggggaataacgggccgaaaggttcgctaataccccataatatttgaaagcggcatcgctttcttcttaaaggtttttcgctttcggacgatcttatggtctatcagctagttggtagggtaacggcctaccaaggcgacgacggatagccggcctgaaagggcgaccggccacgggggcactgagatacgggccccactcctacgggaggcagcagtggggaattttggacaatggacgaaagtctgatccagcaacgctgcgtgaaggacgaaggttctcggattgtaaacttcttttgcaggggaagaaacaaatgacggtaccctgtgaataagccacggctaact

SEQ ID NO: 6786 - DNA, 490 bp, unidentified
  misc_feature 1..490: note = Ascusbbf_389768, encodes 16S rRNA
  source 1..490: mol_type = genomic DNA
agagtttgatcatggctcaggatgaacgctggcggcgtgcttaacacatgcaagtcgaacgaagctatttatgacgtttagggattcgtccacgaactgattaagtaacttagtggcggacgggtgcgtaacgcgtgggcaacctgccttcttccgggggataacacagggaaacttgtgctaataccgcataaagtcacgaggggacatccccatgtgaccaaaggagcaatccgggggaagaggggcccgcgtctgattagctagttggtgaggtaacggcccaccaaggcgacgatcagtagccgaactgagaggttgatcggccacattgggactgagacacggcccagactcctacgggaggcagcagtggggaatattgcgcaatgggggaaaccctgacgcagcaacgccgcgtggaggatgaaggtcttcggattgtaaacttctttaataggggacgaacaatgacggtaccctaagaaaa

SEQ ID NO: 6787 - DNA, 490 bp, unidentified
  misc_feature 1..490: note = Ascusbbf_482643, encodes 16S rRNA
  source 1..490: mol_type = genomic DNA
agagtttgatcctggctcaggataaacgctggcggcgcacataagacatgcaagtcgaacggaagtcgttacgacggaagtggattgaagatttatcagattgaagcagaagatgtaacaatggctttagtggcggactggtgagtaacacgtaagtaacctggctattagaggggaataacagtgagaaatcattgctaataccgcataagcttgtaatatcgcatgatatagcaagaaaaggagaaatccgctaatagatgggcttgcggctgattagctagttggttaggtaacggctgaccaaggcgacgatcagtagccgggctgagaggctcatcggccacattgggactgagatacggcccagactcctacgggaggcagcagtcgggaatattgcgcaatggaggaaactctgacgcagtgacgccgcgtataggaagaaggttttaggattgtaaactattttagacagggaagataaaag

SEQ ID NO: 6788 - DNA, 490 bp, unidentified
  misc_feature 1..490: note = Ascusbbf_1791513, encodes 16S rRNA
  source 1..490: mol_type = genomic DNA
agagtttgatcatggctcaggatgaacgctggcggcatgcctaagacatgcaagtcgaacgaggaagcccaatgaaatttgcgtgcttgcacaaaaatggatttggattacttcctagtggcagacgggtgagtaacacgtgggtaatctacctcggagattgggataacttctggaaacggatgctaataccgaataattcatatttagataactagatatgctaaaaggagcttcggcttcacttcgagatgagcttgcggtgtattagcttgttggtggggtaatggcctaccaaggcaacgatgcatagccgggctgagaggctgatcggccacattggaactgagatacggtccaaacttctacgggaggcagcagttaggaatattcgtcaatgggggaaaccctgaacgagcaatgccgcgtgagtgatgacggtcctagtgattgtaaaactctgttgtaaagaaagaacctacactatagg

SEQ ID NO: 6789 - DNA, 490 bp, unidentified
  misc_feature 1..490: note = Ascusbbf_1882367, encodes 16S rRNA
  source 1..490: mol_type = genomic DNA
agagtttgatcatggctcaggatgaacgctagcggcaggcctaatacatgcaagtcgaacggtaaaatccccttcgggggattgagagtggcggacgggtgcgtaacgcgtatgcaaccaacccccctcaccgggatagccggtggaaacgccggataacaccggatgcgccgcgagggaggcatctcccatgcggcaaggcggcgacgcggagggggacgggcatgcgtgccattagcttgttggcggggcgacggcccaccaaggcgacgatggctaggggatctgagaggacggtcccccaaactggtactgagacacggaccagactcctgcgggaggcagcagtaagggatattggtcaatggggggaaccctgaaccagccatgccgcgtgagggaatgaggccctacgggtcgtgaacctcttttatctggggacaatacggggcacgggatgccccgttgagggtaccagaggaataagcat

SEQ ID NO: 6790 - DNA, 490 bp, unidentified
  misc_feature 1..490: note = Ascusbbf_726766, encodes 16S rRNA
  source 1..490: mol_type = genomic DNA
agagtttgatcatggctcagattgaacgctggcggcatgctttacacatgcaagtcgaacggtaacaggtcttcggatgctgacgagtggcgaacgggtgagtaatacatcggaacgtgcctagtagtgggggataactactcgaaagagtagctaataccgcatgagatctacggatgaaagcaggggaccttcgggccttgtgctactagagcggctgatggcagattaggtagttggtggggtaaaggcttaccaagcctgcgatctgtagctggtctgagaggacgaccagccacactgggactgagacacggcccagactcctacgggaggcagcagtggggaattttggacaatgggcgaaagcctgatccagcaatgccgcgtgcaggatgaaggccctcgggttgtaaactgcttttgtacggaacgaaaagcctggggctaatatccccgggtcatgacggtaccgtaagaataagcaccg

SEQ ID NO: 6791 - DNA, 490 bp, unidentified
  misc_feature 1..490: note = Ascusbbf_740911, encodes 16S rRNA
  source 1..490: mol_type = genomic DNA
agagtttgatcatggctcaggacgaacgctggcggcgtgcctaacacatgcaagtcgaacggagttaacaatggaagttccttcggggacggaagctgttaacttagtggcggacgggtgagtaacgcgtgagtaacctgcctttcagagggggataacgttcggaaacgaacgctaataccgcatgacatagcgataccgcatggtaatgctatcaaaggagcaatccgctgagagatggactcgcgtctgattagatagttggtgaggtaacggctcaccaagtcgacgatcagtagccggactgagaggttgaacggccacattgggactgagacacggcccagactcctacgggaggcagcagtgagggatattgcacaatgggcgcaagcctgatgcagcaacgccgcgtgagggaagacggtcttcggattgtaaacctttgtctttggtgaagaagaaagtgacggtagccgaggaggaagcc

SEQ ID NO: 6792 - DNA, 490 bp, unidentified
  misc_feature 1..490: note = Ascusbbf_1653471, encodes 16S rRNA
  source 1..490: mol_type = genomic DNA
agagtttgatcctggctcaggatgaacgctagcggcaggcctaacacatgcaagtcgaggggtagaaagagcttgcttttttgagaccggcgcacgggtgagtaacgcgtatgcaacctaccttatacaggggaatagcccgaagaaattcggattaatgctccatggtttatcgatatggcatcgtattgataataaagatttatcggtataagatgggcatgcgtatcattagctagttggtgtggtaacggcataccaaggcaacgatgattaggggtcctgagagggagatcccccacactggtactgagacacggaccagactcctacgggaggcagcagtgaggaatattggtcaatggaggcaactctgaaccagccatgccgcgtgcaggatgacggtcctatggattgtaaactgcttttgtacaggaagaaacctccctacgagtagggacttgacggtactgtaagaataaggatcggc

SEQ ID NO: 6793 - DNA, 490 bp, unidentified
  misc_feature 1..490: note = Ascusbbf_1883806, encodes 16S rRNA
  source 1..490: mol_type = genomic DNA
agagtttgatcctggctcaggatgaacgctggcggcacgcttaacacatgcaagtcgagcggagaacagacttcggtttgttcttagcggcggacgggtgaggaacgcgtgggtaatctgccctatacaggggaataacactgagaaattagtgataaagccgcataagcccacgggatcgcatgatcctgtgggaaaaactccggtggtataggatgagcccgcgtccgattagctagttggtgaggtaatggcccaccaaggcgatgatcggtagccggtctgagaggatggacggccacattgggactgagacacggcccaaactcctacgggaggcagcagtggggaatattgcacaatgggggaaaccctgatgcagcgatgccgcgtgaaggaagaagattttcggattgtaaacttctatcagcgaggaagagaacggacagtactcgagtaagcagccccggctaactacgtgccagcagcc

SEQ ID NO: 6794 - DNA, 490 bp, unidentified
  misc_feature 1..490: note = Ascusbbf_1678535, encodes 16S rRNA
  source 1..490: mol_type = genomic DNA
agagtttgatcatggctcaggacgaacgctggcggcgtgcctaatacatgcaagtcgaacgcgtcttggtcaatgaagttgagtgcttgcatttaactgatttgacattaagacgagtggcgaactggtgagtaacacgtgggtaacttgccccgaagcgggggataacatttggaaacaggtgctaataccgcataacaacaaaaaccacatggtttttgtttaaaagatggtttcggctatcactttgggatggacccgcggcgtattagctagttggtgaggtaatggctcaccaaggcaatgatacgtagccgacctgagagggtaatcggccacattgggactgagacacggcccaaactcctacgggaggcagcagtagggaatcttccacaatggacgaaagtctgatggagcaacgccgcgtgagtgatgaagggtttcggctcgtaaaactctgttgttggagaagaacgggtgtcagagt

SEQ ID NO: 6795 - DNA, 490 bp, unidentified
  misc_feature 1..490: note = Ascusbbf_453241, encodes 16S rRNA
  source 1..490: mol_type = genomic DNA
agagtttgatcctggctcaggattaacgctggcggcgtgcataacacattcaagtcgaacggacataggggcttgcccctatgtgagtggcggacgggtgagtaacgcgtgagcaacctgcccctgtgtaagggataacgaccggaaacagtcgctaataccttatgacccgatagtaccgcatggtacagacggcaaagatttattgcacagggatgggctcgcgtccgattaggcagttggtgaggtaacggctcaccaaaccgacgatcggtagccggactgagaggttgaacggccacattggaactgagatacggtccagactcctacgggaggcagcagtggggaatattgggcaatgggcgaaagcctgacccagcgacgccgcgtgagggaagaaggtcttcggattgtaaaccttgaacaacagggacgaaagaaatgacggtacctgttaggaagccacggctaactacgtgccagcagc

SEQ ID NO: 6796 - DNA, 490 bp, unidentified
  misc_feature 1..490: note = Ascusbbf_716912, encodes 16S rRNA
  source 1..490: mol_type = genomic DNA
agagtttgatcatggctcaggacgaacgctggcggcgtgcctaacacatgcaagtcgaacggaactgctgtggaagctcttcggagcggaagcttcagtttagtggcggacgggtgagtaacgcgtgagcaacctgcctttcagagggggacaacggttggaaacgaccgctaataccgcatgaagcaattggttcgcatgaactgattgttaaagattttatcgctgaaagatgggctcgcgtctgattagatagttggtggggtaacggcctaccaagtcaacgatcagtagccggactgagaggttgaacggccacattgggactgagatacggcccagactcctacgggaggcagcagtggggaatattgggcaatgggggcaaccctgacccagcaacgccgcgtgaaggaagaaggctttcgggttgtaaacttcttttaccgaggacgaagaacgtgacggtactcggagaaaaagccacggc

SEQ ID NO: 6797 - DNA, 490 bp, unidentified
  misc_feature 1..490: note = Ascusbbf_1795218, encodes 16S rRNA
  source 1..490: mol_type = genomic DNA
agagtttgatcctggctcagaacgaacgccggcggcgcgtcttaagcatgcaagtcgggcgggatcagggtgcttgcaccctgtgagagcggcggactggcgaggaacgcgtgggtgacgtgccctccgcaccgggacagccggcagaaatgccgggtgatacgggatgagctcgtttcctgtggtggggaacgaggaaagctgccacggcagcggcggaggagcggcccgcgtcccatcagctagtaggcggggcaaaagcccacctaggcgacgacgggtacccggactgagaggtcggacgggcgcattgggactgagatacggcccagactcctacgggaggcagcagctaagaatattccgcaatgggggaaaccctgacggagcgacgccgcgtggacgatggaggccggaaggttgtaaagtcctctggcgcctgaggaaggacccgggcagggaatggcccgggggtgactgtagggcgaga

SEQ ID NO: 6798 - DNA, 490 bp, unidentified
  misc_feature 1..490: note = Ascusbbf_208897, encodes 16S rRNA
  source 1..490: mol_type = genomic DNA
agagtttgatcatggctcaggacgaacgctggcggcgtgcctaacacatgcaagtcgaacgagcgcacgggagcttgctcccgtgctgcgagtggcggacgggtgagtaacgcgtgaggaacctgccttacagagggggataacgtccggaaacggacgctaataccgcataacatatttttgccgcatggcagagatatcaaaggagcaatccgctgtaagatggcctcgcgtctgattagatagttggtgaggtaacggctcaccaagtcgacgatcagtagccggactgagaggttgatcggccacattgggactgagacacggcccagactcctacgggaggcagcagtgagggatattgcacaatgggggaaaccctgatgcagcaacgccgcgtgaaggaagacggttttcggattgtaaacttctgttttgggtgacgataatgacggtagcccgatagaaagccacggctaactacgtgcca

SEQ ID NO: 6799 - DNA, 490 bp, unidentified
  misc_feature 1..490: note = Ascusbbf_403931, encodes 16S rRNA
  source 1..490: mol_type = genomic DNA
agagtttgatcatggctcaggacgaacgctggcggcgtggattaggcatgcaagtcgcacgagaaacattccttcgggaatgtagacagtggcgaactggtgagtaacacgtgaacaacctgcccttacattccggatagccggccgaaaggccggataatacgggcgaggatctttttaaggcatcttaaaaagaaggaaggcgcaagccgtgcaaggaggggttcgcggactatcaggtagttggtggggtaaaggcctaccaagccgacgacggatagctggtctgagaggatggtcagccacactgggactgagacactgcccagactcctacgggaggctgcagtcgagaatcttggacaatgtacgaaagtatgatccagcgacgccgcgtggaggatgaaggagctatgcttcgtaaactccttttatgggggaagaagatctgacggtaccccatgaataagccacggctaactacgtgcca

SEQ ID NO: 6800 - DNA, 490 bp, unidentified
  misc_feature 1..490: note = Ascusbbf_1841061, encodes 16S rRNA
  source 1..490: mol_type = genomic DNA
agagtttgatcctggctcaggacgaacgctggcggcgtgcctaacacatgcaagtcgagcggagtaaagggaagagcttgctcggaactttactcagcggcggacgggtgagtaacgcgtgagcaacctggcctgcacagggggataacagttggaaacgactgctaataccgcataagaccacagcatcgcatggtgcaggggtcaaagaaattcggtgcaggatgggctcgcgtcccattagctagttggcaggataacagcctaccaaggcgacgatgggtagccgacctgagagggtgatcggccacactgggactgagacacggcccagactcctacgggaggcagcagtggggaatattgggcaatgggcgaaagcctgacccagcaacgccgcgtgaaggaagaaggtcttcggattgtaaacttttgtcgccagggacgatgatgacggtacctggtaagaaagccccggctaactacgtgc

SEQ ID NO: 6801 - DNA, 490 bp, unidentified
  misc_feature 1..490: note = Ascusbbf_1824790, encodes 16S rRNA
  source 1..490: mol_type = genomic DNA
agagtttgatcatggctcaggatgaacgctggcggcatgcctaagacatgcaagtcgaacgaagtgtcccgttgaagtttggagtgcttgcacaaaaaatggatacggattcgcacttagtggcagacgggtgagtaacacgtgggtaatctacctcggagactgggataactattagaaatgatagctaataccggataattcgtaatcggataactgattatgctaaaaggggcttcggcctcacttcgagatgagcttgcggtgtattagctagttggtgaggtaatggcccaccaaggcgacgatgcatagccggactgagaggttgaacggccacattgggactgagacacggcccagactcctacgggagacagcagttaggaatattcgtcaatggaggaaactctgaacgagcaatgccgcgtgagtgatgacggtctttatgattgtaaaactctgttgtaaaggaagaacccttgctata

SEQ ID NO: 6802 - DNA, 490 bp, unidentified
  misc_feature 1..490: note = Ascusbbf_728888, encodes 16S rRNA
  source 1..490: mol_type = genomic DNA
agagtttgatcatggctcaggatgaacgctagctacaggcttaacacttgcaagtcgagcggaactgcttcggcagtttagcggcagacgggtgagtaacacgtatccaacctttcccttactcgggtatagcctcgggaaactgagagtaatccccgatgaagtgtacgaggagcattttttgcacaccaaagatttatcggtgaggggtggggatgcgttccattagttagtaggcggggcaacggcccacctagacgatgatggataggggttctgagaggaaggtcccccacattggaactgcgacacggtccaaactcctacgggaggcagcagtgaggaatattggtcaatggtcggaagactgaaccagccaagtagcgtgcaggatgacggccctatgggttgtaaactgcttttatcagggaataaagtgcggcacgtgtgccgttttgtatgtacctgatgaataaggaccggctaattc

SEQ ID NO: 6803 - DNA, 490 bp, unidentified
  misc_feature 1..490: note = Ascusbbf_740024, encodes 16S rRNA
  source 1..490: mol_type = genomic DNA
agagtttgatcctggctcaggatgaacgctggcggcgtgcttaacacattcaagtcgtacggacaaagggacttcggtcccctagttagtggcggacgggtgagtaacgcgtgagcaatctgccttcgggtgtggaataacagacggaaacggctgctaataccgcataacgtatacggaccgcatgatctgtataccaaagatttattgcccgaagatgagctcgcgtcccattagacagttggtgaggtaacggcccaccaaatctacgatgggtagccggactgagaggtcgaacggccacattggaactgagaaacggtccagactcctacgggaggcagcagtggggaatattgggcaatgggcgaaagcctgacccagcgacgccgcgtgaaggaagaaggtcttcggattgtaaactttagtcgacagggaagaaacaaatgacggtacctgtagaggaagccacgactaactacgtgccagc

SEQ ID NO: 6804 - DNA, 490 bp, unidentified
  misc_feature 1..490: note = Ascusbbf_729482, encodes 16S rRNA
  source 1..490: mol_type = genomic DNA
agagtttgatcatggctcaggacgaacgctggcggcgtgcttaacacatgcaagtcgaacggtccttttacgggtagcaatacctgtttaaggatagtggcggacgggtgagtaacgcgtgagcaacctgcccatcagaggggaatagcgtctggaaacggacgataataccgcataaaactgagtcaccgcatgatgacacagccaaaggagaaatccgctgatggatgggctcgcgtccgattagatagttggtggggcaacggcctaccaagtcgacgatcggtagccggactgagaggttgaacggccacattgggactgagacacggcccagactcctacgggaggcagcagtgaggaatattgcacaatggaggaaactctgatgcagcaacgccgcgtgaaggatgacggttttcggattgtaaacttctgttcttggtgatgataatgacataagccaaggagcaagccacggctaactacg

SEQ ID NO: 6805 - DNA, 490 bp, unidentified
  misc_feature 1..490: note = Ascusbbf_989572, encodes 16S rRNA
  source 1..490: mol_type = genomic DNA
agagtttgatcatggctcaggatgaacgctggcggcgtgcttaaaacatgcaagtcgaacgagtgaaattgattgatccttcgggtgatttcaatgaatctagtggcgaacgggtgagtaatacataggcaatctgccccaaggactgggataacggttagaaatgaccgctaataccggataggtagtaggaaggcatcttcttactattaaagttgggtttccaacaccgtgggatgagcttatgctgtattagcttgttggcgggataacagcccaccaaggcgatgatacatagctggtctgagaggatgaacagccacattgggactgagacacggcccagactcctacgggaggcagcagtaaggaattttcggcaatggacgaaagtctgaccgagcaacgccgcgtgagtgatgaaggtcttcggatcgtaaagctctgttgtaaaggaagaatattatgttgaggaaatgctacataagtg

SEQ ID NO: 6806 - DNA, 490 bp, unidentified
  misc_feature 1..490: note = Ascusbbf_1807823, encodes 16S rRNA
  source 1..490: mol_type = genomic DNA
agagtttgatcctggctcaggacgaacgctggcggcgtgcctaacacatgcaagtcgaacgaggttatttatttcggtaattaaccgagtggcggacgggtgagtaacgcgtgagcaacctgtccctttgagggggataacaattggaaacagttgctaataccgcataagaccacgacccggcatcgggatgaggtcaaaggagcaatccgcggagggaggggctcgcgtcccattagatagttggcggggcaatggcccaccaagtcgacgatgggtagccaggctgagaggctgattggccacactggaactgagacacggtccagactcctacgggaggcagcagtggggaatattgggcaatgggcgcaagcctgacccagcaacgccgcgtgagggaagaaggctttcgggttgtaaacctctgtccttggtgacgaacacaatgacggtagccaaggaggaagccccggctaactacgtgcca

SEQ ID NO: 6807 - DNA, 490 bp, unidentified
  misc_feature 1..490: note = Ascusbbf_1753280, encodes 16S rRNA
  source 1..490: mol_type = genomic DNA
agagtttgatcctggctcaggacgaacgctggcggcgtgcctaacacatgcaagtcgaacgagaagtgatgaaaagatctcttcggagtgattagattcatggacagtggcggacgggcgagtaacgcgtgagtaacctgcccataagcgggggatagccgatggaaacgtcgggtaataccccatgacatagttgagtcgcatggcttaattatcaaagatttatcgtttatggatggactcgcgtctgattagatagttggtgaggtaacggctcaccaagtcgacgatcagtagccgaactgagaggttgatcggccgcattgggactgagacacggcccagactcctacgggaggcagcagtgggggatattgcgcaatggggggaaccctgacgcagcaacgccgcgtgcaggaagaaggtcttcggattgtaaactgttgtcgcaagggaagaagacagtgacggtaccttgtgagaaagtcac

SEQ ID NO: 6808 - DNA, 490 bp, unidentified
  misc_feature 1..490: note = Ascusbbf_1872533, encodes 16S rRNA
  source 1..490: mol_type = genomic DNA
agagtttgatcatggctcaggacgaacgctggcggcatgcctaacacatgcaagtcgaacggtttaagagataaattatttataatttgttttttagatagtggcgaacgggtgagtaacgcgtgagcaacctaccttttagagggggataacgcttggaaacaggcgctaataccgcataagctccgagtattgagtggtacagggagaaaaggagaaatccgctaaaagatgggctcgcgtccgattagctagttggtgagataacagcccaccaaggcgacgatcggtagccggactgagaggttgaacggccacattgggactgagacacggcccagactcctacgggaggcagcagtgggggatattgcacaatggggggaaccctgatgcagcaatgccgcgtgagggaagaagtttttcggaatgtaaacctctgtccttcgggaagataatgacggtaccgaaggaggaagctccggctaac

SEQ ID NO: 6809 - DNA, 490 bp, unidentified
  misc_feature 1..490: note = Ascusbbf_630914, encodes 16S rRNA
  source 1..490: mol_type = genomic DNA
aggtttgatcatggctcaggatgaacgctggcggcgtgcctaatacatgcaagtcgaacgggtgtagcaatacatcagtggcgaacgggtgagtaacacgttggtgacctgccccaaagatgggaatatcacctggaaacgggtggcaaaaccgaataagctttgctcagtcagagaaggcaaagtaaaagcgtaagctactttgggaggggcctgcggcccatcagttagttggtgcgggtaacggcccaccaagacgaagacgggtaggggacctgagagggtggtcccccacaatggaactgaaacacggtccatacacctgcgggtggcagcagtagggaatattgcttaatgggcgaaagcctgaagcagcaacgccgcgtggacgatggaggccttcgggtcgtaaagtccttttatgggggaaaaggaaggatggtaccgcatgaataaggaccggctaattccgtgccagcagccgcggtaa

SEQ ID NO: 6810 - DNA, 490 bp, unidentified
  misc_feature 1..490: note = Ascusbbf_743528, encodes 16S rRNA
  source 1..490: mol_type = genomic DNA
agagtttgatcatggctcaggatgaacgctggcggcgtgcttaacacatgcaagtcgaacggagtatatcaatcgagaccttcgggtctcacccggtgtacttagtggcggacgggtgagtaacgcgtgagcaaccaaccttatgcagggggataacaattagaaatgattgctaataccccataagaccacggtagcgcatgatactgtgggaaaaactccggtggcataagacgggctcgcgttcgattagctggatggtgaggtaacggctcaccatggcgacgatcgatagccggactgagaggtcgaccggccacattgggactgagacacggcccagactcctacgggaggcagcagtggggaatattgcacaatgggggaaaccctgatgcagcgacgccgcgtgagtgatgacgtatttcggtatgtaaagctcttttagtagggaagaagatgacggtacctacagaaacagccccggcta

SEQ ID NO: 6811 - DNA, 490 bp, unidentified
  misc_feature 1..490: note = Ascusbbf_1890361, encodes 16S rRNA
  source 1..490: mol_type = genomic DNA
agagtttgatcatggctcaggatgaacgctagctacaggcttaacacatgcaagtcgaacgggactttgcgctgtagcaatacagtgtaaagtttagtggcagacgggtgagtaatgtataagaaacctacctttgagtggggaataacagtccgaaaggattgctaataccccataacatattgaaaaggcatctttttaatatcaaagatttatcgcttgaagatggtcttatattctatcagcttgttggcagtgtaacggactaccaaggctacgacggatagccggcctgaaagggcgaccggccacaagggcactgagacacgggccctactcctacgggaggcagcagtggggaattttggacaatgggcgaaagcctgatccagcaacgatgcgtggaggatgaaggttctcggattgtaaactccttttgtaagggaagaaaaaaatgacggtaccttacgaataagccacggctaactac

SEQ ID NO: 6812 - DNA, 490 bp, unidentified
  misc_feature 1..490: note = Ascusbbf_1802180, encodes 16S rRNA
  source 1..490: mol_type = genomic DNA
agagtttgatcctggctcaggacgaacgctggcggcgtgcttaacacatgcaagtcgaacgaggaatgagggagagcttgctctttcacatttcgaggggcggacgggtgagtaacgcgtgaggaacctgtctttcacagggggataacgttccgaaagggacgctaataccgcataagaccacattgccgcatggcagaggggtcaaaggagagatccggtgagaggtggcctcgcgtcccattaggcagttggcggggtaacggcccaccaaaccaacgatgggtagccgacctgagagggtgatcggccacattggaactgagacacggtccaaactcctacgggaggcagcagtggggaatattgggcaatgggcgcaagcctgacccagcaacgccgcgtgagggaagaaggttttcggattgtaaacctctgtcccgggagacgaggaagagacggtatcccgggaggaagccccggctaacta

SEQ ID NO: 6813 - DNA, 490 bp, unidentified
  misc_feature 1..490: note = Ascusbbf_1812892, encodes 16S rRNA
  source 1..490: mol_type = genomic DNA
agagtttgatcatggctcaggataaacgctggcggcgtgcctaatacatgcaagtcgtacgctgaaagtctagcttgctagatgagtaggagtggcgaacgggtgagtaatacataagcaacctgcccacgaagactgggataatccttggaaacgaggactaataccggataggtaattggatggcatcttccgattattaaaggtttaaaacactggtggatgggcttatggcgcattagcttgttggtgaggtaacggctcaccaaggcgatgatgcgtagccggcctgagagggtgaacggccacattgggactgagacacggcccagactcctacgggaggcagcagtagggaattttcggcaatgggcgaaagcctgaccgagcaacgccgcgtgagtgatgacggccttcgggttgtaaagctctgttgtaagggaagaacaattaagagaaaatcttaaactgacggtaccttaccagaaag

SEQ ID NO: 6814 - DNA, 490 bp, unidentified
  misc_feature 1..490: note = Ascusbbf_1666734, encodes 16S rRNA
  source 1..490: mol_type = genomic DNA
agagtttgatcctggctcaggacgaacgctgtcggcacgcttaacacatgcaagtcgaacgagcgaaagagtgcttgcactctctagctagtggcggacgggtgagtatcacgagagcaatctgcctttcggtgggggataccatttggaaacgaatgttaataccccataacatagaggatccgcatggattttctatcaaaggtttactgccggaagatgagctcgcgtctgattaggtagttggtgaggtaacggctcaccaagccgacgatcagtagccggactgagaggttgaacggccacattgggactgagacacggcccagactcctacgggaggcagcagtggggaatattgcacaatgggcgaaagcctgatgcagcgatgccgcgtgagggaagaaggttttaggattgtaaacctctgtctttggggacgataatgacggtacccaaggaggaagctccggctaactacgtgccagca

SEQ ID NO: 6815 - DNA, 490 bp, unidentified
  misc_feature 1..490: note = Ascusbbf_1341400, encodes 16S rRNA
  source 1..490: mol_type = genomic DNA
agagttgatctggctcaggatgaacgctggcggcgtgcctaatacatgcaagtcgaacgagggtgcttgcaccctagtggcgaacgggtgagtaacacgtaggtaacctgcccttaagcttgggatacccagaggaaactttggctaataccggataacaacagaggaggcatctcttcagtttgaaaggccctttacggggtcacttaaggatggacctgcggcgcattagctagttggtgagataacagcccaccaaggcgaggatgcgtagccgacctgcgaggttgatcggccaaattgaaacttggacaaggtccaaactccgacgggaggcagcagtaaggagttttcggcaatgggggaaaccctgaccgagcaacgccgcgtgagtgatgacggccctatgggttgtaaagctctgttgtaagggacgaatgactaggttaggaaatgaacttagtttgacggtaccttaccagaaagccac

SEQ ID NO: 6816 - DNA, 490 bp, unidentified
  misc_feature 1..490: note = Ascusbbf_1834020, encodes 16S rRNA
  source 1..490: mol_type = genomic DNA
agagtttgatcctggctcaggatgaacgctggcggcgtgcctaacacatgcaagtcgagcggtatatacttaaacaaaacttcggtcgagtgagagtatagagagcggcggacgggtgagtaacgcgtaggcaacctgccccatacagagggatagcctcgggaaaccgggattaaaacctcataacgcgaaaggatctcatggttctttcgccaaagatttatcggtatgggatgggcctgcgtctgattagctagttggtaaggtaacggcttaccaaggcaacgatcagtagccgacctgagagggtaatcggccacattggaactaagacacggtccaaactcctacgggaggcagcagtggggaatattgcacaatgggcgaaagcctgatgcagcaacgccgcgtgagcgatgaaggcctttgggtcgtaaagctctgtccttggggaagaaaaaaatgacggtacccttggaggaagccccgg

SEQ ID NO: 6817 - DNA, 490 bp, unidentified
  misc_feature 1..490: note = Ascusbbf_661041, encodes 16S rRNA
  source 1..490: mol_type = genomic DNA
agagtttgatcatggctcagaatgaacgttggcggcatggattaggcatgcaagtcgagcgagaagctaaagattgaaacttcggtcgatttctttagtggaaagcggcgcaagggagagtaacgagtagttatctaccccagggtccggaatagctgcgggaaactgcgggtaatgccggataatatccccggatcaaaggtgtgattccgccctgggaggagactgctttgtactagcttgttggtggggtaatggcctaccaaggctacgatgcatagcgggcgtgagagcgtggcccgtctcactgggactgaaacactgcccagacacctacgggtggctgcagtcgagaatcttcggcaatgggcgaaagcctgaccgagcaatgccgcgtgcgggatgaaggccttcgggttgtaaaccgctgtcagttgggaggaagggtccgtgaagagcggatcttgacctatcttcagaggaagtccgg

SEQ ID NO: 6818 - DNA, 490 bp, unidentified
  misc_feature 1..490: note = Ascusbbf_1642234, encodes 16S rRNA
  source 1..490: mol_type = genomic DNA
agagtttgatcctggctcaggacgaacgctggcggcgtgcttaacacatgcaagtcgaacgaagcttgattaaagatttcttcggaatgatttaagatatgactgagtggcggacgggtgagtaacgcgtgagcaacctgcccttcagagggggatagcgtctggaaacggacggtaataccgcataacgtgcagataaggcatcttaactgtaccaaagatttatcgctgaaggatgggctcgcgtctgattagatagttggtggggtaacggcctaccaagtcgacgatcagtagccggactgagaggttgaacggccacattgggactgagacacggcccagactcctacgggaggcagcagtggggaatattgcacaatgggggaaaccctgatgcagcaacgccgcgtggaggaagacggttttcggattgtaaactcctgttcttaaggaagaagaaagtgacggtacttaaggagcaagccac

SEQ ID NO: 6819 - DNA, 490 bp, unidentified
  misc_feature 1..490: note = Ascusbbf_1557135, encodes 16S rRNA
  source 1..490: mol_type = genomic DNA
agagtttgatcatggctcaggatgaacgctagcggcaggcctaacacatgcaagtcgaggggtaacggggtgcttgcaccgccgacgaccggcgcacgggtgagcaacgcgtatagaacctacccgttacagggggatagcccagagaaatttggatcaataccccgtggggcccttgaccggcatcggtcttgggctaaagaacttcggtaacggatggctatgcgtcccattagctagttggcagggtaacggcctaccaaggcagcgatgggtaggggccctgagagggggatcccccacactggtactgagacacggaccagactcctacgggaggcagcagtgaggaatattggacaatgggcggtagcctgatccagccatgccgcgtgcaggaagaatgtcctatggactgtaaactgcttttgtacgggaagaaccgggggcacgcgtgcccccctgacggtaccgtaagaataaggatcgg

SEQ ID NO: 6820 - DNA, 490 bp, unidentified
  misc_feature 1..490: note = Ascusbbf_6428, encodes 16S rRNA
  source 1..490: mol_type = genomic DNA
agagtttgatcatggctcaggatgaacgctggcggcgtgcctaacacatgcaagtcgaacggagacagagagacgttttcggacagacctctatcttagtggcggacgggtgagtaacgcgtggataacctgcctctttctgggggatagcagttggaaacgactgataataccgcataagttccttttctcgcatgagggaaggaagaaagatttatcgggaagagatggatccgcgtctgattagccagttggcggggtaacggcccaccaaagcgacgatcagtagccggcctgagagggtgaacggccacattgggactgagacacggcccaaactcctacgggaggcagcagtggggaatattgcacaatgggcgcaagcctgatgcagcgacgccgcgtgagtgaagaagtatttcggtatgtaaagctctatcagcagggaagaaaggcccgaaagggagatgacggtacctgactaagaagc

SEQ ID NO: 6821 - DNA, 490 bp, unidentified
  misc_feature 1..490: note = Ascusbbf_61187, encodes 16S rRNA
  source 1..490: mol_type = genomic DNA
agagtttgatcatggctcaggatgaacgctggcggcgtgcttaacacatgcaagtcgaacggggaatactttaacagagacttcggttgaagttgctgtattcctagtggcggacgggtgagtaacgcgtgggtaacctgcctcacactgggggataacagtcagaaatgactgctaataccgcataagcgcacagcatcgcatgatgcagtgtgaaaaactccggtggtgtgagatggacccgcgttggattagctagttggcagggcagcggcctaccaaggcgacgatccatagccggcctgagagggtggacggccacattgggactgagacacggcccagactcctacgggaggcagcagtggggaatattgcacaatgggggaaaccctgatgcagcgacgccgcgtgaaggaagaagtatctcggtatgtaaacttctatcagcagggaagataatgacggtacctgactaagaagccccggc

SEQ ID NO: 6822 - DNA, 490 bp, unidentified
  misc_feature 1..490: note = Ascusbbf_205174, encodes 16S rRNA
  source 1..490: mol_type = genomic DNA
agagtttgatcctggctcaggatgaacgctggcggcgtgcttaacacatgcaagtcgagcgaagcacttcacccgaaaaagggacctgcttgcagggaacggattcaaccgaagtgactgagcggcggacgggtgagtaacgcgtgggtaacctgcctcatacagggggataacagttagaaatgactgctaataccgcataagcgcacaggagggcatcctctggtgtgaaaaactccggtggtatgagatggacccgcgtcggattagccagttggcggggtaacggcccaccaaagcgacgatccgtagccggcctgagagggcgaccggccacattgggactgagacacggcccaaactcctacgggaggcagcagtggggaatattgcacaatgggggaaaccctgatgcagcgacgccgcgtgagtgatgaagtatttcggtacgtaaagctctatcagcagggaagaagacgacggtacctga

SEQ ID NO: 6823 - DNA, 490 bp, unidentified
  misc_feature 1..490: note = Ascusbbf_4758, encodes 16S rRNA
  source 1..490: mol_type = genomic DNA
agagtttgatcatggctcagaacgaacgctggcggcaggcttaacacatgcaagttgagcgggaatggtttatagcttgctatgaatcatgagagcagcgcactggtgagtaacacgtgggaacgtaccttttagtgggggacaacatttggaaacggatgctaataccgcataatccctgagggggaaaggagagattcgctgaaagatcggcccgcggaagattaggtagtaggtggggcaacggcctacctagccgacgatctatagctggtctgagaggacgatcagccacattggaactgagacacggtccagactcctacgggaggcagcagtgaggaatattgggcaatggagggaactctgacccagccatgccgcgtgagtgaagaaggttttcggattgtaaagctctttcagatgggaagatgatgacggtaccatcagaagaagcaccggctaacttcgtgccagcagccgcggtaat

SEQ ID NO: 6824 - DNA, 490 bp, unidentified
  misc_feature 1..490: note = Ascusbbf_65482, encodes 16S rRNA
  source 1..490: mol_type = genomic DNA
agagtttgatcctggctcaggatgaacgctagcggcaggcttaacacatgcaagtcgaggggcatcgtggagtagcaatactctgacggcgaccggcgaaagggtgagtaacgcgtgagcaacatgcccggtaccggaggatagtcgatggaaacgtcgcgtaatactccgtaacatacggaaccgcatgattctgtattgagagatttatcgctaccggattggctcgcgtcccattaggcagttggcggggtaacggcccaccaaaccgacgatgggtaggggttctgagaggaaggtcccccacattggaactgagacacggtccagactcctacgggaggcagcagtgaggaatattggacaatggccgagaggctgatccagccatgccgcgtgcgggaggacggccctatgggttgtaaaccgcttttgtcagggggcaataagggccacgtgtggcccgatgagagtacctggcgaataagca

SEQ ID NO: 6825 - DNA, 490 bp, unidentified
  misc_feature 1..490: note = Ascusbbf_12069, encodes 16S rRNA
  source 1..490: mol_type = genomic DNA
agagtttgatcatggctcagaacgaacgctggcggcgcgtcttaagcatgcaagtcgagcggtaagttgtagcttgctacaacctagagcggcggactggtgagtaacgcgtgggtgacgtacccttttgacggggatagcctgtggaaacacagggtaataccggataagctggcttgtgtcagaggcaagtcaggaaaggttcttttgaaccgcgaaaggagcggcccgcgtgctattagttagttggcggggtaacggcccaccaagacgacgatagctacccggcctaagagggtgaacgggcacattgggactgagatacggcccagactcctacgggaggcagcagctaagaatattccgcaatggacgaaagtctgacggagcgacgccgcgtggatgatgaaggccggaaggttgtaaaatccttttgggagcgaggaataaggaatctgagagaaacggattctggtgacggtagcttctg

SEQ ID NO: 6826 - DNA, 490 bp, unidentified
  misc_feature 1..490: note = Ascusbbf_21248, encodes 16S rRNA
  source 1..490: mol_type = genomic DNA
agagtttgatcctggctcaggatgaacgctggcggcgtgcttaacacattcaagtcgaacgaactgatttggaagcttgcttctgatgaaagttagtggcggacgggtgagtaacgcgtgagcaacctgcctttgcgcgggggataacacttggaaacgggtgctaataccgcataatgtatactgaccgcatgatcggtatatcaaagatttattgcgcaaagatgggctcgcgtctgattagctggttggtgaggtaacggctcaccaaggcgacgatcagtagccggactgagaggttgaacggccacattggaactgagatacggtccagactcctacgggaggcagcagtggggaatattgggcaatgggcgcaagcctgacccagcgacgccgcgtgagggaagaaggtcttcggattgtaaacctttgtagacagggacgaaacaaatgacggtacctgtaaagtaagccacggctaactacg

SEQ ID NO: 6827 - DNA, 468 bp, unidentified
  misc_feature 1..468: note = Ascusbbf_133735, encodes 16S rRNA
  source 1..468: mol_type = genomic DNA
agagtttgatcctggctcagaacgaacgctggcggcaggcttaacacatgcaagtcgaacgccccgcaaggggagtggcgcacgggtgagtaacgcgtgggaacctacctatcggtacggaataacacagggaaacttgtgctaataccgtatgagctctacggaggaaagatttatcgccgatagatgggcccgcgtccgattagctagttggtgaggtaacggctcaccaaggcttcgatcggtagctggtctgagaggatgatcagccacactgggactgagacacggcccagactcctacgggaggcagcagtggggaatattggacaatgggcgcaagcctgatccagccatgccgcgtgagtgatgaaggccttagggttgtaaagctctttcgtcggggaagataatgacggtacccgaagaagaagcctcggctaactccgtgccagcagccgcggtaat

SEQ ID NO: 6828 - DNA, 490 bp, unidentified
  misc_feature 1..490: note = Ascusbbf_17305, encodes 16S rRNA
  source 1..490: mol_type = genomic DNA
agagtttgatcatggctcaggacgaacgctggcggcgtgcctaacacatgcaagtcgaacggagtgattgttttcggatgatcacttagtggcgaacgggtgagtaacgcgtgaacaacctgccttcctgagggggataacacctggaaacaagtgctaataccgcataagaccacatatccgcatggatgaggggtcaaaggagcgatccgcagggagaggggttcgcgtcccattagctagttggcggggcaacggcccaccaaggcgacgatgggtagccgagctgagaggctgatcggccacactggaactgagacacggtccagactcctacgggaggcagcagtggggaatattgggcaatgggcgcaagcctgacccagcaacgccgcgtgagggaagaaggtcttcggattgtaaacctctgtcctatgtgacgaaggaagtgacggtagcataggaggaagccccggctaactacgtgcca

SEQ ID NO: 6829 - DNA, 488 bp, unidentified
  misc_feature 1..488: note = Ascusbbf_1698, encodes 16S rRNA
  source 1..488: mol_type = genomic DNA
agagtttgatcatggctcagaacgaacgctggcggcatggattaggcatgcaagtcgaacgaagcagcaatgcttagtggcggaagggtgaggaacgcgtgagtaatctgccctcaagttgggaataacagctggaaacggctgctaataccgaatgtggctgcaagaccgcatgattttgcagttaaagatttattgcttgaggatgagctcgcgtcccattagctagttggtgaggcaacggctcaccaaggcgatgatgggtagctggtctgagaggatggtcagccacactgggactgagacactgcccagactcctacgggaggctgcagtcgagaatcttgggcaatgcgcgaaagcgtgacccagcaatgccgcgtgcgcgatgaaggtcttcggattgtaaagcgctgtcaaccgggacgaaaaatgacggtaccggtggaggaagccacggctaactacgtgccagcagccgcggtaat

SEQ ID NO: 6830 - DNA, 490 bp, unidentified
  misc_feature 1..490: note = Ascusbbf_30748, encodes 16S rRNA
  source 1..490: mol_type = genomic DNA
agagtttgatcatggctcaggacgaacgctggcggcgtgcctaacacatgcaagtcgaacgggacttattggaatgagacttcggtcaaaggaaaataagtttagtggcggacgggtgagtaacgcgtgagcaacctgcctttcagagggggacaacagttggaaacgactgctaataccgcataacgtacagaggaggcatcttccctgtaccaaagatttatcgctgaaagatgggctcgcgtctgattagatagttggcggggtaacggcccaccaagtcgacgatcagtagccggactgagaggttgaacggccacattgggactgagatacggcccagactcctacgggaggcagcagtggggaatattggtcaatgggggcaaccctgaaccagcaacgccgcgtgaaggaagaaggctttcgggttgtaaacttcttttgccggggacgaaacaaatgacggtacccggcgaataagccacgg

SEQ ID NO: 6831 - DNA, 490 bp, unidentified
  misc_feature 1..490: note = Ascusbbf_232636, encodes 16S rRNA
  source 1..490: mol_type = genomic DNA
agagtttgatcctggctcagattgaacgctggcggcatgctttacacatgcaagtcggacggcagcggggtagtgcttgcactactgccggcgagtggcgaacgggtgagtaacgcatcggaacgtaccgggtagtgggggataaccgtccgaaagggcggctaataccgcatacgctttgagaaggaaagcgggggaccattcggcctcgcgctatccgagcggccgatgtctgattaggtagttggtggggtaaaggcctaccaagccgacgatcagtagcgggtctgagaggatgatccgccacactgggactgagacacggcccagactcctacgggaggcagcagtggggaattttggacaatgggggcaaccctgatccagccatgccgcgtgtctgaagaaggccttcgggttgtaaaggacttttgtcagggaagaaaggcaggatgctaatatcgttctgtgatgacggtacctgaagaat

SEQ ID NO: 6832 - DNA, 490 bp, unidentified
  misc_feature 1..490: note = Ascusbbf_62176, encodes 16S rRNA
  source 1..490: mol_type = genomic DNA
agagtttgatcctggctcaggatgaacgctggcggcgtgcctaacacatgcaagtcgagcggagttatgagagaagcttgcttcacttttaacttagcggcggacgggtgagtaacacgtgagtaacctgccctcgagtggggaacaacatcgagaaatcggtgctaataccgcataatatcggagatccgcatgcttctccgatcaaaggatttattcgcttgaggatggactcgcgtccgattagttagttggtgaggtaacggcccaccaagacatcgatcggtagccgaactgagaggttgatcggccacattgggactgagacacggcccagactcctacgggaggcagcagtggggaatattgggcaatgggcgaaagcctgacccagcaacgccgcgtgaaggatgaaggtcttcggattgtaaacttctttgatcagggacgaaacaaatgacggtacctgaagaacaagccacggctaact

SEQ ID NO: 6833 - DNA, 490 bp, unidentified
  misc_feature 1..490: note = Ascusbbf_1024614, encodes 16S rRNA
  source 1..490: mol_type = genomic DNA
agagtttgatcatggctcagaacgaacgctggtagcgtggattaggcatgcaagtcgaacgggatccgggaggtagcaatgtcgaccggtgagagtggcggattggggaggaacacgtgagcaacctgcctttgagtcggggaaaaccgttggaaacgacggctaataccggatgcggcgcccggagacatcttcggagcgctaaagggggccgcaaggctcccgctcgtagaggggctcgcgcaccatcagcttgttggcggggtaacggcccaccaaggcctacggttagctggtctgagaggatgaccagccccactgggactgagatactgcccagactcctacgagaggctgcagtcgaggatcatttgcaatgggcgaaagcctgacaatgcgacgctgcgtggaggatgaaggccttcgggtcgtaaactcctgtcatgggggaacaggcgaggggacccaacacgtcccttagttgagtgta

SEQ ID NO: 6834 - DNA, 490 bp, unidentified
  misc_feature 1..490: note = Ascusbbf_37669, encodes 16S rRNA
  source 1..490: mol_type = genomic DNA
agagtttgatcctggctcaggacgaacgctggcggcgcgcctaacacatgcaagtcgaacggagcatagggacggaagcttcggcagaagatcctatgtttagtggcgaacgggtgagtaacacgtgaggaacctgcctttaagagggggataacacttagaaataggtgctaataccgcataagaccacaggatggcatcatccaggggtcaaaggaggaatccgcttaaagatggcctcgcgtccgattaggtagtaggcggggcaacggcccacctagccgacgatcggtagccggactgagaggtcgaacggccacattgggactgagacacggcccagactcctacgggaggcagcagtggggaatattgggcaatgggggaaaccctgacccagcgacgccgcgtgagggaagaaggttttcggattgtaaacctctgtcttcggggacgatagtgacggtacccgaggaggaagccacggcta

SEQ ID NO: 6835 - DNA, 490 bp, unidentified
  misc_feature 1..490: note = Ascusbbf_210470, encodes 16S rRNA
  source 1..490: mol_type = genomic DNA
agagtttgatcctggctcaggataaacgctggcggcgtgcataacacattcaagtcgaacggactgatacgaaagcttgcttttgttgaaagttagtggcggacgggtgagtaacgcgtgagcaacctgcctatttgagcggaataacacccggaaacaggtgctaataccgcatgaagcacacgaatcgcatggtttgtgtgtcaaagatttatcgcagatagatgggctcgcgtctgattagctggttggtgaggtaacggctcaccaaggcgacgatcagtagccggactgagaggttgaacggccacattggaactgagatacggtccagactcctacgggaggcagcagtggggaatattgggcaatgggggcaaccctgacccagcgacgccgcgtgagggaagaaggtcttcggattgtaaacctttgttaacggggacgaaaaaaatgacggtacccgaatagaaagccacggctaactacg

SEQ ID NO: 6836 - DNA, 490 bp, unidentified
  misc_feature 1..490: note = Ascusbbf_391371, encodes 16S rRNA
  source 1..490: mol_type = genomic DNA
agagtttgatcctggctcaggatgaacgctagctacaggcttaacacatgcaagtcgaacgaagcttgaagaaagattccttcgggatgaattcggatatgactgagtggcggacgggtgagtaacgcgtgagtaacctgcctcttggagggggatagtgtttggaaacgaacagtaataccgcataatgtgcattgatggcatcttcaatgtaccaaagatttatcgccaagagatggactcgcgtctgattagatagttggtgaggtaacggctcaccaagtcgacgatcagtagccggactgagaggttgaacggccacattgggactgagacacggcccagactcctacgggaggcagcagtggggaatattgcacaatgggcgcaagcctgatgcagcaacgccgcgtggaggaagacggttttcggattgtaaactcctgttcttagggaagaagaaagtgacggtacctaaggagcaagccac

SEQ ID NO: 6837 - DNA, 490 bp, unidentified
  misc_feature 1..490: note = Ascusbbf_2270, encodes 16S rRNA
  source 1..490: mol_type = genomic DNA
agagtttgatcatggctcaggatgaacgctagcggcaggcttaacacatgcaagtcgaggggcagcatgagagcgtagcaatacattcttgatggcgaccggcgcaagggtgcgtaacgcgtgagcaacttgcccgcatcaggggcataatcggtggaaacgccgtctaactccccataacatacgaggtggcatcactttgtattgaaatccttggaggatgcggatgggctcgcgtgacattaggcagttggcggggtaacggcccaccaaacctacgatgtctaggggaactgagaggttaatcccccacactggaactgagacacggtccagactcctacgggaggcagcagtgaggaatattggacaatggagggaactctgatccagccatgccgcgtgcaggataaggtcctatggattgtaaactgcttttgtacgggagcaataaggtccacgtgtgggtcgatgagagtaccgtacgaat

SEQ ID NO: 6838 - DNA, 490 bp, unidentified
  misc_feature 1..490: note = Ascusbbf_4909, encodes 16S rRNA
  source 1..490: mol_type = genomic DNA
agagtttgatcatggctcaggatgaacgctggcggcgtgcctaacacatgcaagtcgaacgaagttttaacgacggaagtcttcggacggaagatgttacaacttagtggcggacgggtgagtaacgcgtgagcaacctgcctttcagagggggacaacagttggaaacgactgctaataccgcataacgtatatttatggcatcatagatataccaaaggagcaatccgctgaaagatgggctcgcgttggattagatagttggtggggtaacggcctaccaagtcgacgatccatagccggactgagaggttgaacggccacattgggactgagacacggcccagactcctacgggaggcagcagtgggggatattgcacaatgggcgaaagcctgatgcagcaacgccgcgtgagggaagaaggtcttcggattgtaaacctttgtccttgctgacgaataaagtgacggtaagcaaggaggaagtc

SEQ ID NO: 6839 - DNA, 490 bp, unidentified
  misc_feature 1..490: note = Ascusbbf_8272, encodes 16S rRNA
  source 1..490: mol_type = genomic DNA
agagtttgatcatggctcaggattaacgctggcggcatgcctaatacatgcaagtcgaatggtagcaataccatggcgaacgggtgagtaacacgtaggtaacctgtctttaagacgaggataaccgatggaaacgtcggataatactcgataggtgatttgaaggcatctttggatcattaaagatttatcacttagagaggggcctgcggcgcattagctagatggcggtgtaatggaccaccatggcgatgatgcgtagccggactgagaggttgaacggccacaatgggactgagaacggcccatactcctacgggaggcagcagtagggaattttcggcaatgggcgaaagcctgaccgagcaatgccgcgtgaacgaagaagtatttcggtatgtaaagttcttttatcggggaagaaaaatgaccaaattgacggtacctgatgaataagctccggctaactacgtgccagcagccgcggtaa

SEQ ID NO: 6840 - DNA, 490 bp, unidentified
  misc_feature 1..490: note = Ascusbbf_14983, encodes 16S rRNA
  source 1..490: mol_type = genomic DNA
agagtttgatcctggctcaggatgaacgctggcggcgtgcttaacacattcaagtcgaacgagcgataacgggaagcttgctttctgttaaagcgagtggcggacgggtgagtaacgcgtgagcaacctgccttagactggggaataacatcgggaaaccggtgctaataccgcataacgcatcgaggtcgcatggccatgatgccaaaggagcaatccggtgtaagatgggctcgcgtctgattaggtagttggtgaggtaacggctcaccaagcctgcgatcagtagccggactgagaggtcgatcggccacattggaactgagatacggtccagactcctacgggaggcagcagtggggaatattgggcaatgggcgaaagcctgacccagcgacgccgcgtgaaggaagaagatcttcggattgtaaacttctgtcaacagggacgaaggaagtgacggtacctgtggaggaagccacggctaact

SEQ ID NO: 6841 - DNA, 490 bp, unidentified
  misc_feature 1..490: note = Ascusbbf_38213, encodes 16S rRNA
  source 1..490: mol_type = genomic DNA
agagtttgatcatggctcaggatgaacgctggcggcacgcttaacacatgcaagtcgaacgaagcttacggaagggagttttcggacaaacagaagtaagacttagtggcggacgggtgcgtaacgcgtgggtaacctaccctggactgggggataacgtatagaaatgtacgctaataccgcataagctcacgggaccgcatggtccagtgggaaaagccgagacggtctaggatgggcccgcgtctgattagctggttggtggggtaacggcctaccaaggcaacgatcagtagccggtctgagaggatggacggccacattgggactgagacacggcccaaactcctacgggaggcagcagtggggaatattgcacaatgggggaaaccctgatgcagcgatgccgcgtgaaggaagaagtgtttcggcacgtaaacttctatcagcaaggaagaagaaagacagtacttgagtaagcagccccggc

SEQ ID NO: 6842 - DNA, 490 bp, unidentified
  misc_feature 1..490: note = Ascusbbf_79227, encodes 16S rRNA
  source 1..490: mol_type = genomic DNA
agagtttgatcatggctcaggatgaacgctggcggcgtgcctaacacatgcaagtcgaacggtgatgagcagaaattttcggatggaagctgatcatagtggcggacgggtgagtaacgcgtggataacctgcctctcgctgggggatagcagccggaaacggctggtaataccgcatacgttcatttccccgcatggggaggtgaggaaagatttatcggcgagagatggatccgcgtctgattagccagttggcggggtaacggcccaccaaagcgacgatcagtagccggcctgagagggtgatcggccacattgggactgagacacggcccaaactcctacgggaggcagcagtgggggatattgcacaatgggcgcaagcctgatgcagcgacgccgcgtgagtgaagaagtatttcggtatgtaaagctctatcggcagggaagaaaggcccgcaagggagatgacggtacctgactaagaagc

SEQ ID NO: 6843 - DNA, 490 bp, unidentified
  misc_feature 1..490: note = Ascusbbf_27613, encodes 16S rRNA
  source 1..490: mol_type = genomic DNA
agagtttgatcctggctcaggacgaacgctggcggcgtgcttaaaacatgcaagtcgaacggaattgtttgttagcactaagggatttggaaaaattccttagtgctgacaaagaatttagtggcggacgggtgagtaacacatgagcaacctgccttttacagggggataacacttagaaataggtgctaataccgcataagaccacggtgggacatcccacaggggtcaaaggagcaatccggtaaaagaggggcttgtggctcattagctagttggcggggtaacggcccaccaaggcgacgatgagtagccgacctgagagggtgaacggccacattggaactgagaaacggtccagactcctacgggaggcagcagttaggaatattgggcaatggacgaaagtctgacccagcaacgccgcgtgaaggaagaaggttttcggattgtaaacttctgatctaagggaaaaagaaagtgatggtac

SEQ ID NO: 6844 - DNA, 490 bp, unidentified
  misc_feature 1..490: note = Ascusbbf_100882, encodes 16S rRNA
  source 1..490: mol_type = genomic DNA
agagtttgatcctggctcagaacgaacgctggcggcatggattaggcatgcaagtcgaacgggtgcagcaatgcaccagtggcgcaagggtgaggaacacgtgagtaatctaccctcaagattgggatagctcctggaaacgggaattaataccggatgaaacagtatgtccgcatggatgtacttttaaagcagcaatgcgcttgaggaggagctcgcgtcccattagctggttggtgaggtaacggcccaccaaggcgatgatgggtagctggtctgagaggacgatcagccacattgggactgagaaactgcccagactcctacgggaggctgcagtcgagaattttgggcaatgagcgaaagcttgacccagcaatgccgcgtgcgggatgaaggtcttcggattgtaaaccgctgttgagagggacgaagattgacggtacctctagaggaagccacggctaactacgtgccagcagccgcggta

SEQ ID NO: 6845 - DNA, 490 bp, unidentified
  misc_feature 1..490: note = Ascusbbf_123418, encodes 16S rRNA
  source 1..490: mol_type = genomic DNA
agagtttgatcctggctcaggatgaacgctggcggcgtgcttaacacatgcaagtcgaacggagtgcccttgattgaggattcgtccaaatgatagggttacttagtggcggacgggtgagtaacgcgtgagtaacctgcctaggagtggggaataacacagagaaatctgtgctaataccgcataatgcagttgggtcgcatggctctgactgccaaagatttatcgctcttagatggactcgcgtctgattagctagttggcggggtaacggcccaccaaggcgacgatcagtagccggactgagaggttggccggccacattgggactgagacacggcccagactcctacgggaggcagcagtggggaatattgggcaatgggcgcaagcctgacccagcaacgccgcgtgaaggatgaaggctttcgggttgtaaacttcttttctcagggacgaaagaaatgacggtacctgaggaataagccac

SEQ ID NO: 6846 - DNA, 490 bp, unidentified
  misc_feature 1..490: note = Ascusbbf_97754, encodes 16S rRNA
  source 1..490: mol_type = genomic DNA
agagtttgatcatggctcaggatgaacgctggcggcgtgcctaacacatgcaagtcgaacggagcattggcgcagaggagggaattagcttgctaaggaacgaatcatgccaatacttagtggcggacgggtgagtaacgtgtggataacctggtccatgcagggggatagcagctggaaacggctgataataccgcataagcgcacagtaaggcatcttacggtgtgaaaaggagcaatccgggatggaatggatccgcatctgattagccagttggcggggtagaagcccaccaaagcgacgatcagtagccggcctgagagggcggacggccacattgggactgagacacggcccagactcctacgggaggcagcagtgggggatattgcacaatggggggaaccctgatgcagcgacgccgcgtgggtgaagaagtatttcggtatgtaaagccctatcagcagggaagataatgacggtacctga

SEQ ID NO: 6847 - DNA, 490 bp, unidentified
  misc_feature 1..490: note = Ascusbbf_209652, encodes 16S rRNA
  source 1..490: mol_type = genomic DNA
agagtttgatcatggctcaggacgaacgctggcggcgtgcttaacacatgcaagtcgaacgaagccgttccaccgatacagagtacttcggtacgaagtatcaccggaaagacttagtggcggacgggtgagtaacgcgtgagcaacctgcccataagagggggataacagttggaaacgactgctaataccgcataagaccacattaccgcatggtagaggggtcaaagaacggaatcgcttatggatgggctcgcgtcccattaggtagttggcaggataaaagcctaccaagccgacgatgggtagccgacctgagagggtgatcggccacactggaactgagacacggtccagactcctacgggaggcagcagtggggaatattgggcaatgggcgcaagcctgacccagcaacgccgcgtgagggaagaaggccttcgggttgtaaacctctgtcctatgggaagaacgaaatgacggtaccatg

SEQ ID NO: 6848 - DNA, 490 bp, unidentified
  misc_feature 1..490: note = Ascusbbf_4428, encodes 16S rRNA
  source 1..490: mol_type = genomic DNA
agagtttgatcatggctcaggatgaacgctagcggcaggcttaacacatgcaagtcgaggggcagcgggttgtagcaatacaatgccggcgaccggcgaaagggtgagtaacgcgtgagcaacatgcccggtactggaggatagtcgatggaaacgtcgcgtaatactccgtaacaacagggaccgcatgatccttgtttaagagatttattgatatcggattggctcgcgtgccattagctagttggcggggtaacggcccaccaaggcgacgatggctaggggttctgagaggaaggtcccccacattggaactgagacacggtccagactcctacgggaggcagcagtgaggaatattggtcaatggccgagaggctgaaccagccatgccgcgtgcgggaggacggccctatgggttgtaaaccgcttttgttggggagcaataagtgctacgtgtagcacgatgagagtacccagcgaataagca

SEQ ID NO: 6849 - DNA, 490 bp, unidentified
  misc_feature 1..490: note = Ascusbbf_21907, encodes 16S rRNA
  source 1..490: mol_type = genomic DNA
agagtttgatcatggctcaggatgaacgctggcggcgtgcttaacacattcaagtcgaacgatgaagttccttcgggaacggattagtggcggacgggtgagtaacgcgtgagcaacctgccttgcagagggggataacacagggaaacttgtgctaataccgcatgatgcatactgatcgcatgttcggtatgccaaaggagcaatccgctgtaagatgggctcgcgtccgattaggtagttggtgaggtaacggcccaccaagccgacgatcggtagccggactgagaggtcgaacggccacattggaactgagatacggtccagactcctacgggaggcagcagtggggaatattgggcaatgggcgaaagcctgacccagcgacgccgcgtgagggaagaaggtcttcggattgtaaacctttgtcatcagggacgaagaaatgacggtacctgagaaggaagccacggctaactacgtgccagca

SEQ ID NO: 6850 - DNA, 490 bp, unidentified
  misc_feature 1..490: note = Ascusbbf_31297, encodes 16S rRNA
  source 1..490: mol_type = genomic DNA
agagtttgatcatggctcaggacgaacgctggcggcatgcttaacacatgcaagtcgaacgggacgttgacaaatcagcgatgaggcggagacgtttagtggcgaacgggtgagtaacgcgtgagcaacctgccttgtacattgggataccagagggaaacttctgttaataccgaataagaccacagcaccgcatggtgcaggggtcaaagcgatttagcggtacaagatgggctcgcgtcccattagctagttggcgggataacagcccaccaaggcgacgatgggtagccgacttgagagagtgatcggccacaatggaactgagacacggtccatactcctacgggaggcagcagtggggaatattgggcaatgggcgaaagccttacccagcaatgccgcgtgaatgaagaaggtcttcggattgtaaagttcttttattggtgacgaacgcaatgacggtagccgatgaataagccccggctaa

SEQ ID NO: 6851 - DNA, 490 bp, unidentified
  misc_feature 1..490: note = Ascusbbf_1335597, encodes 16S rRNA
  source 1..490: mol_type = genomic DNA
agagtttgatcctggctcagaacgaacgctggcggcgtggattaggcatgcaagtcgtacgagaaagcgtccttcggggcgtgagtacagtggcgaactggtgagtacaaggtgactaacctgcccttgagtgggggataacttcgggaaaccggagctaataccgcatagtctctttgccctgcggggtaacgagtaaagcagtaatgcgctcgaggatggggtcaccccccattagcttgttggtagggtaatggcctaccaaggctgcgatgggtagctggactgagaggttgaccagccacactgggactgggatacggcccagactcctacggggggaagcagtctagaggcttcgacaatgcccgaaagggtgatcgagcgacgccgcgtgcgggatgaaggccttcgggtcgtaaaccgcttttgtttgggaagaaggcttgtatcgtgaatatgagattgacggtaccaaacgaataagccc

SEQ ID NO: 6852 - DNA, 490 bp, unidentified
  misc_feature 1..490: note = Ascusbbf_39287, encodes 16S rRNA
  source 1..490: mol_type = genomic DNA
agagtttgatcatggctcagaacgaacgctggcggcgtggattaggcatgcaagtcgaacgggactttatgttgtagcaatactttataaagtctagtggcgtaagggtgagtaacacgtgggtaatgtacccgatagtttgggataacgttccgaaagggacgctaataccggatgtgatgtcagatcgccggatctgacaagaaaggtggggaccgcaaggcctgccgctaacggaacggcccgcgacctattagctagttggtggggtaaaggcctaccaaggcaaggatgggtagccgaactgagaggttgaccggccacactgggactgagacactgcccagacttctacggaaggctgcagtcgagaatcattcacaatggacgaaagtctgatgatgcgacgccgcgtgcgcgatgaaggtcttcggattgtaaagcgctttgaacagggaagaatgccatgtatttaatagataacgtggag

SEQ ID NO: 6853 - DNA, 490 bp, unidentified
  misc_feature 1..490: note = Ascusbbf_567055, encodes 16S rRNA
  source 1..490: mol_type = genomic DNA
agagtttgatcatggctcaggataaacgctggcggcgcacataagacatgcaagtcgaacgaacttaacctatagtttactattggagcggttagtggcggactggtgagtaacacgtaagcaacctgcctatcagaggggaacaacagttagaaatgactgctaataccgcatatgccttagcaacacatgttgcaaaagggaaagaagcaattcgctgatagatgggcttgcgtctgattagctagttggtggggcaaaggcctaccaaggcaacgatcagtagccgaactgagaggttgaacggccacattgggactgagatacggcccagactcctacgggaggcagcagtcgggaatattgcgcaatggaggaaactctaacgcagtgacgccgcgtgcaggaagaaggttttcggattgtaaactgctttagacagggaagaaacaagacagtacctgtagaataagctccggctaactacgtg

SEQ ID NO: 6854 - DNA, 490 bp, unidentified
  misc_feature 1..490: note = Ascusbbf_1827750, encodes 16S rRNA
  source 1..490: mol_type = genomic DNA
agagtttgatcatggctcaggacgaacgctggcggcgtgcttaacacatgcaagtcgagcgaagccctcgccttcgggtggggtgacttagcggcgaacgggtgagtaacacgtgggcaacctgcccttagctctgggataagcgatggaaacgtcgtctaataccggatatgacactgggacgcatgttcttggtgtggaaagatttatcggctagggatgggcccgcggcctatcagtttgttggtggggtaatggcctaccaaggcggcgacgggtaaccggcctgagagggcgaccggtcacactgggactgagacacggcccagactcctacgggaggcagcagtgggaatattgcacaatgggcgcaagcctgatgcagcgacgccgcgtgagggatgacggccttcgggttgtaaacctctttcagcagggacgaagcgagagtgacggtacctgcagaagaagcgccggccaactacgtgcc

SEQ ID NO: 6855 - DNA, 490 bp, unidentified
  misc_feature 1..490: note = Ascusbbf_12265, encodes 16S rRNA
  source 1..490: mol_type = genomic DNA
agagtttgatcatggctcagattgaacgctggcggtatgcttaacacatgcaagtcgaacggtaacaggccttcgggcgctgacgagtggcggacgggtgagtaacgcgtaggaatctgcctcatagtgggggacaacttggggaaactcaagctaataccgcatacgccctacgggggaaagcgggggaccttcgggcctcgcgctatgagatgagcctgcgttagattagctagttggtggggtaaaggcctaccaaggcgacgatctatagctggtctgagaggacgatcagccacactgggactgagacacggcccagactcctacgggaggcagcagtggggaatattggacaatgggcgcaagcctgatccagcaataccgcgtgtgtgaagaaggcctgagggttgtaaagcactttcaattgggaggaaaacctgccggtcaatacccggcagcttgacattacctttagaagaagcaccgg

SEQ ID NO: 6856 - DNA, 490 bp, unidentified
  misc_feature 1..490: note = Ascusbbf_18715, encodes 16S rRNA
  source 1..490: mol_type = genomic DNA
agagtttgatcctggctcaggatgaacgctggcggcgtgcttaacacatgcaagtcgaacggagatatgttagtgaagttttcggatggaattgatatatcttagtggcggacgggtgagtaacgcgtaaacaatctgccttagagagggggataacagatagaaatatttgctaataccgcataagaccacgcttcggcatcgaggtggggtaaaaggagcaatccgctttaagatgagtttgcgtactattagctagttggtgaggtaacggcccaccaaggcaacgatggttagccggcctgagagggtgaacggccacattggaactgagatacggtccagactcctacgggaggcagcagtgaggaatattgggcaatgggcgaaagcctgacccagcaacgccgcgtgaaggaagaaggttttcggattgtaaacttctgttatgggggaagaaaaagatgacggtaccccatgagaaagctac

SEQ ID NO: 6857 - DNA, 490 bp, unidentified
  misc_feature 1..490: note = Ascusbbf_1507040, encodes 16S rRNA
  source 1..490: mol_type = genomic DNA
agagtttgatcatggctcaggacgaacgctggcggcgtgcctaatacatgcaagtcgggcggggttttgaggggcttgcccttcaagacccagcggcgaacgggtgagtaacacgtgggcaacctgcccgcaagtccgggataacttcgggaaaccggagctaataccggataggaccccggatcgcatgatccggggtggaaaggcggcttcggctgccacttgcggatgggcccgcggcgcattagctagttggtgaggtaacggctcaccaaggtgacgatgcgtagccgacctgagagggtgaccggccacactgggactgagacacggcccagactcctacgggaggcagcagtagggaattttccgcaatgggcgcaagcctgacggagcaacgccgcgtgagcgaggacggccttcgggttgtaaagctctgttcttcgggaagaatggcgggagggcgaacaactctcccgcatgacggtac

SEQ ID NO: 6858 - DNA, 490 bp, unidentified
  misc_feature 1..490: note = Ascusbbf_1426947, encodes 16S rRNA
  source 1..490: mol_type = genomic DNA
agagtttgatcctggctcaggatgaacgctggcggcgcatttaagacatgcaagtcgaacgaaagaattcaattgaaacggaatggaagatttatctgaaatgaagtttcgcccgagttctttagtggcggacgggtgagtaatacatagataatctgccttttagagggaaataactactggaaacggtagctaatgtcccataagaccacactaccgcatgatagagaggtcaaaggagaaatccgctaaaagatgagtctatggctgattagttagttggcagggtaagagcctaccaagactgtgatcagtagccgagctgagaggctggccggccacattgggactgagacacggcccagactcctacgggaggcagcagttgggaatattggacaatggaggaaactctgatccagtgacgccgcgtgaaggaagaaggtcttcggattgtaaacttattttatctgggaagaaaaaaatgact

SEQ ID NO: 6859 - DNA, 490 bp, unidentified
  misc_feature 1..490: note = Ascusbbf_91183, encodes 16S rRNA
  source 1..490: mol_type = genomic DNA
agagtttgatcatggctcaggatgaacgctagcggcaggcttaacacatgcaagtcgaggggcagcgcgagtagcaatacttggcggcgaccggcgcaagggtgcgtaacgcgtgagcaacatgcccgtatcagggggataatccagggaaacttggtctaataccgcataataaacttaggaggcatctctttgagttttaaaatttcgatggatacggattggctcgcgtgacattagtcagatggtaaggtaacggcttaccataactatgatgtctaggggttctgagaggaaggtcccccacactggaactgagacacggtccagactcctacgggaggcagcagtgaggaatattggacaatggatggaaatctgatccagccatgccgcgtgcaggaagacggtcctatggattgtaaactgcttttttatgggagcaataaggtctacgtgtagatcgatgagagtaccataagaataagca

SEQ ID NO: 6860 - DNA, 490 bp, unidentified
  misc_feature 1..490: note = Ascusbbf_81144, encodes 16S rRNA
  source 1..490: mol_type = genomic DNA
agagtttgatcctggctcaggatgaacgctggcggcgtgcttaacacatgcaagtcgaacgattaaaccgccctcgggcggacatagagtggcgaacgggtgagtaacacgtgaccaacctgccccgcactccgggataacctgcggaaacgcaggctaataccggatactccgcgcaggccgcatggcccgcgcgggaaagcccttacggtgcgggatggggtcgcggcccattaggtagacggcggggtgacggcccaccgtgcccgcgatgggtagccgagctgagaggctgaccggccacattgggactgagatacggcccagactcctacgggaggcagcagtggggaattttgcgcaatgggggcaaccctgacgcagcaacgccgcgtgcgggaagaaggccttcgggttgtaaaccgctttcagcggggacgataatgacggtacccgcagaagaagctccggctaactacgtgccagcagc

SEQ ID NO: 6861 - DNA, 490 bp, unidentified
  misc_feature 1..490: note = Ascusbbf_64933, encodes 16S rRNA
  source 1..490: mol_type = genomic DNA
agagtttgatcatggctcaggatgaacgctagcggcaggcttaacacatgcaagtcgaggggcagcgggtgtagcaatacatgccggcgaccggcgaaagggtgagtaacgcgtgagcaacatgcccggaggagggggatagtcattggaaacgatgcgtaataccccgtaacataagtcatcgcatggtgatttattgaaagattcattgtctccggattggctcgcgtgccattaggcagttggcggggtaacggcccaccaaaccgacgatggctaggggttctgagaggaaggtcccccacattggaactgagacacggtccagactcctacgggaggcagcagtgaggaatattggacaatggaaggaattctgatccagccatgccgcgtgcgggaggacggccctatgggttgtaaaccgcttttttgagggagcaataagggtcacgcgtggcccgatgagagtaccttgagaataagcatc

SEQ ID NO: 6862 - DNA, 490 bp, unidentified
  misc_feature 1..490: note = Ascusbbf_43296, encodes 16S rRNA
  source 1..490: mol_type = genomic DNA
agagtttgatcatggctcaggatgaacgctggcggcgtgcttaacacatgcaagtcgaacggagatatgtttaggaagttttcggatggaatgagcatatcttagtggcggacgggtgagtaacgcgtaaacaatctgccttagagagggggataacagatagaaatatctgctaataccgcataagaccacagctaggcatctagcaggggtaaaaggagcaatccgctttaagatgagtttgcgtactattagctagttggtgaggtaacggcccaccaaggcaacgatggttagccggcctgagagggtgaacggccacattggaactgagatacggtccagactcctacgggaggcagcagtgaggaatattgggcaatgggcgaaagcctgacccagcaacgccgcgtgaaggaagaaggttttcggattgtaaacttctgttataggggaagaacaaatgacggtaccctatgagaaagctacg

SEQ ID NO: 6863 - DNA, 490 bp, unidentified
  misc_feature 1..490: note = Ascusbbf_394044, encodes 16S rRNA
  source 1..490: mol_type = genomic DNA
agagtttgatcctggctcaggatgaacgctggcggcatgcctaagacatgcaagtcgaacgaggtggcccacagattgatattgaaaatggagtgcttgcacaaagtcggatttatcttgacgtggattttccacctagtggcaaacgggtgagtaacacatgggttacctgcctctaagttggggataacagttggaaacgattgctaataccgaatgtgatctacggattaaaggtgcctttaaagcatcgcttagagatgggcctgtggcgtattagctagttggtggggtaatggcctaccaaggcaacgatgcgtagccgagctgagaggttaatcggccacactgggactgagacacggcccagactcctacgggagacagcagttaggaatattcgtcaatgggggaaaccctgaacgagcaatgccgcgtgagtgatgacggccctctgggttgtaaaactctgttgtttggaaagaatgat

SEQ ID NO: 6864 - DNA, 490 bp, unidentified
  misc_feature 1..490: note = Ascusbbf_408382, encodes 16S rRNA
  source 1..490: mol_type = genomic DNA
agagtttgatcatggctcaggatgaacgctagcggcaggcttaacacatgcaagtcgaggggcatcgcggggtagcaataccctggcggcgaccggcgaaagggtgagtaacgcgtgagcaacgtgcccgcagttgggggatagtcgatggaaacgtcgcgtaataccccgtaacacattttcccgcatggggagatgttgaaagatattattgactgcggatcggctcgcgtgccattaggtagacggcggggtaacggcccaccgtgccgacgatggctaggggttctgagaggaaggtcccccacattggaactgagacacggtccagactcctacgggaggcagcagtgaggaatattggacaatggccggaaggctgatccagccatgccgcgtgcgggaggacggccctatgggttgtaaaccgcttttgccggggagcaataagcgccacgcgtggcgcgacgagagtacccggcgaataagc

SEQ ID NO: 6865 - DNA, 490 bp, unidentified
  misc_feature 1..490: note = Ascusbbf_1567356, encodes 16S rRNA
  source 1..490: mol_type = genomic DNA
agagtttgatcatggctcaggacgaacgctggcggcgtgcttaacacatgcaagtcgaacgatgaaccttccatgatctattcgtagagattggaagcggattagtggcgaacgggtgagtaacgcgtgagcaacctgccttaaacaacgggatagcctcgggaaaccgggattaataccgtatgagaccccgccttcacatgaagaagaggttaaagatttatcggtttaagatgggctcgcgtctgattagctagttggtgagataaaagcccaccaaggcaaccatcagtaaccggcttgagagagtgaacggtcacattggaactgagacacggtccaaactcctacgggaggcagcagtggggaatattgcacaatgggggaaactctgatgcagcgacgccgcgtgagcgatgaaggaattcgtttcgtaaagctctgtcctaggggaagataatgacagtacccttggaggaagccccggcta

SEQ ID NO: 6866 - DNA, 490 bp, unidentified
  misc_feature 1..490: note = Ascusbbf_1376752, encodes 16S rRNA
  source 1..490: mol_type = genomic DNA
agagtttgatcatggctcaggatgaatgctggcggcgtgcctaatacatgcaagtcgagcggtaacagggcttcaccgtgcacttgacacctcgggccacaggcggagggaagaatcgagtgtacagtgaagctgctgacgagcggcggacggctgagtaacgcgtgggaacggaccccaaagtgagggataactactcgaaagagtggctaataccgcatatgatcttcggattaaagcttttagcgctttgggactggcctgcgtacgattagatagttggcggggtaaaggcccaccaagtggacgatcgttagatggtttgagaggatgatcatccagactgggactgagacacggcccagactcctacgggaggcagcagtagggaatctttcacaatgggcgaaagcctgatggagcaacgccgcgtgcaggatgaaggccttcgggttgtaaactgcttttaaaactgaggaatatgacggta

SEQ ID NO: 6867 - DNA, 469 bp, unidentified
  misc_feature 1..469: note = Ascusbbf_114956, encodes 16S rRNA
  source 1..469: mol_type = genomic DNA
agagtttgatcatggctcaggatgaacgctggcggcgtgcctaacctatgcaagtcgaacgaggcttcgagccgagtggcggacgagtgagtaacacgtatcttatctgcctgtaagtggggaataactcgtcgaaaggcgaactaataccccatgtgctctacggagtaaagcttttgcgcttacagatgaggatgcggcctatcagctagttggtgaggtaaaagcttaccaaggctatgacgggtagctggtctgagaggatgatcagccacgctgggactgagaacggcccagactcctacgggaggcagcaagtgggaatattgcacaatggacgaaagtctgatgcagcgacgccgcgtgggggatgaaggttttcggatcgtaaaccccttttatcgattagaaagatatgatcagtcgatgaataagcacctgctaactacgtgccagcagccgcggtaat

SEQ ID NO: 6868 - DNA, 490 bp, unidentified
  misc_feature 1..490: note = Ascusbbf_6371, encodes 16S rRNA
  source 1..490: mol_type = genomic DNA
agagtttgatcatggctcaggacgaacgctggcggcgtgcctaacacatgcaagtcgaacgagcgcacgggagcttgctcctgtgctgcgagtggcggacgggtgagtaacgcgtgaggaacctgcccttcagagggggataacgtcgggaaactgacgctaataccgcataacgtgtctgatccgcatggatcggataccaaaggagcaatccgctgaaggatggcctcgcgtctgattagatagttggtgaggtaacggctcaccaagtcgacgatcagtagccggactgagaggttgatcggccacattgggactgagacacggcccagactcctacgggaggcagcagtgagggatattgcacaatggggggaaccctgatgcagcaacgccgcgtgaaggaagacggttttcggattgtaaacttctgttttgggtgacgataatgacggtagcccgatagaaagccacggctaactacgtgcca

SEQ ID NO: 6869 - DNA, 490 bp, unidentified
  misc_feature 1..490: note = Ascusbbf_1445584, encodes 16S rRNA
  source 1..490: mol_type = genomic DNA
agagtttgatcctggctcaggacgaacgctggcggcatgcttaacacatgcaagtcgaacggactgattccttcgggatgaaagttagtggcgaacgggtgagtaatgtatgagcaacctgcctctatcaacgggataacagttggaaacgactgctaatacggtataagaccacggcaccgcatgatgctgcggtaaaagatttttcggatagagatgggctcatatcccattatctagttggtgagataacagcccaccaaggcgacgatgggtagccgagctgagaggctgatcggccacgttgggaccgaaaaacggcccagacacctacgggaagcagcagaggggaatattgggcaatggaggcaactctgacccggcaatgccgcgtgagtgatgaaggtaattttattgtaaagctcttatctcaggaacgaataaagatgacggtacctgaggaataagccccggctaactacgtgccagc

SEQ ID NO: 6870 - DNA, 490 bp, unidentified
  misc_feature 1..490: note = Ascusbbf_3847, encodes 16S rRNA
  source 1..490: mol_type = genomic DNA
agagtttgatcatggctcaggatgaacgctggcggcgtgcctaatacatgcaagtcgaacgaggtggatgggagcttgctccttgatgcctagtggcgaacgggtgagtaacacgtaggtaacctgcctttaagcttgggatacccagaggaaactttggctaataccggataacaacagaagcggcatcgcttttgcttgaaaggccctttcaagggtcacttaaagatggacctgcggcgcattagctagttggtgagataacagcccaccaaggcgaggatgcgtagccgacctgagagggtgatcggccacaatgaaactgagacacggttcatactcctacgggaggcagcagtaaggagttttcggcaatgggggaaaccctgaccgagcaacgccgcgtgaatgatgacggccctatgggttgtaaaattcttttatttgggacgaatgattagtttaggaaatgaaactaatttgacagtac

SEQ ID NO: 6871 - DNA, 490 bp, unidentified
  misc_feature 1..490: note = Ascusbbf_12537, encodes 16S rRNA
  source 1..490: mol_type = genomic DNA
agagtttgatcatggctcaggacgaacgctggcggcgtgcttaacacatgcaagtcgaacggagcttaaggaagagcttgctctgagataagcttagtggcggacgggtgagtaacgcgtgaggaacctggtttacacagggggataacggcccgaaagggttgctaataccgcataagaccacaacaccgcatgatgaaggggtcaaaggagaaatccggtgtaaaatggactcgcgtcccattaggcagttggtgaggtaacggcccaccaaaccgacgatgggtagccgacctgagagggtgatcggccacattggaactgagagacggtccaaactcctacgggaggcagcagtggggaatattgggcaatgggcgcaagcctgacccagcaacgccgcgtgagggaagaaggttttcggattgtaaacctctgtccttgatgaaaagcaggagatggtaattaaggaggaagccccggctaacta

SEQ ID NO: 6872 - DNA, 490 bp, unidentified
  misc_feature 1..490: note = Ascusbbf_250175, encodes 16S rRNA
  source 1..490: mol_type = genomic DNA
agagtttgatcatggctcaggatgaacgctggcggcgtgcctaacacattcaagtcgaacggagcaatacggaagcttgcttttgtatagcttagtggcggacgggtgagtaatgcatgagcaacctgccttgaagagggggataacacagagaaatttgtgctaataccgcgtaatctgccgaagcggcatcgcattggcaggaaaggagcaatccgctttaagatgggctcatgtctgattagatagttggtagggtaacggcctaccaagtctgcgatcagtagccggactgagaggttgaccggccacattggaactgagatacggtccagactcctacgggaggcagcagtggggaatattgggcaatgggcgcaagcctgacccagcaacgccgcgtgaaggaagaaggtcttcggattgtaaacttttttgacaggggacgaagcatgacggtaccctgaaaacaagccacgactaactacgt

SEQ ID NO: 6873 - DNA, 490 bp, unidentified
  misc_feature 1..490: note = Ascusbbf_11017, encodes 16S rRNA
  source 1..490: mol_type = genomic DNA
agagtttgatcctggctcaggacgaacgctggcggcgtgcctaatacatgcaagtcgaacggacgatggggcttcggccccaaagttagtggcgaacgggtgagtaacgcgtgagcaacctgactcaaagagggggacaacagctggaaacggctgctaataccgcataagaccacagcgcggcatcgcaaaggggtcaaagaattatcgctttgagaggggctcgcgtcccattagatagttggtgaggtaacggcccaccaagtccgcgatgggtagccgagctgagaggctgatcggccacactggaactgagacacggtccagactcctacgggaggcagcagtagggaatattgggcaatgggcgcaagcctgacccagcaacgccgcgtgagggaagaaggttttcggattgtaaacctctgtcctatgtgacgaaggaagtgacggtagcataggaggaagccccggctaactacgtgccagc

SEQ ID NO: 6874 - DNA, 490 bp, unidentified
  misc_feature 1..490: note = Ascusbbf_148521, encodes 16S rRNA
  source 1..490: mol_type = genomic DNA
agagtttgatcctggctcaggacgaacgctggcggcgtgcctaatacatgcaagtcgagcggacttgacggagcttgctctgttcaagttagcggcggacgggtgagtaacacgtgggtaacctgcctgtaagactgggataactccgggaaaccggggctaataccggatattctttttcttcgcatgaagaagaatggaaaggcggcttttagctgtcacttacagatggacccgcggcgcattagctagttggtgaggtaacggctcaccaaggcgacgatgcgtagccgacctgagagggtgatcggccacactgggactgagacacggcccagactcctacgggaggcagcagtagggaatcttccgcaatggacgaaagtctgacggagcaacgccgcgtgagtgaagaaggttttcggatcgtaaagctctgttgtcagggaagaacaagtaccaaagtaactgttggtaccttgacggtacc

SEQ ID NO: 6875 - DNA, 490 bp, unidentified
  misc_feature 1..490: note = Ascusbbf_1886605, encodes 16S rRNA
  source 1..490: mol_type = genomic DNA
agagtttgatcatggctcaggattaacgcttgcggcatgcctaagacatgcaagtcgaacgagagggcccattgataaggattgaaaatggagtgcttgcacaaagttggatttcctttgatttggattttccctctagtggcaaacgggtgagtaacacgtgggttacctgccctcaagttggggatatcatctggaaacggatagtaataccgaatgtgatctacggattaaaggagcctttaaagcttcgcttgaggatgggcctgcggtgcattagctagttggcgggataatagcccaccaaggcaacgatgcatagccgaactgagaggttgatcggccacactgggactgagacacggcccagactcctacgggagacagcagttaggaatattcgtcaatgggggaaaccctgaacgagcaatgccgcgtgaacgatgaaggccctccgggttgtaaagttctgttgtttggaaagaatatc

SEQ ID NO: 6876 - DNA, 490 bp, unidentified
  misc_feature 1..490: note = Ascusbbf_117007, encodes 16S rRNA
  source 1..490: mol_type = genomic DNA
agagtttgatcctggctcaggatgaacgctggcggcgtgcttaacacatgcaagtcgagcgcggtccctttggtgcttgcaccaaagaagactgagcggcggacgggtgagtaacgcgtgggtaacctgccctatacacatggataacatgctgaaaagcatactaatacatgataacgtacactgatggcatcttcggtgtatcaaagcgttagcggtataggatggacccgcgtctgattagctagttggtggggtaaaagcctaccaaggccacgatcagtagccgacctgagagggtgatcggccacattggaactgagacacggtccaaactcctacgggaggcagcagtggggaatattgcacaatgggcgaaagcctgatgcagcaacgccgcgtgaacgatgaaggtcttcggatcgtaaagttctgtcgcaggggaagataatgacggtaccctgtgaggaagcaccggctaactacgtgc

SEQ ID NO: 6877 - DNA, 490 bp, unidentified
  misc_feature 1..490: note = Ascusbbf_168596, encodes 16S rRNA
  source 1..490: mol_type = genomic DNA
agagtttgatcatggctcaggatgaacgctggcggcgtgcctaacacatgcaagtcgaacggagatgttccgccgatgaagcttcggccgaatcatggaacaacttagtggcggacgggtgagtaacgcgtgggcaacctgccctgcactgggggatagcagctggaaacggctggtaataccgcataagcgcacggtactgcatggtacagtgtgaaaaattccggtggtgcaggatgggcccgcgtccgattagccagttggcggggtaacggcccaccaaagcgacgatcggtagccggcctgagagggcggacggccacattgggactgagacacggcccagactcctacgggaggcagcagtgggggatattgcacaatgggggaaaccctgatgcagcgacgccgcgtgggtgaagaagtatttcggtatgtaaagccctatcagcagggacgataatgacggtacctgagtaagaagccccgg

SEQ ID NO: 6878 - DNA, 490 bp, unidentified
  misc_feature 1..490: note = Ascusbbf_146394, encodes 16S rRNA
  source 1..490: mol_type = genomic DNA
agagtttgatcctggctcaggataaacgctggcggcgtgcataacacattcaagtcgaacgaagcgccgattgccgagacttcggtcaaagcaagaggatgacttagtggcggacgggtgagtaacgcgtgagcaacctgcctgttagtggggaataacgtttggaaacgaacgctaataccgcataatatatacatggcgcatgctaagtatatcaaagatatattgctgacagatgggctcgcgtccgattaggcagttggtgaggtaacggctcaccaaaccgacgatcggtagccggactgagaggttgaacggccacattggaactgagaaacggtccagactcctacgggaggcagcagtggggaatattgggcaatgggcgaaagcctgacccagcgacgccgcgtgagggaagacggtcttcggattgtaaacctctttcagcagggaagacaaaaggacggtacctgcagaagaagccacg

SEQ ID NO: 6879 - DNA, 490 bp, unidentified
  misc_feature 1..490: note = Ascusbbf_268394, encodes 16S rRNA
  source 1..490: mol_type = genomic DNA
agagtttgatcctggctcaggataaacgctggcggcgcacataagacatgcaagtcgaacggaagtcgttataatcgaagctgaaatgaacagagaacttgttcgaaggaatttgacgtagactttataacaatggctttagtggcggactggtgagtaacgcgtgagcaacctgcctattagaggggaataacagtgagaaatcattgctaataccgcatatgccataggtaccacatggtactagtgggaaaggagtaatccgctaatagatgggctcgcgtctgattagatagttggtggggtaacggcctaccaagtcgacgatcagtagccggactgagaggttgaacggccacattgggactgagatacggcccagactcctacgggaggcagcagtcgggaatattgcgcaatggaggaaactctgacgcagtgacgccgcgtataggatgaaggtcttcggattgtaaactattgtcgttag

SEQ ID NO: 6880 - DNA, 490 bp, unidentified
  misc_feature 1..490: note = Ascusbbf_137775, encodes 16S rRNA
  source 1..490: mol_type = genomic DNA
agagtttgatcatggctcaggatgaacgctagctacaggcttaacacatgcaagtcgaggggcagcatgatctgtgcttgcacagtttgatggcgaccggcgcacgggtgagtaacgcgtatccaaccttccccgcagcagggaatagcccggcgaaagtcggattaatgccctatgttttcctttgagagcatttgatttggaacaaagatttttcgctacgggatggggatgcgtccgattagcttgacggcggggtaacggcccaccgtggcttcgatcggtaggggttctgagaggaaggtcccccacattggaactgagacacggtccaaactcctacgggaggcagcagtgaggaatattggtcaatggtctgacgactgaaccagccaagtagcgtgcgggatgactgccctatgggttgtaaaccgcttttgcaggggaataaagtcaggaacgtgttcctgtttgcatgtaccctgagaat

SEQ ID NO: 6881 - DNA, 490 bp, unidentified
  misc_feature 1..490: note = Ascusbbf_6081, encodes 16S rRNA
  source 1..490: mol_type = genomic DNA
agagtttgatcatggctcaggatgaacgctagcggcaggcttaacacatgcaagtcgaggggcagcgtggagtagcaatactctgacggcgaccggcgaaagggtgagtaacgcgtgagcaacatgcccgggactgggggatagtcgatggaaacgtcgcgtaataccccgtaacaacagagaccgcatgatctttgtttaagagatttatcgattccggattggctcgcgtcccattaggcagttggcggggtaacggcccaccaaaccgacgatgggtaggggttctgagaggaaggtcccccacattggaactgagacacggtccagactcctacgggaggcagcagtgaggaatattggacaatggccgagaggctgatccagccatgccgcgtgcgggaggacggccctatgggttgtaaaccgcttttgtcagggagcaataaggtctacgtgtagactgatgagagtacctggcgaataagca

SEQ ID NO: 6882 - DNA, 487 bp, unidentified
  misc_feature 1..487: note = Ascusbbf_52316, encodes 16S rRNA
  source 1..487: mol_type = genomic DNA
agagtttgatcctggctcagaacgaacgctggcggcaggcttaacacatgcaagttgaacgggatttggatgtagcttgctacattcaatgagagtagcgcactggtgagtaacacgtgggaacgtacattgtagtgggggacaacagttggaaacgactgctaataccgcataatccctgagggggaaagatttatcgctataatatcggcccgcggcagattaggtagttggtggggtaaaggcctaccaagcctacgatctatagctggtctgagaggacgatcagccacattggaactgagacacggtccagactcctacgggaggcagcagtgaggaatattgggcaatggagggaactctgacccagccatgccgcgtgagtgagaaggttttcgaattgtaaagctctttcgggtgtgaagatgatgacggtagcaccagaagaagccccggcaaacttcgtgccagcagccgcggtaat

SEQ ID NO: 6883 - DNA, 490 bp, unidentified
  misc_feature 1..490: note = Ascusbbf_7397, encodes 16S rRNA
  source 1..490: mol_type = genomic DNA
agagtttgatcctggctcaggacgaacgctggcggcgtgcctaacacatgcaagtcgaacgaagttttaaggagcttgctctttaaaacttagtggcggacgggtgagtaacgcgtgagcaacctgcctctcagagggggataacgttttgaaaagaacgctaataccgcataatatatcggaatcgcatgattctgatatcaaaggagcaatccgctgagagatgggctcgcgtccgattagttagttggtgaggtaacggctcaccaagactacgatcggtagccggactgagaggttgatcggccacattgggactgagacacggcccagactcctacgggaggcagcagtgggggatattgcgcaatgggggaaaccctgacgcagcaacgccgcgtgaaggaagaaggtcttcggattgtaaacttcttttgtcagggacgaagaaagtgacggtacctgacgaataagctccggctaactacgt

SEQ ID NO: 6884 - DNA, 490 bp, unidentified
  misc_feature 1..490: note = Ascusbbf_7131, encodes 16S rRNA
  source 1..490: mol_type = genomic DNA
agagtttgatcatggctcaggatgaacgctggcggcgtgcttaacacatgcaagtcgaacgaagcactggcgtctgatctttcgggtgaagaggcctttgactgagtggcggacgggtgagtaacgcgtggggaacctgccccataccgggggacaacagccggaaacggctgctaataccgcataagcgcacggaagcgcatgcttttgtgtgaaaaactccggtggtatgggatggccccgcgtctgattaggcagttggcggggcaacggcccaccaaaccgacgatcagtagccgacctgagagggtgaccggccacattgggactgagacacggcccaaactcctacgggaggcagcagtggggaatattgcacaatgggggaaaccctgatgcagcgacgccgcgtgagtgaagaagtatttcggtatgtaaagctctatcagcagggaagaaaatgacggtacctgcacaagaagccccggct

SEQ ID NO: 6885 - DNA, 490 bp, unidentified
  misc_feature 1..490: note = Ascusbbf_5523, encodes 16S rRNA
  source 1..490: mol_type = genomic DNA
agagtttgatcatggctcaggatgaacgctggcggcgtgcctaacacatgcaagtcgagcgagaagctcttttcggaagcttcggtagaagaagagagtggaaagcggcggacgggtgagtaacgcgtaggcaacctgccccttgcagagggatagcctcgggaaaccgggattaaaacctcataacgcatcgaggagacatcttcacgatgccaaagatttatcggcaagggatgggcctgcgtctgattagttagttggtggggtaacggcctaccaaggcagcgatcagtagccgacctgagagggtgatcggccacattggaactgagacacggtccaaactcctacgggaggcagcagtggggaatattgcacaatgggggaaaccctgatgcagcaacgccgcgtgaaggatgaaggcccttgggtcgtaaacttctgttctaagggaagataatgacggtaccttaggagcaagtcccggcta

SEQ ID NO: 6886 - DNA, 490 bp, unidentified
  misc_feature 1..490: note = Ascusbbf_81880, encodes 16S rRNA
  source 1..490: mol_type = genomic DNA
agagtttgatcctggctcagattgaacgctggcggcaggcctaacacatgcaagtcgagcggtagcacagagaagcttgcttcttgggtgacgagcggcggacgggtgagtaacgcgtgggaatctacctggtagtgggggacaacagtcggaaacgactgctaataccgcatacgcccttcgggggaaagtgggggatcttcggacctcacgctatcagatgagcccgcgtcggattagcttgttggtgaggtaaaggctcaccaaggcgatgatccgtagctggtctgagaggatgaccagccacactgggactgagacacggcccagactcctacgggaggcagcagtggggaatattggacaatgggggcaaccctgatccagccatgccgcgtgtgtgaagaaggccttcgggttgtaaagcactttcagctgtgaggaaaggcgagtggttaatacccgcttgctgtgacgttaacagcagaag

SEQ ID NO: 6887 - DNA, 490 bp, unidentified
  misc_feature 1..490: note = Ascusbbf_125906, encodes 16S rRNA
  source 1..490: mol_type = genomic DNA
agagtttgatcatggctcaggacgaacgctggcggcatgcttaacacatgcaagtcgaacggaacatcaacaattcagcgatgatgcggagatgtttagtggcgaacgggtgagtaacgcgtgagcaacctgccttgtacactgggataccagagggaaacttctgttaatacgggataagaccacagaaccgcatggttcaggggtcaaagcgatttagcggtacaagatgggctcgcgtcccattagctagttggcgggataacagcccaccaaggcgacgatgggtagccgacttgagagagtgatcggccacaatggaactgagacacggtccatactcctacgggaggcagcagtggggaatattgggcaatgggcgcaagccttacccagcaatgccgcgtgaatgatgaaggtcttcggattgtaaagttcttttattggtgacgaacgcaatgacggtagccaatgaataagccccggctaa

SEQ ID NO: 6888 - DNA, 490 bp, unidentified
  misc_feature 1..490: note = Ascusbbf_50117, encodes 16S rRNA
  source 1..490: mol_type = genomic DNA
agagtttgatcctggctcaggacgaacgctggcggcatgcctaacacatgcaagtcgaacgaagcttgagagcttgcttttaagcttagtggcggacgggtgagtaacgcgtgagcaacctgcctttcagtggggaataatactttgaaaagagtactaataccgcataacgtataatggtcgcatgactgatataccaaagatttatcgctgagagatgggctcgcgtccgattagccagttggtggggtaacggcctaccaaagcgacgatcggtagccggactgagaggttgaacggccacattgggactgagacacggcccagactcctacgggaggcagcagtgggggatattgcgcaatgggggaaaccctgacgcagcaatgccgcgtggaggattgaaggtcttcggattgtaaactccttttgtcagggacgaaaatgacggtacctgacgaataagctccggctaactacgtgccagcag

SEQ ID NO: 6889 - DNA, 490 bp, unidentified
  misc_feature 1..490: note = Ascusbbf_25838, encodes 16S rRNA
  source 1..490: mol_type = genomic DNA
agagtttgatcatggctcaggatgaacgctggcggcgtgcttaacacatgcaagtcgaacggacttgttccgctgtaagacgacgtgcttgcattgaatcttacttggaacaagttagtggcggacgggtgagtaacgcgtggggaacctgcctgtatctgggggataacagttagaaatgactgctaataccgcataagcgcacactgtcgcatgacagagtgtgaaaaactgaggtggatacagatggacccgcgttggattagccagttggtggggtaacggcctaccaaagcgacgatccatagccggcctgagagggcgaccggccacattgggactgagacacggcccaaactcctacgggaggcagcagtggggaatattgcacaatgggggaaaccctgatgcagcgacgccgcgtgagcgaagaagtatttcggtatgtaaagctctatcagcagggaagaaaatgacggtacctgactaa

SEQ ID NO: 6890 - DNA, 490 bp, unidentified
  misc_feature 1..490: note = Ascusbbf_101012, encodes 16S rRNA
  source 1..490: mol_type = genomic DNA
agagtttgatcatggctcaggatgaacgctagctacaggcttaacacatgcaagtcgaggggcatcgggagagtagcttgctactcttgccggcgaccggcgcacgggtgcgtaacgcgtatccaacctgccgtgtacttggggatagccctctgaaaggaggattaatacccgatgtggtcatttgaagacatcttcttatgattaaagatttatcggtacaccgatggggatgcgtacgattaggtagatggcggggtaacggcccaccatgccatcgatcgttaggggttctgagaggaaggtcccccacataggaactgagacacggtcctaactcctacgggaggcagcagtgaggaatattggtcaatgggcgagagcctgaaccagccaagtagcgtgaaggatgactgccctatgggttgtaaacttcttttatgggagaataaagtgcgccacgtgtggcgttttgtaggtatcccatgaa

SEQ ID NO: 6891 - DNA, 490 bp, unidentified
  misc_feature 1..490: note = Ascusbbf_5986, encodes 16S rRNA
  source 1..490: mol_type = genomic DNA
agagtttgatcctggctcaggacgaacgctggcggcatgcttaacacatgcaagtcgaacgggcatatttggttatagcgatataatcggatatgtttagtggcgaacgggtgagtaacgcgtgagcaacctgccttgtacaccgggataacagaccgaaagggctgctaataccggataagaccacgatgaggcatctcaacggggtcaaagtgatttagcggtacaagatgggctcgcgtcctattaggtagttggtgagataacagcccaccaagccgatgataggtagccgacttgagagagtgatcggccacaatggaactgagacacggtccatactcctacgggaggcagcagtggggaatattgggcaatgggcgaaagccttacccagcaatgccgcgtgaatgatgaaggtcttcggattgtaaaattcttttattggtgacgaacacaatgacggtagccgatgaataagccccggcta

SEQ ID NO: 6892 - DNA, 490 bp, unidentified
  misc_feature 1..490: note = Ascusbbf_4805, encodes 16S rRNA
  source 1..490: mol_type = genomic DNA
agagtttgatcatggctcaggacgaacgctggcggcgtgcctaacacatgcaagtcgagcgagaaactcataaacgagccttcgggcaagtgagtgagcggaaagcggcggacgggtgagtaacgcgtgagtaatctgccttaaggtgggggataacacagagaaatttgtgctaataccgcataacacataattatcgcatgatagatatgtcaaaactccggtgccttaagatgagctcgcgtccgattagttagttggcggggtaatggcccaccaagacaacgatcggtagccggactgagaggttgaacggccacattgggactgagacacggcccagactcctacgggaggcagcagtgggggatattgcgcaatgggggaaaccctgacgcagcaacgccgcgtgaaggaagaaggtcttcggattgtaaacttttgtcttttgggacgaagaagtgacggtaccaaaggaggaagccacggc

SEQ ID NO: 6893 - DNA, 490 bp, unidentified
  misc_feature 1..490: note = Ascusbbf_256313, encodes 16S rRNA
  source 1..490: mol_type = genomic DNA
agagtttgatcctggctcaggacgaacgctggcggcatgcttaacacatgcaagtcgaacgggcgcatttgggtatagcgatatacttggatgcgtttagtggcgaacgggtgagtaacgcgtgagcaacctgccgtatacactgggataacagaccgaaaggactgctaataccggataagaccacagtagggcatcctacaggggtcaaagtgatttagcggtatacgatgggctcgcgtcctattaggtagttggtgagataacagcccaccaagccgatgataggtagccgacttgagagagtgatcggccacaatggaactgagacacggtccatactcctacgggaggcagcagtggggaatattgggcaatgggcgaaagccttacccagcaatgccgcgtgaatgatgaaggtcttcggattgtaaatttcttttattggtgacgaacaaaatgacggtagccgatgaataagccccggcta

SEQ ID NO: 6894 - DNA, 490 bp, unidentified
  misc_feature 1..490: note = Ascusbbf_217247, encodes 16S rRNA
  source 1..490: mol_type = genomic DNA
agagtttgatcatggctcaggacgaacgctggcggcgtgcctaacacatgcaagtcgagcggagatatgaggaacaagggcttcggcccaagggaaacatattttagcggcggacgggtgagtaacgcgtgaacaatctgtccctgacagggggataacacttggaaacaggtgctaataccgcataagaccacgaggcggcatcgccttgaggtaaaaggagaaatccggtgaggggtgagttcgcgtccgattagccagttggtgaggtaacggcccaccaaagcgacgatcggtagccgacctgagagggtgatcggccacattggaactgagagacggtccaaactcctacgggaggcagcagtgggaatattgggcaatgggcgaaagcctgacccagcaacgccgcgtgagggaagaaggttttcggattgtaaacctctgtccttggtgacgaaggaagtgacggtagccaaggaggaagccc

SEQ ID NO: 6895 - DNA, 490 bp, unidentified
  misc_feature 1..490: note = Ascusbbf_7317, encodes 16S rRNA
  source 1..490: mol_type = genomic DNA
agagtttgatcatggctcaggatgaacgctggcggcgtgcctaacacatgcaagtcgagcggagatatatgtctaggagacttcggtcaaattaattatatcttagcggcggatgggtgaggaacgcgtggagaacctgcccttcacagggggataacagctggaaacggctgttaataccgcatatgctcacagcaccgcatggtgcagggaggaaagcctttacggtgaaggatggctccgcgtcggattagccagttggcggggtaacggcccaccaaagcgatgatccgtagccggcctgagagggcgaccggccacattgggactgagacacggcccaaactcctacgggaggcagcagtgggggatattgcacaatggggggaaccctgatgcagcgacgccgcgtgaaggaagacgtgcttcggcatgtaaacttctatcagcagggaagaagatgacggtacctgactaagaagccccggct

SEQ ID NO: 6896 - DNA, 490 bp, unidentified
  misc_feature 1..490: note = Ascusbbf_75691, encodes 16S rRNA
  source 1..490: mol_type = genomic DNA
agagtttgatcatggctcaggatgaacgctggcggcgtgcctaacacatgcaagtcgaacgagggtgcttgcaccctagtggcgaacgggtgagtaacacgtaggtaacctgcctttaagcttgggatacccagaggaaactttggctaataccggataacaatggaagaggcatctcttctatttaaaaggccctttcaagggtcacttagagatggacctgcggcgcattagctagttggtgagataacagcccaccaaggcaaggatgcgtagccgacctgagagggtgatcggccacattggaactgagacacggtccaaactcctacgggaggcagcagtgaggagttttcggcaatgggggaaaccctgaccgagcaacgccgcgtgaatgatgacggccctatgggttgtaaagttcttttattagggacgaatgactagcttaggaaatgcagctagtttgacggtaccttttgaataagcc

SEQ ID NO: 6897 - DNA, 490 bp, unidentified
  misc_feature 1..490: note = Ascusbbf_19751, encodes 16S rRNA
  source 1..490: mol_type = genomic DNA
agagtttgatcatggctcaggacgaacgctggcggcgtgcttaacacatgcaagtcgaacgaagatacgggagagcttgctcgaaggtatctgagtggcggacgggtgagtaacgcgtgaacaatctgtctcatacagggggataacgcgtcgaaagacgtgctaataccgcgtaggaccacggagtcgcatggctctggggtgaaaggagcaatccggtatgaggtgagttcgcgtctgattagatagttggtgaggtaacggcccaccaagtcaacgatcagtagccgacctgagagggtgatcggccacattgggactgagacacggcccagactcctacgggaggcagcagtggggaatattgggcaatgggcgaaagcctgacccagcaacgccgcgtgagggaagaaagttttcggattgtaaacctctgtcctacatgaagagttagagacggtagtgtaggaggaagccccggctaactacg

SEQ ID NO: 6898 - DNA, 490 bp, unidentified
  misc_feature 1..490: note = Ascusbbf_50932, encodes 16S rRNA
  source 1..490: mol_type = genomic DNA
agagtttgatcctggctcaggataaacgctggcggcgcacataagacatgcaagtcgaacgaacttaacctttagtttactttaggagcggttagtggcggactggtgagtaacgcgtaagcaatctgcctataagagggggataacagtgagaaatcactgctaataccgcataagctgtgaatatcgcatgatataagcagaaaaggagcaatccacttatagatgagcttgcgtctgattagctagttggtgaggtaacggcccaccaaggcgatgatcagtagccggactgagaggttgaacggccacattgggactgagatacggcccagactcctacgggaggcagcagtcgggaatattgcgcaatggaggaaactctgacgcagtgacgccgcgtgcaggaagaaggttttcggattgtaaactgctttagatagggaagaaacaaatgacggtacctatagaataagctccggctaactac

SEQ ID NO: 6899 - DNA, 490 bp, unidentified
  misc_feature 1..490: note = Ascusbbf_1542621, encodes 16S rRNA
  source 1..490: mol_type = genomic DNA
agagtttgatcctggctcaggacgaacgctggcggcgtgcctaatacatgcaagtcgtacgaattgattaaggagcttgctccttatgacgttagtggcgaacgggtgagtaacacgtgggtaacctaccttcaagagggggataacatccggaaacgggtgctaataccgcatagtttcagcttccacatggaagccgaaggaaagacggcctttgtgctgtcacttggagatggacccgcggcgcattagttagttggtagggtaacggcctaccaagacgatgatgcgtagccgacgtgagagggtgatcggccacattgggactgagacacggcccaaactcctacgggaggcagcagtagggaatcttccgcaatggacgaaagtctgacggagcaacgccgcgtgagtgaagaaggttttcggatcgtaaaactctgttgttggagaagaacaagtaggagagtaactgctcttaccttgacgg

SEQ ID NO: 6900 - DNA, 490 bp, unidentified
  misc_feature 1..490: note = Ascusbbf_100121, encodes 16S rRNA
  source 1..490: mol_type = genomic DNA
agagtttgatcctggctcagaatgaacgctggcggcatggattaggcatgcaagtcgaacgggtcccttcggggactagtggcgcaagggtgagtaacacgtgagcaacctgcccccgaatccggaataatccagggaaacttggtctaaaaccggatgtcggcgtttacccgcatgggtttccgccgaaatattcatagttcggggatgggctcgcgtcccattagctggttggcggggtaacggcccaccaaggctacgacgggtaggtggtctgagaggatggtcacccacactgggactgagacactgcccagactcctacgggaggctgcagtcgagaatcttccgcaatgggcgcaagcctgacggagcgatgccgcgtgagggaagaaggccttcgggttgtaaacctctgtcacccgggacgaaatcaatgacggtaccgggaaaggaagccacggctaaccacgtgccagcagccgcggta

SEQ ID NO: 6901 - DNA, 490 bp, unidentified
  misc_feature 1..490: note = Ascusbbf_173640, encodes 16S rRNA
  source 1..490: mol_type = genomic DNA
agagtttgatcatggctcagaacgaacgccggcggcgcgtcttaagcatgcaagtcgagcgggattgaggggcttgcccctcatgagagcggcggactggtgagtaacgcgtgggcgacgtaccccctgcaccgggacagccggcagaaatgccgggtgatacgggatgaggtcgcagcctgtggtgggctgcgaggaaagcggctacggccgcggcaggggaacggcccgcgtcccatcagctagtcggcggggtaaaggcccaccgaggcaacgacgggtacccggactgagaggttggacgggcacattgggactgagatacggcccagactcctacgggaggcagcagctaagaatattccgcaatgggcgaaagcctgacggagcgacgccgcgtggacgatggaggccggaaggttgtaaagtcctctggcgggggaagaagaagtccgggagggaatgcccggacggtgaccgtaccccgaga

SEQ ID NO: 6902 - DNA, 490 bp, unidentified
  misc_feature 1..490: note = Ascusbbf_351383, encodes 16S rRNA
  source 1..490: mol_type = genomic DNA
agagtttgatcatggctcaggacgaacgctggcggcgtgcttcatacatgcaagtcgaacgataaggtctcttcggagacacataagtggcggacgggtgagtaatgtgtagagaatctgccttagagtgggggacaacagttggaaacgactgctaataccgcatatgcgcgtacctgtgatggtattcgtgaaaactccggtgctctaagatgagtctgcatctgattagctagctgggggtgtaatggaccaccaaggcgacgatcagtagctggtttgagaggataatcagccacaatgggactgagacacggcccatactcctacgggaggcagcagtagggaattttgcgcaatgggggaaaccctgacgcagcaacgccgcgtgattgaataagctcttcggggtgtaaagatctgtcagtagggacgaaacttgacggtacctacagaggaagcatcggctaactccgtgccagcagccgcg

SEQ ID NO: 6903 - DNA, 490 bp, unidentified
  misc_feature 1..490: note = Ascusbbf_10073, encodes 16S rRNA
  source 1..490: mol_type = genomic DNA
agagtttgatcatggctcaggacgaacgctggcggcatgcctaacacatgcaagtcgaacggagttaaatcgagcttgcttgatttaacttagtggcggacgggtgagtaacgcgtgagcaacctgcctttcagtggggaataatgttctgaaaagagcactaataccgcataatgtataagtatcgcatggtacatataccaaagatttatcgctgagagatgggctcgcgtccgattagccggttggtggggtaacggcctaccaaagctacgatcggtagccggactgagaggttgaacggccacattgggactgagacacggcccagactcctacgggaggcagcagtgggggatattgcgcaatggggggaaccctgacgcagcaatgccgcgtgaaggaagaaggtcttcggattgtaaacttcttttgtcagggacgaacaatgacggtacctgacgaataagctccggctaactacgtgcca

SEQ ID NO: 6904 - DNA, 490 bp, unidentified
  misc_feature 1..490: note = Ascusbbf_65859, encodes 16S rRNA
  source 1..490: mol_type = genomic DNA
agagtttgatcctggctcaggatgaacgctagctacaggcttaacacatgcaagtcgaggggcagcatgtatctggcttgccagatatgatggcgaccggcgcacgggtgcgtaacgcgtgttcgacctaccctttactcgggaacagcccatcgaaagatggattaatgcccgatgttctccctatatcgcatggtattcggagcaaagatttatcggtagaggatgggaacgcgtccgattagctggacggcggggtaacggcccaccgtggcgacgatcggtaggggttctgagaggaaggtcccccacactggaactgagacacggtccagactcctacgggaggcagcagtgaggaatattggtcaatggccgagaggctgaaccagccaagtagcgtgaaggatgactgccctatgggttgtaaacttcttttgtacgggaataacctggcccacgtgtgggctactgcatgtaccgtacgaat

SEQ ID NO: 6905 - DNA, 490 bp, unidentified
  misc_feature 1..490: note = Ascusbbf_9679, encodes 16S rRNA
  source 1..490: mol_type = genomic DNA
agagtttgatcatggctcaggatgaacgctggcggtatgcctaacacatgcaagtcgaacggatgaaatgaaagcttgcttttattttgttagtggcggacgggtgagtaacgcgtgagtaatctgccttgaaatgggggataacacttggaaacaggtgctaataccgcgtagtatattagtttcgcatgaagcttttattatagtttttcgtttcaagatgagctcgcgtccgattagtttgttggcgaggtaaatgctcaccaagactgcgatcggtagccgggttgagagactgaacggccacattggaactgagacacggtccagactcctacgggaggcagcagtggggaatattgcacaatgggggaaaccttgatgcagcaataccgcgtgagggatgaaggctttcgggttgtaaacctctgtctgaagggatgaatttcgacggtaccttcgaaggaagctccggctaactacgtgccag

SEQ ID NO: 6906 - DNA, 490 bp, unidentified
  misc_feature 1..490: note = Ascusbbf_24043, encodes 16S rRNA
  source 1..490: mol_type = genomic DNA
agagtttgatcatggctcaggatgaacgctagcggcaggcctaatacatgcaagtcgaacggtaaacgccccttcgggggtgtgagagtggcgcacgggtgcgtaacgcgtatgcaacccacccgctgtcgggggatagcccgtagaaatgcgaattaataccccatgaggaggagatgaggcatctcatttttttcaaaacttcggtgacggcggacgggcatgcgtgccattagatggttggcggggtaacggcccaccaagtcgacgatggctaggggatctgagaggacggtcccccacactggtactgagacacggaccagactcctacgggaggcagcagtaagggatattggtcaatggggggaaccctgaaccagccatgccgcgtgagggaataaggccctacgggtcgtaaacctcttttgccgggggataaggatagtcacgtgtgactgtttgaaggtacccggagaataagcatcgg

SEQ ID NO: 6907 - DNA, 490 bp, unidentified
  misc_feature 1..490: note = Ascusbbf_97019, encodes 16S rRNA
  source 1..490: mol_type = genomic DNA
agagtttgatcctggctcagaacgaacgctggtggcgtgtcttatacatgcaagtcgagcggtgcagcaatgcatagcggcgaacgggtgagtaacgcgtaagcaatctgccccacactcgggaatagccgtgccaacgcgcgggtaataccggatatcgtggctccccacctggggggttgacaaaagatttatcggtgtgggatgagcttgcgtccgattagctagttggcggggcaacggcccaccaaggcgacgatcggtagccggcctgagagggtgatcggccacattgggactgagatacggcccagactcctacgggaggcagcagtagggaatattgcacaatgggggaaaccctgatgcagcaacgccacgtgtgggaagaagcatttcggtgtgtaaaccactgtcgtgagggaataaggcttgtccacgggcaagttgaatgtacctcgagaggaagcaccggcaaacttcgtgccag

SEQ ID NO: 6908 - DNA, 490 bp, unidentified
  misc_feature 1..490: note = Ascusbbf_68350, encodes 16S rRNA
  source 1..490: mol_type = genomic DNA
agagtttgatcatggctcaggatgaacgctagcggcaggcttaacacatgcaagtcgaggggcagcgagggtagcaatacctgtcggcgaccggcggaagggtgcgtaacgcgtgagcaacttgcccgtatcagggggatagtcgatggaaacgtcgcgtaataccccataacaactgtggtcgcatggtcacagtttgaaagattcgtcggatacggataggctcgcgagacattagctagttggcggggtaacggcccaccaaggcgacgatgtctaggggttctgagaggaaggtcccccacattggaactgagacacggtccaaactcctacgggaggcagcagtgaggaatattggtcaatggccggaaggctgaaccagccatgccgcgtgcaggaagacggccctatgggttgtaaactgcttttgtggtggagcaataaggcgtacgagtacgccgatgagagtacatcacgaataagcatc

SEQ ID NO: 6909 - DNA, 490 bp, unidentified
  misc_feature 1..490: note = Ascusbbf_46334, encodes 16S rRNA
  source 1..490: mol_type = genomic DNA
agagtttgatcctggctcaggatgaacgctagcggcaggcctaacacatgcaagtcgaggggtatagtaagcttgcttactagagaccggcgcacgggtgcgtaacgcgtatgcaatctaccttttactaaggaatagcccggagaaatccggattaatgccttatagtatattgagatggcctcattttaatattaaagatttatcggtaaaagatgagcatgcgtcccattagttagttggtgtggtaacggcataccaagacgatgatgggtaggggtcctgagagggagatcccccacactggtactgagacacggaccagactcctacgggaggcagcagtgaggaatattggtcaatggaggcaactctgaaccagccatgccgcgtgcaggacgacggtcctatggattgtaaactgcttttgtacgggaagaaaaagagttacgtgtaatttattgacggtaccgtaagaataaggatcggc

SEQ ID NO: 6910 - DNA, 490 bp, unidentified
  misc_feature 1..490: note = Ascusbbf_58102, encodes 16S rRNA
  source 1..490: mol_type = genomic DNA
agagtttgatcatggctcaggacgaacgctggcggcgtgcctaacacatgcaagtcgaacgagaaattgatattggacttttcggaggaagatattaatggacagtggcggacgggcgagtaacgcgtgagtaacctgcccataagaaagggatagccgatggaaacgtcgagtaataccatataacacagataactcgcatgagatatctgtcaaagatttatcgcttatggatggactcgcgtcagattagatagttggagaggtaacggctcaccaagtcgacgatctgtagccgaactgagaggttgaacggccgcattgggactgagacacggcccagactcctacgggaggcagcagtgggggatattgcgcaatggggggaaccctgacgcagcaacgccgcgtgcaggaagaaggtcttcggattgtaaactgttgtcgcaggggaagaaaagaatgacggtaccctgtgagaaagtcacgg

SEQ ID NO: 6911 - DNA, 490 bp, unidentified
  misc_feature 1..490: note = Ascusbbf_138326, encodes 16S rRNA
  source 1..490: mol_type = genomic DNA
agagtttgatcctggctcaggatgaacgctggcggcgtgcctaatacatgcaagtcgaacggagatgccttttcagaagccttcgggcggacgagttggtattcttagtggcggacgggtgagtaacacgtgagcaacctgcctttcagagggggataacggctggaaacggtcgctaataccgcatgatataccgaagtggcatcgctttggtatcaaaggagcaatccgctgaaagatgggctcgcgtctgattagatagttggtggggtaacggcctaccaagtcgacgatcagtagccggactgagaggttgaacggccacattgggactgagatacggcccagactcctacgggaggcagcagtagggaatattgcacaatgggggaaaccctgatgcagcaacgccgcgtgaaggacgacggtcttcggattgtaaacttcttttctttgtgaagaattctgacggtagcaaaggaataagcat

SEQ ID NO: 6912 - DNA, 490 bp, unidentified
  misc_feature 1..490: note = Ascusbbf_317115, encodes 16S rRNA
  source 1..490: mol_type = genomic DNA
agagtttgatcctggctcaggatgaacgctggcggcgtgcctaatacatgcaagtcgaacgaggttccttcggggacctagtggcgaacgggtgagtaacacataaacaatctgccctggagactgggataacgtcgggaaaccgacgctaataccggataggcagtaagggggcatccccatactgttaaagctgggttgcagcgctgcaggatgagtttatgtcgcattagttagttggtgaggtaacggcccaccaagacgatgatgcgtagccggtctgagaggatgaacggccacattgggactgagacacggcccagactcctacgggaggcagcagtagggaattttcggcaatggggggaaccctgaccgagcaacgccgcgtgaacgaagaaggtttttggatcgcagagttctgttgtaggggaagaaagctatggatagggaatgatctgtagttgacggtaccctgccagaaagccac

SEQ ID NO: 6913 - DNA, 490 bp, unidentified
  misc_feature 1..490: note = Ascusbbf_271233, encodes 16S rRNA
  source 1..490: mol_type = genomic DNA
agagtttgatcatggctcaggacgaacgctggcggcgtgcttaaaacatgcaagtcgaacggagtgtgtttcttgcacaaagcgatgtgttgaacattgttttgtgcagggaatagacttagtggcggacgggtgagtaacacatgagcaacctgcctttcacagggggataacagatagaaatatctgctaataccgcataagaccacgcttgggcatccaagaggggtcaaaggagcgatccggtggaagaggggcttgtggctcattagctagttggcggggtagaggcccaccaaggcgacgatgagtagccgatctgagaggatgaacggccacattggaactgagatacggtccagactcctacgggaggcagcagttaggaatattgggcaatggaggaaactctgacccagcaacgccgcgtgaaggaagaaggttttcggattgtaaacttctgatctaagggaaaaagaaagtgatggta

SEQ ID NO: 6914 - DNA, 490 bp, unidentified
  misc_feature 1..490: note = Ascusbbf_1836296, encodes 16S rRNA
  source 1..490: mol_type = genomic DNA
agagtttgatcctggctcaggacgaacgctggcggcgtgcctaatacatgcaagtcgagcggaacctttggagcttgctccattggtttagcggcggacgggtgagtaacacgtgggcaacctgccctgcagatcgggataactccgggaaaccggtgctaataccgaatagtttgcggcctctcctgaggctgcacggaaagacggtttcggctgtcactgcaggatgggcccgcggcgcattagctagttggtggggtaatggcccaccaaggcgacgatgcgtagccgacctgagagggtgatcggccacactgggactgagacacggcccagactcctacgggaggcagcagtagggaatcttccgcaatggacgcaagtctgacggagcaacgccgcgtgagtgacgaaggttttcggatcgtaaaactctgttgtgagggaagaacacgtaccaggtaactactggtaccttgacggtacctca

SEQ ID NO: 6915 - DNA, 490 bp, unidentified
  misc_feature 1..490: note = Ascusbbf_116196, encodes 16S rRNA
  source 1..490: mol_type = genomic DNA
agagtttgatcatggctcaggattaacgctggcggcatgcctaatacatgcaagtcgaacgagaatagcaatattctagtggcgaacgggtgagtaacacgtaggcaatctacccatgtgacgaggataactattggaaacgatagctaaaactggatagtatatcaagaggcatcttttgatatttaaaggtcctgaaagggaacgcgcatggatgagcctgcggtgcattagctagttggtgaggtaacggcccaccaaggcgacgatgcatagctgtgctgagaggcaaaacagccacattgggactgagacacggcccagactcctacgggaggcagcagtagggaattttcggcaatgggggaaaccctgaccgagcaatgccgcgtgaatgaagaagttcttcggaatgtaaaattctgttattcgtgaaagaaaggtattaagaggaaatgcttagtacttgacggtaccgaatgagaaagcc

SEQ ID NO: 6916 - DNA, 490 bp, unidentified
  misc_feature 1..490: note = Ascusbbf_138423, encodes 16S rRNA
  source 1..490: mol_type = genomic DNA
agagtttgatcctggctcaggataaacgctagcggcaggcctaacacatgcaagtcgagcggtaacaggagtagcaatacttgctgacgagcggcagacgggtgagtaacgcgtatgcaacctaccccagacccggggacagccttccgaaaggaggattgatacccgatggttcaatacggacggcatcgtcacattgataaagattcatcagtttgggatgggcatgcgtggcattagttagttggcggggtaacggcccaccaagacgatgatgcctaggggttctaaaaggaaggtcccccacatcggtactgagacacggaccgaactcctacgggaggcagcagtgaggaatattggacaatggaggcaactctgatccagccaaaccgcgtgaaggatgaaggccctagtggtcgtaaacttcttttgcgaggggataattgccggtatgtatactggcttgcaggtaccttgcgaataagca

SEQ ID NO: 6917 - DNA, 490 bp, unidentified
  misc_feature 1..490: note = Ascusbbf_128478, encodes 16S rRNA
  source 1..490: mol_type = genomic DNA
agagtttgatcatggctcaggattaacgctggcggcgtgcataacacattcaagtcgaacgggcaaaggggcttgcttctttgccagtggcggacgggtgagtaacgcgtgagcaacctgcccttgtgtgggggataacgacgggaaactgtcgctaataccgcatgacccgatagcatcgcatggtgcagtcggcaaagatttattgcacaaggatgggctcgcgtccgattaggcagttggtggggtaacggcctaccaaacctacgatcggtagccggactgagaggttgaacggccacattggaactgagatacggtccagactcctacgggaggcagcagtggggaatattgggcaatgggcgaaagcctgacccagcgacgccgcgtgagggaagaaggtcttcggattgtaaaccttgaacaacagggacgaacaaatgacggtacctgttaggaagccacggctaactacgtgccagcagcc

SEQ ID NO: 6918 - DNA, 490 bp, unidentified
  misc_feature 1..490: note = Ascusbbf_301649, encodes 16S rRNA
  source 1..490: mol_type = genomic DNA
agagtttgatcatggctcaggacgaacgctggcggcgtgcctaacacatgcaagtcgaacggagcgcaggttttgatcttttcggagtgacgaatctgttgcttagtggcggacgggtgagtaacgcgtgaggaacctgcctttcagagggggacaacagttggaaacgactgctaataccgcataatgcagcgagatcgcatgatattgctgccaaagatttcatcgctgaaagatggcctcgcgtctgattagatagttggtgaggtaacggcccaccaagtctgcgatcagtagccggactgagaggttgaacggccacattgggactgagacacggcccagactcctacgggaggcagcagtggggaatattgcgcaatggggggaaccctgacgcagcaacgccgcgtgaaggaagaaggtcttcggattgtaaacttttgtcttcagggaagataatgacggtacctgaggaggaagctccggc

SEQ ID NO: 6919 - DNA, 490 bp, unidentified
  misc_feature 1..490: note = Ascusbbf_1837407, encodes 16S rRNA
  source 1..490: mol_type = genomic DNA
agagtttgatcctggctcagattgaacgctggcggcatgctttacacatgcaagtcggacggcagcgcgggcttcggcctggcggcgagtggcgaacgggtgagtaatacatcggaacgtacctggtaatgggggatagctcggcgaaagccggattaataccgcatacgacctacgggagaaagcgggggaccttcgggcctcgcgttatcagagcggccgatggcagattagctggttggtgaggtaaaggcttaccaaggcgacgatctgtagctggtctgagaggacgaccagccacactgggactgagacacggcccagactcctacgggaggcagcagtggggaattttggacaatgggcgcaagcctgatccagcaatgccgcgtgtgtgatgaaggccttcgggttgtaaagcacttttggcaggaacgaaaaggtctgtgctaataccacgggccgatgacggtacctgcagaataagcac

SEQ ID NO: 6920 - DNA, 490 bp, unidentified
  misc_feature 1..490: note = Ascusbbf_1547594, encodes 16S rRNA
  source 1..490: mol_type = genomic DNA
agagtttgatcctggctcaggacgaacgctggcggcgtgcctaacacatgcaagtcgagcggggactatagaacggaaggcttcggccggaaggtttatagttctagcggcggacgggtgagtaacgcgtgagcaatctgtctcagacaggggggtaacgcagcgaaagctgcactaataccgcatgagaccacagaaccgcatggttgaggggtcaaaggagcaatccggtctgaggtgagctcgcgtcctattaggtagttggtggggtaacggcccaccaagcctgcggtaggtagccgacctgagagggtgatcggccacactggaactgagacacggtccagactcctacgggaggcagcagtggggaatattgggcaatgggcgaaagcctgacccagcaacgccgcgtgagtgaagaaggtcttcggattgtaaatctctgtcctaagagaagaggggaagacggtatcttaggaggaagccc

SEQ ID NO: 6921 - DNA, 490 bp, unidentified
  misc_feature 1..490: note = Ascusbbf_452686, encodes 16S rRNA
  source 1..490: mol_type = genomic DNA
agagtttgatcatggctcagattgaacgctggcggcaggcttaacacatgcaagtcgaacggtagcacagggagcttgctcctgggtgacgagtggcggacgggtgagtaatgcttgggaatctggcttatggagggggataactactggaaacggtagctaataccgcgtaatctctttggagtaaagggtgggaccgtttggccacctgccataagatgagcccaagtgggattaggtagttggtgaggtaatggctcaccaagcctgcgatctctagctggtctgagaggatgaccagccacactggaactgagacacggtccagactcctacgggaggcagcagtggggaatattgcacaatggggggaaccctgatgcagccatgccgcgtgaatgaagaaggccttcgggttgtaaagttctttcggtgatgaggaaggagtgaagtttaatagacttcattattgacgttagtcacagaagaa

SEQ ID NO: 6922 - DNA, 472 bp, unidentified
  misc_feature 1..472: note = Ascusbbf_380310, encodes 16S rRNA
  source 1..472: mol_type = genomic DNA
agagtttgatcctggctcagagcgaacgctggcggcaggcctaacacatgcaagtcgagcgggcgtagcaatacgtcagcggcagacgggagagtaacacgtgggaacgtgccctttggttcggaataactcagggaaacttgagctaataccggataagcccttacggggaaagatttattgccattggagcggcccgcgtcggattagctagttggtgaggtaatggctcaccaaggcgacgatccgtagctggtctgagaggatgaccagcctcactgggactgagacacggcccagactcctacgggaggcagcagtggggaatattggacaatgggcgcaagcctgatccagccatgccgcgtggatgatgaaggccctagggttgtaaagtccttttaacggggaagataatgacggtacccgtagaataagccccggctaacttcgtgccagcagccgcggtaat

SEQ ID NO: 6923 - DNA, 490 bp, unidentified
  misc_feature 1..490: note = Ascusbbf_1739344, encodes 16S rRNA
  source 1..490: mol_type = genomic DNA
agagtttgatcatggctcaggacgaacgctggcggcgtgcctaatacatgcaagtcgagcggaaattttattggtgcttgcacctttaaaattttagcggcggacgggtgagtaacacgtgggtaacctaccttatagattgggataactccgggaaaccggggctaataccgaataatactttttaacacatgtttgaaagttgaaagacggtttcggctgtcactataagatggacccgcggcgcattagctagttggtgaggtaacggctcaccaaggcaacgatgcgtagccgacctgagagggtgatcggccacactgggactgagacacggcccagactcctacgggaggcagcagtagggaatcttccacaatggacgaaagtctgatggagcaacgccgcgtgagtgaagaaggatttcggttcgtaaaactctgttgcaagggaagaacaagtagcgtagtaactggcgctaccttgacgg

SEQ ID NO: 6924 - DNA, 490 bp, unidentified
  misc_feature 1..490: note = Ascusbbf_1529482, encodes 16S rRNA
  source 1..490: mol_type = genomic DNA
agagtttgatcatggctcaggacgaacgctggcggcgcgcctaacacatgcaagtcgaacgggactagtgaccggagagcagaagttttctactctgcgttcactagttcagtggcggacgggtgagtaaagcatgagcaacctggctattagagggggatagcttttggaaacagaagataataccgcatgaatcagagatttcgcatgaagtttttggaaaaggagcaatccgctaatagatgggctcatgtccgattagcttgttggtggggtaatggctcaccaaggcaacgatcggtagccgtactgagaggttcaacggtcacattgggactgagacacggcccagactcctacgggaggcagcagtgaggaatattgcgcaatggaggaaactctgacgcagcgacgccgcgtgaaggaagacggtcttcggattgtaaacttctgtcttcagggaagaaacaaatgacggtacctggggagg

(The sequence listing continues in the following parts.)
